United States Patent Application Publication US 2011/0183924 A1 - sequence listing, part 196

SEQ ID NO: 464055 - DNA, 6551 bp, Homo sapiens
gttaccgccacgatgacagctctttacgccttccactccgtgctgggttcaaaggaaatcctcttcgcgcatctttctcgtgttctggccctgcggtactcttggagcagttgtaagttcacaacaaaactgagtggaaggtatagagatttcccatgtatcgcctacccctacagagccaaaatctctcatcagagtggccatgtgggccatgaggtccacgaccttgttgctgtagccaaattcatcgctataccaagaaatgatcttgacaaagtggttgttgagggcaatgccagccctaacattgaaggtggaagagtgcgtgttgctgttgaagttggaggagacagcctggtgctcagtgtagcccaggatgcccttgagggggccctccgatgtctgcttcaccaccttcttgatgtcatcatatttggcaggtttttccagatggcaggtcaggttaatgaccgacaccttggcagtggtgacacagaaggccatgccacaaatgaagcttggaaagattttcatggttctcttcttcgattttatgaaaatggagaactctgtgatgtcacactcaaggttgaactggtggctagagcttgttgtgaatacatgaagttacattttcatccctccaattgcctggcagtaagagcctttgcagaaagtcacaatcgaatagacttaatggacatggcggatcagtatgcctgtgaccattttactgaagtagtggagtgtgaagactttgtaagtgtatcaccgcagcacctccataagcttttgtcctccagtgatctaaatattgaaaatgaaaagcaggtctataatgctgccatcaagtggcttcttgccaatcctcagcatcattccaaatggttggatgaaacacttgcacaggttcgcctgccattgttgccggttgattttcttatgggtgttgtggcaaaagaacagattgtcaagcaaaatctaaaatgtagagatttactggatgaagcaagaaattaccaccttcacttgagtagcagagcagtacctgactttgaatactccattcggactaccccaaggaagcatactgctggtgtgctgttttgtgtaggtggtcgaggtggatctggtgacccctttcgcagtattgaatgctattctatcaacaaaaacagttggttctttggaccagaaatgaatagtcgaaggcgacatgtgggtgtaatctctgtggaaggtaaagtgtatgcagtaggtggacatgatggaaatgaacatttagggagtatggagatgtttgatcctctcactaataaatggatgatgaaggcatcaatgaacacaaagaggcgaggaattgccttggcttccttaggaggcccaatttatgcaattggagggttagatgacaatacttgcttcaatgatgtggagagatatgacatagaatctgatcagtggagtacagtggcaccaatgaatactccccgtggaggagttggctctgttgctctagtaaaccatgtttatgcagtaggtggcaatgatggaatggcttctttatctagcgtggagagatatgatccacatctggataagtggatagaagttaaagaaatgggtcagcgaagagcaggcaatggagttagcaagcttcatggttgcttatacgtagttggtggttttgatgataattctcctctgagttcagttgagcggtatgacccccgaagcaacaagtgggattatgtggcagcacttactactcccagaggtggagtgggaatcgcaacagtgatgggcaaaatctttgcagttggtggtcataatggcaatgcatacttaaatacagtagaagcgtttgatccagtgctgaataggtgggagcttgttggatctgtgtctcactgcagagctggagcaggagtagctgtgtgttcctgtttaactagccaaattcgagatgtaggtcatggatccaataatgtggttgactgtatgtgatttgagttctggccaccaacaatttagtcatatctgataggtacaaaagaaaaccaagattttgatatgaccacctttcaacactttttactgcaactagagtcttatttaaatgttaactgttgtattgtgactaagtacaacttttggaatgatacctgaagaattattagtaatagagttaaatttgatacttcctgcttttgcaaataatggagtagggaagaagatagtcgaacttaaaatcatacctaccctgaaaaatgcttaaagtagtgccaaaaatcttgaaatctctctctctctctctatttggatgaatcaaaatgtaatttgttgagttttgccttttcttttgcctaaagatgttaacgtcaggcagtgggtttttcctagaggagagattagtacctattcattaacacaaggatacataagagacttgccccttttgaagatcatttctacttggtgctgatgaatttatgcctagctttttttttctaggtggtgatttttcaatttcttttatatttacggaagtagaaaaaatgttctgtctttttgaatgccacttagctgcattttcagaagcttataggctataagaagcctttaatttcagtttgaattgctaggacaccaaaagacctagctgggctaactccatccaaatgattttacagttttattttttcatcttttgcaaaaagtatttgttacataatcaaaaggtgaaccagaggaaatattgaacaaggttttagatctgatgttattctggtgcccaattgagagaccttgagaaagaatgatgcagattacatgactctaatgtgggcagtctgaaaatatctttaactgtcttctttgatcatttgattttggatccaagatttatcatctctctattttgctatttgccaccatcctggtttttctgactgtacagaatcaatctgcatttatttattatcagaaatgaatgcatttttacaaaaacctttttgtagactgtagtttattgattagttcaagcccatcacgaactaattaaacatattgttggtaaaaacagagattgaaattactgtttttatcatatttaaatccctctggtgtatttattgaaatttaattaaaaatatttctacatattgatttgaagccaggatattgatggacctacagatttaacagctcttcaaagttttaactagcattataaaatggcctattcattatatgtatatttttttataaatatttatcaagaacatgaaaatattttattttgtatttgcagtgcagtttggcacctctcttccaggccttcctaagtttttgttagttgtgtcttcgaatttattgtagttcaccgctggtcagtaatctggttcataaggaagctggggcagtgaaaaacacttcgttgatccatccagccctaaagttcattgactaatagctcatgcatcttattaaatgggattctggacttctacaatagtgtggaaagccacatcacaaaaaaagccacatcacaaaaaaaagccagtgcctattgagtatatcaaaccaaaaaagaaaaaaaaaagttttaagaggggtcaggctggcagataaaagtctcttatgaagcagatataaatccagtaagctatttttttctacctatgggcaagttcataagtcattgctggatctgaaccagtgttcttttgtgtaagtacaaccatatttcagtcagtccagaggcagttaaccctgtagcacttactagactggtgacaactggctggatgtggagaataagtgtcaaaacctggcttcaatgtctatttcttatgtctaatggagttcttatattacagtgtttgtttagctatggttactaatatgtttgttatatttattttcggggagaggatcttgttattgtttcctgagattatttaaaatgttttttctttgatgtatttctgtctttcttatatgtaaggagttataagggttattatattttcatttctggtttttactatacaatggttatctaacatactaagttggtaccctacctacccgtaaaatatgaaatactcagaagtaaagtgtgtgggcaatcagaagcatagccttgaaggacctgacagcagtatgaaaagataaataggccaggcatggtggctcacgcctgtgatcccagcactttgggaggccgaggtgggtggaccacctgagatcaggtgttcaagaccagcctgaccaacatggtgaaaccctgtctctactaaaagtacaaaaattagccaggcgtggtggcgcatacctgtaattccagctactcaggaggctgaggcaggagaattgcttgaacccaggaggtggaggttgcaatgagccgaggttgagccatcgcactccagcggtgaaacaagagtgaaactccatctcaaaaaaaaaaaaaaaaaaaagataaaaaagcagaatcaatatgtgcacagttctctttatcaggcaaaaacacgtttattgagacatgaaatgagaatcaggctgaaggaatcatgcagctgaaagatgattatattcatagaaatgaagagatgaaatattcaaagaagatggctactttattgtgagacttaccactttaacctcatatgttaacagcacctaccaaaaaatgatatgagatagagctaaaatactgaaattgcaaatggacaaaataaatcatgaaaatttgtttattatttcttcaataaatatttctaggtgctttgtgattctttcatttagtcattaaagccattgctttactatattgcgttgccactttaaaaacaagttacttgacattgtttttgacagatttcactatattcttatgtaattaattgattatttctaaaatgtttgaataaactttgtactccctctaaggagtattttattcattcttttaattcccaaatgaactttgaacttacagtgctgttgaatgccttggtaaggacttcttgaaattgcataaactattcttgtaaatggtaaacttgagaattttctttgtttcttttttctctatgtcttaaagaatgcctttagaatctaattcatgttgtatcagttaagaatgtttctgtggtttctcgtatcagatgtgtaaagaaattattactgggatgccattggctatgtctctttccccttcatgtaaaattccaagtgtcagtaaaacttctctataatattttcttaaaaccatttataaatttgtgttataatactccagaaaatcaatgtaataagtggtcatatatatcaccaactatggatatcaaaaagttggggtcacatcagtgctatttatttaattaaaatacattgcatatttctattagcacaaacttctctctaaaaggtctgtgtaactgcttctcatcattatttgattgctgttatgggatcctgtcaaaactgtgtaattgtttattctccattcctcaaatacaaaattgagtaggttggctatatttttctccttatatgaaggatctttatgtttaactgaaaattttagaaagcttttcgttttcccttatgaaaattaaaggttgaaggtaactgatgtaagtagtttcactgatcttaagcagttgtctcttcagtaattgcagacttgtactatatagaaatgagactatgcattaggatgactgttgtccttccaagtagaaaccttgcaaagttgtagctttttaaaaaaattaaggttgccattgctaaaacttcttttgaaactcatctttgaaaatagcctgaagagatcatttgtaagtcactcaaaagaattagtctcatcatagtcatatgttaatcttgaccaaaatcttaacttgattattcatcaaacatgattgaaaatatttcatgtctattttcataggtaaaatctactttcaaagaagtgaggtttttcatctactggtaaaaatgttttcaacactaaacagtttgaatgaaatatttctaaaatcctgagcaatggcaaggtcagtgaaagaagtgtatagtctctttgagaggcaaccttatttgaatgcagaaattctggtgcgttttttgttgtttttaacaagtcactcttccattatcttagtggtttgaggctaagttcagtagaatataaggggtttcttagatatgagtaatagttatggggagtattagctatcatttaaaaaaatgtatcgcctgtaccagtcacttaataacatttctcatctttacagtaatttgatacttcaccgttaaaaaaaaggttcaaaagttaaaaagaaaatagattcaaagacattaaataactagttgaagatcacaactaagttagtgattgactaatattctttgtgactaaaaaactcaactgctccacctatatcagttatacatacttctgcattcactaggtaatacagtatgcatacattaagaaaagatcatttcctttttttgtagtctcttcttagcagtat

SEQ ID NO: 464056 - DNA, 211 bp, Homo sapiens
atcattgaagcaagtattgtcatctaaccctccaattgcataaattgggcctcctaaggaagccaaggcaattccttgcttcaatgatgtggagagatatgacatagaatctgatcagtggagtacagtggcaccaatgaatactccccgtggaggagttggctctgttgctctagtagtaagttatatggcaacttgtcattaaattaca

SEQ ID NO: 464057 - DNA, 6496 bp, Homo sapiens
ggggaaaaggcatcaacagcaccagcaaataaagaacagatgctcaattagtgatggtgatggacaagattcctttatttttgaagcaaatgaagcttggaaagattttcatggttctcttcttcgattttatgaaaatggagaactctgtgatgtcacactcaagtcacagcaaactgtacaatggcagttgagtgggttttgaaaaacgtctgaattgtagtgtctacatctaccttctgccttctctctaccctttgaaaaaaaataaatggcatgtttgagaagagagctctattaaaagaggaatattgcaaatggcttcagattctatgagtagtaaacaagctaggaatcacattacaaaggggaaaaggcaacaacagcaccagcaaataaagaacagatcctcaattagtgatggtgatggagaagattcctttatttttgaagcaaatgaagcttggaaagattttcatggttctcttcttcgattttatgaaaatggagaactctgtgatgtcacactcaaggttgaactggtggctagagcttgttgtgaatacatgaagttacattttcatccctccaattgcctggcagtaagagcctttgcagaaagtcacaatcgaatagacttaatggacatggcggatcagtatgcctgtgaccattttactgaagtagtggagtgtgaagactttgtaagtgtatcaccgcagcacctccataagcttttgtcctccagtgatctaaatattgaaaatgaaaagcaggtctataatgctgccatcaagtggcttcttgccaatcctcagcatcattccaaatggttggatgaaacacttgcacaggttcgcctgccattgttgccggttgattttcttatgggtgttgtggcaaaagaacagattgtcaagcaaaatctaaaatgtagagatttactggatgaagcaagaaattaccaccttcacttgagtagcagagcagtacctgactttgaatactccattcggactaccccaaggaagcatactgctggtgtgctgttttgtgtaggtggtcgaggtggatctggtgacccctttcgcagtattgaatgctattctatcaacaaaaacagttggttctttggaccagaaatgaatagtcgaaggcgacatgtgggtgtaatctctgtggaaggtaaagtgtatgcagtaggtggacatgatggaaatgaacatttagggagtatggagatgtttgatcctctcactaataaatggatgatgaaggcatcaatgaacacaaagaggcgaggaattgccttggcttccttaggaggcccaatttatgcaattggagggttagatgacaatacttgcttcaatgatgtggagagatatgacatagaatctgatcagtggagtacagtggcaccaatgaatactccccgtggaggagttggctctgttgctctagtaaaccatgtttatgcagtaggtggcaatgatggaatggcttctttatctagcgtggagagatatgatccacatctggataagtggatagaagttaaagaaatgggtcagcgaagagcaggcaatggagttagcaagcttcatggttgcttatacgtagttggtggttttgatgataattctcctctgagttcagttgagcggtatgacccccgaagcaacaagtgggattatgtggcagcacttactactcccagaggtggagtgggaatcgcaacagtgatgggcaaaatctttgcagttggtggtcataatggcaatgcatacttaaatacagtagaagcgtttgatccagtgctgaataggtgggagcttgttggatctgtgtctcactgcagagctggagcaggagtagctgtgtgttcctgtttaactagccaaattcgagatgtaggtcatggatccaataatgtggttgactgtatgtgatttgagttctggccaccaacaatttagtcatatctgataggtacaaaagaaaaccaagattttgatatgaccacctttcaacactttttactgcaactagagtcttatttaaatgttaactgttgtattgtgactaagtacaacttttggaatgatacctgaagaattattagtaatagagttaaatttgatacttcctgcttttgcaaataatggagtagggaagaagatagtcgaacttaaaatcatacctaccctgaaaaatgcttaaagtagtgccaaaaatcttgaaatctctctctctctctctatttggatgaatcaaaatgtaatttgttgagttttgccttttcttttgcctaaagatgttaacgtcaggcagtgggtttttcctagaggagagattagtacctattcattaacacaaggatacataagagacttgccccttttgaagatcatttctacttggtgctgatgaatttatgcctagctttttttttctaggtggtgatttttcaatttcttttatatttacggaagtagaaaaaatgttctgtctttttgaatgccacttagctgcattttcagaagcttataggctataagaagcctttaatttcagtttgaattgctaggacaccaaaagacctagctgggctaactccatccaaatgattttacagttttattttttcatcttttgcaaaaagtatttgttacataatcaaaaggtgaaccagaggaaatattgaacaaggttttagatctgatgttattctggtgcccaattgagagaccttgagaaagaatgatgcagattacatgactctaatgtgggcagtctgaaaatatctttaactgtcttctttgatcatttgattttggatccaagatttatcatctctctattttgctatttgccaccatcctggtttttctgactgtacagaatcaatctgcatttatttattatcagaaatgaatgcatttttacaaaaacctttttgtagactgtagtttattgattagttcaagcccatcacgaactaattaaacatattgttggtaaaaacagagattgaaattactgtttttatcatatttaaatccctctggtgtatttattgaaatttaattaaaaatatttctacatattgatttgaagccaggatattgatggacctacagatttaacagctcttcaaagttttaactagcattataaaatggcctattcattatatgtatatttttttataaatatttatcaagaacatgaaaatattttattttgtatttgcagtgcagtttggcacctctcttccaggccttcctaagtttttgttagttgtgtcttcgaatttattgtagttcaccgctggtcagtaatctggttcataaggaagctggggcagtgaaaaacacttcgttgatccatccagccctaaagttcattgactaatagctcatgcatcttattaaatgggattctggacttctacaatagtgtggaaagccacatcacaaaaaaagccacatcacaaaaaaaagccagtgcctattgagtatatcaaaccaaaaaagaaaaaaaaaagttttaagaggggtcaggctggcagataaaagtctcttatgaagcagatataaatccagtaagctatttttttctacctatgggcaagttcataagtcattgctggatctgaaccagtgttcttttgtgtaagtacaaccatatttcagtcagtccagaggcagttaaccctgtagcacttactagactggtgacaactggctggatgtggagaataagtgtcaaaacctggcttcaatgtctatttcttatgtctaatggagttcttatattacagtgtttgtttagctatggttactaatatgtttgttatatttattttcggggagaggatcttgttattgtttcctgagattatttaaaatgttttttctttgatgtatttctgtctttcttatatgtaaggagttataagggttattatattttcatttctggtttttactatacaatggttatctaacatactaagttggtaccctacctacccgtaaaatatgaaatactcagaagtaaagtgtgtgggcaatcagaagcatagccttgaaggacctgacagcagtatgaaaagataaataggccaggcatggtggctcacgcctgtgatcccagcactttgggaggccgaggtgggtggaccacctgagatcaggtgttcaagaccagcctgaccaacatggtgaaaccctgtctctactaaaagtacaaaaattagccaggcgtggtggcgcatacctgtaattccagctactcaggaggctgaggcaggagaattgcttgaacccaggaggtggaggttgcaatgagccgaggttgagccatcgcactccagcggtgaaacaagagtgaaactccatctcaaaaaaaaaaaaaaaaaaaagataaaaaagcagaatcaatatgtgcacagttctctttatcaggcaaaaacacgtttattgagacatgaaatgagaatcaggctgaaggaatcatgcagctgaaagatgattatattcatagaaatgaagagatgaaatattcaaagaagatggctactttattgtgagacttaccactttaacctcatatgttaacagcacctaccaaaaaatgatatgagatagagctaaaatactgaaattgcaaatggacaaaataaatcatgaaaatttgtttattatttcttcaataaatatttctaggtgctttgtgattctttcatttagtcattaaagccattgctttactatattgcgttgccactttaaaaacaagttacttgacattgtttttgacagatttcactatattcttatgtaattaattgattatttctaaaatgtttgaataaactttgtactccctctaaggagtattttattcattcttttaattcccaaatgaactttgaacttacagtgctgttgaatgccttggtaaggacttcttgaaattgcataaactattcttgtaaatggtaaacttgagaattttctttgtttcttttttctctatgtcttaaagaatgcctttagaatctaattcatgttgtatcagttaagaatgtttctgtggtttctcgtatcagatgtgtaaagaaattattactgggatgccattggctatgtctctttccccttcatgtaaaattccaagtgtcagtaaaacttctctataatattttcttaaaaccatttataaatttgtgttataatactccagaaaatcaatgtaataagtggtcatatatatcaccaactatggatatcaaaaagttggggtcacatcagtgctatttatttaattaaaatacattgcatatttctattagcacaaacttctctctaaaaggtctgtgtaactgcttctcatcattatttgattgctgttatgggatcctgtcaaaactgtgtaattgtttattctccattcctcaaatacaaaattgagtaggttggctatatttttctccttatatgaaggatctttatgtttaactgaaaattttagaaagcttttcgttttcccttatgaaaattaaaggttgaaggtaactgatgtaagtagtttcactgatcttaagcagttgtctcttcagtaattgcagacttgtactatatagaaatgagactatgcattaggatgactgttgtccttccaagtagaaaccttgcaaagttgtagctttttaaaaaaattaaggttgccattgctaaaacttcttttgaaactcatctttgaaaatagcctgaagagatcatttgtaagtcactcaaaagaattagtctcatcatagtcatatgttaatcttgaccaaaatcttaacttgattattcatcaaacatgattgaaaatatttcatgtctattttcataggtaaaatctactttcaaagaagtgaggtttttcatctactggtaaaaatgttttcaacactaaacagtttgaatgaaatatttctaaaatcctgagcaatggcaaggtcagtgaaagaagtgtatagtctctttgagaggcaaccttatttgaatgcagaaattctggtgcgttttttgttgtttttaacaagtcactcttccattatcttagtggtttgaggctaagttcagtagaatataaggggtttcttagatatgagtaatagttatggggagtattagctatcatttaaaaaaatgtatcgcctgtaccagtcacttaataacatttctcatctttacagtaatttgatacttcaccgttaaaaaaaaggttcaaaagttaaaaagaaaatagattcaaagacattaaataactagttgaagatcacaactaagttagtgattgactaatattctttgtgactaaaaaactcaactgctccacctatatcagttatacatacttctgcattcactaggtaatacagtatgcatacattaagaaaagatcatttcctttttttgtagtctcttcttagcagtat

SEQ ID NO: 464058 - DNA, 4043 bp, Homo sapiens
gatttttcaattttttttctacttccgtaaatataaaagaaattgaaaaaatgttctgtctttttgaatgccacttagctgcattttcagaagcttataggctataagaagcctttaatttcagtttgaattgctaggacaccaaaagacctagctgggctaactccatccaaatgattttacagttttattttttcatcttttgcaaaaagtatttgttacataatcaaaaggtgaaccagaggaaatattgaacaaggttttagatctgatgttattctggtgcccaattgagagaccttgagaaagaatgatgcagattacatgactctaatgtgggcagtctgaaaatatctttaactgtcttctttgatcatttgattttggatccaagatttatcatctctctattttgctatttgccaccatcctggtttttctgactgtacagaatcaatctgcatttatttattatcagaaatgaatgcatttttacaaaaacctttttgtagactgtagtttattgattagttcaagcccatcacgaactaattaaacatattgttggtaaaaacagagattgaaattactgtttttatcatatttaaatccctctggtgtatttattgaaatttaattaaaaatatttctacatattgatttgaagccaggatattgatggacctacagatttaacagctcttcaaagttttaactagcattataaaatggcctattcattatatgtatatttttttataaatatttatcaagaacatgaaaatattttattttgtatttgcagtgcagtttggcacctctcttccaggccttcctaagtttttgttagttgtgtcttcgaatttattgtagttcaccgctggtcagtaatctggttcataaggaagctggggcagtgaaaaacacttcgttgatccatccagccctaaagttcattgactaatagctcatgcatcttattaaatgggattctggacttctacaatagtgtggaaagccacatcacaaaaaaagccacatcacaaaaaaaagccagtgcctattgagtatatcaaaccaaaaaagaaaaaaaaaagttttaagaggggtcaggctggcagataaaagtctcttatgaagcagatataaatccagtaagctatttttttctacctatgggcaagttcataagtcattgctggatctgaaccagtgttcttttgtgtaagtacaaccatatttcagtcagtccagaggcagttaaccctgtagcacttactagactggtgacaactggctggatgtggagaataagtgtcaaaacctggcttcaatgtctatttcttatgtctaatggagttcttatattacagtgtttgtttagctatggttactaatatgtttgttatatttattttcggggagaggatcttgttattgtttcctgagattatttaaaatgttttttctttgatgtatttctgtctttcttatatgtaaggagttataagggttattatattttcatttctggtttttactatacaatggttatctaacatactaagttggtaccctacctacccgtaaaatatgaaatactcagaagtaaagtgtgtgggcaatcagaagcatagccttgaaggacctgacagcagtatgaaaagataaataggccaggcatggtggctcacgcctgtgatcccagcactttgggaggccgaggtgggtggaccacctgagatcaggtgttcaagaccagcctgaccaacatggtgaaaccctgtctctactaaaagtacaaaaattagccaggcgtggtggcgcatacctgtaattccagctactcaggaggctgaggcaggagaattgcttgaacccaggaggtggaggttgcaatgagccgaggttgagccatcgcactccagcggtgaaacaagagtgaaactccatctcaaaaaaaaaaaaaaaaaaaagataaaaaagcagaatcaatatgtgcacagttctctttatcaggcaaaaacacgtttattgagacatgaaatgagaatcaggctgaaggaatcatgcagctgaaagatgattatattcatagaaatgaagagatgaaatattcaaagaagatggctactttattgtgagacttaccactttaacctcatatgttaacagcacctaccaaaaaatgatatgagatagagctaaaatactgaaattgcaaatggacaaaataaatcatgaaaatttgtttattatttcttcaataaatatttctaggtgctttgtgattctttcatttagtcattaaagccattgctttactatattgcgttgccactttaaaaacaagttacttgacattgtttttgacagatttcactatattcttatgtaattaattgattatttctaaaatgtttgaataaactttgtactccctctaaggagtattttattcattcttttaattcccaaatgaactttgaacttacagtgctgttgaatgccttggtaaggacttcttgaaattgcataaactattcttgtaaatggtaaacttgagaattttctttgtttcttttttctctatgtcttaaagaatgcctttagaatctaattcatgttgtatcagttaagaatgtttctgtggtttctcgtatcagatgtgtaaagaaattattactgggatgccattggctatgtctctttccccttcatgtaaaattccaagtgtcagtaaaacttctctataatattttcttaaaaccatttataaatttgtgttataatactccagaaaatcaatgtaataagtggtcatatatatcaccaactatggatatcaaaaagttggggtcacatcagtgctatttatttaattaaaatacattgcatatttctattagcacaaacttctctctaaaaggtctgtgtaactgcttctcatcattatttgattgctgttatgggatcctgtcaaaactgtgtaattgtttattctccattcctcaaatacaaaattgagtaggttggctatatttttctccttatatgaaggatctttatgtttaactgaaaattttagaaagcttttcgttttcccttatgaaaattaaaggttgaaggtaactgatgtaagtagtttcactgatcttaagcagttgtctcttcagtaattgcagacttgtactatatagaaatgagactatgcattaggatgactgttgtccttccaagtagaaaccttgcaaagttgtagctttttaaaaaaattaaggttgccattgctaaaacttcttttgaaactcatctttgaaaatagcctgaagagatcatttgtaagtcactcaaaagaattagtctcatcatagtcatatgttaatcttgaccaaaatcttaacttgattattcatcaaacatgattgaaaatatttcatgtctattttcataggtaaaatctactttcaaagaagtgaggtttttcatctactggtaaaaatgttttcaacactaaacagtttgaatgaaatatttctaaaatcctgagcaatggcaaggtcagtgaaagaagtgtatagtctctttgagaggcaaccttatttgaatgcagaaattctggtgcgttttttgttgtttttaacaagtcactcttccattatcttagtggtttgaggctaagttcagtagaatataaggggtttcttagatatgagtaatagttatggggagtattagctatcatttaaaaaaatgtatcgcctgtaccagtcacttaataacatttctcatctttacagtaatttgatacttcaccgttaaaaaaaaggttcaaaagttaaaaagaaaatagattcaaagacattaaataactagttgaagatcacaactaagttagtgattgactaatattctttgtgactaaaaaactcaactgctccacctatatcagttatacatacttctgcattcactaggtaatacagtatgcatacattaagaaaagatcatttcctttttttgtagtctcttcttagcagtat

SEQ ID NO: 464059 - DNA, 4188 bp, Homo sapiens
ggggaaaaggcatcaacagcaccagcaaataaagaacagatgctcaattagtgatggtgatggacaagattcctttatttttgaagcaaatgaagcttggaaagattttcatggttctcttcttcgattttatgaaaatggagaactctgtgatgtcacactcaagtcacagcaaactgtacaatggcagttgagtgggttttgaaaaacgtctgaattgtagtgtctacatctaccttctgccttctctctaccctttgaaaaaaaataaatggcatgtttgagaagagagctctattaaaagaggaatattgcaaatggcttcagattctatgagtagtaaacaagctaggaatcacattacaaaggggaaaaggcaacaacagcaccagcaaataaagaacagatcctcaattagtgatggtgatggagaagattcctttatttttgaagcaaatgaagcttggaaagattttcatggttctcttcttcgattttatgaaaatggagaactctgtgatgtcacactcaaggttgaactggtggctagagcttgttgtgaatacatgaagttacattttcatccctccaattgcctggcagtaagagcctttgcagaaagtcacaatcgaatagacttaatggacatggcggatcagtatgcctgtgaccattttactgaagtagtggagtgtgaagactttgtaagtgtatcaccgcagcacctccataagcttttgtcctccagtgatctaaatattgaaaatgaaaagcaggtctataatgctgccatcaagtggcttcttgccaatcctcagcatcattccaaatggttggatgaaacacttgcacaggttcgcctgccattgttgccggttgattttcttatgggtgttgtggcaaaagaacagattgtcaagcaaaatctaaaatgtagagatttactggatgaagcaagaaattaccaccttcacttgagtagcagagcagtacctgactttgaatactccattcggactaccccaaggaagcatactgctggtgtgctgttttgtgtaggtggtcgaggtggatctggtgacccctttcgcagtattgaatgctattctatcaacaaaaacagttggttctttggaccagaaatgaatagtcgaaggcgacatgtgggtgtaatctctgtggaaggtaaagtgtatgcagtaggtggacatgatggaaatgaacatttagggagtatggagatgtttgatcctctcactaataaatggatgatgaaggcatcaatgaacacaaagaggcgaggaattgccttggcttccttaggaggcccaatttatgcaattggagggttagatgacaatacttgcttcaatgatgtggagagatatgacatagaatctgatcagtggagtacagtggcaccaatgaatactccccgtggaggagttggctctgttgctctagtaaaccatgtttatgcagtaggtggcaatgatggaatggcttctttatctagcgtggagagatatgatccacatctggataagtggatagaagttaaagaaatgggtcagcgaagagcaggcaatggagttagcaagcttcatggttgcttatacgtagttggtggttttgatgataattctcctctgagttcagttgagcggtatgacccccgaagcaacaagtgggattatgtggcagcacttactactcccagaggtggagtgggaatcgcaacagtgatgggcaaaatctttgcagttggtggtcataatggcaatgcatacttaaatacagtagaagcgtttgatccagtgctgaataggtgggagcttgttggatctgtgtctcactgcagagctggagcaggagtagctgtgtgttcctgtttaactagccaaattcgagatgtaggtcatggatccaataatgtggttgactgtatgtgatttgagttctggccaccaacaatttagtcatatctgataggtacaaaagaaaaccaagattttgatatgaccacctttcaacactttttactgcaactagagtcttatttaaatgttaactgttgtattgtgactaagtacaacttttggaatgatacctgaagaattattagtaatagagttaaatttgatacttcctgcttttgcaaataatggagtagggaagaagatagtcgaacttaaaatcatacctaccctgaaaaatgcttaaagtagtgccaaaaatcttgaaatctctctctctctctctatttggatgaatcaaaatgtaatttgttgagttttgccttttcttttgcctaaagatgttaacgtcaggcagtgggtttttcctagaggagagattagtacctattcattaacacaaggatacataagagacttgccccttttgaagatcatttctacttggtgctgatgaatttatgcctagctttttttttctaggtggtgatttttcaatttcttttatatttacggaagtagaaaaaatgttctgtctttttgaatgccacttagctgcattttcagaagcttataggctataagaagcctttaatttcagtttgaattgctaggacaccaaaagacctagctgggctaactccatccaaatgattttacagttttattttttcatcttttgcaaaaagtatttgttacataatcaaaaggtgaaccagaggaaatattgaacaaggttttagatctgatgttattctggtgcccaattgagagaccttgagaaagaatgatgcagattacatgactctaatgtgggcagtctgaaaatatctttaactgtcttctttgatcatttgattttggatccaagatttatcatctctctattttgctatttgccaccatcctggtttttctgactgtacagaatcaatctgcatttatttattatcagaaatgaatgcatttttacaaaaacctttttgtagactgtagtttattgattagttcaagcccatcacgaactaattaaacatattgttggtaaaaacagagattgaaattactgtttttatcatatttaaatccctctggtgtatttattgaaatttaattaaaaatatttctacatattgatttgaagccaggatattgatggacctacagatttaacagctcttcaaagttttaactagcattataaaatggcctattcattatatgtatatttttttataaatatttatcaagaacatgaaaatattttattttgtatttgcagtgcagtttggcacctctcttccaggccttcctaagtttttgttagttgtgtcttcgaatttattgtagttcaccgctggtcagtaatctggttcataaggaagctggggcagtgaaaaacacttcgttgatccatccagccctaaagttcattgactaatagctcatgcatcttattaaatgggattctggacttctacaatagtgtggaaagccacatcacaaaaaaagccacatcacaaaaaaaagccagtgcctattgagtatatcaaaccaaaaaagaaaaaaaaaagttttaagaggggtcaggctggcagataaaagtctcttatgaagcagatataaatccagtaagctatttttttctacctatgggcaagttcataagtcattgctggatctgaaccagtgttcttttgtgtaagtacaaccatatttcagtcagtccagaggcagttaaccctgtagcacttactagactggtgacaactggctggatgtggagaataagtgtcaaaacctggcttcaatgtctatttcttatgtctaatggagttcttatattacagtgtttgtttagctatggttactaatatgtttgttatatttattttcggggagaggatcttgttattgtttcctgagattatttaaaatgttttttctttgatgtatttctgtctttcttatatgtaaggagttataagggttattatattttcatttctggtttttactatacaatggttatctaacatactaagttggtaccctacctacccgtaaaatatgaaatactcagaagtaaagtgtgtgggcaatcagaagcatagccttgaaggacctgacatgcaagcccggtacatgcaagggtatgggcccggtacatgcaagggtacatgcaagcccgtacatgcccggtacatgcaag

SEQ ID NO: 464060 - DNA, 442 bp, Homo sapiens
ccattcggactaccccaaggaagcatactgctggtaaccaaattattttgtcaattctcctggaaggatctttgttgtatttgagggttgttcatgtgtgcccaaacttagttgtaatataattagtgtctgattgccttaaagtaataattggcaaatacggttttatatatttataatttttactgtacattatttagttttaccaataagccagttttttaaaaagccgtaatcagtcctgtatactctgaagagcctactgaaatatctcttcttttgagatctttcccgattctgaacttggtttactatgttgcattgtcatttactcatttgacatgtcttaagttcttcaaagacagctgagtatcttatttaggtttctatccctagggccaagcatggaacttgaaatatattgtgcatctaaatatttgtt

SEQ ID NO: 464061 - DNA, 694 bp, Homo sapiens
tccgcggggccgcgcaggagagcgcgcgtccgccgggtgctcgcgcggggttggtgaggttccgctgagggcggccggggctctgggagcgtggtaacgtggctgcaaccttagcgacatcaggaagaacagggtcgaggatcgagtcacagcaaactgtacaatggcagttgagtgggttttgaaaaacgtctgaattgtagtgtctacatctaccttctgccttctctctaccctttgaaaaaaaataaatggcatgtttgagaagagagctctattaaaagaggaatattgcaaatggcttcagattctatgagtagtaaacaagctaggaatcacattacaaaggggaaaaggcaacaacagcaccagcaaataaagaacagatcctcaattagtgatggtgatggagaagattcctttatttttgaagcaaatgaagcttggaaagattttcatggttctcttcttcgattttatgaaaatggagaactctgtgatgtcacactcaaggttggctcaaagctaatctcttgtcacaagctggtattggcttgtgttattccctactttagagccatgtttctttctgaaatggctgaagccaagcaaacgctgattgagattagagattttgatggtgatgcaatagaagacttggtaaagtttgtctattcttcacggctcactttga

SEQ ID NO: 464062 - DNA, 5968 bp, Homo sapiens
tccgcggggccgcgcaggagagcgcgcgtccgccgggtgctcgcgcggggttggtgaggttccgctgagggcggccggggctctgggagcgtggtaacgtggctgcaaccttagcgacatcaggaagaacagggtcgaggatcgagtcacagcaaactgtacaatggcagttgagtgggttttgaaaaacgtctgaattgtagtgtctacatctaccttctgccttctctctaccctttgaaaaaaaataaatggcatgtttgagaagagagctctattaaaagaggaatattgcaaatggcttcagattctatgagtagtaaacaagctaggaatcacattacaaaggggaaaaggcaacaacagcaccagcaaataaagaacagatcctcaattagtgatggtgatggagaagattcctttatttttgaagcaaatgaagcttggaaagattttcatggttctcttcttcgattttatgaaaatggagaactctgtgatgtcacactcaaggtgtgctgttttgtgtaggtggtcgaggtggatctggtgacccctttcgcagtattgaatgctattctatcaacaaaaacagttggttctttggaccagaaatgaatagtcgaaggcgacatgtgggtgtaatctctgtggaaggtaaagtgtatgcagtaggtggacatgatggaaatgaacatttagggagtatggagatgtttgatcctctcactaataaatggatgatgaaggcatcaatgaacacaaagaggcgaggaattgccttggcttccttaggaggcccaatttatgcaattggagggttagatgacaatacttgcttcaatgatgtggagagatatgacatagaatctgatcagtggagtacagtggcaccaatgaatactccccgtggaggagttggctctgttgctctagtaaaccatgtttatgcagtaggtggcaatgatggaatggcttctttatctagcgtggagagatatgatccacatctggataagtggatagaagttaaagaaatgggtcagcgaagagcaggcaatggagttagcaagcttcatggttgcttatacgtagttggtggttttgatgataattctcctctgagttcagttgagcggtatgacccccgaagcaacaagtgggattatgtggcagcacttactactcccagaggtggagtgggaatcgcaacagtgatgggcaaaatctttgcagttggtggtcataatggcaatgcatacttaaatacagtagaagcgtttgatccagtgctgaataggtgggagcttgttggatctgtgtctcactgcagagctggagcaggagtagctgtgtgttcctgtttaactagccaaattcgagatgtaggtcatggatccaataatgtggttgactgtatgtgatttgagttctggccaccaacaatttagtcatatctgataggtacaaaagaaaaccaagattttgatatgaccacctttcaacactttttactgcaactagagtcttatttaaatgttaactgttgtattgtgactaagtacaacttttggaatgatacctgaagaattattagtaatagagttaaatttgatacttcctgcttttgcaaataatggagtagggaagaagatagtcgaacttaaaatcatacctaccctgaaaaatgcttaaagtagtgccaaaaatcttgaaatctctctctctctctctatttggatgaatcaaaatgtaatttgttgagttttgccttttcttttgcctaaagatgttaacgtcaggcagtgggtttttcctagaggagagattagtacctattcattaacacaaggatacataagagacttgccccttttgaagatcatttctacttggtgctgatgaatttatgcctagctttttttttctaggtggtgatttttcaatttcttttatatttacggaagtagaaaaaatgttctgtctttttgaatgccacttagctgcattttcagaagcttataggctataagaagcctttaatttcagtttgaattgctaggacaccaaaagacctagctgggctaactccatccaaatgattttacagttttattttttcatcttttgcaaaaagtatttgttacataatcaaaaggtgaaccagaggaaatattgaacaaggttttagatctgatgttattctggtgcccaattgagagaccttgagaaagaatgatgcagattacatgactctaatgtgggcagtctgaaaatatctttaactgtcttctttgatcatttgattttggatccaagatttatcatctctctattttgctatttgccaccatcctggtttttctgactgtacagaatcaatctgcatttatttattatcagaaatgaatgcatttttacaaaaacctttttgtagactgtagtttattgattagttcaagcccatcacgaactaattaaacatattgttggtaaaaacagagattgaaattactgtttttatcatatttaaatccctctggtgtatttattgaaatttaattaaaaatatttctacatattgatttgaagccaggatattgatggacctacagatttaacagctcttcaaagttttaactagcattataaaatggcctattcattatatgtatatttttttataaatatttatcaagaacatgaaaatattttattttgtatttgcagtgcagtttggcacctctcttccaggccttcctaagtttttgttagttgtgtcttcgaatttattgtagttcaccgctggtcagtaatctggttcataaggaagctggggcagtgaaaaacacttcgttgatccatccagccctaaagttcattgactaatagctcatgcatcttattaaatgggattctggacttctacaatagtgtggaaagccacatcacaaaaaaagccacatcacaaaaaaaagccagtgcctattgagtatatcaaaccaaaaaagaaaaaaaaaagttttaagaggggtcaggctggcagataaaagtctcttatgaagcagatataaatccagtaagctatttttttctacctatgggcaagttcataagtcattgctggatctgaaccagtgttcttttgtgtaagtacaaccatatttcagtcagtccagaggcagttaaccctgtagcacttactagactggtgacaactggctggatgtggagaataagtgtcaaaacctggcttcaatgtctatttcttatgtctaatggagttcttatattacagtgtttgtttagctatggttactaatatgtttgttatatttattttcggggagaggatcttgttattgtttcctgagattatttaaaatgttttttctttgatgtatttctgtctttcttatatgtaaggagttataagggttattatattttcatttctggtttttactatacaatggttatctaacatactaagttggtaccctacctacccgtaaaatatgaaatactcagaagtaaagtgtgtgggcaatcagaagcatagccttgaaggacctgacagcagtatgaaaagataaataggccaggcatggtggctcacgcctgtgatcccagcactttgggaggccgaggtgggtggaccacctgagatcaggtgttcaagaccagcctgaccaacatggtgaaaccctgtctctactaaaagtacaaaaattagccaggcgtggtggcgcatacctgtaattccagctactcaggaggctgaggcaggagaattgcttgaacccaggaggtggaggttgcaatgagccgaggttgagccatcgcactccagcggtgaaacaagagtgaaactccatctcaaaaaaaaaaaaaaaaaaaagataaaaaagcagaatcaatatgtgcacagttctctttatcaggcaaaaacacgtttattgagacatgaaatgagaatcaggctgaaggaatcatgcagctgaaagatgattatattcatagaaatgaagagatgaaatattcaaagaagatggctactttattgtgagacttaccactttaacctcatatgttaacagcacctaccaaaaaatgatatgagatagagctaaaatactgaaattgcaaatggacaaaataaatcatgaaaatttgtttattatttcttcaataaatatttctaggtgctttgtgattctttcatttagtcattaaagccattgctttactatattgcgttgccactttaaaaacaagttacttgacattgtttttgacagatttcactatattcttatgtaattaattgattatttctaaaatgtttgaataaactttgtactccctctaaggagtattttattcattcttttaattcccaaatgaactttgaacttacagtgctgttgaatgccttggtaaggacttcttgaaattgcataaactattcttgtaaatggtaaacttgagaattttctttgtttcttttttctctatgtcttaaagaatgcctttagaatctaattcatgttgtatcagttaagaatgtttctgtggtttctcgtatcagatgtgtaaagaaattattactgggatgccattggctatgtctctttccccttcatgtaaaattccaagtgtcagtaaaacttctctataatattttcttaaaaccatttataaatttgtgttataatactccagaaaatcaatgtaataagtggtcatatatatcaccaactatggatatcaaaaagttggggtcacatcagtgctatttatttaattaaaatacattgcatatttctattagcacaaacttctctctaaaaggtctgtgtaactgcttctcatcattatttgattgctgttatgggatcctgtcaaaactgtgtaattgtttattctccattcctcaaatacaaaattgagtaggttggctatatttttctccttatatgaaggatctttatgtttaactgaaaattttagaaagcttttcgttttcccttatgaaaattaaaggttgaaggtaactgatgtaagtagtttcactgatcttaagcagttgtctcttcagtaattgcagacttgtactatatagaaatgagactatgcattaggatgactgttgtccttccaagtagaaaccttgcaaagttgtagctttttaaaaaaattaaggttgccattgctaaaacttcttttgaaactcatctttgaaaatagcctgaagagatcatttgtaagtcactcaaaagaattagtctcatcatagtcatatgttaatcttgaccaaaatcttaacttgattattcatcaaacatgattgaaaatatttcatgtctattttcataggtaaaatctactttcaaagaagtgaggtttttcatctactggtaaaaatgttttcaacactaaacagtttgaatgaaatatttctaaaatcctgagcaatggcaaggtcagtgaaagaagtgtatagtctctttgagaggcaaccttatttgaatgcagaaattctggtgcgttttttgttgtttttaacaagtcactcttccattatcttagtggtttgaggctaagttcagtagaatataaggggtttcttagatatgagtaatagttatggggagtattagctatcatttaaaaaaatgtatcgcctgtaccagtcacttaataacatttctcatctttacagtaatttgatacttcaccgttaaaaaaaaggttcaaaagttaaaaagaaaatagattcaaagacattaaataactagttgaagatcacaactaagttagtgattgactaatattctttgtgactaaaaaactcaactgctccacctatatcagttatacatacttctgcattcactaggtaatacagtatgcatacattaagaaaagatcatttcctttttttgtagtctcttcttagcagtat

SEQ ID NO: 464063 - DNA, 961 bp, Homo sapiens
cttctgaaccaggatgagccaggaaaaggactttcacaagcacgaacatacaggaaatcaacattatcagttccctggcctctgctggtattgtgaagtaatttttgaaacttggaaatattacgatcgggtccatctatctaagtggaggaggcagctgtggcctggaggagttgtcgcttcctccaggtcatgtgtgagtcagtctgatacagccgagaagcacatcaggcagggctccttccactacctcacgctgcctctcttcctctgggtgcctttaatgaggggtcagtgcttactggttgctccccagggaaacctctcaggaaggggcttctgtgttagcatagtgtcaagctccccaggggattccagtggcagccagggtccaggacacgtcagaggcacgtcagtggcacgtcagtgtgctcagcggcggggtcctggggcctggtttgtatatagatttggcggcttttccattgctcctgcattctgggactgctttccaaaaaccctcctccagagtacagtagtcaagaatctcctctcagaaggcaggaccgactacacagggctgaaggaggcaaacaccctcaaggctgagtgtgcggaattaccttgtagatgccaaggggaggaaaaggctgaggagccccagagaaagctccattgccatgacgtcattttatggacagaaagttccattctcctcctctgcaagtgttgtagcctgacatggggccaggctaggaagaatgctgcgagccctctttggagtgacacggactgtatggatcatcagcagacacactttatgtaaaggagaaggagctgttgaagcgtcttgaaaacctactgaattgctgagcaggagagtatgtactaaagcagatcctaagaatactaattattcagatatggacactgagccattggtgcctattttattcactct

SEQ ID NO: 464064 - DNA, 1291 bp, Homo sapiens
tctgcgctccggaactgcatggacgagttaagagtgcccatgttgctcagcttctcagacacattcattccagagtctttgctgaggcagagctctctaaggagatgtttaagaatgggccaggtggcaaagtctcagcattttccactcattacatattgcaaggatcagcaatttgccattcctggtcatagacaacatgcctttggattgcaatggcccattatcacccctgctactgattattcctgtctcctactggggcctccaacttcctcttccgtgacaaaacctaaagcagtgttacgagcactttgcaaaattacttggcaatatttactaaagctaaatacacatatacgtatatgaattataaataaagccgctctgaatatccttggccattttttgtggacttatgaatttctgttggaagcactcctttcccctctaactacgaacagaactggagagctactttctggctgggtgacttggggaaatttgtaaacctcttgagatgcatcagtaagatgggcataatgacaggaaatcagcagctccaagagggcagaaactgtgctcctgtttgctagccctgacctcatacctggtattcagtatgcaggaagaaggtttagtaaggcctaaaattccccaaggaaagaaagcatgcctcaagactgtgaatgccctccagacatttacaactcatactgatgatttagctccctttcagtagggtctttcctatattatttattatttatgtgctggggcagagacatgaagaaaatggagctgtttagaacaggagtttgcaaactgcaatggccagtgaaccaaatccagctcaccgctcactgcctgtttttctaaataaagttgtattggaacacaaccacacctattcatttgcatattgtcgagggttgctttctggaccatggggtgtgtgtgtgtctgtgtgtgcgtgctcaagcacatgtgtgatagggaggtgggagctgcaagctaaatttgccagagaactctggctgcagcacatagtccagggcagtatcagtacccctacatcctctggaggatctggcagaagaatcccacctgatggcaaggagacacagatatcaggtcatttccctctcaagcagagctctgttttcttaattaacagagagggtttttccctgccaaataatgcaggctttatgagaggtgctcagggtgatgatagagttaaacgcagtgatttatccatatcccaagggtcagtgtgactgggagctac

SEQ ID NO: 464065 - DNA, 540 bp, Homo sapiens
catttactccatggccactgggccgtgaaagacttggacacagagaagtatttccatttggtgctgcctacggacgagctggcggagcccaagaagtctcaccggcagagccatcgcaagaaggtgctcccggaaatctacctgacccgcctgctctccaccaagggcacgttgcagaagtttctggatgacctgttcaaggccattctgagtatccgtgaagacaagcccccactggctgtcaagtactttttcgacttcctggaggagcaggctgagaagaggggaatctccgaccccgacaccctacacatctggaagaccaacagccttcctctccggttctgggtgaacatcctgaagaacccccagtttgtctttgacatcgacaagacagaccacatcgacgcctgcctttcagtcatcgcgcaggccttcatcgacgcctgctccatctctgacctgcagctgggcaaggattcgccaaccacaagctcctctacgccatggagtaaatgcagggatcctctagaacgccac

SEQ ID NO: 464066 - DNA, 517 bp, Homo sapiens
tcacggctgtccgtgtgtcgccaggcttcgctgagctgcagacagacatgacagatctcaccaaggagctgaaccgcagccagggcatccccttcctggagtataagcacttcgtgacccgcaccttcttccccaaggtcagcccgagcctgagcctgccctgaacctgtgccagccacctcaaggcaactcgacctctctgagccctgccagcctatagggtcccttgagcagtgccaaacctgcacagctgtccgcagccgtcctggccacttgccctggcctgccacggggagaagggttggaggcagattctccactgtcattctctgctcacttgatgtttaacagtccatatggaagccagctgcagccccgctgtcctggccagctgggcctgcctctccccttttcaaggtggggcagaagcggccagggctgtcccaggccagcctctctccttcctgtgcctcttcccagccaggcttcccttggtctctacactccctcctcctgt

SEQ ID NO: 464067 - DNA, 354 bp, Homo sapiens
gcctgacctgcctctccactgcccgcagccctgttcgtcttctgtaccaagagccgacgtgctgagcgttactggcagaagacgctgctgcagatggaggagatggaatctcagatccgagaggaaatccgcaaaggcttcgctgagctgcagacagacatgacagatctcaccaaggagctgaaccgcagccagggcatccccttcctggagtataagcacttcgtgacccgcaccttcttccccaaggtcagcccgagcctgagcctgccctgaacctgtgccagccacctcaaggcaactcgactacactgagtacacagcgaagggttcatcaagggcagcggtacgtta

SEQ ID NO: 464068 - DNA, 7611 bp, Homo sapiens
  misc_feature (155)..(155): n is a, c, g, or t
ccgggctgcgcggcgaggctgagccgggcccgggcgccggggccgggggcggctggcgcgggcaggaagcgcctcgcggcccgggcccgccccccgcctctcgcccgctccgggctcccggctcccggccggcgctcgtcccatgcaatagccgngccgcgcagcccgcgcacgcccggatggctcttcgcgccgcgggcggcgcaccctttagcggcccggcgccgctgccagccccccgccgttccagacgccgccgcggtgcccggtgccgctgctgttgctgctgctcctgggggcggcgcgggccggcgccctggagatccagcgtcggttcccctcgcccacgcccaccaacaacttcgccctggacggcgcggcggggaccgtgtacctggcggccgtcaaccgcctctatcagctgtcgggcgccaacctgagcctggaggccgaggcggccgtgggcccggtgcccgacagcccgctgtgtcacgctccgcagctgccgcaggcctcgtgcgagcacccgcggcgcctcacggacaactacaacaagatcctgcagctggaccccggccagggcctggtagtcgtgtgcgggtccatctaccagggcttctgccagctgcggcgccggggcaacatctcggccgtggccgtgcgcttcccgcccgccgcgccgcccgccgagcccgtcacggtgttccccagcatgctgaacgtggcggccaaccacccgaacgcgtccaccgtggggctagttctgcctcccgccgcgggcgcggggggcagccgcctgctcgtgggcgccacgtacaccggttacggcagctccttcttcccgcgcaaccgcagcctggaggaccaccgcttcgagaacacgcccgagatcgccatccgctccctggacacgcgcggcgacctggccaagctcttcaccttcgacctcaacccctccgacgacaacatcctcaagatcaagcagggcgccaaggagcagcacaagctgggcttcgtgagcgccttcctgcacccgtccgacccgccgccgggtgcacagtcctacgcgtacctggcgctcaacagcgaggcgcgcgcgggcgacaaggagagccaggcgcggagcctgctggcgcgcatctgcctgccccacggcgccggcggcgacgccaagaagctcaccgagtcctacatccagttgggcttgcagtgcgcgggcggcgcgggccgcggcgacctctacagccgcctggtgtcggtcttcccagcccgggagcggctctttgctgtcttcgagcggccccaggggtcccccgcggcccgcgctgctccggccgcactctgcgccttccgcttcgccgacgtgcgagccgccatccgagctgcgcgcaccgcctgcttcgtggaaccggcgcccgacgtggtggcggtgctcgacagcgtggtgcagggcacgggaccggcctgcgagcgcaagctcaacatccagctccagccagagcagctggactgtggagctgctcacctgcagcacccgctgtccatcctgcagcccctgaaggccacgcccgtgttccgcgccccgggcctcacctccgtggccgtggccagcgtcaacaactacacagcggtcttcctgggcacggtcaacgggaggcttctcaagatcaacctgaacgagagcatgcaggtggtgagcaggcgggtggtgactgtggcctatggggagcccgtgcaccatgtcatgcagtttgacccagcagactccggttacctttacctgatgacgtcccaccagatggccagggtgaaggtcgccgcctgcaacgtgcactccacctgtggggactgcgtgggtgcggcggacgcctactgcggctggtgtgccctggagacgcggtgcaccttgcagcaggactgcaccaattccagccagcagcatttctggaccagtgccagcgagggccccagccgctgtcctgccatgaccgtcctgccttccgagatcgatgtgcgccaggagtacccaggcatgatcctgcagatctcgggcagcctgcccagcctcagtggcatggagatggcctgtgactatgggaacaacatccgcactgtggctcgggtcccaggccctgcctttggtcaccagattgcctactgcaacctcctgccgagggaccagtttccgcccttcccccccaaccaggaccacgtgactgttgagatgtctgtgagggtcaatgggcggaacatcgtcaaggccaatttcaccatctacgactgcagccgcactgcacaagtgtacccccacacagcctgtaccagctgcctgtcggcacagtggccctgtttctggtgcagccagcagcactcctgtgtttccaaccagtctcggtgcgaggcctcaccaaaccccacgagccctcaggactgcccccggaccctgctctcacccctggcacccgtgcctaccggtggctcccagaacatcctggtgcctctggccaacactgcctttttccagggtgcagccctggagtgtagttttgggctggaggagatcttcgaggctgtgtgggtgaatgagtctgttgtacgctgtgaccaggtggtgctgcacacgacccggaagagccaggtgttcccgctcagcctccaactaaaggggcggccagcccgattcctggacagccctgagcccatgacagtcatggtctataactgtgccatgggcagccccgactgttcccagtgcctgggccgcgaagacctgggtcacctgtgcgtgtggagtgatggctgccgcctgcgggggcctctgcagcccatggctggcacctgccccgcccccgagatccgcgcgattgagcccctgagtggcccgttggacggtgggaccctgctgaccatccgaggaaggaacctgggccggcggctcagtgacgtggcccacggcgtgtggattggtggtgtggcctgtgagccactgcctgacagatacacggtgtcggaggagatcgtgtgtgtcacagggccagccccaggaccgctctcaggtgtggtgaccgtgaacgcctctaaggagggcaagtcccgggaccgcttctcctacgtgctgcccctggtccactccctggagcctaccatgggccccaaggccgggggcaccaggatcaccatccatgggaatgacctccatgtaggctccgagctccaggtcctggtgaacgacacagacccctgcacggagctgatgcgcacagataccagcatcgcctgcaccatgcctgagggggccctgccggctccggtgcctgtgtgtgtgcgcttcgagcgtcggggctgcgtgcacggcaacctcaccttctggtacatgcagaacccggtcatcacggccatcagtccccgccgcagccctgtcagtggcggcaggaccatcacagtggctggtgagcgtttccacatggtgcagaatgtgtccatggccgtccaccacattggccgggagcccacgctctgcaaggttctcaactccaccctcatcacctgcccgtcccccggggccctgagcaacgcatcagcgccagtggacttcttcatcaatgggcgggcctacgcagacgaggtggctgtggctgaggagctactggaccccgaggaggcacagcggggcagcaggttccgcctggactacctccccaacccacagttctctacggccaagagggagaagtggatcaagcaccaccccggggagcctctcaccctcgttatccacaaggagcaggacagcctggggctccagagtcacgagtaccgggtcaagataggccaagtaagctgcgacatccagattgtctctgacagaatcatccactgctcggtcaacgagtccctgggcgcggccgtggggcagctgcccatcacaatccaggtagggaacttcaaccagaccatcgccacactgcagctggggggcagcgagacggccatcatcgtgtccatcgtcatctgcagcgtcctgctgctgctctccgtggtggccctgttcgtcttctgtaccaagagccgacgtgctgagcgttactggcagaagacgctgctgcagatggaggagatggaatctcagatccgagaggaaatccgcaaaggcttcgctgagctgcagacagacatgacagatctcaccaaggagctgaaccgcagccagggcatccccttcctggagtataagcacttcgtgacccgcaccttcttccccaagtgttcctccctttatgaagagcgttacgtgctgccctcccagaccctcaactcccagggcagctcccaggcacaggaaacccacccactgctgggagagtggaagattcctgagagctgccggcccaacatggaagagggaattagcttgttctcctcactactcaacaacaagcacttcctcatcgtctttgtccacgcgctggagcagcagaaggactttgcggtgcgcgacaggtgcagcctggcctcgctgctgaccatcgcgctgcacggcaagctggagtactacaccagcatcatgaaggagctgctggtggacctcattgacgcctcggccgccaagaaccccaagctcatgctgcggcgcacagagtctgtggtggagaagatgctcaccaactggatgtccatctgcatgtacagctgtctgcgggagacggtgggggagccattcttcctgctgctgtgtgccatcaagcagcaaatcaacaagggctccatcgacgccatcacaggcaaggcccgctacacactcaatgaggagtggctgctgcgggagaacatcgaggccaagccccggaacctgaacgtgtccttccagggctgtggcatggactcgctgagcgtgcgggccatggacaccgacacgctgacacaggtcaaggagaagatcctggaggccttctgcaagaatgtgccctactcccagtggccgcgtgcagaggacgtcgaccttgagtggttcgcctccagcacacagagctacatccttcgggacctggacgacacctcagtggtggaagacggccgcaagaagcttaacacgctggcccattacaagatccctgaaggtgcctccctggccatgagtctcatagacaagaaggacaacacactgggccgagtgaaagacttggacacagagaagtatttccatttggtgctgcctacggacgagctggcggagcccaagaagtctcaccggcagagccatcgcaagaaggtgctcccggaaatctacctgacccgcctgctctccaccaagggcacgttgcagaagtttctggatgacctgttcaaggccattctgagtatccgtgaagacaagcccccactggctgtcaagtactttttcgacttcctggaggagcaggctgagaagaggggaatctccgaccccgacaccctacacatctggaagaccaacagccttcctctccggttctgggtgaacatcctgaagaacccccagtttgtctttgacatcgacaagacagaccacatcgacgcctgcctttcagtcatcgcgcaggccttcatcgacgcctgctccatctctgacctgcagctgggcaaggattcgccaaccaacaagctcctctacgccaaggagattcctgagtaccggaagatcgtgcagcgctactacaagcagatccaggacatgacgccgctcagcgagcaagagatgaatgcccatctggccgaggagtcgaggaaataccagaatgagttcaacaccaatgtggccatggcagagatttataagtacgccaagaggtatcggccgcagatcatggccgcgctggaggccaaccccacggcccggaggacacaactgcagcacaagtttgagcaggtggtggctttgatggaggacaacatctacgagtgctacagtgaggcctgagacacatggagagttggtcaggctgctgctgggagaaatggacgcccactgggcctcaacttgatcttctaccccgtgcctgtgactcagactgggaaatactgagcagagacggctggggcgggggcaggaggaggggctgctctctgagacaggggcgcccccgccttgacccctgggcacctccatcccctcccacctgtccccagatcagtctctgggatggaggccagagagctggtcaggctcccccatctgcccagcacggcctgcactgtgcccacccacttgctccacaacgtccagttggtcctgctgccaagagccccgtgcatccaggcggccaagcacaaactgggggagaggaggccgccagcccggaggctgcagcccagaaactctacctcatccacactggtgcagggagccctccttgaactgacctttgattggtttctgcttcaactaccaaaatgttatctccacttccccctcacccgtagaggatcctggccacagacagtttcaagtagtgtcagatttttgttgcttgggcggctgttggtagagtgggcagtgcccgcgccatggggtgctctgtgggcttctccaggagcagggagggtggaggggagggatggggggcacaggagctgggagccccgtctccaggaaaaggagaggggttaagatgcaccgaggctgtagctgggctacttgatcttgctgaaagtgtttctaaagatagcaccacttttttttttaaagcttttatatattaaaaaacgtatcatgcaccaactgtgaatagctgccgcttgcgcagaggacccggggaggggtcccgagaggctccccatgcaacactggaaatgactgttccagagagcgggcagacctggcagagcgcccctggcgcctgagactaccacccactccgttcctgccagaaacgaccctctgtggccgatgggccatgcgggcccctcgcagccaactcagccagtgttgggactggctcagagcccatgggggctggaggggggcagctgggactctggaatcttctttataataaaagccttacggacaaacctaaaaaaaaaaaaaaaaaaaaaaaaaaaaaaaaaaaaaaaaaaaaaaaaaaaaaaaaaaaaaaaaaaaaaaaaaaaaaaaaaaaagggggggggcgcaaaaaattcccccgggggggcccaagttttccgcggatccccgcgttttctttgtcaccaagggggcggcccattatgaggggcgcgagtattattaagccgaagaggagcaccgggccggggcctggttataacccagcgctttctgttcgcggggagaaaactcgtcgcctagcgggggcggggctcttgtgggggagggagcccctctatcttcttgtgggggcgggggcgcaaccttcctgtggggcaccaccctcccgcaaaccgagaagattattaaacgcgcctctaagcggggaatactataacaccattttcacgggttgcttattcgtggtgttcacacccagcggtacttattgtcccgtgcgcgtcctagaaatatttgtgccaccggcgagctcttgattttggtgcaacaaacttttttccccggacggtggtgtgtgttataattag

SEQ ID NO: 464069 - DNA, 7139 bp, Homo sapiens
  misc_feature (155)..(155): n is a, c, g, or t
  misc_feature (7036)..(7036): n is a, c, g, or t
  misc_feature (7038)..(7038): n is a, c, g, or t
ccgggctgcgcggcgaggctgagccgggcccgggcgccggggccgggggcggctggcgcgggcaggaagcgcctcgcggcccgggcccgccccccgcctctcgcccgctccgggctcccggctcccggccggcgctcgtcccatgcaatagccgngccgcgcagcccgcgcacgcccggatggctcttcgcgccgcgggcggcgcaccctttagcggcccggcgccgctgccagccccccgccgttccagacgccgccgcggtgcccggtgccgctgctgttgctgctgctcctgggggcggcgcgggccggcgccctggagatccagcgtcggttcccctcgcccacgcccaccaacaacttcgccctggacggcgcggcggggaccgtgtacctggcggccgtcaaccgcctctatcagctgtcgggcgccaacctgagcctggaggccgaggcggccgtgggcccggtgcccgacagcccgctgtgtcacgctccgcagctgccgcaggcctcgtgcgagcacccgcggcgcctcacggacaactacaacaagatcctgcagctggaccccggccagggcctggtagtcgtgtgcgggtccatctaccagggcttctgccagctgcggcgccggggcaacatctcggccgtggccgtgcgcttcccgcccgccgcgccgcccgccgagcccgtcacggtgttccccagcatgctgaacgtggcggccaaccacccgaacgcgtccaccgtggggctagttctgcctcccgccgcgggcgcggggggcagccgcctgctcgtgggcgccacgtacaccggttacggcagctccttcttcccgcgcaaccgcagcctggaggaccaccgcttcgagaacacgcccgagatcgccatccgctccctggacacgcgcggcgacctggccaagctcttcaccttcgacctcaacccctccgacgacaacatcctcaagatcaagcagggcgccaaggagcagcacaagctgggcttcgtgagcgccttcctgcacccgtccgacccgccgccgggtgcacagtcctacgcgtacctggcgctcaacagcgaggcgcgcgcgggcgacaaggagagccaggcgcggagcctgctggcgcgcatctgcctgccccacggcgccggcggcgacgccaagaagctcaccgagtcctacatccagttgggcttgcagtgcgcgggcggcgcgggccgcggcgacctctacagccgcctggtgtcggtcttcccagcccgggagcggctctttgctgtcttcgagcggccccaggggtcccccgcggcccgcgctgctccggccgcactctgcgccttccgcttcgccgacgtgcgagccgccatccgagctgcgcgcaccgcctgcttcgtggaaccggcgcccgacgtggtggcggtgctcgacagcgtggtgcagggcacgggaccggcctgcgagcgcaagctcaacatccagctccagccagagcagctggactgtggagctgctcacctgcagcacccgctgtccatcctgcagcccctgaaggccacgcccgtgttccgcgccccgggcctcacctccgtggccgtggccagcgtcaacaactacacagcggtcttcctgggcacggtcaacgggaggcttctcaagatcaacctgaacgagagcatgcaggtggtgagcaggcgggtggtgactgtggcctatggggagcccgtgcaccatgtcatgcagtttgacccagcagactccggttacctttacctgatgacgtcccaccagatggccagggtgaaggtcgccgcctgcaacgtgcactccacctgtggggactgcgtgggtgcggcggacgcctactgcggctggtgtgccctggagacgcggtgcaccttgcagcaggactgcaccaattccagccagcagcatttctggaccagtgccagcgagggccccagccgctgtcctgccatgaccgtcctgccttccgagatcgatgtgcgccaggagtacccaggcatgatcctgcagatctcgggcagcctgcccagcctcagtggcatggagatggcctgtgactatgggaacaacatccgcactgtggctcgggtcccaggccctgcctttggtcaccagattgcctactgcaacctcctgccgagggaccagtttccgcccttcccccccaaccaggaccacgtgactgttgagatgtctgtgagggtcaatgggcggaacatcgtcaaggccaatttcaccatctacgactgcagccgcactgcacaagtgtacccccacacagcctgtaccagctgcctgtcggcacagtggccctgtttctggtgcagccagcagcactcctgtgtttccaaccagtctcggtgcgaggcctcaccaaaccccacgagccctcaggactgcccccggaccctgctctcacccctggcacccgtgcctaccggtggctcccagaacatcctggtgcctctggccaacactgcctttttccagggtgcagccctggagtgtagttttgggctggaggagatcttcgaggctgtgtgggtgaatgagtctgttgtacgctgtgaccaggtggtgctgcacacgacccggaagagccaggtgttcccgctcagcctccaactaaaggggcggccagcccgattcctggacagccctgagcccatgacagtcatggtctataactgtgccatgggcagccccgactgttcccagtgcctgggccgcgaagacctgggtcacctgtgcgtgtggagtgatggctgccgcctgcgggggcctctgcagcccatggctggcacctgccccgcccccgagatccgcgcgattgagcccctgagtggcccgttggacggtgggaccctgctgaccatccgaggaaggaacctgggccggcggctcagtgacgtggcccacggcgtgtggattggtggtgtggcctgtgagccactgcctgacagatacacggtgtcggaggagatcgtgtgtgtcacagggccagccccaggaccgctctcaggtgtggtgaccgtgaacgcctctaaggagggcaagtcccgggaccgcttctcctacgtgctgcccctggtccactccctggagcctaccatgggccccaaggccgggggcaccaggatcaccatccatgggaatgacctccatgtaggctccgagctccaggtcctggtgaacgacacagacccctgcacggagctgatgcgcacagataccagcatcgcctgcaccatgcctgagggggccctgccggctccggtgcctgtgtgtgtgcgcttcgagcgtcggggctgcgtgcacggcaacctcaccttctggtacatgcagaacccggtcatcacggccatcagtccccgccgcagccctgtcagtggcggcaggaccatcacagtggctggtgagcgtttccacatggtgcagaatgtgtccatggccgtccaccacattggccgggagcccacgctctgcaaggttctcaactccaccctcatcacctgcccgtcccccggggccctgagcaacgcatcagcgccagtggacttcttcatcaatgggcgggcctacgcagacgaggtggctgtggctgaggagctactggaccccgaggaggcacagcggggcagcaggttccgcctggactacctccccaacccacagttctctacggccaagagggagaagtggatcaagcaccaccccggggagcctctcaccctcgttatccacaaggagcaggacagcctggggctccagagtcacgagtaccgggtcaagataggccaagtaagctgcgacatccagattgtctctgacagaatcatccactgctcggtcaacgagtccctgggcgcggccgtggggcagctgcccatcacaatccaggtagggaacttcaaccagaccatcgccacactgcagctggggggcagcgagacggccatcatcgtgtccatcgtcatctgcagcgtcctgctgctgctctccgtggtggccctgttcgtcttctgtaccaagagccgacgtgctgagcgttactggcagaagacgctgctgcagatggaggagatggaatctcagatccgagaggaaatccgcaaaggcttcgctgagctgcagacagacatgacagatctcaccaaggagctgaaccgcagccagggcatccccttcctggagtataagcacttcgtgacccgcaccttcttccccaagtgttcctccctttatgaagagcgttacgtgctgccctcccagaccctcaactcccagggcagctcccaggcacaggaaacccacccactgctgggagagtggaagattcctgagagctgccggcccaacatggaagagggaattagcttgttctcctcactactcaacaacaagcacttcctcatcgtctttgtccacgcgctggagcagcagaaggactttgcggtgcgcgacaggtgcagcctggcctcgctgctgaccatcgcgctgcacggcaagctggagtactacaccagcatcatgaaggagctgctggtggacctcattgacgcctcggccgccaagaaccccaagctcatgctgcggcgcacagagtctgtggtggagaagatgctcaccaactggatgtccatctgcatgtacagctgtctgcgggagacggtgggggagccattcttcctgctgctgtgtgccatcaagcagcaaatcaacaagggctccatcgacgccatcacaggcaaggcccgctacacactcaatgaggagtggctgctgcgggagaacatcgaggccaagccccggaacctgaacgtgtccttccagggctgtggcatggactcgctgagcgtgcgggccatggacaccgacacgctgacacaggtcaaggagaagatcctggaggccttctgcaagaatgtgccctactcccagtggccgcgtgcagaggacgtcgaccttgagtggttcgcctccagcacacagagctacatccttcgggacctggacgacacctcagtggtggaagacggccgcaagaagcttaacacgctggcccattacaagatccctgaaggtgcctccctggccatgagtctcatagacaagaaggacaacacactgggccgagtgaaagacttggacacagagaagtatttccatttggtgctgcctacggacgagctggcggagcccaagaagtctcaccggcagagccatcgcaagaaggtgctcccggaaatctacctgacccgcctgctctccaccaagggcacgttgcagaagtttctggatgacctgttcaaggccattctgagtatccgtgaagacaagcccccactggctgtcaagtactttttcgacttcctggaggagcaggctgagaagaggggaatctccgaccccgacaccctacacatctggaagaccaacagccttcctctccggttctgggtgaacatcctgaagaacccccagtttgtctttgacatcgacaagacagaccacatcgacgcctgcctttcagtcatcgcgcaggccttcatcgacgcctgctccatctctgacctgcagctgggcaaggattcgccaaccaacaagctcctctacgccaaggagattcctgagtaccggaagatcgtgcagcgctactacaagcagatccaggacatgacgccgctcagcgagcaagagatgaatgcccatctggccgaggagtcgaggaaataccagaatgagttcaacaccaatgtggccatggcagagatttataagtacgccaagaggtatcggccgcagatcatggccgcgctggaggccaaccccacggcccggaggacacaactgcagcacaagtttgagcaggtggtggctttgatggaggacaacatctacgagtgctacagtgaggcctgagacacatggagagttggtcaggctgctgctgggagaaatggacgcccactgggcctcaacttgatcttctaccccgtgcctgtgactcagactgggaaatactgagcagagacggctggggcgggggcaggaggaggggctgctctctgagacaggggcgcccccgccttgacccctgggcacctccatcccctcccacctgtccccagatcagtctctgggatggaggccagagagctggtcaggctcccccatctgcccagcacggcctgcactgtgcccacccacttgctccacaacgtccagttggtcctgctgccaagagccccgtgcatccaggcggccaagcacaaactgggggagaggaggccgccagcccggaggctgcagcccagaaactctacctcatccacactggtgcagggagccctccttgaactgacctttgattggtttctgcttcaactaccaaaatgttatctccacttccccctcacccgtagaggatcctggccacagacagtttcaagtagtgtcagatttttgttgcttgggcggctgttggtagagtgggcagtgcccgcgccatggggtgctctgtgggcttctccaggagcagggagggtggaggggagggatggggggcacaggagctgggagccccgtctccaggaaaaggagaggggttaagatgcaccgaggctgtagctgggctacttgatcttgctgaaagtgtttctaaagatagcaccacttttttttttaaagcttttatatattaaaaaacgtatcatgcaccaactgtgaatagctgccgcttgcgcagaggacccggggaggggtcccgagaggctccccatgcaacactggaaatgactgttccagagagcgggcagacctggcagagcgcccctggcgcctgagactaccacccactccgttcctgccagaaacgaccctctgtggccgatgggccatgcgggcccctcgcagccaactcagccagtgttgggactggctcagagcccatgggggctggaggggggcagctgggactctggaatcttctttataaagctnangaaaactaaaaagaaaaaaataaaaaacacggagatatgggagaaaagatgaaggaggaaagttcgaccgttttaagggaaagggacaagagacaatacga

SEQ ID NO: 464070 - DNA, 7083 bp, Homo sapiens
  misc_feature (155)..(155): n is a, c, g, or t
ccgggctgcgcggcgaggctgagccgggcccgggcgccggggccgggggcggctggcgcgggcaggaagcgcctcgcggcccgggcccgccccccgcctctcgcccgctccgggctcccggctcccggccggcgctcgtcccatgcaatagccgngccgcgcagcccgcgcacgcccggatggctcttcgcgccgcgggcggcgcaccctttagcggcccggcgccgctgccagccccccgccgttccagacgccgccgcggtgcccggtgccgctgctgttgctgctgctcctgggggcggcgcgggccggcgccctggagatccagcgtcggttcccctcgcccacgcccaccaacaacttcgccctggacggcgcggcggggaccgtgtacctggcggccgtcaaccgcctctatcagctgtcgggcgccaacctgagcctggaggccgaggcggccgtgggcccggtgcccgacagcccgctgtgtcacgctccgcagctgccgcaggcctcgtgcgagcacccgcggcgcctcacggacaactacaacaagatcctgcagctggaccccggccagggcctggtagtcgtgtgcgggtccatctaccagggcttctgccagctgcggcgccggggcaacatctcggccgtggccgtgcgcttcccgcccgccgcgccgcccgccgagcccgtcacggtgttccccagcatgctgaacgtggcggccaaccacccgaacgcgtccaccgtggggctagttctgcctcccgccgcgggcgcggggggcagccgcctgctcgtgggcgccacgtacaccggttacggcagctccttcttcccgcgcaaccgcagcctggaggaccaccgcttcgagaacacgcccgagatcgccatccgctccctggacacgcgcggcgacctggccaagctcttcaccttcgacctcaacccctccgacgacaacatcctcaagatcaagcagggcgccaaggagcagcacaagctgggcttcgtgagcgccttcctgcacccgtccgacccgccgccgggtgcacagtcctacgcgtacctggcgctcaacagcgaggcgcgcgcgggcgacaaggagagccaggcgcggagcctgctggcgcgcatctgcctgccccacggcgccggcggcgacgccaagaagctcaccgagtcctacatccagttgggcttgcagtgcgcgggcggcgcgggccgcggcgacctctacagccgcctggtgtcggtcttcccagcccgggagcggctctttgctgtcttcgagcggccccaggggtcccccgcggcccgcgctgctccggccgcactctgcgccttccgcttcgccgacgtgcgagccgccatccgagctgcgcgcaccgcctgcttcgtggaaccggcgcccgacgtggtggcggtgctcgacagcgtggtgcagggcacgggaccggcctgcgagcgcaagctcaacatccagctccagccagagcagctggactgtggagctgctcacctgcagcacccgctgtccatcctgcagcccctgaaggccacgcccgtgttccgcgccccgggcctcacctccgtggccgtggccagcgtcaacaactacacagcggtcttcctgggcacggtcaacgggaggcttctcaagatcaacctgaacgagagcatgcaggtggtgagcaggcgggtggtgactgtggcctatggggagcccgtgcaccatgtcatgcagtttgacccagcagactccggttacctttacctgatgacgtcccaccagatggccagggtgaaggtcgccgcctgcaacgtgcactccacctgtggggactgcgtgggtgcggcggacgcctactgcggctggtgtgccctggagacgcgccagcagcatttctggaccagtgccagcgagggccccagccgctgtcctgccatgaccgtcctgccttccgagatcgatgtgcgccaggagtacccaggcatgatcctgcagatctcgggcagcctgcccagcctcagtggcatggagatggcctgtgactatgggaacaacatccgcactgtggctcgggtcccaggccctgcctttggtcaccagattgcctactgcaacctcctgccgagggaccagtttccgcccttcccccccaaccaggaccacgtgactgttgagatgtctgtgagggtcaatgggcggaacatcgtcaaggccaatttcaccatctacgactgcagccgcactgcacaagtgtacccccacacagcctgtaccagctgcctgtcggcacagtggccctgtttctggtgcagccagcagcactcctgtgtttccaaccagtctcggtgcgaggcctcaccaaaccccacgagccctcaggactgcccccggaccctgctctcacccctggcacccgtgcctaccggtggctcccagaacatcctggtgcctctggccaacactgcctttttccagggtgcagccctggagtgtagttttgggctggaggagatcttcgaggctgtgtgggtgaatgagtctgttgtacgctgtgaccaggtggtgctgcacacgacccggaagagccaggtgttcccgctcagcctccaactaaaggggcggccagcccgattcctggacagccctgagcccatgacagtcatggtctataactgtgccatgggcagccccgactgttcccagtgcctgggccgcgaagacctgggtcacctgtgcgtgtggagtgatggctgccgcctgcgggggcctctgcagcccatggctggcacctgccccgcccccgagatccgcgcgattgagcccctgagtggcccgttggacggtgggaccctgctgaccatccgaggaaggaacctgggccggcggctcagtgacgtggcccacggcgtgtggattggtggtgtggcctgtgagccactgcctgacagatacacggtgtcggaggagatcgtgtgtgtcacagggccagccccaggaccgctctcaggtgtggtgaccgtgaacgcctctaaggagggcaagtcccgggaccgcttctcctacgtgctgcccctggtccactccctggagcctaccatgggccccaaggccgggggcaccaggatcaccatccatgggaatgacctccatgtaggctccgagctccaggtcctggtgaacgacacagacccctgcacggagctgatgcgcacagataccagcatcgcctgcaccatgcctgagggggccctgccggctccggtgcctgtgtgtgtgcgcttcgagcgtcggggctgcgtgcacggcaacctcaccttctggtacatgcagaacccggtcatcacggccatcagtccccgccgcagccctgtcagtggcggcaggaccatcacagtggctggtgagcgtttccacatggtgcagaatgtgtccatggccgtccaccacattggccgggagcccacgctctgcaaggttctcaactccaccctcatcacctgcccgtcccccggggccctgagcaacgcatcagcgccagtggacttcttcatcaatgggcgggcctacgcagacgaggtggctgtggctgaggagctactggaccccgaggaggcacagcggggcagcaggttccgcctggactacctccccaacccacagttctctacggccaagagggagaagtggatcaagcaccaccccggggagcctctcaccctcgttatccacaaggagcaggacagcctggggctccagagtcacgagtaccgggtcaagataggccaaatccaggtagggaacttcaaccagaccatcgccacactgcagctggggggcagcgagacggccatcatcgtgtccatcgtcatctgcagcgtcctgctgctgctctccgtggtggccctgttcgtcttctgtaccaagagccgacgtgctgagcgttactggcagaagacgctgctgcagatggaggagatggaatctcagatccgagaggaaatccgcaaaggcttcgctgagctgcagacagacatgacagatctcaccaaggagctgaaccgcagccagggcatccccttcctggagtataagcacttcgtgacccgcaccttcttccccaagtgttcctccctttatgaagagcgttacgtgctgccctcccagaccctcaactcccagggcagctcccaggcacaggaaacccacccactgctgggagagtggaagattcctgagagctgccggcccaacatggaagagggaattagcttgttctcctcactactcaacaacaagcacttcctcatcgtctttgtccacgcgctggagcagcagaaggactttgcggtgcgcgacaggtgcagcctggcctcgctgctgaccatcgcgctgcacggcaagctggagtactacaccagcatcatgaaggagctgctggtggacctcattgacgcctcggccgccaagaaccccaagctcatgctgcggcgcacagagtctgtggtggagaagatgctcaccaactggatgtccatctgcatgtacagctgtctgcgggagacggtgggggagccattcttcctgctgctgtgtgccatcaagcagcaaatcaacaagggctccatcgacgccatcacaggcaaggcccgctacacactcaatgaggagtggctgctgcgggagaacatcgaggccaagccccggaacctgaacgtgtccttccagggctgtggcatggactcgctgagcgtgcgggccatggacaccgacacgctgacacaggtcaaggagaagatcctggaggccttctgcaagaatgtgccctactcccagtggccgcgtgcagaggacgtcgaccttgagtggttcgcctccagcacacagagctacatccttcgggacctggacgacacctcagtggtggaagacggccgcaagaagcttaacacgctggcccattacaagatccctgaaggtgcctccctggccatgagtctcatagacaagaaggacaacacactgggccgagtgaaagacttggacacagagaagtatttccatttggtgctgcctacggacgagctggcggagcccaagaagtctcaccggcagagccatcgcaagaaggtgctcccggaaatctacctgacccgcctgctctccaccaagggcacgttgcagaagtttctggatgacctgttcaaggccattctgagtatccgtgaagacaagcccccactggctgtcaagtactttttcgacttcctggaggagcaggctgagaagaggggaatctccgaccccgacaccctacacatctggaagaccaacagccttcctctccggttctgggtgaacatcctgaagaacccccagtttgtctttgacatcgacaagacagaccacatcgacgcctgcctttcagtcatcgcgcaggccttcatcgacgcctgctccatctctgacctgcagctgggcaaggattcgccaaccaacaagctcctctacgccaaggagattcctgagtaccggaagatcgtgcagcgctactacaagcagatccaggacatgacgccgctcagcgagcaagagatgaatgcccatctggccgaggagtcgaggaaataccagaatgagttcaacaccaatgtggccatggcagagatttataagtacgccaagaggtatcggccgcagatcatggccgcgctggaggccaaccccacggcccggaggacacaactgcagcacaagtttgagcaggtggtggctttgatggaggacaacatctacgagtgctacagtgaggcctgagacacatggagagttggtcaggctgctgctgggagaaatggacgcccactgggcctcaacttgatcttctaccccgtgcctgtgactcagactgggaaatactgagcagagacggctggggcgggggcaggaggaggggctgctctctgagacaggggcgcccccgccttgacccctgggcacctccatcccctcccacctgtccccagatcagtctctgggatggaggccagagagctggtcaggctcccccatctgcccagcacggcctgcactgtgcccacccacttgctccacaacgtccagttggtcctgctgccaagagccccgtgcatccaggcggccaagcacaaactgggggagaggaggccgccagcccggaggctgcagcccagaaactctacctcatccacactggtgcagggagccctccttgaactgacctttgattggtttctgcttcaactaccaaaatgttatctccacttccccctcacccgtagaggatcctggccacagacagtttcaagtagtgtcagatttttgttgcttgggcggctgttggtagagtgggcagtgcccgcgccatggggtgctctgtgggcttctccaggagcagggagggtggaggggagggatggggggcacaggagctgggagccccgtctccaggaaaaggagaggggttaagatgcaccgaggctgtagctgggctacttgatcttgctgaaagtgtttctaaagatagcaccacttttttttttaaagcttttatatattaaaaaacgtatcatgcaccaactgtgaatagctgccgcttgcgcagaggacccggggaggggtcccgagaggctccccatgcaacactggaaatgactgttccagagagcgggcagacctggcagagcgcccctggcgcctgagactaccacccactccgttcctgccagaaacgaccctctgtggccgatgggccatgcgggcccctcgcagccaactcagccagtgttgggactggctcagagcccatgggggctggaggggggcagctgggactctggaatcttctttataataaaagccttacggacaaacctaaaaaaaaacggcacgagggggggccccgtaccacaatttgcccttatagtgaggtgtatttacaatttaactggccgccggttttacaaccttttggactgggaaaaaccctgggctttaccccaaactttaaacggctttgctgaaaaataccc

SEQ ID NO: 464071 - DNA, 5181 bp, Homo sapiens
taaatcagctcggtcccatggttagcagaggcccagcctcagtggcatggagatggcctgtgactatgggaacaacatccgcactgtggctcgggtcccaggccctgcctttggtcaccagattgcctactgcaacctcctgccgagggaccagtttccgcccttcccccccaaccaggaccacgtgactgttgagatgtctgtgagggtcaatgggcggaacatcgtcaaggccaatttcaccatctacgactgcagccgcactgcacaagtgtacccccacacagcctgtaccagctgcctgtcggcacagtggccctgtttctggtgcagccagcagcactcctgtgtttccaaccagtctcggtgcgaggcctcaccaaaccccacgagccctcaggactgcccccggaccctgctctcacccctggcacccgtgcctaccggtggctcccagaacatcctggtgcctctggccaacactgcctttttccagggtgcagccctggagtgtagttttgggctggaggagatcttcgaggctgtgtgggtgaatgagtctgttgtacgctgtgaccaggtggtgctgcacacgacccggaagagccaggtgttcccgctcagcctccaactaaaggggcggccagcccgattcctggacagccctgagcccatgacagtcatggtctataactgtgccatgggcagccccgactgttcccagtgcctgggccgcgaagacctgggtcacctgtgcgtgtggagtgatggctgccgcctgcgggggcctctgcagcccatggctggcacctgccccgcccccgagatccgcgcgattgagcccctgagtggcccgttggacggtgggaccctgctgaccatccgaggaaggaacctgggccggcggctcagtgacgtggcccacggcgtgtggattggtggtgtggcctgtgagccactgcctgacagatacacggtgtcggaggagatcgtgtgtgtcacagggccagccccaggaccgctctcaggtgtggtgaccgtgaacgcctctaaggagggcaagtcccgggaccgcttctcctacgtgctgcccctggtccactccctggagcctaccatgggccccaaggccgggggcaccaggatcaccatccatgggaatgacctccatgtaggctccgagctccaggtcctggtgaacgacacagacccctgcacggagctgatgcgcacagataccagcatcgcctgcaccatgcctgagggggccctgccggctccggtgcctgtgtgtgtgcgcttcgagcgtcggggctgcgtgcacggcaacctcaccttctggtacatgcagaacccggtcatcacggccatcagtccccgccgcagccctgtcagtggcggcaggaccatcacagtggctggtgagcgtttccacatggtgcagaatgtgtccatggccgtccaccacattggccgggagcccacgctctgcaaggttctcaactccaccctcatcacctgcccgtcccccggggccctgagcaacgcatcagcgccagtggacttcttcatcaatgggcgggcctacgcagacgaggtggctgtggctgaggagctactggaccccgaggaggcacagcggggcagcaggttccgcctggactacctccccaacccacagttctctacggccaagagggagaagtggatcaagcaccaccccggggagcctctcaccctcgttatccacaaggagcaggacagcctggggctccagagtcacgagtaccgggtcaagataggccaagtaagctgcgacatccagattgtctctgacagaatcatccactgctcggtcaacgagtccctgggcgcggccgtggggcagctgcccatcacaatccaggtagggaacttcaaccagaccatcgccacactgcagctggggggcagcgagacggccatcatcgtgtccatcgtcatctgcagcgtcctgctgctgctctccgtggtggccctgttcgtcttctgtaccaagagccgacgtgctgagcgttactggcagaagacgctgctgcagatggaggagatggaatctcagatccgagaggaaatccgcaaaggcttcgctgagctgcagacagacatgacagatctcaccaaggagctgaaccgcagccagggcatccccttcctggagtataagcacttcgtgacccgcaccttcttccccaagtgttcctccctttatgaagagcgttacgtgctgccctcccagaccctcaactcccagggcagctcccaggcacaggaaacccacccactgctgggagagtggaagattcctgagagctgccggcccaacatggaagagggaattagcttgttctcctcactactcaacaacaagcacttcctcatcgtctttgtccacgcgctggagcagcagaaggactttgcggtgcgcgacaggtgcagcctggcctcgctgctgaccatcgcgctgcacggcaagctggagtactacaccagcatcatgaaggagctgctggtggacctcattgacgcctcggccgccaagaaccccaagctcatgctgcggcgcacagagtctgtggtggagaagatgctcaccaactggatgtccatctgcatgtacagctgtctgcgggagacggtgggggagccattcttcctgctgctgtgtgccatcaagcagcaaatcaacaagggctccatcgacgccatcacaggcaaggcccgctacacactcaatgaggagtggctgctgcgggagaacatcgaggccaagccccggaacctgaacgtgtccttccagggctgtggcatggactcgctgagcgtgcgggccatggacaccgacacgctgacacaggtcaaggagaagatcctggaggccttctgcaagaatgtgccctactcccagtggccgcgtgcagaggacgtcgaccttgagtggttcgcctccagcacacagagctacatccttcgggacctggacgacacctcagtggtggaagacggccgcaagaagcttaacacgctggcccattacaagatccctgaaggtgcctccctggccatgagtctcatagacaagaaggacaacacactgggccgagtgaaagacttggacacagagaagtatttccatttggtgctgcctacggacgagctggcggagcccaagaagtctcaccggcagagccatcgcaagaaggtgctcccggaaatctacctgacccgcctgctctccaccaagggcacgttgcagaagtttctggatgacctgttcaaggccattctgagtatccgtgaagacaagcccccactggctgtcaagtactttttcgacttcctggaggagcaggctgagaagaggggaatctccgaccccgacaccctacacatctggaagaccaacagccttcctctccggttctgggtgaacatcctgaagaacccccagtttgtctttgacatcgacaagacagaccacatcgacgcctgcctttcagtcatcgcgcaggccttcatcgacgcctgctccatctctgacctgcagctgggcaaggattcgccaaccaacaagctcctctacgccaaggagattcctgagtaccggaagatcgtgcagcgctactacaagcagatccaggacatgacgccgctcagcgagcaagagatgaatgcccatctggccgaggagtcgaggaaataccagaatgagttcaacaccaatgtggccatggcagagatttataagtacgccaagaggtatcggccgcagatcatggccgcgctggaggccaaccccacggcccggaggacacaactgcagcacaagtttgagcaggtggtggctttgatggaggacaacatctacgagtgctacagtgaggcctgagacacatggagagttggtcaggctgctgctgggagaaatggacgcccactgggcctcaacttgatcttctaccccgtgcctgtgactcagactgggaaatactgagcagagacggctggggcgggggcaggaggaggggctgctctctgagacaggggcgcccccgccttgacccctgggcacctccatcccctcccacctgtccccagatcagtctctgggatggaggccagagagctggtcaggctcccccatctgcccagcacggcctgcactgtgcccacccacttgctccacaacgtccagttggtcctgctgccaagagccccgtgcatccaggcggccaagcacaaactgggggagaggaggccgccagcccggaggctgcagcccagaaactctacctcatccacactggtgcagggagccctccttgaactgacctttgattggtttctgcttcaactaccaaaatgttatctccacttccccctcacccgtagaggatcctggccacagacagtttcaagtagtgtcagatttttgttgcttgggcggctgttggtagagtgggcagtgcccgcgccatggggtgctctgtgggcttctccaggagcagggagggtggaggggagggatggggggcacaggagctgggagccccgtctccaggaaaaggagaggggttaagatgcaccgaggctgtagctgggctacttgatcttgctgaaagtgtttctaaagatagcaccacttttttttttaaagcttttatatattaaaaaacgtatcatgcaccaactgtgaatagctgccgcttgcgcagaggacccggggaggggtcccgagaggctccccatgcaacactggaaatgactgttccagagagcgggcagacctggcagagcgcccctggcgcctgagactaccacccactccgttcctgccagaaacgaccctctgtggccgatgggccatgcgggcccctcgcagccaactcagccagtgttgggactggctcagagcccatgggggctggaggggggcagctgggactctggaatcttctttataataaaagccttacggacaaacctaaaaaaaaacggcacgagggggggccccgtaccacaatttgcccttatagtgaggtgtatttacaatttaactggccgccggttttacaaccttttggactgggaaaaaccctgggctttaccccaaactttaaacggctttgctgaaaaataccc

SEQ ID NO: 464072 - DNA, 2408 bp, Homo sapiens
gacttaggctagtaggaggccgggttttaaatcggccgaggccggaacctgaacgtgtccttccagggctgtggcatggactcgctgagcgtgcgggccatggacaccgacacgctgacacaggtcaaggagaagatcctggaggccttctgcaagaatgtgccctactcccagtggccgcgtgcagaggacgtcgaccttgagtggttcgcctccagcacacagagctacatccttcgggacctggacgacacctcagtggtggaagacggccgcaagaagcttaacacgctggcccattacaagatccctgaaggtgcctccctggccatgagtctcatagacaagaaggacaacacactgggccgagtgaaagacttggacacagagaagtatttccatttggtgctgcctacggacgagctggcggagcccaagaagtctcaccggcagagccatcgcaagaaggtgctcccggaaatctacctgacccgcctgctctccaccaagggcacgttgcagaagtttctggatgacctgttcaaggccattctgagtatccgtgaagacaagcccccactggctgtcaagtactttttcgacttcctggaggagcaggctgagaagaggggaatctccgaccccgacaccctacacatctggaagaccaacagccttcctctccggttctgggtgaacatcctgaagaacccccagtttgtctttgacatcgacaagacagaccacatcgacgcctgcctttcagtcatcgcgcaggccttcatcgacgcctgctccatctctgacctgcagctgggcaaggattcgccaaccaacaagctcctctacgccaaggagattcctgagtaccggaagatcgtgcagcgctactacaagcagatccaggacatgacgccgctcagcgagcaagagatgaatgcccatctggccgaggagtcgaggaaataccagaatgagttcaacaccaatgtggccatggcagagatttataagtacgccaagaggtatcggccgcagatcatggccgcgctggaggccaaccccacggcccggaggacacaactgcagcacaagtttgagcaggtggtggctttgatggaggacaacatctacgagtgctacagtgaggcctgagacacatggagagttggtcaggctgctgctgggagaaatggacgcccactgggcctcaacttgatcttctaccccgtgcctgtgactcagactgggaaatactgagcagagacggctggggcgggggcaggaggaggggctgctctctgagacaggggcgcccccgccttgacccctgggcacctccatcccctcccacctgtccccagatcagtctctgggatggaggccagagagctggtcaggctcccccatctgcccagcacggcctgcactgtgcccacccacttgctccacaacgtccagttggtcctgctgccaagagccccgtgcatccaggcggccaagcacaaactgggggagaggaggccgccagcccggaggctgcagcccagaaactctacctcatccacactggtgcagggagccctccttgaactgacctttgattggtttctgcttcaactaccaaaatgttatctccacttccccctcacccgtagaggatcctggccacagacagtttcaagtagtgtcagatttttgttgcttgggcggctgttggtagagtgggcagtgcccgcgccatggggtgctctgtgggcttctccaggagcagggagggtggaggggagggatggggggcacaggagctgggagccccgtctccaggaaaaggagaggggttaagatgcaccgaggctgtagctgggctacttgatcttgctgaaagtgtttctaaagatagcaccacttttttttttaaagcttttatatattaaaaaacgtatcatgcaccaactgtgaatagctgccgcttgcgcagaggacccggggaggggtcccgagaggctccccatgcaacactggaaatgactgttccagagagcgggcagacctggcagagcgcccctggcgcctgagactaccacccactccgttcctgccagaaacgaccctctgtggccgatgggccatgcgggcccctcgcagccaactcagccagtgttgggactggctcagagcccatgggggctggaggggggcagctgggactctggaatcttctttataataaaagccttacggacaaacctaaaaaaaaacggcacgagggggggccccgtaccacaatttgcccttatagtgaggtgtatttacaatttaactggccgccggttttacaaccttttggactgggaaaaaccctgggctttaccccaaactttaaacggctttgctgaaaaataccc

SEQ ID NO: 464073 - DNA, 2062 bp, Homo sapiens
ggtccctccatcccgggtcactgttgaaagacttggacacagagaagtatttccatttggtgctgcctacggacgagctggcggagcccaagaagtctcaccggcagagccatcgcaagaaggtgctcccggaaatctacctgacccgcctgctctccaccaagggcacgttgcagaagtttctggatgacctgttcaaggccattctgagtatccgtgaagacaagcccccactggctgtcaagtactttttcgacttcctggaggagcaggctgagaagaggggaatctccgaccccgacaccctacacatctggaagaccaacagccttcctctccggttctgggtgaacatcctgaagaacccccagtttgtctttgacatcgacaagacagaccacatcgacgcctgcctttcagtcatcgcgcaggccttcatcgacgcctgctccatctctgacctgcagctgggcaaggattcgccaaccaacaagctcctctacgccaaggagattcctgagtaccggaagatcgtgcagcgctactacaagcagatccaggacatgacgccgctcagcgagcaagagatgaatgcccatctggccgaggagtcgaggaaataccagaatgagttcaacaccaatgtggccatggcagagatttataagtacgccaagaggtatcggccgcagatcatggccgcgctggaggccaaccccacggcccggaggacacaactgcagcacaagtttgagcaggtggtggctttgatggaggacaacatctacgagtgctacagtgaggcctgagacacatggagagttggtcaggctgctgctgggagaaatggacgcccactgggcctcaacttgatcttctaccccgtgcctgtgactcagactgggaaatactgagcagagacggctggggcgggggcaggaggaggggctgctctctgagacaggggcgcccccgccttgacccctgggcacctccatcccctcccacctgtccccagatcagtctctgggatggaggccagagagctggtcaggctcccccatctgcccagcacggcctgcactgtgcccacccacttgctccacaacgtccagttggtcctgctgccaagagccccgtgcatccaggcggccaagcacaaactgggggagaggaggccgccagcccggaggctgcagcccagaaactctacctcatccacactggtgcagggagccctccttgaactgacctttgattggtttctgcttcaactaccaaaatgttatctccacttccccctcacccgtagaggatcctggccacagacagtttcaagtagtgtcagatttttgttgcttgggcggctgttggtagagtgggcagtgcccgcgccatggggtgctctgtgggcttctccaggagcagggagggtggaggggagggatggggggcacaggagctgggagccccgtctccaggaaaaggagaggggttaagatgcaccgaggctgtagctgggctacttgatcttgctgaaagtgtttctaaagatagcaccacttttttttttaaagcttttatatattaaaaaacgtatcatgcaccaactgtgaatagctgccgcttgcgcagaggacccggggaggggtcccgagaggctccccatgcaacactggaaatgactgttccagagagcgggcagacctggcagagcgcccctggcgcctgagactaccacccactccgttcctgccagaaacgaccctctgtggccgatgggccatgcgggcccctcgcagccaactcagccagtgttgggactggctcagagcccatgggggctggaggggggcagctgggactctggaatcttctttataataaaagccttacggacaaacctaaaaaaaaacggcacgagggggggccccgtaccacaatttgcccttatagtgaggtgtatttacaatttaactggccgccggttttacaaccttttggactgggaaaaaccctgggctttaccccaaactttaaacggctttgctgaaaaataccc

SEQ ID NO: 464074 - DNA, 1854 bp, Homo sapiens
cctggcttgctcaggtctcctggcttgctcaggtctcctgcttgctcagttcctggaggagcaggctgagaagaggggaatctccgaccccgacaccctacacatctggaagaccaacagccttcctctccggttctgggtgaacatcctgaagaacccccagtttgtctttgacatcgacaagacagaccacatcgacgcctgcctttcagtcatcgcgcaggccttcatcgacgcctgctccatctctgacctgcagctgggcaaggattcgccaaccaacaagctcctctacgccaaggagattcctgagtaccggaagatcgtgcagcgctactacaagcagatccaggacatgacgccgctcagcgagcaagagatgaatgcccatctggccgaggagtcgaggaaataccagaatgagttcaacaccaatgtggccatggcagagatttataagtacgccaagaggtatcggccgcagatcatggccgcgctggaggccaaccccacggcccggaggacacaactgcagcacaagtttgagcaggtggtggctttgatggaggacaacatctacgagtgctacagtgaggcctgagacacatggagagttggtcaggctgctgctgggagaaatggacgcccactgggcctcaacttgatcttctaccccgtgcctgtgactcagactgggaaatactgagcagagacggctggggcgggggcaggaggaggggctgctctctgagacaggggcgcccccgccttgacccctgggcacctccatcccctcccacctgtccccagatcagtctctgggatggaggccagagagctggtcaggctcccccatctgcccagcacggcctgcactgtgcccacccacttgctccacaacgtccagttggtcctgctgccaagagccccgtgcatccaggcggccaagcacaaactgggggagaggaggccgccagcccggaggctgcagcccagaaactctacctcatccacactggtgcagggagccctccttgaactgacctttgattggtttctgcttcaactaccaaaatgttatctccacttccccctcacccgtagaggatcctggccacagacagtttcaagtagtgtcagatttttgttgcttgggcggctgttggtagagtgggcagtgcccgcgccatggggtgctctgtgggcttctccaggagcagggagggtggaggggagggatggggggcacaggagctgggagccccgtctccaggaaaaggagaggggttaagatgcaccgaggctgtagctgggctacttgatcttgctgaaagtgtttctaaagatagcaccacttttttttttaaagcttttatatattaaaaaacgtatcatgcaccaactgtgaatagctgccgcttgcgcagaggacccggggaggggtcccgagaggctccccatgcaacactggaaatgactgttccagagagcgggcagacctggcagagcgcccctggcgcctgagactaccacccactccgttcctgccagaaacgaccctctgtggccgatgggccatgcgggcccctcgcagccaactcagccagtgttgggactggctcagagcccatgggggctggaggggggcagctgggactctggaatcttctttataataaaagccttacggacaaacctaaaaaaaaacggcacgagggggggccccgtaccacaatttgcccttatagtgaggtgtatttacaatttaactggccgccggttttacaaccttttggactgggaaaaaccctgggctttaccccaaactttaaacggctttgctgaaaaataccc

SEQ ID NO: 464075 - DNA, 1856 bp, Homo sapiens
cttgtgacaaggctccaacctcaggcccttgagggacaaagccagctctctcctccacaactgtccctcgactgcttcctaccccaccctaccctcactgtctttgtcaccctaccccacagccttcctctccggttctgggtgaacatcctgaagaacccccagtttgtctttgacatcgacaagacagaccacatcgacgcctgcctttcagtcatcgcgcaggccttcatcgacgcctgctccatctctgacctgcagctgggcaaggattcgccaaccaacaagctcctctacgccaaggagattcctgagtaccggaagatcgtgcagcgctactacaagcagatccaggacatgacgccgctcagcgagcaagagatgaatgcccatctggccgaggagtcgaggaaataccagaatgagttcaacaccaatgtggccatggcagagatttataagtacgccaagaggtatcggccgcagatcatggccgcgctggaggccaaccccacggcccggaggacacaactgcagcacaagtttgagcaggtggtggctttgatggaggacaacatctacgagtgctacagtgaggcctgagacacatggagagttggtcaggctgctgctgggagaaatggacgcccactgggcctcaacttgatcttctaccccgtgcctgtgactcagactgggaaatactgagcagagacggctggggcgggggcaggaggaggggctgctctctgagacaggggcgcccccgccttgacccctgggcacctccatcccctcccacctgtccccagatcagtctctgggatggaggccagagagctggtcaggctcccccatctgcccagcacggcctgcactgtgcccacccacttgctccacaacgtccagttggtcctgctgccaagagccccgtgcatccaggcggccaagcacaaactgggggagaggaggccgccagcccggaggctgcagcccagaaactctacctcatccacactggtgcagggagccctccttgaactgacctttgattggtttctgcttcaactaccaaaatgttatctccacttccccctcacccgtagaggatcctggccacagacagtttcaagtagtgtcagatttttgttgcttgggcggctgttggtagagtgggcagtgcccgcgccatggggtgctctgtgggcttctccaggagcagggagggtggaggggagggatggggggcacaggagctgggagccccgtctccaggaaaaggagaggggttaagatgcaccgaggctgtagctgggctacttgatcttgctgaaagtgtttctaaagatagcaccacttttttttttaaagcttttatatattaaaaaacgtatcatgcaccaactgtgaatagctgccgcttgcgcagaggacccggggaggggtcccgagaggctccccatgcaacactggaaatgactgttccagagagcgggcagacctggcagagcgcccctggcgcctgagactaccacccactccgttcctgccagaaacgaccctctgtggccgatgggccatgcgggcccctcgcagccaactcagccagtgttgggactggctcagagcccatgggggctggaggggggcagctgggactctggaatcttctttataataaaagccttacggacaaacctaaaaaaaaacggcacgagggggggccccgtaccacaatttgcccttatagtgaggtgtatttacaatttaactggccgccggttttacaaccttttggactgggaaaaaccctgggctttaccccaaactttaaacggctttgctgaaaaataccc

SEQ ID NO: 464076 - DNA, 1429 bp, Homo sapiens
cccacgaactgaggcagggctaccggccatggcccggctgactccgctgctcccctcagatcatggccgcgctggaggccaaccccacggcccggaggacacaactgcagcacaagtttgagcaggtggtggctttgatggaggacaacatctacgagtgctacagtgaggcctgagacacatggagagttggtcaggctgctgctgggagaaatggacgcccactgggcctcaacttgatcttctaccccgtgcctgtgactcagactgggaaatactgagcagagacggctggggcgggggcaggaggaggggctgctctctgagacaggggcgcccccgccttgacccctgggcacctccatcccctcccacctgtccccagatcagtctctgggatggaggccagagagctggtcaggctcccccatctgcccagcacggcctgcactgtgcccacccacttgctccacaacgtccagttggtcctgctgccaagagccccgtgcatccaggcggccaagcacaaactgggggagaggaggccgccagcccggaggctgcagcccagaaactctacctcatccacactggtgcagggagccctccttgaactgacctttgattggtttctgcttcaactaccaaaatgttatctccacttccccctcacccgtagaggatcctggccacagacagtttcaagtagtgtcagatttttgttgcttgggcggctgttggtagagtgggcagtgcccgcgccatggggtgctctgtgggcttctccaggagcagggagggtggaggggagggatggggggcacaggagctgggagccccgtctccaggaaaaggagaggggttaagatgcaccgaggctgtagctgggctacttgatcttgctgaaagtgtttctaaagatagcaccacttttttttttaaagcttttatatattaaaaaacgtatcatgcaccaactgtgaatagctgccgcttgcgcagaggacccggggaggggtcccgagaggctccccatgcaacactggaaatgactgttccagagagcgggcagacctggcagagcgcccctggcgcctgagactaccacccactccgttcctgccagaaacgaccctctgtggccgatgggccatgcgggcccctcgcagccaactcagccagtgttgggactggctcagagcccatgggggctggaggggggcagctgggactctggaatcttctttataataaaagccttacggacaaacctaaaaaaaaacggcacgagggggggccccgtaccacaatttgcccttatagtgaggtgtatttacaatttaactggccgccggttttacaaccttttggactgggaaaaaccctgggctttaccccaaactttaaacggctttgctgaaaaataccc

SEQ ID NO: 464077 - DNA, 5612 bp, Homo sapiens
  misc_feature (155)..(155): n is a, c, g, or t
ccgggctgcgcggcgaggctgagccgggcccgggcgccggggccgggggcggctggcgcgggcaggaagcgcctcgcggcccgggcccgccccccgcctctcgcccgctccgggctcccggctcccggccggcgctcgtcccatgcaatagccgngccgcgcagcccgcgcacgcccggatggctcttcgcgccgcgggcggcgcaccctttagcggcccggcgccgctgccagccccccgccgttccagacgccgccgcggtgcccggtgccgctgctgttgctgctgctcctgggggcggcgcgggccggcgccctggagatccagcgtcggttcccctcgcccacgcccaccaacaacttcgccctggacggcgcggcggggaccgtgtacctggcggccgtcaaccgcctctatcagctgtcgggcgccaacctgagcctggaggccgaggcggccgtgggcccggtgcccgacagcccgctgtgtcacgctccgcagctgccgcaggcctcgtgcgagcacccgcggcgcctcacggacaactacaacaagatcctgcagctggaccccggccagggcctggtagtcgtgtgcgggtccatctaccagggcttctgccagctgcggcgccggggcaacatctcggccgtggccgtgcgcttcccgcccgccgcgccgcccgccgagcccgtcacggtgttccccagcatgctgaacgtggcggccaaccacccgaacgcgtccaccgtggggctagttctgcctcccgccgcgggcgcggggggcagccgcctgctcgtgggcgccacgtacaccggttacggcagctccttcttcccgcgcaaccgcagcctggaggaccaccgcttcgagaacacgcccgagatcgccatccgctccctggacacgcgcggcgacctggccaagctcttcaccttcgacctcaacccctccgacgacaacatcctcaagatcaagcagggcgccaaggagcagcacaagctgggcttcgtgagcgccttcctgcacccgtccgacccgccgccgggtgcacagtcctacgcgtacctggcgctcaacagcgaggcgcgcgcgggcgacaaggagagccaggcgcggagcctgctggcgcgcatctgcctgccccacggcgccggcggcgacgccaagaagctcaccgagtcctacatccagttgggcttgcagtgcgcgggcggcgcgggccgcggcgacctctacagccgcctggtgtcggtcttcccagcccgggagcggctctttgctgtcttcgagcggccccaggggtcccccgcggcccgcgctgctccggccgcactctgcgccttccgcttcgccgacgtgcgagccgccatccgagctgcgcgcaccgcctgcttcgtggaaccggcgcccgacgtggtggcggtgctcgacagcgtggtgcagggcacgggaccggcctgcgagcgcaagctcaacatccagctccagccagagcagctggactgtggagctgctcacctgcagcacccgctgtccatcctgcagcccctgaaggccacgcccgtgttccgcgccccgggcctcacctccgtggccgtggccagcgtcaacaactacacagcggtcttcctgggcacggtcaacgggaggcttctcaagatcaacctgaacgagagcatgcaggtggtgagcaggcgggtggtgactgtggcctatggggagcccgtgcaccatgtcatgcagtttgacccagcagactccggttacctttacctgatgacgtcccaccagatggccagggtgaaggtcgccgcctgcaacgtgcactccacctgtggggactgcgtgggtgcggcggacgcctactgcggctggtgtgccctggagacgcgccagcagcatttctggaccagtgccagcgagggccccagccgctgtcctgccatgaccgtcctgccttccgagatcgatgtgcgccaggagtacccaggcatgatcctgcagatctcgggcagcctgcccagcctcagtggcatggagatggcctgtgactatgggaacaacatccgcactgtggctcgggtcccaggccctgcctttggtcaccagattgcctactgcaacctcctgccgagggaccagtttccgcccttcccccccaaccaggaccacgtgactgttgagatgtctgtgagggtcaatgggcggaacatcgtcaaggccaatttcaccatctacgactgcagccgcactgcacaagtgtacccccacacagcctgtaccagctgcctgtcggcacagtggccctgtttctggtgcagccagcagcactcctgtgtttccaaccagtctcggtgcgaggcctcaccaaaccccacgagccctcaggactgcccccggaccctgctctcacccctggcacccgtgcctaccggtggctcccagaacatcctggtgcctctggccaacactgcctttttccagggtgcagccctggagtgtagttttgggctggaggagatcttcgaggctgtgtgggtgaatgagtctgttgtacgctgtgaccaggtggtgctgcacacgacccggaagagccaggtgttcccgctcagcctccaactaaaggggcggccagcccgattcctggacagccctgagcccatgacagtcatggtctataactgtgccatgggcagccccgactgttcccagtgcctgggccgcgaagacctgggtcacctgtgcgtgtggagtgatggctgccgcctgcgggggcctctgcagcccatggctggcacctgccccgcccccgagatccgcgcgattgagcccctgagtggcccgttggacggtgggaccctgctgaccatccgaggaaggaacctgggccggcggctcagtgacgtggcccacggcgtgtggattggtggtgtggcctgtgagccactgcctgacagatacacggtgtcggaggagatcgtgtgtgtcacagggccagccccaggaccgctctcaggtgtggtgaccgtgaacgcctctaaggagggcaagtcccgggaccgcttctcctacgtgctgcccctggtccactccctggagcctaccatgggccccaaggccgggggcaccaggatcaccatccatgggaatgacctccatgtaggctccgagctccaggtcctggtgaacgacacagacccctgcacggagctgatgcgcacagataccagcatcgcctgcaccatgcctgagggggccctgccggctccggtgcctgtgtgtgtgcgcttcgagcgtcggggctgcgtgcacggcaacctcaccttctggtacatgcagaacccggtcatcacggccatcagtccccgccgcagccctgtcagtggcggcaggaccatcacagtggctggtgagcgtttccacatggtgcagaatgtgtccatggccgtccaccacattggccgggagcccacgctctgcaaggttctcaactccaccctcatcacctgcccgtcccccggggccctgagcaacgcatcagcgccagtggacttcttcatcaatgggcgggcctacgcagacgaggtggctgtggctgaggagctactggaccccgaggaggcacagcggggcagcaggttccgcctggactacctccccaacccacagttctctacggccaagagggagaagtggatcaagcaccaccccggggagcctctcaccctcgttatccacaaggagcaggacagcctggggctccagagtcacgagtaccgggtcaagataggccaagtaagctgcgacatccagattgtctctgacagaatcatccactgctcggtcaacgagtccctgggcgcggccgtggggcagctgcccatcacaatccaggtagggaacttcaaccagaccatcgccacactgcagctggggggcagcgagacggccatcatcgtgtccatcgtcatctgcagcgtcctgctgctgctctccgtggtggccctgttcgtcttctgtaccaagagccgacgtgctgagcgttactggcagaagacgctgctgcagatggaggagatggaatctcagatccgagaggaaatccgcaaaggcttcgctgagctgcagacagacatgacagatctcaccaaggagctgaaccgcagccagggcatccccttcctggagtataagcacttcgtgacccgcaccttcttccccaagtgttcctccctttatgaagagcgttacgtgctgccctcccagaccctcaactcccagggcagctcccaggcacaggaaacccacccactgctgggagagtggaagattcctgagagctgccggcccaacatggaagagggaattagcttgttctcctcactactcaacaacaagcacttcctcatcgtctttgtccacgcgctggagcagcagaaggactttgcggtgcgcgacaggtgcagcctggcctcgctgctgaccatcgcgctgcacggcaagctggagtactacaccagcatcatgaaggagctgctggtggacctcattgacgcctcggccgccaagaaccccaagctcatgctgcggcgcacagagtctgtggtggagaagatgctcaccaactggatgtccatctgcatgtacagctgtctgcgggagacggtgggggagccattcttcctgctgctgtgtgccatcaagcagcaaatcaacaagggctccatcgacgccatcacaggcaaggcccgctacacactcaatgaggagtggctgctgcgggagaacatcgaggccaagccccggaacctgaacgtgtccttccagggctgtggcatggactcgctgagcgtgcgggccatggacaccgacacgctgacacaggtcaaggagaagatcctggaggccttctgcaagaatgtgccctactcccagtggccgcgtgcagaggacgtcgaccttgagtggttcgcctccagcacacagagctacatccttcgggacctggacgacacctcagtggtggaagacggccgcaagaagcttaacacgctggcccattacaagatccctgaaggtgcctccctggccatgagtctcatagacaagaaggacaacacactgggccgagtgaaagacttggacacagagaagtatttccatttggtgctgcctacggacgagctggcggagcccaagaagtctcaccggcagagccatcgcaagaaggtgctcccggaaatctacctgacccgcctgctctccaccaagggcacgttgcagaagtttctggatgacctgttcaaggccattctgagtatccgtgaagacaagcccccactggctgtcaagtactttttcgacttcctggaggagcaggctgagaagaggggaatctccgaccccgacaccctacacatctggaagaccaacaggtggcgggtgggggggccgtgtggacttcactgtgccactggggcccctgtggcagggggttcagagtctagtcttctggcctcgcctgcttggggtcaagccctcctctgccatttcccagctgtgtgttctcggatgagtgacttagcctctctgtgcttcagttccc

SEQ ID NO: 464078 - DNA, 5194 bp, Homo sapiens
  misc_feature (155)..(155): n is a, c, g, or t
ccgggctgcgcggcgaggctgagccgggcccgggcgccggggccgggggcggctggcgcgggcaggaagcgcctcgcggcccgggcccgccccccgcctctcgcccgctccgggctcccggctcccggccggcgctcgtcccatgcaatagccgngccgcgcagcccgcgcacgcccggatggctcttcgcgccgcgggcggcgcaccctttagcggcccggcgccgctgccagccccccgccgttccagacgccgccgcggtgcccggtgccgctgctgttgctgctgctcctgggggcggcgcgggccggcgccctggagatccagcgtcggttcccctcgcccacgcccaccaacaacttcgccctggacggcgcggcggggaccgtgtacctggcggccgtcaaccgcctctatcagctgtcgggcgccaacctgagcctggaggccgaggcggccgtgggcccggtgcccgacagcccgctgtgtcacgctccgcagctgccgcaggcctcgtgcgagcacccgcggcgcctcacggacaactacaacaagatcctgcagctggaccccggccagggcctggtagtcgtgtgcgggtccatctaccagggcttctgccagctgcggcgccggggcaacatctcggccgtggccgtgcgcttcccgcccgccgcgccgcccgccgagcccgtcacggtgttccccagcatgctgaacgtggcggccaaccacccgaacgcgtccaccgtggggctagttctgcctcccgccgcgggcgcggggggcagccgcctgctcgtgggcgccacgtacaccggttacggcagctccttcttcccgcgcaaccgcagcctggaggaccaccgcttcgagaacacgcccgagatcgccatccgctccctggacacgcgcggcgacctggccaagctcttcaccttcgacctcaacccctccgacgacaacatcctcaagatcaagcagggcgccaaggagcagcacaagctgggcttcgtgagcgccttcctgcacccgtccgacccgccgccgggtgcacagtcctacgcgtacctggcgctcaacagcgaggcgcgcgcgggcgacaaggagagccaggcgcggagcctgctggcgcgcatctgcctgccccacggcgccggcggcgacgccaagaagctcaccgagtcctacatccagttgggcttgcagtgcgcgggcggcgcgggccgcggcgacctctacagccgcctggtgtcggtcttcccagcccgggagcggctctttgctgtcttcgagcggccccaggggtcccccgcggcccgcgctgctccggccgcactctgcgccttccgcttcgccgacgtgcgagccgccatccgagctgcgcgcaccgcctgcttcgtggaaccggcgcccgacgtggtggcggtgctcgacagcgtggtgcagggcacgggaccggcctgcgagcgcaagctcaacatccagctccagccagagcagctggactgtggagctgctcacctgcagcacccgctgtccatcctgcagcccctgaaggccacgcccgtgttccgcgccccgggcctcacctccgtggccgtggccagcgtcaacaactacacagcggtcttcctgggcacggtcaacgggaggcttctcaagatcaacctgaacgagagcatgcaggtggtgagcaggcgggtggtgactgtggcctatggggagcccgtgcaccatgtcatgcagtttgacccagcagactccggttacctttacctgatgacgtcccaccagatggccagggtgaaggtcgccgcctgcaacgtgcactccacctgtggggactgcgtgggtgcggcggacgcctactgcggctggtgtgccctggagacgcgccagcagcatttctggaccagtgccagcgagggccccagccgctgtcctgccatgaccgtcctgccttccgagatcgatgtgcgccaggagtacccaggcatgatcctgcagatctcgggcagcctgcccagcctcagtggcatggagatggcctgtgactatgggaacaacatccgcactgtggctcgggtcccaggccctgcctttggtcaccagattgcctactgcaacctcctgccgagggaccagtttccgcccttcccccccaaccaggaccacgtgactgttgagatgtctgtgagggtcaatgggcggaacatcgtcaaggccaatttcaccatctacgactgcagccgcactgcacaagtgtacccccacacagcctgtaccagctgcctgtcggcacagtggccctgtttctggtgcagccagcagcactcctgtgtttccaaccagtctcggtgcgaggcctcaccaaaccccacgagccctcaggactgcccccggaccctgctctcacccctggcacccgtgcctaccggtggctcccagaacatcctggtgcctctggccaacactgcctttttccagggtgcagccctggagtgtagttttgggctggaggagatcttcgaggctgtgtgggtgaatgagtctgttgtacgctgtgaccaggtggtgctgcacacgacccggaagagccaggtgttcccgctcagcctccaactaaaggggcggccagcccgattcctggacagccctgagcccatgacagtcatggtctataactgtgccatgggcagccccgactgttcccagtgcctgggccgcgaagacctgggtcacctgtgcgtgtggagtgatggctgccgcctgcgggggcctctgcagcccatggctggcacctgccccgcccccgagatccgcgcgattgagcccctgagtggcccgttggacggtgggaccctgctgaccatccgaggaaggaacctgggccggcggctcagtgacgtggcccacggcgtgtggattggtggtgtggcctgtgagccactgcctgacagatacacggtgtcggaggagatcgtgtgtgtcacagggccagccccaggaccgctctcaggtgtggtgaccgtgaacgcctctaaggagggcaagtcccgggaccgcttctcctacgtgctgcccctggtccactccctggagcctaccatgggccccaaggccgggggcaccaggatcaccatccatgggaatgacctccatgtaggctccgagctccaggtcctggtgaacgacacagacccctgcacggagctgatgcgcacagataccagcatcgcctgcaccatgcctgagggggccctgccggctccggtgcctgtgtgtgtgcgcttcgagcgtcggggctgcgtgcacggcaacctcaccttctggtacatgcagaacccggtcatcacggccatcagtccccgccgcagccctgtcagtggcggcaggaccatcacagtggctggtgagcgtttccacatggtgcagaatgtgtccatggccgtccaccacattggccgggagcccacgctctgcaaggttctcaactccaccctcatcacctgcccgtcccccggggccctgagcaacgcatcagcgccagtggacttcttcatcaatgggcgggcctacgcagacgaggtggctgtggctgaggagctactggaccccgaggaggcacagcggggcagcaggttccgcctggactacctccccaacccacagttctctacggccaagagggagaagtggatcaagcaccaccccggggagcctctcaccctcgttatccacaaggagcaggacagcctggggctccagagtcacgagtaccgggtcaagataggccaagtaagctgcgacatccagattgtctctgacagaatcatccactgctcggtcaacgagtccctgggcgcggccgtggggcagctgcccatcacaatccaggtagggaacttcaaccagaccatcgccacactgcagctggggggcagcgagacggccatcatcgtgtccatcgtcatctgcagcgtcctgctgctgctctccgtggtgggtaaggagccccaccctcaggacaccttggagggcaggcttgccaccttgccccagcccctctgaagattggcagatgggagaaggcaggatgggatggggcacagcttgaacaaaggcttggccatgggaacaggttaggcacccagaggttgggggaggtgtgccctggctccagcaccaatgggtagaagatgttaggtggccaggggatatgctaggcccacgcccaggtccctgaatctcaagcagagaaatttggaaccatgttctccagtcaatagagagctactgaaggtacttaagagaggattactcaggaaaaattaacctacatgtctggtgggctataccactgttaaaataatggtcaataaagtaatagactcgatgtagcagagaaactggagccatcatacgctactagagggaatacaaaaaagcgcagctgctttggaaaacattttggaagtttcttaggatgtgaaacatagaattaccctatgacctatgacccagcaattccacccctagctatctgctcaagagaaatgaaaacgtagccacacaaaaacttgtacacacgtgtttatagcaacattatttataataaccaggaagtcaaaacaacccaaatgtccatcaaccaataaatgaataaatgaaatatgaaaaaaaaaaaaaaaaaaaaaaaaaaaaaaaaaaaaaaaagggggggggcgcaaaaaattcccccgggggggcccaagttttccgcggatccccgcgttttctttgtcaccaagggggcggcccattatgaggggcgcgagtattattaagccgaagaggagcaccgggccggggcctggttataacccagcgctttctgttcgcggggagaaaactcgtcgcctagcgggggcggggctcttgtgggggagggagcccctctatcttcttgtgggggcgggggcgcaaccttcctgtggggcaccaccctcccgcaaaccgagaagattattaaacgcgcctctaagcggggaatactataacaccattttcacgggttgcttattcgtggtgttcacacccagcggtacttattgtcccgtgcgcgtcctagaaatatttgtgccaccggcgagctcttgattttggtgcaacaaacttttttccccggacggtggtgtgtgttataattag

SEQ ID NO: 464079 - DNA, 4611 bp, Homo sapiens
  misc_feature (155)..(155): n is a, c, g, or t
ccgggctgcgcggcgaggctgagccgggcccgggcgccggggccgggggcggctggcgcgggcaggaagcgcctcgcggcccgggcccgccccccgcctctcgcccgctccgggctcccggctcccggccggcgctcgtcccatgcaatagccgngccgcgcagcccgcgcacgcccggatggctcttcgcgccgcgggcggcgcaccctttagcggcccggcgccgctgccagccccccgccgttccagacgccgccgcggtgcccggtgccgctgctgttgctgctgctcctgggggcggcgcgggccggcgccctggagatccagcgtcggttcccctcgcccacgcccaccaacaacttcgccctggacggcgcggcggggaccgtgtacctggcggccgtcaaccgcctctatcagctgtcgggcgccaacctgagcctggaggccgaggcggccgtgggcccggtgcccgacagcccgctgtgtcacgctccgcagctgccgcaggcctcgtgcgagcacccgcggcgcctcacggacaactacaacaagatcctgcagctggaccccggccagggcctggtagtcgtgtgcgggtccatctaccagggcttctgccagctgcggcgccggggcaacatctcggccgtggccgtgcgcttcccgcccgccgcgccgcccgccgagcccgtcacggtgttccccagcatgctgaacgtggcggccaaccacccgaacgcgtccaccgtggggctagttctgcctcccgccgcgggcgcggggggcagccgcctgctcgtgggcgccacgtacaccggttacggcagctccttcttcccgcgcaaccgcagcctggaggaccaccgcttcgagaacacgcccgagatcgccatccgctccctggacacgcgcggcgacctggccaagctcttcaccttcgacctcaacccctccgacgacaacatcctcaagatcaagcagggcgccaaggagcagcacaagctgggcttcgtgagcgccttcctgcacccgtccgacccgccgccgggtgcacagtcctacgcgtacctggcgctcaacagcgaggcgcgcgcgggcgacaaggagagccaggcgcggagcctgctggcgcgcatctgcctgccccacggcgccggcggcgacgccaagaagctcaccgagtcctacatccagttgggcttgcagtgcgcgggcggcgcgggccgcggcgacctctacagccgcctggtgtcggtcttcccagcccgggagcggctctttgctgtcttcgagcggccccaggggtcccccgcggcccgcgctgctccggccgcactctgcgccttccgcttcgccgacgtgcgagccgccatccgagctgcgcgcaccgcctgcttcgtggaaccggcgcccgacgtggtggcggtgctcgacagcgtggtgcagggcacgggaccggcctgcgagcgcaagctcaacatccagctccagccagagcagctggactgtggagctgctcacctgcagcacccgctgtccatcctgcagcccctgaaggccacgcccgtgttccgcgccccgggcctcacctccgtggccgtggccagcgtcaacaactacacagcggtcttcctgggcacggtcaacgggaggcttctcaagatcaacctgaacgagagcatgcaggtggtgagcaggcgggtggtgactgtggcctatggggagcccgtgcaccatgtcatgcagtttgacccagcagactccggttacctttacctgatgacgtcccaccagatggccagggtgaaggtcgccgcctgcaacgtgcactccacctgtggggactgcgtgggtgcggcggacgcctactgcggctggtgtgccctggagacgcgccagcagcatttctggaccagtgccagcgagggccccagccgctgtcctgccatgaccgtcctgccttccgagatcgatgtgcgccaggagtacccaggcatgatcctgcagatctcgggcagcctgcccagcctcagtggcatggagatggcctgtgactatgggaacaacatccgcactgtggctcgggtcccaggccctgcctttggtcaccagattgcctactgcaacctcctgccgagggaccagtttccgcccttcccccccaaccaggaccacgtgactgttgagatgtctgtgagggtcaatgggcggaacatcgtcaaggccaatttcaccatctacgactgcagccgcactgcacaagtgtacccccacacagcctgtaccagctgcctgtcggcacagtggccctgtttctggtgcagccagcagcactcctgtgtttccaaccagtctcggtgcgaggcctcaccaaaccccacgagccctcaggactgcccccggaccctgctctcacccctggcacccgtgcctaccggtggctcccagaacatcctggtgcctctggccaacactgcctttttccagggtgcagccctggagtgtagttttgggctggaggagatcttcgaggctgtgtgggtgaatgagtctgttgtacgctgtgaccaggtggtgctgcacacgacccggaagagccaggtgttcccgctcagcctccaactaaaggggcggccagcccgattcctggacagccctgagcccatgacagtcatggtctataactgtgccatgggcagccccgactgttcccagtgcctgggccgcgaagacctgggtcacctgtgcgtgtggagtgatggctgccgcctgcgggggcctctgcagcccatggctggcacctgccccgcccccgagatccgcgcgattgagcccctgagtggcccgttggacggtgggaccctgctgaccatccgaggaaggaacctgggccggcggctcagtgacgtggcccacggcgtgtggattggtggtgtggcctgtgagccactgcctgacagatacacggtgtcggaggagatcgtgtgtgtcacagggccagccccaggaccgctctcaggtgtggtgaccgtgaacgcctctaaggagggcaagtcccgggaccgcttctcctacgtgctgcccctggtccactccctggagcctaccatgggccccaaggccgggggcaccaggatcaccatccatgggaatgacctccatgtaggctccgagctccaggtcctggtgaacgacacagacccctgcacggagctgatgcgcacagataccagcatcgcctgcaccatgcctgagggggccctgccggctccggtgcctgtgtgtgtgcgcttcgagcgtcggggctgcgtgcacggcaacctcaccttctggtacatgcagaacccggtcatcacggccatcagtccccgccgcagccctgtcagtggcggcaggaccatcacagtggctggtgagcgtttccacatggtgcagaatgtgtccatggccgtccaccacattggccgggagcccacgctctgcaaggttctcaactccaccctcatcacctgcccgtcccccggggccctgagcaacgcatcagcgccagtggacttcttcatcaatgggcgggcctacgcagacgaggtggctgtggctgaggagctactggaccccgaggaggcacagcggggcagcaggttccgcctggactacctccccaacccacagttctctacggccaagagggagaagtggatcaagcaccaccccggggagcctctcaccctcgttatccacaaggagcaggacagcctggggctccagagtcacgagtaccgggtcaagataggccaagtaagctgcgacatccagattgtctctgacagaatcatccactgctcggtcaacgagtccctgggcgcggccgtggggcagctgcccatcacaatccaggtagggaacttcaaccagaccatcgccacactgcagctggggggcagcgagacggccatcatcgtgtccatcgtcatctgcagcgtcctgctgctgctctccgtggtggccctgttcgtcttctgtaccaagagccgacgtgctgagcgttactggcagaagacgctgctgcagatggaggagatggaatctcagatccgagaggaaatccgcaaaggcttcgctgagctgcagacagacatgacagatctcaccaaggagctgaaccgcagccagggcatccccttcctggagtataagcacttcgtgacccgcaccttcttccccaaggtcagcccgagcctgagcctgccctgaacctgtgccagccacctcaaggcaactcgacctctctgagccctgccagcctatagggtcccttgagcagtgccaaacctgcacagctgtccgcagccgtcctggccacttgccctggcctgccacggggagaagggttggaggcagattctccactgtcattctctgctcacttgatgtttaacagtccatatggaagccagctgcagccccgctgtcctggccagctgggcctgcctctccccttttcaaggtggggcagaagcggccagggctgtcccaggccagcctctctccttcctgtgcctcttcccagccaggcttcccttggtctctacactccctcctcctgt

SEQ ID NO: 464080 - DNA, 473 bp, Homo sapiens
ccgccgccgtcgttgacccagcccgccaggcgctactgaccgtcgcttcctccggtcccgggtcccgagaggctccccatgcaacactggaaatgactgttccagagagcgggcagacctggcagagcgcccctggcgcctgagactaccacccactccgttcctgccagaaacgaccctctgtggccgatgggccatgcgggcccctcgcagccaactcagccagtgttgggactggctcagagcccatgggggctggaggggggcagctgggactctggaatcttctttataataaaagccttacggacaaacctaaaaaaaaacggcacgagggggggccccgtaccacaatttgcccttatagtgaggtgtatttacaatttaactggccgccggttttacaaccttttggactgggaaaaaccctgggctttaccccaaactttaaacggctttgctgaaaaataccc

SEQ ID NO: 464081 - DNA, 563 bp, Homo sapiens
tccggttctgggtgaacatcctgaagaacccccagtttgtctttgacatcgacaagacagaccacatcgacgcctgcctttcagtcatcgcgcaggccttcatcgacgcctgctccatctctgacctgcagctgggcaaggtcagctgttcccaggaccaggccaggcccatgcacagggccagagtggggtgccgaccatgggtagcctcctcgactctctgaggctgagctcagagatcttcctgggaggggaaccaaaagatctcaggtctaggggatgtgggatgagtgactcattcagacagggagacacctagaagccagtaccttccatcagaaactctgtatcgctgcagaccaactgcacatgctgcagctgtgcctggcactggctttgaacacaggcctgagaacccggtgtgggaaagccagtatgagcttggacaacctgcttggtcaggcacaacatcatctgaaaaccgggccaggctctgggcagtagcccctgaaagtcaaaagccattcaagcgagcattcagtgaaggggtgggcagaggggtg

SEQ ID NO: 464082 - DNA, 385 bp, Homo sapiens
gcatggtttagagatctgtgactggcccagaggggccgtaggaaatacacgtgagcagagactgaactggctttccttttgggaggccgtgcatcaggcgtgtggaagagccgtcatctaccagcccagcagacgttctcatgatcagagacccttttgtcccacccccgtgtcttatagttgcagaactgtgggaaactgatggggtaaattatacatagaaggcattggaagtgtggcatggcgtggaatggggcgatccctgagcctggctctagggtggccgtgggggccaaggaccgctggctgaccacagcacctcccctcaggatcgtgtgtgtcacagggccagccccaggaccgctctcaggtgtggtgaccgtga

SEQ ID NO: 464083 - DNA, 405 bp, Homo sapiens
gatgaggcggcactgagaccctgggacccacagctcctagggcctaaaggtgcagttgacacctgcctcccgctcacaggtgcagcctggcctcgctgctgaccatcgcgctgcacggcaagctggagtactacaccagcatcatgaaggagctgctggtggacctcattgacgcctcggccgccaagaaccccaagctcatgctgcggcgcacagagtctgtggtggagaagatgctcaccaactggatgtccatctgcatgtacagctgtctgcgggtgaggctgcctggggacagacagagcccaggcgggggacgtggcagggactcagcggcagtgaccccacggcctcccaggccttccctggcaccctcaggccagctctgccaggagggagtgttgc

SEQ ID NO: 464084 - DNA, 303 bp, Homo sapiens
ggctccccatgcaacactggaaatgactgttccagagagcgggcagacctggcagagcgcccctggcgcctgagactaccacccactccgttcctgccagaaacgaccctctgtggccgatgggccatgcgggcccctcgcagccaactcagccagtgttgggactggctcagagcccatgggggctggaggggggcagctgggactctggaatcttctttataataaaagccttacggacaaacctactgtgggctccagcctttgtcctgagatagccaagcgggagaatgggcagtttct

SEQ ID NO: 464085 - DNA, 216 bp, Homo sapiens
gtaagctgcgacatccagattgtctctgacagaatcatccactgctcggtcaacgagtccctgggcgcggccgtggggcagctgcccatcacagtgagtggatggggcgccggagcagggcagacctggccccacccctggcccatctgccaagcatctgcccctcacccagcacctgaattcactgagcgttttcacgctcaacagctcagtcca

SEQ ID NO: 464086 - DNA, 6106 bp, Homo sapiens
  misc_feature (155)..(155): n is a, c, g, or t
ccgggctgcgcggcgaggctgagccgggcccgggcgccggggccgggggcggctggcgcgggcaggaagcgcctcgcggcccgggcccgccccccgcctctcgcccgctccgggctcccggctcccggccggcgctcgtcccatgcaatagccgngccgcgcagcccgcgcacgcccggatggctcttcgcgccgcgggcggcgcaccctttagcggcccggcgccgctgccagccccccgccgttccagacgccgccgcggtgcccggtgccgctgctgttgctgctgctcctgggggcggcgcgggccggcgccctggagatccagcgtcggttcccctcgcccacgcccaccaacaacttcgccctggacggcgcggcggggaccgtgtacctggcggccgtcaaccgcctctatcagctgtcgggcgccaacctgagcctggaggccgaggcggccgtgggcccggtgcccgacagcccgctgtgtcacgctccgcagctgccgcaggcctcgtgcgagcacccgcggcgcctcacggacaactacaacaagatcctgcagctggaccccggccagggcctggtagtcgtgtgcgggtccatctaccagggcttctgccagctgcggcgccggggcaacatctcggccgtggccgtgcgcttcccgcccgccgcgccgcccgccgagcccgtcacggtgttccccagcatgctgaacgtggcggccaaccacccgaacgcgtccaccgtggggctagttctgcctcccgccgcgggcgcggggggcagccgcctgctcgtgggcgccacgtacaccggttacggcagctccttcttcccgcgcaaccgcagcctggaggaccaccgcttcgagaacacgcccgagatcgccatccgctccctggacacgcgcggcgacctggccaagctcttcaccttcgacctcaacccctccgacgacaacatcctcaagatcaagcagggcgccaaggagcagcacaagctgggcttcgtgagcgccttcctgcacccgtccgacccgccgccgggtgcacagtcctacgcgtacctggcgctcaacagcgaggcgcgcgcgggcgacaaggagagccaggcgcggagcctgctggcgcgcatctgcctgccccacggcgccggcggcgacgccaagaagctcaccgagtcctacatccagttgggcttgcagtgcgcgggcggcgcgggccgcggcgacctctacagccgcctggtgtcggtcttcccagcccgggagcggctctttgctgtcttcgagcggccccaggggtcccccgcggcccgcgctgctccggccgcactctgcgccttccgcttcgccgacgtgcgagccgccatccgagctgcgcgcaccgcctgcttcgtggaaccggcgcccgacgtggtggcggtgctcgacagcgtggtgcagggcacgggaccggcctgcgagcgcaagctcaacatccagctccagccagagcagctggactgtggagctgctcacctgcagcacccgctgtccatcctgcagcccctgaaggccacgcccgtgttccgcgccccgggcctcacctccgtggccgtggccagcgtcaacaactacacagcggtcttcctgggcacggtcaacgggaggcttctcaagatcaacctgaacgagagcatgcaggtggtgagcaggcgggtggtgactgtggcctatggggagcccgtgcaccatgtcatgcagtttgacccagcagactccggttacctttacctgatgacgtcccaccagatggccagggtgaaggtcgccgcctgcaacgtgcactccacctgtggggactgcgtgggtgcggcggacgcctactgcggctggtgtgccctggagacgcgccagcagcatttctggaccagtgccagcgagggccccagccgctgtcctgccatgaccgtcctgccttccgagatcgatgtgcgccaggagtacccaggcatgatcctgcagatctcgggcagcctgcccagcctcagtggcatggagatggcctgtgactatgggaacaacatccgcactgtggctcgggtcccaggccctgcctttggtcaccagattgcctactgcaacctcctgccgagggaccagtttccgcccttcccccccaaccaggaccacgtgactgttgagatgtctgtgagggtcaatgggcggaacatcgtcaaggccaatttcaccatctacgactgcagccgcactgcacaagtgtacccccacacagcctgtaccagctgcctgtcggcacagtggccctgtttctggtgcagccagcagcactcctgtgtttccaaccagtctcggtgcgaggcctcaccaaaccccacgagccctcaggactgcccccggaccctgctctcacccctggcacccgtgcctaccggtggctcccagaacatcctggtgcctctggccaacactgcctttttccagggtgcagccctggagtgtagttttgggctggaggagatcttcgaggctgtgtgggtgaatgagtctgttgtacgctgtgaccaggtggtgctgcacacgacccggaagagccaggtgttcccgctcagcctccaactaaaggggcggccagcccgattcctggacagccctgagcccatgacagtcatggtctataactgtgccatgggcagccccgactgttcccagtgcctgggccgcgaagacctgggtcacctgtgcgtgtggagtgatggctgccgcctgcgggggcctctgcagcccatggctggcacctgccccgcccccgagatccgcgcgattgagcccctgagtggcccgttggacggtgggaccctgctgaccatccgaggaaggaacctgggccggcggctcagtgacgtggcccacggcgtgtggattggtggtgtggcctgtgagccactgcctgacagatacacggtgtcggaggagatcgtgtgtgtcacagggccagccccaggaccgctctcaggtgtggtgaccgtgaacgcctctaaggagggcaagtcccgggaccgcttctcctacgtgctgcccctggtccactccctggagcctaccatgggccccaaggccgggggcaccaggatcaccatccatgggaatgacctccatgtaggctccgagctccaggtcctggtgaacgacacagacccctgcacggagctgatgcgcacagataccagcatcgcctgcaccatgcctgagggggccctgccggctccggtgcctgtgtgtgtgcgcttcgagcgtcggggctgcgtgcacggcaacctcaccttctggtacatgcagaacccggtcatcacggccatcagtccccgccgcagccctgtcagtggcggcaggaccatcacagtggctggtgagcgtttccacatggtgcagaatgtgtccatggccgtccaccacattggccgggagcccacgctctgcaaggttctcaactccaccctcatcacctgcccgtcccccggggccctgagcaacgcatcagcgccagtggacttcttcatcaatgggcgggcctacgcagacgaggtggctgtggctgaggagctactggaccccgaggaggcacagcggggcagcaggttccgcctggactacctccccaacccacagttctctacggccaagagggagaagtggatcaagcaccaccccggggagcctctcaccctcgttatccacaaggagcaggacagcctggggctccagagtcacgagtaccgggtcaagataggccaagtaagctgcgacatccagattgtctctgacagaatcatccactgctcggtcaacgagtccctgggcgcggccgtggggcagctgcccatcacaatccaggtagggaacttcaaccagaccatcgccacactgcagctggggggcagcgagacggccatcatcgtgtccatcgtcatctgcagcgtcctgctgctgctctccgtggtggccctgttcgtcttctgtaccaagagccgacgtgctgagcgttactggcagaagacgctgctgcagatggaggagatggaatctcagatccgagaggaaatccgcaaaggcttcgctgagctgcagacagacatgacagatctcaccaaggagctgaaccgcagccagggcatccccttcctggagtataagcacttcgtgacccgcaccttcttccccaagtgttcctccctttatgaagagcgttacgtgctgccctcccagaccctcaactcccagggcagctcccaggcacaggaaacccacccactgctgggagagtggaagattcctgagagctgccggcccaacatggaagagggaattagcttgttctcctcactactcaacaacaagcacttcctcatcgtctttgtccacgcgctggagcagcagaaggactttgcggtgcgcgacaggtgcagcctggcctcgctgctgaccatcgcgctgcacggcaagctggagtactacaccagcatcatgaaggagctgctggtggacctcattgacgcctcggccgccaagaaccccaagctcatgctgcggcgcacagagtctgtggtggagaagatgctcaccaactggatgtccatctgcatgtacagctgtctgcgggagacggtgggggagccattcttcctgctgctgtgtgccatcaagcagcaaatcaacaagggctccatcgacgccatcacaggcaaggcccgctacacactcaatgaggagtggctgctgcgggagaacatcgaggccaagccccggaacctgaacgtgtccttccagggctgtggcatggactcgctgagcgtgcgggccatggacaccgacacgctgacacaggtcaaggagaagatcctggaggccttctgcaagaatgtgccctactcccagtggccgcgtgcagaggacgtcgaccttgagtggttcgcctccagcacacagagctacatccttcgggacctggacgacacctcagtggtggaagacggccgcaagaagcttaacacgctggcccattacaagatccctgaaggtgcctccctggccatgagtctcatagacaagaaggacaacacactgggccgagtgaaagacttggacacagagaagtatttccatttggtgctgcctacggacgagctggcggagcccaagaagtctcaccggcagagccatcgcaagaaggtgctcccggaaatctacctgacccgcctgctctccaccaagggcacgttgcagaagtttctggatgacctgttcaaggccattctgagtatccgtgaagacaagcccccactggctgtcaagtactttttcgacttcctggaggagcaggctgagaagaggggaatctccgaccccgacaccctacacatctggaagaccaacagccttcctctccggttctgggtgaacatcctgaagaacccccagtttgtctttgacatcgacaagacagaccacatcgacgcctgcctttcagtcatcgcgcaggccttcatcgacgcctgctccatctctgacctgcagctgggcaaggattcgccaaccaacaagctcctctacgccaaggagattcctgagtaccggaagatcgtgcagcgctactacaagcagatccaggacatgacgccgctcagcgagcaagagatgaatgcccatctggccgaggagtcgaggaaataccagaatgagttcaacaccaatgtggccatggcagagatttataagtacgccaagaggtatcggccgcagatcatggccgcgctggaggccaaccccacggcccggaggacacaactgcagcacaagtttgagcaggtggtggctttgatggaggacaacatctacgagtgctacacttcagccctctggctggacactttggatgatgaggccttgatgggcagcccagcctttctagggcccttgggggcctctgtcttcctggacaaatgtgcagagtggctggagggttaacggaagcacttgctctaggcaaagcactagtgctccaagcccaccaaagccaacgtctaacgggcctgtcagctc

SEQ ID NO: 464087 - DNA, 7209 bp, Homo sapiens
  misc_feature (155)..(155): n is a, c, g, or t
ccgggctgcgcggcgaggctgagccgggcccgggcgccggggccgggggcggctggcgcgggcaggaagcgcctcgcggcccgggcccgccccccgcctctcgcccgctccgggctcccggctcccggccggcgctcgtcccatgcaatagccgngccgcgcagcccgcgcacgcccggatggctcttcgcgccgcgggcggcgcaccctttagcggcccggcgccgctgccagccccccgccgttccagacgccgccgcggtgcccggtgccgctgctgttgctgctgctcctgggggcggcgcgggccggcgccctggagatccagcgtcggttcccctcgcccacgcccaccaacaacttcgccctggacggcgcggcggggaccgtgtacctggcggccgtcaaccgcctctatcagctgtcgggcgccaacctgagcctggaggccgaggcggccgtgggcccggtgcccgacagcccgctgtgtcacgctccgcagctgccgcaggcctcgtgcgagcacccgcggcgcctcacggacaactacaacaagatcctgcagctggaccccggccagggcctggtagtcgtgtgcgggtccatctaccagggcttctgccagctgcggcgccggggcaacatctcggccgtggccgtgcgcttcccgcccgccgcgccgcccgccgagcccgtcacggtgttccccagcatgctgaacgtggcggccaaccacccgaacgcgtccaccgtggggctagttctgcctcccgccgcgggcgcggggggcagccgcctgctcgtgggcgccacgtacaccggttacggcagctccttcttcccgcgcaaccgcagcctggaggaccaccgcttcgagaacacgcccgagatcgccatccgctccctggacacgcgcggcgacctggccaagctcttcaccttcgacctcaacccctccgacgacaacatcctcaagatcaagcagggcgccaaggagcagcacaagctgggcttcgtgagcgccttcctgcacccgtccgacccgccgccgggtgcacagtcctacgcgtacctggcgctcaacagcgaggcgcgcgcgggcgacaaggagagccaggcgcggagcctgctggcgcgcatctgcctgccccacggcgccggcggcgacgccaagaagctcaccgagtcctacatccagttgggcttgcagtgcgcgggcggcgcgggccgcggcgacctctacagccgcctggtgtcggtcttcccagcccgggagcggctctttgctgtcttcgagcggccccaggggtcccccgcggcccgcgctgctccggccgcactctgcgccttccgcttcgccgacgtgcgagccgccatccgagctgcgcgcaccgcctgcttcgtggaaccggcgcccgacgtggtggcggtgctcgacagcgtggtgcagggcacgggaccggcctgcgagcgcaagctcaacatccagctccagccagagcagctggactgtggagctgctcacctgcagcacccgctgtccatcctgcagcccctgaaggccacgcccgtgttccgcgccccgggcctcacctccgtggccgtggccagcgtcaacaactacacagcggtcttcctgggcacggtcaacgggaggcttctcaagatcaacctgaacgagagcatgcaggtggtgagcaggcgggtggtgactgtggcctatggggagcccgtgcaccatgtcatgcagtttgacccagcagactccggttacctttacctgatgacgtcccaccagatggccagggtgaaggtcgccgcctgcaacgtgcactccacctgtggggactgcgtgggtgcggcggacgcctactgcggctggtgtgccctggagacgcggtgcaccttgcagcaggactgcaccaattccagccagcagcatttctggaccagtgccagcgagggccccagccgctgtcctgccatgaccgtcctgccttccgagatcgatgtgcgccaggagtacccaggcatgatcctgcagatctcgggcagcctgcccagcctcagtggcatggagatggcctgtgactatgggaacaacatccgcactgtggctcgggtcccaggccctgcctttggtcaccagattgcctactgcaacctcctgccgagggaccagtttccgcccttcccccccaaccaggaccacgtgactgttgagatgtctgtgagggtcaatgggcggaacatcgtcaaggccaatttcaccatctacgactgcagccgcactgcacaagtgtacccccacacagcctgtaccagctgcctgtcggcacagtggccctgtttctggtgcagccagcagcactcctgtgtttccaaccagtctcggtgcgaggcctcaccaaaccccacgagccctcaggactgcccccggaccctgctctcacccctggcacccgtgcctaccggtggctcccagaacatcctggtgcctctggccaacactgcctttttccagggtgcagccctggagtgtagttttgggctggaggagatcttcgaggctgtgtgggtgaatgagtctgttgtacgctgtgaccaggtggtgctgcacacgacccggaagagccaggtgttcccgctcagcctccaactaaaggggcggccagcccgattcctggacagccctgagcccatgacagtcatggtctataactgtgccatgggcagccccgactgttcccagtgcctgggccgcgaagacctgggtcacctgtgcgtgtggagtgatggctgccgcctgcgggggcctctgcagcccatggctggcacctgccccgcccccgagatccgcgcgattgagcccctgagtggcccgttggacggtgggaccctgctgaccatccgaggaaggaacctgggccggcggctcagtgacgtggcccacggcgtgtggattggtggtgtggcctgtgagccactgcctgacagatacacggtgtcggaggagatcgtgtgtgtcacagggccagccccaggaccgctctcaggtgtggtgaccgtgaacgcctctaaggagggcaagtcccgggaccgcttctcctacgtgctgcccctggtccactccctggagcctaccatgggccccaaggccgggggcaccaggatcaccatccatgggaatgacctccatgtaggctccgagctccaggtcctggtgaacgacacagacccctgcacggagctgatgcgcacagataccagcatcgcctgcaccatgcctgagggggccctgccggctccggtgcctgtgtgtgtgcgcttcgagcgtcggggctgcgtgcacggcaacctcaccttctggtacatgcagaacccggtcatcacggccatcagtccccgccgcagccctgtcagtggcggcaggaccatcacagtggctggtgagcgtttccacatggtgcagaatgtgtccatggccgtccaccacattggccgggagcccacgctctgcaaggttctcaactccaccctcatcacctgcccgtcccccggggccctgagcaacgcatcagcgccagtggacttcttcatcaatgggcgggcctacgcagacgaggtggctgtggctgaggagctactggaccccgaggaggcacagcggggcagcaggttccgcctggactacctccccaacccacagttctctacggccaagagggagaagtggatcaagcaccaccccggggagcctctcaccctcgttatccacaaggagcaggacagcctggggctccagagtcacgagtaccgggtcaagataggccaagtaagctgcgacatccagattgtctctgacagaatcatccactgctcggtcaacgagtccctgggcgcggccgtggggcagctgcccatcacaatccaggtagggaacttcaaccagaccatcgccacactgcagctggggggcagcgagacggccatcatcgtgtccatcgtcatctgcagcgtcctgctgctgctctccgtggtggccctgttcgtcttctgtaccaagagccgacgtgctgagcgttactggcagaagacgctgctgcagatggaggagatggaatctcagatccgagaggaaatccgcaaaggcttcgctgagctgcagacagacatgacagatctcaccaaggagctgaaccgcagccagggcatccccttcctggagtataagcacttcgtgacccgcaccttcttccccaagtgttcctccctttatgaagagcgttacgtgctgccctcccagaccctcaactcccagggcagctcccaggcacaggaaacccacccactgctgggagagtggaagattcctgagagctgccggcccaacatggaagagggaattagcttgttctcctcactactcaacaacaagcacttcctcatcgtctttgtccacgcgctggagcagcagaaggactttgcggtgcgcgacaggtgcagcctggcctcgctgctgaccatcgcgctgcacggcaagctggagtactacaccagcatcatgaaggagctgctggtggacctcattgacgcctcggccgccaagaaccccaagctcatgctgcggcgcacagagtctgtggtggagaagatgctcaccaactggatgtccatctgcatgtacagctgtctgcgggagacggtgggggagccattcttcctgctgctgtgtgccatcaagcagcaaatcaacaagggctccatcgacgccatcacaggcaaggcccgctacacactcaatgaggagtggctgctgcgggagaacatcgaggccaagccccggaacctgaacgtgtccttccagggctgtggcatggactcgctgagcgtgcgggccatggacaccgacacgctgacacaggtcaaggagaagatcctggaggccttctgcaagaatgtgccctactcccagtggccgcgtgcagaggacgtcgaccttgagtggttcgcctccagcacacagagctacatccttcgggacctggacgacacctcagtggtggaagacggccgcaagaagcttaacacgctggcccattacaagatccctgaaggtgcctccctggccatgagtctcatagacaagaaggacaacacactgggccgagtgaaagacttggacacagagaagtatttccatttggtgctgcctacggacgagctggcggagcccaagaagtctcaccggcagagccatcgcaagaaggtgctcccggaaatctacctgacccgcctgctctccaccaagggcacgttgcagaagtttctggatgacctgttcaaggccattctgagtatccgtgaagacaagcccccactggctgtcaagtactttttcgacttcctggaggagcaggctgagaagaggggaatctccgaccccgacaccctacacatctggaagaccaacagccttcctctccggttctgggtgaacatcctgaagaacccccagtttgtctttgacatcgacaagacagaccacatcgacgcctgcctttcagtcatcgcgcaggccttcatcgacgcctgctccatctctgacctgcagctgggcaaggattcgccaaccaacaagctcctctacgccaaggagattcctgagtaccggaagatcgtgcagcgctactacaagcagatccaggacatgacgccgctcagcgagcaagagatgaatgcccatctggccgaggagtcgaggaaataccagaatgagttcaacaccaatgtggccatggcagagatttataagtacgccaagaggtatcggccgcagatcatggccgcgctggaggccaaccccacggcccggaggacacaactgcagcacaagtttgagcaggtggtggctttgatggaggacaacatctacgagtgctacagtgaggcctgagacacatggagagttggtcaggctgctgctgggagaaatggacgcccactgggcctcaacttgatcttctaccccgtgcctgtgactcagactgggaaatactgagcagagacggctggggcgggggcaggaggaggggctgctctctgagacaggggcgcccccgccttgacccctgggcacctccatcccctcccacctgtccccagatcagtctctgggatggaggccagagagctggtcaggctcccccatctgcccagcacggcctgcactgtgcccacccacttgctccacaacgtccagttggtcctgctgccaagagccccgtgcatccaggcggccaagcacaaactgggggagaggaggccgccagcccggaggctgcagcccagaaactctacctcatccacactggtgcagggagccctccttgaactgacctttgattggtttctgcttcaactaccaaaatgttatctccacttccccctcacccgtagaggatcctggccacagacagtttcaagtagtgtcagatttttgttgcttgggcggctgttggtagagtgggcagtgcccgcgccatggggtgctctgtgggcttctccaggagcagggagggtggaggggagggatggggggcacaggagctgggagccccgtctccaggaaaaggagaggggttaagatgcaccgaggctgtagctgggctacttgatcttgctgaaagtgtttctaaagatagcaccacttttttttttaaagcttttatatattaaaaaacgtatcatgcaccaactgtgaatagctgccgcttgcgcagaggacccggggaggggtcccgagaggctccccatgcaacactggaaatgactgttccagagagcgggcagacctggcagagcgcccctggcgcctgagactaccacccactccgttcctgccagaaacgaccctctgtggccgatgggccatgcgggcccctcgcagccaactcagccagtgttgggactggctcagagcccatgggggctggaggggggcagctgggactctggaatcttctttataataaaagccttacggacaaacctaaaaaaaaacggcacgagggggggccccgtaccacaatttgcccttatagtgaggtgtatttacaatttaactggccgccggttttacaaccttttggactgggaaaaaccctgggctttaccccaaactttaaacggctttgctgaaaaataccc

SEQ ID NO: 464088 - DNA, 2919 bp, Homo sapiens
catcttacggctaggacaggccgggtggtaatcggccgaggaggcacaggaaacctacccactgctgggagagtggaagattcctgagagctgccggcccaacatggaagagggaattagcttgttctcctcactactcaacaacaagcacttcctcatcgtctttgtccacgcgctggagcagcagaaggactttgcggtgcgcgacaggtgcagcctggcctcgctgctgaccatcgcgctgcacggcaagctggagtactacaccagcatcatgaaggagctgctggtggacctcattgacgcctcggccgccaagaaccccaagctcatgctgcggcgcacagagtctgtggtggagaagatgctcaccaactggatgtccatctgcatgtacagctgtctgcgggagacggtgggggagccattcttcctgctgctgtgtgccatcaagcagcaaatcaacaagggctccatcgacgccatcacaggcaaggcccgctacacactcaatgaggagtggctgctgcgggagaacatcgaggccaagccccggaacctgaacgtgtccttccagggctgtggcatggactcgctgagcgtgcgggccatggacaccgacacgctgacacaggtcaaggagaagatcctggaggccttctgcaagaatgtgccctactcccagtggccgcgtgcagaggacgtcgaccttgagtggttcgcctccagcacacagagctacatccttcgggacctggacgacacctcagtggtggaagacggccgcaagaagcttaacacgctggcccattacaagatccctgaaggtgcctccctggccatgagtctcatagacaagaaggacaacacactgggccgagtgaaagacttggacacagagaagtatttccatttggtgctgcctacggacgagctggcggagcccaagaagtctcaccggcagagccatcgcaagaaggtgctcccggaaatctacctgacccgcctgctctccaccaagggcacgttgcagaagtttctggatgacctgttcaaggccattctgagtatccgtgaagacaagcccccactggctgtcaagtactttttcgacttcctggaggagcaggctgagaagaggggaatctccgaccccgacaccctacacatctggaagaccaacagccttcctctccggttctgggtgaacatcctgaagaacccccagtttgtctttgacatcgacaagacagaccacatcgacgcctgcctttcagtcatcgcgcaggccttcatcgacgcctgctccatctctgacctgcagctgggcaaggattcgccaaccaacaagctcctctacgccaaggagattcctgagtaccggaagatcgtgcagcgctactacaagcagatccaggacatgacgccgctcagcgagcaagagatgaatgcccatctggccgaggagtcgaggaaataccagaatgagttcaacaccaatgtggccatggcagagatttataagtacgccaagaggtatcggccgcagatcatggccgcgctggaggccaaccccacggcccggaggacacaactgcagcacaagtttgagcaggtggtggctttgatggaggacaacatctacgagtgctacagtgaggcctgagacacatggagagttggtcaggctgctgctgggagaaatggacgcccactgggcctcaacttgatcttctaccccgtgcctgtgactcagactgggaaatactgagcagagacggctggggcgggggcaggaggaggggctgctctctgagacaggggcgcccccgccttgacccctgggcacctccatcccctcccacctgtccccagatcagtctctgggatggaggccagagagctggtcaggctcccccatctgcccagcacggcctgcactgtgcccacccacttgctccacaacgtccagttggtcctgctgccaagagccccgtgcatccaggcggccaagcacaaactgggggagaggaggccgccagcccggaggctgcagcccagaaactctacctcatccacactggtgcagggagccctccttgaactgacctttgattggtttctgcttcaactaccaaaatgttatctccacttccccctcacccgtagaggatcctggccacagacagtttcaagtagtgtcagatttttgttgcttgggcggctgttggtagagtgggcagtgcccgcgccatggggtgctctgtgggcttctccaggagcagggagggtggaggggagggatggggggcacaggagctgggagccccgtctccaggaaaaggagaggggttaagatgcaccgaggctgtagctgggctacttgatcttgctgaaagtgtttctaaagatagcaccacttttttttttaaagcttttatatattaaaaaacgtatcatgcaccaactgtgaatagctgccgcttgcgcagaggacccggggaggggtcccgagaggctccccatgcaacactggaaatgactgttccagagagcgggcagacctggcagagcgcccctggcgcctgagactaccacccactccgttcctgccagaaacgaccctctgtggccgatgggccatgcgggcccctcgcagccaactcagccagtgttgggactggctcagagcccatgggggctggaggggggcagctgggactctggaatcttctttataataaaagccttacggacaaacctaaaaaaaaacggcacgagggggggccccgtaccacaatttgcccttatagtgaggtgtatttacaatttaactggccgccggttttacaaccttttggactgggaaaaaccctgggctttaccccaaactttaaacggctttgctgaaaaataccc

SEQ ID NO: 464089 - DNA, 7176 bp, Homo sapiens
  misc_feature (155)..(155): n is a, c, g, or t
ccgggctgcgcggcgaggctgagccgggcccgggcgccggggccgggggcggctggcgcgggcaggaagcgcctcgcggcccgggcccgccccccgcctctcgcccgctccgggctcccggctcccggccggcgctcgtcccatgcaatagccgngccgcgcagcccgcgcacgcccggatggctcttcgcgccgcgggcggcgcaccctttagcggcccggcgccgctgccagccccccgccgttccagacgccgccgcggtgcccggtgccgctgctgttgctgctgctcctgggggcggcgcgggccggcgccctggagatccagcgtcggttcccctcgcccacgcccaccaacaacttcgccctggacggcgcggcggggaccgtgtacctggcggccgtcaaccgcctctatcagctgtcgggcgccaacctgagcctggaggccgaggcggccgtgggcccggtgcccgacagcccgctgtgtcacgctccgcagctgccgcaggcctcgtgcgagcacccgcggcgcctcacggacaactacaacaagatcctgcagctggaccccggccagggcctggtagtcgtgtgcgggtccatctaccagggcttctgccagctgcggcgccggggcaacatctcggccgtggccgtgcgcttcccgcccgccgcgccgcccgccgagcccgtcacggtgttccccagcatgctgaacgtggcggccaaccacccgaacgcgtccaccgtggggctagttctgcctcccgccgcgggcgcggggggcagccgcctgctcgtgggcgccacgtacaccggttacggcagctccttcttcccgcgcaaccgcagcctggaggaccaccgcttcgagaacacgcccgagatcgccatccgctccctggacacgcgcggcgacctggccaagctcttcaccttcgacctcaacccctccgacgacaacatcctcaagatcaagcagggcgccaaggagcagcacaagctgggcttcgtgagcgccttcctgcacccgtccgacccgccgccgggtgcacagtcctacgcgtacctggcgctcaacagcgaggcgcgcgcgggcgacaaggagagccaggcgcggagcctgctggcgcgcatctgcctgccccacggcgccggcggcgacgccaagaagctcaccgagtcctacatccagttgggcttgcagtgcgcgggcggcgcgggccgcggcgacctctacagccgcctggtgtcggtcttcccagcccgggagcggctctttgctgtcttcgagcggccccaggggtcccccgcggcccgcgctgctccggccgcactctgcgccttccgcttcgccgacgtgcgagccgccatccgagctgcgcgcaccgcctgcttcgtggaaccggcgcccgacgtggtggcggtgctcgacagcgtggtgcagggcacgggaccggcctgcgagcgcaagctcaacatccagctccagccagagcagctggactgtggagctgctcacctgcagcacccgctgtccatcctgcagcccctgaaggccacgcccgtgttccgcgccccgggcctcacctccgtggccgtggccagcgtcaacaactacacagcggtcttcctgggcacggtcaacgggaggcttctcaagatcaacctgaacgagagcatgcaggtggtgagcaggcgggtggtgactgtggcctatggggagcccgtgcaccatgtcatgcagtttgacccagcagactccggttacctttacctgatgacgtcccaccagatggccagggtgaaggtcgccgcctgcaacgtgcactccacctgtggggactgcgtgggtgcggcggacgcctactgcggctggtgtgccctggagacgcgccagcagcatttctggaccagtgccagcgagggccccagccgctgtcctgccatgaccgtcctgccttccgagatcgatgtgcgccaggagtacccaggcatgatcctgcagatctcgggcagcctgcccagcctcagtggcatggagatggcctgtgactatgggaacaacatccgcactgtggctcgggtcccaggccctgcctttggtcaccagattgcctactgcaacctcctgccgagggaccagtttccgcccttcccccccaaccaggaccacgtgactgttgagatgtctgtgagggtcaatgggcggaacatcgtcaaggccaatttcaccatctacgactgcagccgcactgcacaagtgtacccccacacagcctgtaccagctgcctgtcggcacagtggccctgtttctggtgcagccagcagcactcctgtgtttccaaccagtctcggtgcgaggcctcaccaaaccccacgagccctcaggactgcccccggaccctgctctcacccctggcacccgtgcctaccggtggctcccagaacatcctggtgcctctggccaacactgcctttttccagggtgcagccctggagtgtagttttgggctggaggagatcttcgaggctgtgtgggtgaatgagtctgttgtacgctgtgaccaggtggtgctgcacacgacccggaagagccaggtgttcccgctcagcctccaactaaaggggcggccagcccgattcctggacagccctgagcccatgacagtcatggtctataactgtgccatgggcagccccgactgttcccagtgcctgggccgcgaagacctgggtcacctgtgcgtgtggagtgatggctgccgcctgcgggggcctctgcagcccatggctggcacctgccccgcccccgagatccgcgcgattgagcccctgagtggcccgttggacggtgggaccctgctgaccatccgaggaaggaacctgggccggcggctcagtgacgtggcccacggcgtgtggattggtggtgtggcctgtgagccactgcctgacagatacacggtgtcggaggagatcgtgtgtgtcacagggccagccccaggaccgctctcaggtgtggtgaccgtgaacgcctctaaggagggcaagtcccgggaccgcttctcctacgtgctgcccctggtccactccctggagcctaccatgggccccaaggccgggggcaccaggatcaccatccatgggaatgacctccatgtaggctccgagctccaggtcctggtgaacgacacagacccctgcacggagctgatgcgcacagataccagcatcgcctgcaccatgcctgagggggccctgccggctccggtgcctgtgtgtgtgcgcttcgagcgtcggggctgcgtgcacggcaacctcaccttctggtacatgcagaacccggtcatcacggccatcagtccccgccgcagccctgtcagtggcggcaggaccatcacagtggctggtgagcgtttccacatggtgcagaatgtgtccatggccgtccaccacattggccgggagcccacgctctgcaaggttctcaactccaccctcatcacctgcccgtcccccggggccctgagcaacgcatcagcgccagtggacttcttcatcaatgggcgggcctacgcagacgaggtggctgtggctgaggagctactggaccccgaggaggcacagcggggcagcaggttccgcctggactacctccccaacccacagttctctacggccaagagggagaagtggatcaagcaccaccccggggagcctctcaccctcgttatccacaaggagcaggacagcctggggctccagagtcacgagtaccgggtcaagataggccaagtaagctgcgacatccagattgtctctgacagaatcatccactgctcggtcaacgagtccctgggcgcggccgtggggcagctgcccatcacaatccaggtagggaacttcaaccagaccatcgccacactgcagctggggggcagcgagacggccatcatcgtgtccatcgtcatctgcagcgtcctgctgctgctctccgtggtggccctgttcgtcttctgtaccaagagccgacgtgctgagcgttactggcagaagacgctgctgcagatggaggagatggaatctcagatccgagaggaaatccgcaaaggcttcgctgagctgcagacagacatgacagatctcaccaaggagctgaaccgcagccagggcatccccttcctggagtataagcacttcgtgacccgcaccttcttccccaagtgttcctccctttatgaagagcgttacgtgctgccctcccagaccctcaactcccagggcagctcccaggcacaggaaacccacccactgctgggagagtggaagattcctgagagctgccggcccaacatggaagagggaattagcttgttctcctcactactcaacaacaagcacttcctcatcgtctttgtccacgcgctggagcagcagaaggactttgcggtgcgcgacaggtgcagcctggcctcgctgctgaccatcgcgctgcacggcaagctggagtactacaccagcatcatgaaggagctgctggtggacctcattgacgcctcggccgccaagaaccccaagctcatgctgcggcgcacagagtctgtggtggagaagatgctcaccaactggatgtccatctgcatgtacagctgtctgcgggagacggtgggggagccattcttcctgctgctgtgtgccatcaagcagcaaatcaacaagggctccatcgacgccatcacaggcaaggcccgctacacactcaatgaggagtggctgctgcgggagaacatcgaggccaagccccggaacctgaacgtgtccttccagggctgtggcatggactcgctgagcgtgcgggccatggacaccgacacgctgacacaggtcaaggagaagatcctggaggccttctgcaagaatgtgccctactcccagtggccgcgtgcagaggacgtcgaccttgagtggttcgcctccagcacacagagctacatccttcgggacctggacgacacctcagtggtggaagacggccgcaagaagcttaacacgctggcccattacaagatccctgaaggtgcctccctggccatgagtctcatagacaagaaggacaacacactgggccgagtgaaagacttggacacagagaagtatttccatttggtgctgcctacggacgagctggcggagcccaagaagtctcaccggcagagccatcgcaagaaggtgctcccggaaatctacctgacccgcctgctctccaccaagggcacgttgcagaagtttctggatgacctgttcaaggccattctgagtatccgtgaagacaagcccccactggctgtcaagtactttttcgacttcctggaggagcaggctgagaagaggggaatctccgaccccgacaccctacacatctggaagaccaacagccttcctctccggttctgggtgaacatcctgaagaacccccagtttgtctttgacatcgacaagacagaccacatcgacgcctgcctttcagtcatcgcgcaggccttcatcgacgcctgctccatctctgacctgcagctgggcaaggattcgccaaccaacaagctcctctacgccaaggagattcctgagtaccggaagatcgtgcagcgctactacaagcagatccaggacatgacgccgctcagcgagcaagagatgaatgcccatctggccgaggagtcgaggaaataccagaatgagttcaacaccaatgtggccatggcagagatttataagtacgccaagaggtatcggccgcagatcatggccgcgctggaggccaaccccacggcccggaggacacaactgcagcacaagtttgagcaggtggtggctttgatggaggacaacatctacgagtgctacagtgaggcctgagacacatggagagttggtcaggctgctgctgggagaaatggacgcccactgggcctcaacttgatcttctaccccgtgcctgtgactcagactgggaaatactgagcagagacggctggggcgggggcaggaggaggggctgctctctgagacaggggcgcccccgccttgacccctgggcacctccatcccctcccacctgtccccagatcagtctctgggatggaggccagagagctggtcaggctcccccatctgcccagcacggcctgcactgtgcccacccacttgctccacaacgtccagttggtcctgctgccaagagccccgtgcatccaggcggccaagcacaaactgggggagaggaggccgccagcccggaggctgcagcccagaaactctacctcatccacactggtgcagggagccctccttgaactgacctttgattggtttctgcttcaactaccaaaatgttatctccacttccccctcacccgtagaggatcctggccacagacagtttcaagtagtgtcagatttttgttgcttgggcggctgttggtagagtgggcagtgcccgcgccatggggtgctctgtgggcttctccaggagcagggagggtggaggggagggatggggggcacaggagctgggagccccgtctccaggaaaaggagaggggttaagatgcaccgaggctgtagctgggctacttgatcttgctgaaagtgtttctaaagatagcaccacttttttttttaaagcttttatatattaaaaaacgtatcatgcaccaactgtgaatagctgccgcttgcgcagaggacccggggaggggtcccgagaggctccccatgcaacactggaaatgactgttccagagagcgggcagacctggcagagcgcccctggcgcctgagactaccacccactccgttcctgccagaaacgaccctctgtggccgatgggccatgcgggcccctcgcagccaactcagccagtgttgggactggctcagagcccatgggggctggaggggggcagctgggactctggaatcttctttataataaaagccttacggacaaacctaaaaaaaaacggcacgagggggggccccgtaccacaatttgcccttatagtgaggtgtatttacaatttaactggccgccggttttacaaccttttggactgggaaaaaccctgggctttaccccaaactttaaacggctttgctgaaaaataccc

SEQ ID NO: 464090 - DNA, 3620 bp, Homo sapiens
cacgccgactcttgaggatcaacagcggcagacgaggtggctgtggctgaggagctactggaccccgaggaggcacagcggggcagcaggttccgcctggactacctccccaacccacagttctctacggccaagagggagaagtggatcaagcaccaccccggggagcctctcaccctcgttatccacaaggagcaggacagcctggggctccagagtcacgagtaccgggtcaagataggccaagtaagctgcgacatccagattgtctctgacagaatcatccactgctcggtcaacgagtccctgggcgcggccgtggggcagctgcccatcacaatccaggtagggaacttcaaccagaccatcgccacactgcagctggggggcagcgagacggccatcatcgtgtccatcgtcatctgcagcgtcctgctgctgctctccgtggtggccctgttcgtcttctgtaccaagagccgacgtgctgagcgttactggcagaagacgctgctgcagatggaggagatggaatctcagatccgagaggaaatccgcaaaggcttcgctgagctgcagacagacatgacagatctcaccaaggagctgaaccgcagccagggcatccccttcctggagtataagcacttcgtgacccgcaccttcttccccaagtgttcctccctttatgaagagcgttacgtgctgccctcccagaccctcaactcccagggcagctcccaggcacaggaaacccacccactgctgggagagtggaagattcctgagagctgccggcccaacatggaagagggaattagcttgttctcctcactactcaacaacaagcacttcctcatcgtctttgtccacgcgctggagcagcagaaggactttgcggtgcgcgacaggtgcagcctggcctcgctgctgaccatcgcgctgcacggcaagctggagtactacaccagcatcatgaaggagctgctggtggacctcattgacgcctcggccgccaagaaccccaagctcatgctgcggcgcacagagtctgtggtggagaagatgctcaccaactggatgtccatctgcatgtacagctgtctgcgggagacggtgggggagccattcttcctgctgctgtgtgccatcaagcagcaaatcaacaagggctccatcgacgccatcacaggcaaggcccgctacacactcaatgaggagtggctgctgcgggagaacatcgaggccaagccccggaacctgaacgtgtccttccagggctgtggcatggactcgctgagcgtgcgggccatggacaccgacacgctgacacaggtcaaggagaagatcctggaggccttctgcaagaatgtgccctactcccagtggccgcgtgcagaggacgtcgaccttgagtggttcgcctccagcacacagagctacatccttcgggacctggacgacacctcagtggtggaagacggccgcaagaagcttaacacgctggcccattacaagatccctgaaggtgcctccctggccatgagtctcatagacaagaaggacaacacactgggccgagtgaaagacttggacacagagaagtatttccatttggtgctgcctacggacgagctggcggagcccaagaagtctcaccggcagagccatcgcaagaaggtgctcccggaaatctacctgacccgcctgctctccaccaagggcacgttgcagaagtttctggatgacctgttcaaggccattctgagtatccgtgaagacaagcccccactggctgtcaagtactttttcgacttcctggaggagcaggctgagaagaggggaatctccgaccccgacaccctacacatctggaagaccaacagccttcctctccggttctgggtgaacatcctgaagaacccccagtttgtctttgacatcgacaagacagaccacatcgacgcctgcctttcagtcatcgcgcaggccttcatcgacgcctgctccatctctgacctgcagctgggcaaggattcgccaaccaacaagctcctctacgccaaggagattcctgagtaccggaagatcgtgcagcgctactacaagcagatccaggacatgacgccgctcagcgagcaagagatgaatgcccatctggccgaggagtcgaggaaataccagaatgagttcaacaccaatgtggccatggcagagatttataagtacgccaagaggtatcggccgcagatcatggccgcgctggaggccaaccccacggcccggaggacacaactgcagcacaagtttgagcaggtggtggctttgatggaggacaacatctacgagtgctacagtgaggcctgagacacatggagagttggtcaggctgctgctgggagaaatggacgcccactgggcctcaacttgatcttctaccccgtgcctgtgactcagactgggaaatactgagcagagacggctggggcgggggcaggaggaggggctgctctctgagacaggggcgcccccgccttgacccctgggcacctccatcccctcccacctgtccccagatcagtctctgggatggaggccagagagctggtcaggctcccccatctgcccagcacggcctgcactgtgcccacccacttgctccacaacgtccagttggtcctgctgccaagagccccgtgcatccaggcggccaagcacaaactgggggagaggaggccgccagcccggaggctgcagcccagaaactctacctcatccacactggtgcagggagccctccttgaactgacctttgattggtttctgcttcaactaccaaaatgttatctccacttccccctcacccgtagaggatcctggccacagacagtttcaagtagtgtcagatttttgttgcttgggcggctgttggtagagtgggcagtgcccgcgccatggggtgctctgtgggcttctccaggagcagggagggtggaggggagggatggggggcacaggagctgggagccccgtctccaggaaaaggagaggggttaagatgcaccgaggctgtagctgggctacttgatcttgctgaaagtgtttctaaagatagcaccacttttttttttaaagcttttatatattaaaaaacgtatcatgcaccaactgtgaatagctgccgcttgcgcagaggacccggggaggggtcccgagaggctccccatgcaacactggaaatgactgttccagagagcgggcagacctggcagagcgcccctggcgcctgagactaccacccactccgttcctgccagaaacgaccctctgtggccgatgggccatgcgggcccctcgcagccaactcagccagtgttgggactggctcagagcccatgggggctggaggggggcagctgggactctggaatcttctttataataaaagccttacggacaaacctaaaaaaaaacggcacgagggggggccccgtaccacaatttgcccttatagtgaggtgtatttacaatttaactggccgccggttttacaaccttttggactgggaaaaaccctgggctttaccccaaactttaaacggctttgctgaaaaataccc

SEQ ID NO: 464091 - DNA, 7427 bp, Homo sapiens
  misc_feature (155)..(155): n is a, c, g, or t
ccgggctgcgcggcgaggctgagccgggcccgggcgccggggccgggggcggctggcgcgggcaggaagcgcctcgcggcccgggcccgccccccgcctctcgcccgctccgggctcccggctcccggccggcgctcgtcccatgcaatagccgngccgcgcagcccgcgcacgcccggatggctcttcgcgccgcgggcggcgcaccctttagcggcccggcgccgctgccagccccccgccgttccagacgccgccgcggtgcccggtgccgctgctgttgctgctgctcctgggggcggcgcgggccggcgccctggagatccagcgtcggttcccctcgcccacgcccaccaacaacttcgccctggacggcgcggcggggaccgtgtacctggcggccgtcaaccgcctctatcagctgtcgggcgccaacctgagcctggaggccgaggcggccgtgggcccggtgcccgacagcccgctgtgtcacgctccgcagctgccgcaggcctcgtgcgagcacccgcggcgcctcacggacaactacaacaagatcctgcagctggaccccggccagggcctggtagtcgtgtgcgggtccatctaccagggcttctgccagctgcggcgccggggcaacatctcggccgtggccgtgcgcttcccgcccgccgcgccgcccgccgagcccgtcacggtgttccccagcatgctgaacgtggcggccaaccacccgaacgcgtccaccgtggggctagttctgcctcccgccgcgggcgcggggggcagccgcctgctcgtgggcgccacgtacaccggttacggcagctccttcttcccgcgcaaccgcagcctggaggaccaccgcttcgagaacacgcccgagatcgccatccgctccctggacacgcgcggcgacctggccaagctcttcaccttcgacctcaacccctccgacgacaacatcctcaagatcaagcagggcgccaaggagcagcacaagctgggcttcgtgagcgccttcctgcacccgtccgacccgccgccgggtgcacagtcctacgcgtacctggcgctcaacagcgaggcgcgcgcgggcgacaaggagagccaggcgcggagcctgctggcgcgcatctgcctgccccacggcgccggcggcgacgccaagaagctcaccgagtcctacatccagttgggcttgcagtgcgcgggcggcgcgggccgcggcgacctctacagccgcctggtgtcggtcttcccagcccgggagcggctctttgctgtcttcgagcggccccaggggtcccccgcggcccgcgctgctccggccgcactctgcgccttccgcttcgccgacgtgcgagccgccatccgagctgcgcgcaccgcctgcttcgtggaaccggcgcccgacgtggtggcggtgctcgacagcgtggtgcagggcacgggaccggcctgcgagcgcaagctcaacatccagctccagccagagcagctggactgtggagctgctcacctgcagcacccgctgtccatcctgcagcccctgaaggccacgcccgtgttccgcgccccgggcctcacctccgtggccgtggccagcgtcaacaactacacagcggtcttcctgggcacggtcaacgggaggcttctcaagatcaacctgaacgagagcatgcaggtggtgagcaggcgggtggtgactgtggcctatggggagcccgtgcaccatgtcatgcagtttgacccagcagactccggttacctttacctgatgacgtcccaccagatggccagggtgaaggtcgccgcctgcaacgtgcactccacctgtggggactgcgtgggtgcggcggacgcctactgcggctggtgtgccctggagacgcggtgcaccttgcagcaggactgcaccaattccagccagcagcatttctggaccagtgccagcgagggccccagccgctgtcctgccatgaccgtcctgccttccgagatcgatgtgcgccaggagtacccaggcatgatcctgcagatctcgggcagcctgcccagcctcagtggcatggagatggcctgtgactatgggaacaacatccgcactgtggctcgggtcccaggccctgcctttggtcaccagattgcctactgcaacctcctgccgagggaccagtttccgcccttcccccccaaccaggaccacgtgactgttgagatgtctgtgagggtcaatgggcggaacatcgtcaaggccaatttcaccatctacgactgcagccgcactgcacaagtgtacccccacacagcctgtaccagctgcctgtcggcacagtggccctgtttctggtgcagccagcagcactcctgtgtttccaaccagtctcggtgcgaggcctcaccaaaccccacgagccctcaggactgcccccggaccctgctctcacccctggcacccgtgcctaccggtggctcccagaacatcctggtgcctctggccaacactgcctttttccagggtgcagccctggagtgtagttttgggctggaggagatcttcgaggctgtgtgggtgaatgagtctgttgtacgctgtgaccaggtggtgctgcacacgacccggaagagccaggtgttcccgctcagcctccaactaaaggggcggccagcccgattcctggacagccctgagcccatgacagtcatggtctataactgtgccatgggcagccccgactgttcccagtgcctgggccgcgaagacctgggtcacctgtgcgtgtggagtgatggctgccgcctgcgggggcctctgcagcccatggctggcacctgccccgcccccgagatccgcgcgattgagcccctgagtggcccgttggacggtgggaccctgctgaccatccgaggaaggaacctgggccggcggctcagtgacgtggcccacggcgtgtggattggtggtgtggcctgtgagccactgcctgacagatacacggtgtcggaggagatcgtgtgtgtcacagggccagccccaggaccgctctcaggtgtggtgaccgtgaacgcctctaaggagggcaagtcccgggaccgcttctcctacgtgctgcccctggtccactccctggagcctaccatgggccccaaggccgggggcaccaggatcaccatccatgggaatgacctccatgtaggctccgagctccaggtcctggtgaacgacacagacccctgcacggagctgatgcgcacagataccagcatcgcctgcaccatgcctgagggggccctgccggctccggtgcctgtgtgtgtgcgcttcgagcgtcggggctgcgtgcacggcaacctcaccttctggtacatgcagaacccggtcatcacggccatcagtccccgccgcagccctgtcagtggcggcaggaccatcacagtggctggtgagcgtttccacatggtgcagaatgtgtccatggccgtccaccacattggccgggagcccacgctctgcaaggttctcaactccaccctcatcacctgcccgtcccccggggccctgagcaacgcatcagcgccagtggacttcttcatcaatgggcgggcctacgcagacgaggtggctgtggctgaggagctactggaccccgaggaggcacagcggggcagcaggttccgcctggactacctccccaacccacagttctctacggccaagagggagaagtggatcaagcaccaccccggggagcctctcaccctcgttatccacaaggagcaggacagcctggggctccagagtcacgagtaccgggtcaagataggccaagtaagctgcgacatccagattgtctctgacagaatcatccactgctcggtcaacgagtccctgggcgcggccgtggggcagctgcccatcacaatccaggtagggaacttcaaccagaccatcgccacactgcagctggggggcagcgagacggccatcatcgtgtccatcgtcatctgcagcgtcctgctgctgctctccgtggtggccctgttcgtcttctgtaccaagagccgacgtgctgagcgttactggcagaagacgctgctgcagatggaggagatggaatctcagatccgagaggaaatccgcaaaggcttcgctgagctgcagacagacatgacagatctcaccaaggagctgaaccgcagccagggcatccccttcctggagtataagcacttcgtgacccgcaccttcttccccaagtgttcctccctttatgaagagcgttacgtgctgccctcccagaccctcaactcccagggcagctcccaggcacaggaaacccacccactgctgggagagtggaagattcctgagagctgccggcccaacatggaagagggaattagcttgttctcctcactactcaacaacaagcacttcctcatcgtctttgtccacgcgctggagcagcagaaggactttgcggtgcgcgacaggtgcagcctggcctcgctgctgaccatcgcgctgcacggcaagctggagtactacaccagcatcatgaaggagctgctggtggacctcattgacgcctcggccgccaagaaccccaagctcatgctgcggcgcacagagtctgtggtggagaagatgctcaccaactggatgtccatctgcatgtacagctgtctgcgggagacggtgggggagccattcttcctgctgctgtgtgccatcaagcagcaaatcaacaagggctccatcgacgccatcacaggcaaggcccgctacacactcaatgaggagtggctgctgcgggagaacatcgaggccaagccccggaacctgaacgtgtccttccagggctgtggcatggactcgctgagcgtgcgggccatggacaccgacacgctgacacaggtcaaggagaagatcctggaggccttctgcaagaatgtgccctactcccagtggccgcgtgcagaggacgtcgaccttgagtggttcgcctccagcacacagagctacatccttcgggacctggacgacacctcagtggtggaagacggccgcaagaagcttaacacgctggcccattacaagatccctgaaggtgcctccctggccatgagtctcatagacaagaaggacaacacactgggccgagtgaaagacttggacacagagaagtatttccatttggtgctgcctacggacgagctggcggagcccaagaagtctcaccggcagagccatcgcaagaaggtgctcccggaaatctacctgacccgcctgctctccaccaagggcacgttgcagaagtttctggatgacctgttcaaggccattctgagtatccgtgaagacaagcccccactggctgtcaagtactttttcgacttcctggaggagcaggctgagaagaggggaatctccgaccccgacaccctacacatctggaagaccaacagccttcctctccggttctgggtgaacatcctgaagaacccccagtttgtctttgacatcgacaagacagaccacatcgacgcctgcctttcagtcatcgcgcaggccttcatcgacgcctgctccatctctgacctgcagctgggcaaggattcgccaaccaacaagctcctctacgccaaggagattcctgagtaccggaagatcgtgcagcgctactacaagcagatccaggacatgacgccgctcagcgagcaagagatgaatgcccatctggccgaggagtcgaggaaataccagaatgagttcaacaccaatgtggccatggcagagatttataagtacgccaagaggtatcggccgcagatcatggccgcgctggaggccaaccccacggcccggaggacacaactgcagcacaagtttgagcaggtggtggctttgatggaggacaacatctacgagtgctacagtgaggcctgagacacatggagagttggtcaggctgctgctgggagaaatggacgcccactgggcctcaacttgatcttctaccccgtgcctgtgactcagactgggaaatactgagcagagacggctggggcgggggcaggaggaggggctgctctctgagacaggggcgcccccgccttgacccctgggcacctccatcccctcccacctgtccccagatcagtctctgggatggaggccagagagctggtcaggctcccccatctgcccagcacggcctgcactgtgcccacccacttgctccacaacgtccagttggtcctgctgccaagagccccgtgcatccaggcggccaagcacaaactgggggagaggaggccgccagcccggaggctgcagcccagaaactctacctcatccacactggtgcagggagccctccttgaactgacctttgattggtttctgcttcaactaccaaaatgttatctccacttccccctcacccgtagaggatcctggccacagacagtttcaagtagtgtcagatttttgttgcttgggcggctgttggtagagtgggcagtgcccgcgccatggggtgctctgtgggcttctccaggagcagggagggtggaggggagggatggggggcacaggagctgggagccccgtctccaggaaaaggagaggggttaagatgcaccgaggctgtagctgggctacttgatcttgctgaaagtgtttctaaagatagcaccacttttttttttaaagcttttatatattaaaaaacgtatcatgcgggcccctcgcagccaactcagccagtgttgggactggctcagagcccatgggggctggaggggggcagctgggactctggaatcttctttataataaaagccttacggacaaacctaaaaaaaaaaaaaaaaaaaaaaaaaaaaaaaaaaaaaaaaaaaaaaaaaaaaaaaaaaaaaaaaaaaaaaaaaaaaaaaaaaaagggggggggcgcaaaaaattcccccgggggggcccaagttttccgcggatccccgcgttttctttgtcaccaagggggcggcccattatgaggggcgcgagtattattaagccgaagaggagcaccgggccggggcctggttataacccagcgctttctgttcgcggggagaaaactcgtcgcctagcgggggcggggctcttgtgggggagggagcccctctatcttcttgtgggggcgggggcgcaaccttcctgtggggcaccaccctcccgcaaaccgagaagattattaaacgcgcctctaagcggggaatactataacaccattttcacgggttgcttattcgtggtgttcacacccagcggtacttattgtcccgtgcgcgtcctagaaatatttgtgccaccggcgagctcttgattttggtgcaacaaacttttttccccggacggtggtgtgtgttataattag

SEQ ID NO: 464092 - DNA, 6885 bp, Homo sapiens
  misc_feature (155)..(155): n is a, c, g, or t
ccgggctgcgcggcgaggctgagccgggcccgggcgccggggccgggggcggctggcgcgggcaggaagcgcctcgcggcccgggcccgccccccgcctctcgcccgctccgggctcccggctcccggccggcgctcgtcccatgcaatagccgngccgcgcagcccgcgcacgcccggatggctcttcgcgccgcgggcggcgcaccctttagcggcccggcgccgctgccagccccccgccgttccagacgccgccgcggtgcccggtgccgctgctgttgctgctgctcctgggggcggcgcgggccggcgccctggagatccagcgtcggttcccctcgcccacgcccaccaacaacttcgccctggacggcgcggcggggaccgtgtacctggcggccgtcaaccgcctctatcagctgtcgggcgccaacctgagcctggaggccgaggcggccgtgggcccggtgcccgacagcccgctgtgtcacgctccgcagctgccgcaggcctcgtgcgagcacccgcggcgcctcacggacaactacaacaagatcctgcagctggaccccggccagggcctggtagtcgtgtgcgggtccatctaccagggcttctgccagctgcggcgccggggcaacatctcggccgtggccgtgcgcttcccgcccgccgcgccgcccgccgagcccgtcacggtgttccccagcatgctgaacgtggcggccaaccacccgaacgcgtccaccgtggggctagttctgcctcccgccgcgggcgcggggggcagccgcctgctcgtgggcgccacgtacaccggttacggcagctccttcttcccgcgcaaccgcagcctggaggaccaccgcttcgagaacacgcccgagatcgccatccgctccctggacacgcgcggcgacctggccaagctcttcaccttcgacctcaacccctccgacgacaacatcctcaagatcaagcagggcgccaaggagcagcacaagctgggcttcgtgagcgccttcctgcacccgtccgacccgccgccgggtgcacagtcctacgcgtacctggcgctcaacagcgaggcgcgcgcgggcgacaaggagagccaggcgcggagcctgctggcgcgcatctgcctgccccacggcgccggcggcgacgccaagaagctcaccgagtcctacatccagttgggcttgcagtgcgcgggcggcgcgggccgcggcgacctctacagccgcctggtgtcggtcttcccagcccgggagcggctctttgctgtcttcgagcggccccaggggtcccccgcggcccgcgctgctccggccgcactctgcgccttccgcttcgccgacgtgcgagccgccatccgagctgcgcgcaccgcctgcttcgtggaaccggcgcccgacgtggtggcggtgctcgacagcgtggtgcagggcacgggaccggcctgcgagcgcaagctcaacatccagctccagccagagcagctggactgtggagctgctcacctgcagcacccgctgtccatcctgcagcccctgaaggccacgcccgtgttccgcgccccgggcctcacctccgtggccgtggccagcgtcaacaactacacagcggtcttcctgggcacggtcaacgggaggcttctcaagatcaacctgaacgagagcatgcaggtggtgagcaggcgggtggtgactgtggcctatggggagcccgtgcaccatgtcatgcagtttgacccagcagactccggttacctttacctgatgacgtcccaccagatggccagggtgaaggtcgccgcctgcaacgtgcactccacctgtggggactgcgtgggtgcggcggacgcctactgcggctggtgtgccctggagacgcgccagcagcatttctggaccagtgccagcgagggccccagccgctgtcctgccatgaccgtcctgccttccgagatcgatgtgcgccaggagtacccaggcatgatcctgcagatctcgggcagcctgcccagcctcagtggcatggagatggcctgtgactatgggaacaacatccgcactgtggctcgggtcccaggccctgcctttggtcaccagattgcctactgcaacctcctgccgagggaccagtttccgcccttcccccccaaccaggaccacgtgactgttgagatgtctgtgagggtcaatgggcggaacatcgtcaaggccaatttcaccatctacgactgcagccgcactgcacaagtgtacccccacacagcctgtaccagctgcctgtcggcacagtggccctgtttctggtgcagccagcagcactcctgtgtttccaaccagtctcggtgcgaggcctcaccaaaccccacgagccctcaggactgcccccggaccctgctctcacccctggcacccgtgcctaccggtggctcccagaacatcctggtgcctctggccaacactgcctttttccagggtgcagccctggagtgtagttttgggctggaggagatcttcgaggctgtgtgggtgaatgagtctgttgtacgctgtgaccaggtggtgctgcacacgacccggaagagccaggtgttcccgctcagcctccaactaaaggggcggccagcccgattcctggacagccctgagcccatgacagtcatggtctataactgtgccatgggcagccccgactgttcccagtgcctgggccgcgaagacctgggtcacctgtgcgtgtggagtgatggctgccgcctgcgggggcctctgcagcccatggctggcacctgccccgcccccgagatccgcgcgattgagcccctgagtggcccgttggacggtgggaccctgctgaccatccgaggaaggaacctgggccggcggctcagtgacgtggcccacggcgtgtggattggtggtgtggcctgtgagccactgcctgacagatacacggtgtcggaggagatcgtgtgtgtcacagggccagccccaggaccgctctcaggtgtggtgaccgtgaacgcctctaaggagggcaagtcccgggaccgcttctcctacgtgctgcccctggtccactccctggagcctaccatgggccccaaggccgggggcaccaggatcaccatccatgggaatgacctccatgtaggctccgagctccaggtcctggtgaacgacacagacccctgcacggagctgatgcgcacagataccagcatcgcctgcaccatgcctgagggggccctgccggctccggtgcctgtgtgtgtgcgcttcgagcgtcggggctgcgtgcacggcaacctcaccttctggtacatgcagaacccggtcatcacggccatcagtccccgccgcagccctgtcagtggcggcaggaccatcacagtggctggtgagcgtttccacatggtgcagaatgtgtccatggccgtccaccacattggccgggagcccacgctctgcaaggttctcaactccaccctcatcacctgcccgtcccccggggccctgagcaacgcatcagcgccagtggacttcttcatcaatgggcgggcctacgcagacgaggtggctgtggctgaggagctactggaccccgaggaggcacagcggggcagcaggttccgcctggactacctccccaacccacagttctctacggccaagagggagaagtggatcaagcaccaccccggggagcctctcaccctcgttatccacaaggagcaggacagcctggggctccagagtcacgagtaccgggtcaagataggccaagtaagctgcgacatccagattgtctctgacagaatcatccactgctcggtcaacgagtccctgggcgcggccgtggggcagctgcccatcacaatccaggtagggaacttcaaccagaccatcgccacactgcagctggggggcagcgagacggccatcatcgtgtccatcgtcatctgcagcgtcctgctgctgctctccgtggtggccctgttcgtcttctgtaccaagagccgacgtgctgagcgttactggcagaagacgctgctgcagatggaggagatggaatctcagatccgagaggaaatccgcaaaggcttcgctgagctgcagacagacatgacagatctcaccaaggagctgaaccgcagccagggcatccccttcctggagtataagcacttcgtgacccgcaccttcttccccaagtgttcctccctttatgaagagcgttacgtgctgccctcccagaccctcaactcccagggcagctcccaggcacaggaaacccacccactgctgggagagtggaagattcctgagagctgccggcccaacatggaagagggaattagcttgttctcctcactactcaacaacaagcacttcctcatcgtctttgtccacgcgctggagcagcagaaggactttgcggtgcgcgacaggtgcagcctggcctcgctgctgaccatcgcgctgcacggcaagctggagtactacaccagcatcatgaaggagctgctggtggacctcattgacgcctcggccgccaagaaccccaagctcatgctgcggcgcacagagtctgtggtggagaagatgctcaccaactggatgtccatctgcatgtacagctgtctgcgggagacggtgggggagccattcttcctgctgctgtgtgccatcaagcagcaaatcaacaagggctccatcgacgccatcacaggcaaggcccgctacacactcaatgaggagtggctgctgcgggagaacatcgaggccaagccccggaacctgaacgtgtccttccagggctgtggcatggactcgctgagcgtgcgggccatggacaccgacacgctgacacaggtcaaggagaagatcctggaggccttctgcaagaatgtgccctactcccagtggccgcgtgcagaggacgtcgaccttgagtggttcgcctccagcacacagagctacatccttcgggacctggacgacacctcagtggtggaagacggccgcaagaagcttaacacgctggcccattacaagatccctgaaggtgcctccctggccatgagtctcatagacaagaaggacaacacactgggccgagtgaaagacttggacacagagaagtatttccatttggtgctgcctacggacgagctggcggagcccaagaagtctcaccggcagagccatcgcaagaaggtgctcccggaaatctacctgacccgcctgctctccaccaagggcacgttgcagaagtttctggatgacctgttcaaggccattctgagtatccgtgaagacaagcccccactggctgtcaagtactttttcgacttcctggaggagcaggctgagaagaggggaatctccgaccccgacaccctacacatctggaagaccaacagccttcctctccggttctgggtgaacatcctgaagaacccccagtttgtctttgacatcgacaagacagaccacatcgacgcctgcctttcagtcatcgcgcaggccttcatcgacgcctgctccatctctgacctgcagctgggcaaggattcgccaaccaacaagctcctctacgccaaggagattcctgagtaccggaagatcgtgcagcgctactacaagcagatccaggacatgacgccgctcagcgagcaagagatgaatgcccatctggccgaggagtcgaggaaataccagaatgagttcaacaccaatgtggccatggcagagatttataagtacgccaagaggtatcggccgcagatcatggccgcgctggaggccaaccccacggcccggaggacacaactgcagcacaagtttgagcaggtggtggctttgatggaggacaacatctacgagtgctacagtgaggcctgagacacatggagagttggtcaggctgtgccaagagccccgtgcatccaggcggccaagcacaaactgggggagaggaggccgccagcccggaggctgcagcccagaaactctacctcatccacactggtgcagggagccctccttgaactgacctttgattggtttctgcttcaactaccaaaatgttatctccacttccccctcacccgtagaggatcctggccacagacagtttcaagtagtgtcagatttttgttgcttgggcggctgttggtagagtgggcagtgcccgcgccatggggtgctctgtgggcttctccaggagcagggagggtggaggggagggatggggggcacaggagctgggagccccgtctccaggaaaaggagaggggttaagatgcaccgaggctgtagctgggctacttgatcttgctgaaagtgtttctaaagatagcaccacttttttttttaaagcttttatatattaaaaaacgtatcatgcaccaactgtgaatagctgccgcttgcgcagaggacccggggaggggtcccgagaggctccccatgcaacactggaaatgactgttccagagagcgggcagacctggcagagcgcccctggcgcctgagactaccacccactccgttcctgccagaaacgaccctctgtggccgatgggccatgcgggcccctcgcagccaactcagccagtgttgggactggctcagagcccatgggggctggaggggggcagctgggactctggaatcttctttataataaaagccttacggacaaacctaaaaaaaaacggcacgagggggggccccgtaccacaatttgcccttatagtgaggtgtatttacaatttaactggccgccggttttacaaccttttggactgggaaaaaccctgggctttaccccaaactttaaacggctttgctgaaaaataccc

SEQ ID NO: 464093 - DNA, 1580 bp, Homo sapiens
  misc_feature (38)..(38): n is a, c, g, or t
gatcgctgtctctagagcataaaataaaggcgagtganttaccggaagatcgtgcagcgctactacaagcagatccaggacatgacgccgctcagcgagcaagagatgaatgcccatctggccgaggagtcgaggaaataccagaatgagttcaacaccaatgtggccatggcagagatttataagtacgccaagaggtatcggccgcagatcatggccgcgctggaggccaaccccacggcccggaggacacaactgcagcacaagtttgagcaggtggtggctttgatggaggacaacatctacgagtgctacagtgaggcctgagacacatggagagttggtcaggctgctgctgggagaaatggacgcccactgggcctcaacttgatcttctaccccgtgcctgtgactcagactgggaaatactgagcagagacggctggggcgggggcaggaggaggggctgctctctgagacaggggcgcccccgccttgacccctgggcacctccatcccctcccacctgtccccagatcagtctctgggatggaggccagagagctggtcaggctcccccatctgcccagcacggcctgcactgtgcccacccacttgctccacaacgtccagttggtcctgctgccaagagccccgtgcatccaggcggccaagcacaaactgggggagaggaggccgccagcccggaggctgcagcccagaaactctacctcatccacactggtgcagggagccctccttgaactgacctttgattggtttctgcttcaactaccaaaatgttatctccacttccccctcacccgtagaggatcctggccacagacagtttcaagtagtgtcagatttttgttgcttgggcggctgttggtagagtgggcagtgcccgcgccatggggtgctctgtgggcttctccaggagcagggagggtggaggggagggatggggggcacaggagctgggagccccgtctccaggaaaaggagaggggttaagatgcaccgaggctgtagctgggctacttgatcttgctgaaagtgtttctaaagatagcaccacttttttttttaaagcttttatatattaaaaaacgtatcatgcaccaactgtgaatagctgccgcttgcgcagaggacccggggaggggtcccgagaggctccccatgcaacactggaaatgactgttccagagagcgggcagacctggcagagcgcccctggcgcctgagactaccacccactccgttcctgccagaaacgaccctctgtggccgatgggccatgcgggcccctcgcagccaactcagccagtgttgggactggctcagagcccatgggggctggaggggggcagctgggactctggaatcttctttataataaaagccttacggacaaacctaaaaaaaaacggcacgagggggggccccgtaccacaatttgcccttatagtgaggtgtatttacaatttaactggccgccggttttacaaccttttggactgggaaaaaccctgggctttaccccaaactttaaacggctttgctgaaaaataccc

SEQ ID NO: 464094 - DNA, 6444 bp, Homo sapiens
  misc_feature (155)..(155): n is a, c, g, or t
ccgggctgcgcggcgaggctgagccgggcccgggcgccggggccgggggcggctggcgcgggcaggaagcgcctcgcggcccgggcccgccccccgcctctcgcccgctccgggctcccggctcccggccggcgctcgtcccatgcaatagccgngccgcgcagcccgcgcacgcccggatggctcttcgcgccgcgggcggcgcaccctttagcggcccggcgccgctgccagccccccgccgttccagacgccgccgcggtgcccggtgccgctgctgttgctgctgctcctgggggcggcgcgggccggcgccctggagatccagcgtcggttcccctcgcccacgcccaccaacaacttcgccctggacggcgcggcggggaccgtgtacctggcggccgtcaaccgcctctatcagctgtcgggcgccaacctgagcctggaggccgaggcggccgtgggcccggtgcccgacagcccgctgtgtcacgctccgcagctgccgcaggcctcgtgcgagcacccgcggcgcctcacggacaactacaacaagatcctgcagctggaccccggccagggcctggtagtcgtgtgcgggtccatctaccagggcttctgccagctgcggcgccggggcaacatctcggccgtggccgtgcgcttcccgcccgccgcgccgcccgccgagcccgtcacggtgttccccagcatgctgaacgtggcggccaaccacccgaacgcgtccaccgtggggctagttctgcctcccgccgcgggcgcggggggcagccgcctgctcgtgggcgccacgtacaccggttacggcagctccttcttcccgcgcaaccgcagcctggaggaccaccgcttcgagaacacgcccgagatcgccatccgctccctggacacgcgcggcgacctggccaagctcttcaccttcgacctcaacccctccgacgacaacatcctcaagatcaagcagggcgccaaggagcagcacaagctgggcttcgtgagcgccttcctgcacccgtccgacccgccgccgggtgcacagtcctacgcgtacctggcgctcaacagcgaggcgcgcgcgggcgacaaggagagccaggcgcggagcctgctggcgcgcatctgcctgccccacggcgccggcggcgacgccaagaagctcaccgagtcctacatccagttgggcttgcagtgcgcgggcggcgcgggccgcggcgacctctacagccgcctggtgtcggtcttcccagcccgggagcggctctttgctgtcttcgagcggccccaggggtcccccgcggcccgcgctgctccggccgcactctgcgccttccgcttcgccgacgtgcgagccgccatccgagctgcgcgcaccgcctgcttcgtggaaccggcgcccgacgtggtggcggtgctcgacagcgtggtgcagggcacgggaccggcctgcgagcgcaagctcaacatccagctccagccagagcagctggactgtggagctgctcacctgcagcacccgctgtccatcctgcagcccctgaaggccacgcccgtgttccgcgccccgggcctcacctccgtggccgtggccagcgtcaacaactacacagcggtcttcctgggcacggtcaacgggaggcttctcaagatcaacctgaacgagagcatgcaggtggtgagcaggcgggtggtgactgtggcctatggggagcccgtgcaccatgtcatgcagtttgacccagcagactccggttacctttacctgatgacgtcccaccagatggccagggtgaaggtcgccgcctgcaacgtgcactccacctgtggggactgcgtgggtgcggcggacgcctactgcggctggtgtgccctggagacgcgccagcagcatttctggaccagtgccagcgagggccccagccgctgtcctgccatgaccgtcctgccttccgagatcgatgtgcgccaggagtacccaggcatgatcctgcagatctcgggcagcctgcccagcctcagtggcatggagatggcctgtgactatgggaacaacatccgcactgtggctcgggtcccaggccctgcctttggtcaccagattgcctactgcaacctcctgccgagggaccagtttccgcccttcccccccaaccaggaccacgtgactgttgagatgtctgtgagggtcaatgggcggaacatcgtcaaggccaatttcaccatctacgactgcagccgcactgcacaagtgtacccccacacagcctgtaccagctgcctgtcggcacagtggccctgtttctggtgcagccagcagcactcctgtgtttccaaccagtctcggtgcgaggcctcaccaaaccccacgagccctcaggactgcccccggaccctgctctcacccctggcacccgtgcctaccggtggctcccagaacatcctggtgcctctggccaacactgcctttttccagggtgcagccctggagtgtagttttgggctggaggagatcttcgaggctgtgtgggtgaatgagtctgttgtacgctgtgaccaggtggtgctgcacacgacccggaagagccaggtgttcccgctcagcctccaactaaaggggcggccagcccgattcctggacagccctgagcccatgacagtcatggtctataactgtgccatgggcagccccgactgttcccagtgcctgggccgcgaagacctgggtcacctgtgcgtgtggagtgatggctgccgcctgcgggggcctctgcagcccatggctggcacctgccccgcccccgagatccgcgcgattgagcccctgagtggcccgttggacggtgggaccctgctgaccatccgaggaaggaacctgggccggcggctcagtgacgtggcccacggcgtgtggattggtggtgtggcctgtgagccactgcctgacagatacacggtgtcggaggagatcgtgtgtgtcacagggccagccccaggaccgctctcaggtgtggtgaccgtgaacgcctctaaggagggcaagtcccgggaccgcttctcctacgtgctgcccctggtccactccctggagcctaccatgggccccaaggccgggggcaccaggatcaccatccatgggaatgacctccatgtaggctccgagctccaggtcctggtgaacgacacagacccctgcacggagctgatgcgcacagataccagcatcgcctgcaccatgcctgagggggccctgccggctccggtgcctgtgtgtgtgcgcttcgagcgtcggggctgcgtgcacggcaacctcaccttctggtacatgcagaacccggtcatcacggccatcagtccccgccgcagccctgtcagtggcggcaggaccatcacagtggctggtgagcgtttccacatggtgcagaatgtgtccatggccgtccaccacattggccgggagcccacgctctgcaaggttctcaactccaccctcatcacctgcccgtcccccggggccctgagcaacgcatcagcgccagtggacttcttcatcaatgggcgggcctacgcagacgaggtggctgtggctgaggagctactggaccccgaggaggcacagcggggcagcaggttccgcctggactacctccccaacccacagttctctacggccaagagggagaagtggatcaagcaccaccccggggagcctctcaccctcgttatccacaaggagcaggacagcctggggctccagagtcacgagtaccgggtcaagataggccaagtaagctgcgacatccagattgtctctgacagaatcatccactgctcggtcaacgagtccctgggcgcggccgtggggcagctgcccatcacaatccaggtagggaacttcaaccagaccatcgccacactgcagctggggggcagcgagacggccatcatcgtgtccatcgtcatctgcagcgtcctgctgctgctctccgtggtggccctgttcgtcttctgtaccaagagccgacgtgctgagcgttactggcagaagacgctgctgcagatggaggagatggaatctcagatccgagaggaaatccgcaaaggcttcgctgagctgcagacagacatgacagatctcaccaaggagctgaaccgcagccagggcatccccttcctggagtataagcacttcgtgacccgcaccttcttccccaagtgttcctccctttatgaagagcgttacgtgctgccctcccagaccctcaactcccagggcagctcccaggcacaggaaacccacccactgctgggagagtggaagattcctgagagctgccggcccaacatggaagagggaattagcttgttctcctcactactcaacaacaagcacttcctcatcgtctttgtccacgcgctggagcagcagaaggactttgcggtgcgcgacaggtgcagcctggcctcgctgctgaccatcgcgctgcacggcaagctggagtactacaccagcatcatgaaggagctgctggtggacctcattgacgcctcggccgccaagaaccccaagctcatgctgcggcgcacagagtctgtggtggagaagatgctcaccaactggatgtccatctgcatgtacagctgtctgcgggagacggtgggggagccattcttcctgctgctgtgtgccatcaagcagcaaatcaacaagggctccatcgacgccatcacaggcaaggcccgctacacactcaatgaggagtggctgctgcgggagaacatcgaggccaagccccggaacctgaacgtgtccttccagggctgtggcatggactcgctgagcgtgcgggccatggacaccgacacgctgacacaggtcaaggagaagatcctggaggccttctgcaagaatgtgccctactcccagtggccgcgtgcagaggacgtcgaccttgagtggttcgcctccagcacacagagctacatccttcgggacctggacgacacctcagtggtggaagacggccgcaagaagcttaacacgctggcccattacaagatccctgaaggtgcctccctggccatgagtctcatagacaagaaggacaacacactgggccgagtgaaagacttggacacagagaagtatttccatttggtgctgcctacggacgagctggcggagcccaagaagtctcaccggcagagccatcgcaagaaggtgctcccggaaatctacctgacccgcctgctctccaccaagggcacgttgcagaagtttctggatgacctgttcaaggccattctgagtatccgtgaagacaagcccccactggctgtcaagtactttttcgacttcctggaggagcaggctgagaagaggggaatctccgaccccgacaccctacacatctggaagaccaacagccttcctctccggttctgggtgaacatcctgaagaacccccagtttgtctttgacatcgacaagacagaccacatcgacgcctgcctttcagtcatcgcgcaggccttcatcgacgcctgctccatctctgacctgcagctgggcaaggattcgccaaccaacaagctcctctacgccaaggagattcctgagtaccggaagatcgtgcagcactggaaatgactgttccagagagcgggcagacctggcagagcgcccctggcgcctgagactaccacccactccgttcctgccagaaacgaccctctgtggccgatgggccatgcgggcccctcgcagccaactcagccagtgttgggactggctcagagcccatgggggctggaggggggcagctgggactctggaatcttctttataataaaagccttacggacaaacctaaaaaaaaaaaaaaaaaaaaaaaaaaaaaaaaaaaaaaaaaaaaaaaaaaaaaaaaaaaaaaaaaaaaaaaaaaaaaaaaaaaagggggggggcgcaaaaaattcccccgggggggcccaagttttccgcggatccccgcgttttctttgtcaccaagggggcggcccattatgaggggcgcgagtattattaagccgaagaggagcaccgggccggggcctggttataacccagcgctttctgttcgcggggagaaaactcgtcgcctagcgggggcggggctcttgtgggggagggagcccctctatcttcttgtgggggcgggggcgcaaccttcctgtggggcaccaccctcccgcaaaccgagaagattattaaacgcgcctctaagcggggaatactataacaccattttcacgggttgcttattcgtggtgttcacacccagcggtacttattgtcccgtgcgcgtcctagaaatatttgtgccaccggcgagctcttgattttggtgcaacaaacttttttccccggacggtggtgtgtgttataattag

SEQ ID NO: 464095 - DNA, 5182 bp, Homo sapiens
  misc_feature (155)..(155): n is a, c, g, or t
ccgggctgcgcggcgaggctgagccgggcccgggcgccggggccgggggcggctggcgcgggcaggaagcgcctcgcggcccgggcccgccccccgcctctcgcccgctccgggctcccggctcccggccggcgctcgtcccatgcaatagccgngccgcgcagcccgcgcacgcccggatggctcttcgcgccgcgggcggcgcaccctttagcggcccggcgccgctgccagccccccgccgttccagacgccgccgcggtgcccggtgccgctgctgttgctgctgctcctgggggcggcgcgggccggcgccctggagatccagcgtcggttcccctcgcccacgcccaccaacaacttcgccctggacggcgcggcggggaccgtgtacctggcggccgtcaaccgcctctatcagctgtcgggcgccaacctgagcctggaggccgaggcggccgtgggcccggtgcccgacagcccgctgtgtcacgctccgcagctgccgcaggcctcgtgcgagcacccgcggcgcctcacggacaactacaacaagatcctgcagctggaccccggccagggcctggtagtcgtgtgcgggtccatctaccagggcttctgccagctgcggcgccggggcaacatctcggccgtggccgtgcgcttcccgcccgccgcgccgcccgccgagcccgtcacggtgttccccagcatgctgaacgtggcggccaaccacccgaacgcgtccaccgtggggctagttctgcctcccgccgcgggcgcggggggcagccgcctgctcgtgggcgccacgtacaccggttacggcagctccttcttcccgcgcaaccgcagcctggaggaccaccgcttcgagaacacgcccgagatcgccatccgctccctggacacgcgcggcgacctggccaagctcttcaccttcgacctcaacccctccgacgacaacatcctcaagatcaagcagggcgccaaggagcagcacaagctgggcttcgtgagcgccttcctgcacccgtccgacccgccgccgggtgcacagtcctacgcgtacctggcgctcaacagcgaggcgcgcgcgggcgacaaggagagccaggcgcggagcctgctggcgcgcatctgcctgccccacggcgccggcggcgacgccaagaagctcaccgagtcctacatccagttgggcttgcagtgcgcgggcggcgcgggccgcggcgacctctacagccgcctggtgtcggtcttcccagcccgggagcggctctttgctgtcttcgagcggccccaggggtcccccgcggcccgcgctgctccggccgcactctgcgccttccgcttcgccgacgtgcgagccgccatccgagctgcgcgcaccgcctgcttcgtggaaccggcgcccgacgtggtggcggtgctcgacagcgtggtgcagggcacgggaccggcctgcgagcgcaagctcaacatccagctccagccagagcagctggactgtggagctgctcacctgcagcacccgctgtccatcctgcagcccctgaaggccacgcccgtgttccgcgccccgggcctcacctccgtggccgtggccagcgtcaacaactacacagcggtcttcctgggcacggtcaacgggaggcttctcaagatcaacctgaacgagagcatgcaggtggtgagcaggcgggtggtgactgtggcctatggggagcccgtgcaccatgtcatgcagtttgacccagcagactccggttacctttacctgatgacgtcccaccagatggccagggtgaaggtcgccgcctgcaacgtgcactccacctgtggggactgcgtgggtgcggcggacgcctactgcggctggtgtgccctggagacgcgccagcagcatttctggaccagtgccagcgagggccccagccgctgtcctgccatgaccgtcctgccttccgagatcgatgtgcgccaggagtacccaggcatgatcctgcagatctcgggcagcctgcccagcctcagtggcatggagatggcctgtgactatgggaacaacatccgcactgtggctcgggtcccaggccctgcctttggtcaccagattgcctactgcaacctcctgccgagggaccagtttccgcccttcccccccaaccaggaccacgtgactgttgagatgtctgtgagggtcaatgggcggaacatcgtcaaggccaatttcaccatctacgactgcagccgcactgcacaagtgtacccccacacagcctgtaccagctgcctgtcggcacagtggccctgtttctggtgcagccagcagcactcctgtgtttccaaccagtctcggtgcgaggcctcaccaaaccccacgagccctcaggactgcccccggaccctgctctcacccctggcacccgtgcctaccggtggctcccagaacatcctggtgcctctggccaacactgcctttttccagggtgcagccctggagtgtagttttgggctggaggagatcttcgaggctgtgtgggtgaatgagtctgttgtacgctgtgaccaggtggtgctgcacacgacccggaagagccaggtgttcccgctcagcctccaactaaaggggcggccagcccgattcctggacagccctgagcccatgacagtcatggtctataactgtgccatgggcagccccgactgttcccagtgcctgggccgcgaagacctgggtcacctgtgcgtgtggagtgatggctgccgcctgcgggggcctctgcagcccatggctggcacctgccccgcccccgagatccgcgcgattgagcccctgagtggcccgttggacggtgggaccctgctgaccatccgaggaaggaacctgggccggcggctcagtgacgtggcccacggcgtgtggattggtggtgtggcctgtgagccactgcctgacagatacacggtgtcggaggagatcgtgtgtgtcacagggccagccccaggaccgctctcaggtgtggtgaccgtgaacgcctctaaggagggcaagtcccgggaccgcttctcctacgtgctgcccctggtccactccctggagcctaccatgggccccaaggccgggggcaccaggatcaccatccatgggaatgacctccatgtaggctccgagctccaggtcctggtgaacgacacagacccctgcacggagctgatgcgcacagataccagcatcgcctgcaccatgcctgagggggccctgccggctccggtgcctgtgtgtgtgcgcttcgagcgtcggggctgcgtgcacggcaacctcaccttctggtacatgcagaacccggtcatcacggccatcagtccccgccgcagccctgtcagtggcggcaggaccatcacagtggctggtgagcgtttccacatggtgcagaatgtgtccatggccgtccaccacattggccgggagcccacgctctgcaaggttctcaactccaccctcatcacctgcccgtcccccggggccctgagcaacgcatcagcgccagtggacttcttcatcaatgggcgggcctacgcagacgaggtggctgtggctgaggagctactggaccccgaggaggcacagcggggcagcaggttccgcctggactacctccccaacccacagttctctacggccaagagggagaagtggatcaagcaccaccccggggagcctctcaccctcgttatccacaaggagcaggacagcctggggctccagagtcacgagtaccgggtcaagataggccaagtaagctgcgacatccagattgtctctgacagaatcatccactgctcggtcaacgagtccctgggcgcggccgtggggcagctgcccatcacaatccaggtagggaacttcaaccagaccatcgccacactgcagctggggggcagcgagacggccatcatcgtgtccatcgtcatctgcagcgtcctgctgctgctctccgtggtggccctgttcgtcttctgtaccaagagccgacgtgctgagcgttactggcagaagacgctgctgcagatggaggagatggaatctcagatccgagaggaaatccgcaaaggcttcgctgagctgcagacagacatgacagatctcaccaaggagctgaaccgcagccagggcatccccttcctggagtataagcacttcgtgacccgcaccttcttccccaagtgttcctccctttatgaagagcgttacgtgctgccctcccagaccctcaactcccagggcagctcccaggcacaggaaacccacccactgctgggagagtggaagattcctgagagctgccggcccaacatggaagagggaattagcttgttctcctcactactcaacaacaagcacttcctcatcgtctttgtccacgcgctggagcagcagaaggactttgcggtgcgcgacaggtgcagcctggcctcgctgctgaccatcgcgctgcacggcaagctggagtactacaccagcatcatgaaggagctgctggtggacctcattgacgcctcggccgccaagaaccccaagctcatgctgcggcgcacagagtctgtggtggagaagatgctcaccaactggatgtccatctgcatgtacagctgtctgcgggagacggtgggggagccattcttcctgctgctgtgtgccatcaagcagcaaatcaacaagggctccatcgacgccatcacaggcaaggcccgctacacactcaatgaggagtggctgctgcgggagaacatcgaggccaagccccggaacctgaacgtgtccttccagggctgtggcatggactcgctgagcgtgcgggccatggacaccgacacgctgacacaggtcaaggagaagatcctggaggccttctgcaagaatgtgccctactcccagtggccgcgtgcagaggacgtcgaccttgagtggttcgcctccagcacacagagctacatccttcgggacctggacgacacctcagtggtggaagacggccgcaagaagcttaacacgctggcccattacaagatccctgaaggtgcctccctggccatgagtctcatagacaagaaggacaacacactgggccgagtgcaggcaggagattagttcggcggccacagtggggggatcctc

SEQ ID NO: 464096 - DNA, 5101 bp, Homo sapiens
  misc_feature (155)..(155): n is a, c, g, or t
ccgggctgcgcggcgaggctgagccgggcccgggcgccggggccgggggcggctggcgcgggcaggaagcgcctcgcggcccgggcccgccccccgcctctcgcccgctccgggctcccggctcccggccggcgctcgtcccatgcaatagccgngccgcgcagcccgcgcacgcccggatggctcttcgcgccgcgggcggcgcaccctttagcggcccggcgccgctgccagccccccgccgttccagacgccgccgcggtgcccggtgccgctgctgttgctgctgctcctgggggcggcgcgggccggcgccctggagatccagcgtcggttcccctcgcccacgcccaccaacaacttcgccctggacggcgcggcggggaccgtgtacctggcggccgtcaaccgcctctatcagctgtcgggcgccaacctgagcctggaggccgaggcggccgtgggcccggtgcccgacagcccgctgtgtcacgctccgcagctgccgcaggcctcgtgcgagcacccgcggcgcctcacggacaactacaacaagatcctgcagctggaccccggccagggcctggtagtcgtgtgcgggtccatctaccagggcttctgccagctgcggcgccggggcaacatctcggccgtggccgtgcgcttcccgcccgccgcgccgcccgccgagcccgtcacggtgttccccagcatgctgaacgtggcggccaaccacccgaacgcgtccaccgtggggctagttctgcctcccgccgcgggcgcggggggcagccgcctgctcgtgggcgccacgtacaccggttacggcagctccttcttcccgcgcaaccgcagcctggaggaccaccgcttcgagaacacgcccgagatcgccatccgctccctggacacgcgcggcgacctggccaagctcttcaccttcgacctcaacccctccgacgacaacatcctcaagatcaagcagggcgccaaggagcagcacaagctgggcttcgtgagcgccttcctgcacccgtccgacccgccgccgggtgcacagtcctacgcgtacctggcgctcaacagcgaggcgcgcgcgggcgacaaggagagccaggcgcggagcctgctggcgcgcatctgcctgccccacggcgccggcggcgacgccaagaagctcaccgagtcctacatccagttgggcttgcagtgcgcgggcggcgcgggccgcggcgacctctacagccgcctggtgtcggtcttcccagcccgggagcggctctttgctgtcttcgagcggccccaggggtcccccgcggcccgcgctgctccggccgcactctgcgccttccgcttcgccgacgtgcgagccgccatccgagctgcgcgcaccgcctgcttcgtggaaccggcgcccgacgtggtggcggtgctcgacagcgtggtgcagggcacgggaccggcctgcgagcgcaagctcaacatccagctccagccagagcagctggactgtggagctgctcacctgcagcacccgctgtccatcctgcagcccctgaaggccacgcccgtgttccgcgccccgggcctcacctccgtggccgtggccagcgtcaacaactacacagcggtcttcctgggcacggtcaacgggaggcttctcaagatcaacctgaacgagagcatgcaggtggtgagcaggcgggtggtgactgtggcctatggggagcccgtgcaccatgtcatgcagtttgacccagcagactccggttacctttacctgatgacgtcccaccagatggccagggtgaaggtcgccgcctgcaacgtgcactccacctgtggggactgcgtgggtgcggcggacgcctactgcggctggtgtgccctggagacgcgccagcagcatttctggaccagtgccagcgagggccccagccgctgtcctgccatgaccgtcctgccttccgagatcgatgtgcgccaggagtacccaggcatgatcctgcagatctcgggcagcctgcccagcctcagtggcatggagatggcctgtgactatgggaacaacatccgcactgtggctcgggtcccaggccctgcctttggtcaccagattgcctactgcaacctcctgccgagggaccagtttccgcccttcccccccaaccaggaccacgtgactgttgagatgtctgtgagggtcaatgggcggaacatcgtcaaggccaatttcaccatctacgactgcagccgcactgcacaagtgtacccccacacagcctgtaccagctgcctgtcggcacagtggccctgtttctggtgcagccagcagcactcctgtgtttccaaccagtctcggtgcgaggcctcaccaaaccccacgagccctcaggactgcccccggaccctgctctcacccctggcacccgtgcctaccggtggctcccagaacatcctggtgcctctggccaacactgcctttttccagggtgcagccctggagtgtagttttgggctggaggagatcttcgaggctgtgtgggtgaatgagtctgttgtacgctgtgaccaggtggtgctgcacacgacccggaagagccaggtgttcccgctcagcctccaactaaaggggcggccagcccgattcctggacagccctgagcccatgacagtcatggtctataactgtgccatgggcagccccgactgttcccagtgcctgggccgcgaagacctgggtcacctgtgcgtgtggagtgatggctgccgcctgcgggggcctctgcagcccatggctggcacctgccccgcccccgagatccgcgcgattgagcccctgagtggcccgttggacggtgggaccctgctgaccatccgaggaaggaacctgggccggcggctcagtgacgtggcccacggcgtgtggattggtggtgtggcctgtgagccactgcctgacagatacacggtgtcggaggagatcgtgtgtgtcacagggccagccccaggaccgctctcaggtgtggtgaccgtgaacgcctctaaggagggcaagtcccgggaccgcttctcctacgtgctgcccctggtccactccctggagcctaccatgggccccaaggccgggggcaccaggatcaccatccatgggaatgacctccatgtaggctccgagctccaggtcctggtgaacgacacagacccctgcacggagctgatgcgcacagataccagcatcgcctgcaccatgcctgagggggccctgccggctccggtgcctgtgtgtgtgcgcttcgagcgtcggggctgcgtgcacggcaacctcaccttctggtacatgcagaacccggtcatcacggccatcagtccccgccgcagccctgtcagtggcggcaggaccatcacagtggctggtgagcgtttccacatggtgcagaatgtgtccatggccgtccaccacattggccgggagcccacgctctgcaaggttctcaactccaccctcatcacctgcccgtcccccggggccctgagcaacgcatcagcgccagtggacttcttcatcaatgggcgggcctacgcagacgaggtggctgtggctgaggagctactggaccccgaggaggcacagcggggcagcaggttccgcctggactacctccccaacccacagttctctacggccaagagggagaagtggatcaagcaccaccccggggagcctctcaccctcgttatccacaaggagcaggacagcctggggctccagagtcacgagtaccgggtcaagataggccaaatccaggtagggaacttcaaccagaccatcgccacactgcagctggggggcagcgagacggccatcatcgtgtccatcgtcatctgcagcgtcctgctgctgctctccgtggtgggtaaggagccccaccctcaggacaccttggagggcaggcttgccaccttgccccagcccctctgaagattggcagatgggagaaggcaggatgggatggggcacagcttgaacaaaggcttggccatgggaacaggttaggcacccagaggttgggggaggtgtgccctggctccagcaccaatgggtagaagatgttaggtggccaggggatatgctaggcccacgcccaggtccctgaatctcaagcagagaaatttggaaccatgttctccagtcaatagagagctactgaaggtacttaagagaggattactcaggaaaaattaacctacatgtctggtgggctataccactgttaaaataatggtcaataaagtaatagactcgatgtagcagagaaactggagccatcatacgctactagagggaatacaaaaaagcgcagctgctttggaaaacattttggaagtttcttaggatgtgaaacatagaattaccctatgacctatgacccagcaattccacccctagctatctgctcaagagaaatgaaaacgtagccacacaaaaacttgtacacacgtgtttatagcaacattatttataataaccaggaagtcaaaacaacccaaatgtccatcaaccaataaatgaataaatgaaatatgaaaaaaaaaaaaaaaaaaaaaaaaaaaaaaaaaaaaaaaagggggggggcgcaaaaaattcccccgggggggcccaagttttccgcggatccccgcgttttctttgtcaccaagggggcggcccattatgaggggcgcgagtattattaagccgaagaggagcaccgggccggggcctggttataacccagcgctttctgttcgcggggagaaaactcgtcgcctagcgggggcggggctcttgtgggggagggagcccctctatcttcttgtgggggcgggggcgcaaccttcctgtggggcaccaccctcccgcaaaccgagaagattattaaacgcgcctctaagcggggaatactataacaccattttcacgggttgcttattcgtggtgttcacacccagcggtacttattgtcccgtgcgcgtcctagaaatatttgtgccaccggcgagctcttgattttggtgcaacaaacttttttccccggacggtggtgtgtgttataattag

SEQ ID NO: 464097 - DNA, 1484 bp, Homo sapiens
ggttcactctgtcaccagctcccatccccaagcccagcagaaggccaccttgctctgccccatctaatggctaaggaccaaatagcacaggcagggaggacaagaaacaggaaaaagaagcttgctgagagttttcaaacctacatcaacagagaggagcaacttgccctgagtgcctactacttgacaagcacgaaaactacatcattcttcatccttacaaaatctttagactgggtaacagcattcccattatatgaagaaactgaggagctgaccaaagagggtgctggctcccctgctccttcctccagtctggtgcaccatgatgactgtttggaagttgactttgatagacaagaggatgtttgtgcactgctggaagagactgtgaagggaagcctcactctccacagtgtgatggcttccttctatgagctcaacggcagtctcatctatagtaataacatcctacctgacatgagtatagtactttacaattctttcataccatttggggaggttcttcctaacccctcgattaagcagttgaagtggtaggaaatttttacataggagagtatggtgatcatatttgcattttagaaaataatggatagcagtttgttaggggaacaaaggacagagacagggagactatttaaaacattaataaaaaataccagtgacagatgatgaggcacctacctgatgggaatggagaagaggagatggattcagaaactacttaggagaggcaggcagtccaaggctgatgcccaaagaagccatcaagacccgtgctacttccagctccttctgtcctcataatcatagatgattgctccacatccagagtctcgctcagtttccaggctggagtgtaatggcgtgatcttggctcactgcaacctctgcctcccagcttcaagtgattcccctgctttagcctcccaagcagctgggactacaggcatgcaccagcatggccggctaatttttttttgtattttagtacagatgggatggaccacagggaaaccactgcagcaaactaaaagtgtctatctcagatccttccaccaccatcatttccaaaatcaccgtcactatctccaccaccatcacctttaccaccatcaccactatcatcctcatccttcccatcaccatctccactgctatctctcaacaccatcatcatcaccaccaccaccatcatcaccatgagcaccacctctgtcgtcatcaaaaaagcacacagttcaggctggcctgttggaggataacagatcatgtggagcagagacgagctggcccacctcaggccctaccagagcaatcagcttgccaaacacgacatacatcagcgaggccatcctagaccatccagccctagctgagccagcccagaccagagactcatgagaaacagtaaaatgttcatcattttaagccactagattttgtggtggtttgttata

SEQ ID NO: 464098 - DNA, 1771 bp, Homo sapiens
cgaagcctcaagcgtcacgtctaggaatagcgctggagtcgggccaagtcattagagacgatgagtaatctggctcttccagaccttcctgagtggtagtggccacggctgaagacagagggctgcgtggaggctgaaggcagagggctgggccttgggcctgggtaaagacagctctggacatggagtggcaggagcgataagcagaactactggtgacactgtgggagagaaattctgcaaaataacagctgggcagcccgggaccccagggagttgaaatgggacctcggagacatcaggatgtcctggagaggcaccaaggccagaggtcccccagggaccgtggagggggcattaagccctgaaaacagatcatgatgcccatccccccagcacaattagaaataaaaacaacccgggacagttaaattagtgtaaggaagtccctcaagagttttacttttcccgtaacggcgattttcgatgctccttcggaaacatcagattctttccaagcgttattctttttctattttggtgcccgaagtactagcgtggtggaccaagcccctacaccagccgtgagcgacccctgcgggctgcctggcccctgtgggcactggctccggggatgcggcagggggcggagggggcgacaccgggcttggggggcgggcagcggagggaggactgggggtggggaggggggagggcggggagggcgcccagcggcgcggccgcgccccccaccccaccccattccacccccaccgaggaccgcgctggggtttcagaaagcgcttttctggccctgccgccggatctgactcaaaaaggggagctggctcaaaccgaaagaataattcggttagccaaagcgccgatatttccctggggcccaaatggctgccaggcagggggctccagggccgcagcctcgccggcccctcgggccccgccgaaagccccgggccccatccatcttcgccaccgaaaggggcaggaagagcagctgagaggagggcgcctcctccagccccgcaggctctgctgccggaccgtcgtgtccctcccgaggccttcccctgcctgtcccagcgggccctgctctctcgggttctcaggacatagatccagattgaagagttgaggagctgcctggaagtggggagcccacgggactcccagctccatgaaactgctcctgctggctgtggagggggaggaagcagccacagatggggagggtggcaaccaggcacctacccctgcagggccgctgccttgcccccacaggtgtagcactatccgcccagggatgaggcctgggtgcctgctggtgccctgtgtcagagtccccatctgtaatacaccccagtcccacagccagtgggtggtagagtccccactctgtgctgctgactgtgctaggctatttcatggcacttgcaaaggctcagcacatcatgggcccccagtgtgtgctgactgtatggctgaaaggattgatgagacactaaagtcccccatgaaggcacaaaccagaagtagaggtggttctcagctacaacagctcccctgcccacccacccacagtgcccccacagctgagttcctgcgggctgggtgccaggcgatgtgcatgcagcacatgtgagtcccaggggcatggggtctcccagcgctcagagcctcccaccaccctgcacccagggtgccatgccctctctctttccctgcaccctatggctgctgttttccctcaata

SEQ ID NO: 464099 - DNA, 1867 bp, Homo sapiens
tgtacatgtacccgattactaatgagattgagcatcttttcacatttctgtggaccattccagaggtactgcctttatggtcttgggcaagatcctgaagaattccctggattactagacagagactcttgttctcttcacttactttctaccaaacaaatcaattctctccctctgttacaagcctcctggagctgggagtggagtgacaaaaacacgtctatagctaccacccttaggactgcactgggtttctcccaaaacctgttgcaaccactccctgactactgcctatgtttgctcaatgccctgaggctctacaatcatcaagtggcaaagccagccaggcttatatccttccccagggcctgggcaagtccagaggtgccaactgggggccagggactagagtcaaaaaccttagatgtgtacctgatgctccattgtactgcagctgagctgacttttaaaccataagacacagtccttcccactcttccctcttcttttcaatggcagagaagcctcactttgtggccaccaccacctcaggcccatgaggagtactaccagactattgctcatgttcccttagggctaaggactcttcagtcagcttatggtgaatactgcctgatctgagactcacccttcagaggaatgggctcctgtatggcccagggcaggacacagaaacactgtcagcactacgccactgctgcttggtgatggggaagaggtggtgtcagtgattcaagcctgtttttcctacctcttcagtgcttctttcagcgctatgaagtaaaaccaggtaatctgcatctcattaattggaccataagaccaagcagccacacctcagttttatccgggtacaaaatctggcagctccactgggacagagctgccctcagcagctagaggcttgtgacctgacggtctttaggagactcccagcagctgctaggtacagtttgtcctgaggacgcttctgagaactttccctgggcaaaaggaccacccatccccttgctactggggtagaacaggggctaggacactgaagggatgggagcagcctggtaaccaatggaagaaagaatgctgtatatgctatggtgacctcttaagaggtagcagaggcaaggactttacgtgggaacctctgcacagaaggcagagcaaatcacccttataagagcctgcagttgtcccaaggagcattgtgaactctgaagaactgtgccacacattccagcccggtgatcaagtgctattaaaagaatggaaagaaacagaccctgcttcccagctgcaggagaaatacaaagggccctatgatgtgctgctaagcaccagttcagcactgaaactggtggacatcaagccatggatccactacacacgattgaaaaagttcctgcaagaagaaacatccacgacagaggacaccaaggccaccgaatgggagatggaacccctggaaggcctaagatttctgttcaacaaatgacaagattttcccttataatatttttcctttctgctccttttgttgttaatgcctctacctctaacgttttcctacaatgggcacacagttatgcagatggcttacaacaaggagacccttgctgggtctgtggttcgttacccgtcactaacaccatggagctaccttggtgggtctccccgctacaagggaaagactgggttttttttcaaagctttataggggatcttaaacaatggacaggggcacagatgactggggtaactagaaaaaacatttcagaatggcctataaataaaatagagcgccgataatgaaatttattggtcgacatattggttataaaaacaaatt

SEQ ID NO: 464100 - DNA, 1460 bp, Homo sapiens
tgtacatgtacccgattactaatgagattgagcatcttttcacatttctgtggaccattccagaggtactgcctttatggtcttgggcaagatcctgaagaattccctggattactagacagagactcttgttctcttcacttactttctaccaaacaaatcaattctctccctctgttacaagcctcctggagctgggagtggagtgacaaaaacacgtctatagctaccacccttaggactgcactgggtttctcccaaaacctgttgcaaccactccctgactactgcctatgtttgctcaatgccctgaggctctacaatcatcaagtggcaaagccagccaggcttatatccttccccagggcctgggcaagtccagaggtgccaactgggggccagggactagagtcaaaaaccttagatgtgtacctgatgctccattgtactgcagctgagctgacttttaaaccataagacacagtccttcccactcttccctcttcttttcaatggcagagaagcctcactttgtggccaccaccacctcaggcccatgaggagtactaccagactattgctcatgttcccttagggctaaggactcttcagtcagcttatggtgaatactgcctgatctgagactcacccttcagaggaatgggctcctgtatggcccagggcaggacacagaaacactgtcagcactacgccactgctgcttggtgatggggaagaggtggtgtcagtgattcaagcctgtttttcctacctcttcagtgcttctttcagcgctatgaagtaaaaccaggagcattgtgaactctgaagaactgtgccacacattccagcccggtgatcaagtgctattaaaagaatggaaagaaacagaccctgcttcccagctgcaggagaaatacaaagggccctatgatgtgctgctaagcaccagttcagcactgaaactggtggacatcaagccatggatccactacacacgattgaaaaagttcctgcaagaagaaacatccacgacagaggacaccaaggccaccgaatgggagatggaacccctggaaggcctaagatttctgttcaacaaatgacaagattttcccttataatatttttcctttctgctccttttgttgttaatgcctctacctctaacgttttcctacaatgggcacacagttatgcagatggcttacaacaaggagacccttgctgggtctgtggttcgttacccgtcactaacaccatggagctaccttggtgggtctccccgctacaagggaaagactgggttttttttcaaagctttataggggatcttaaacaatggacaggggcacagatgactggggtaactagaaaaaacatttcagaatggcctataaataaaatagagcgccgataatgaaatttattggtcgacatattggttataaaaacaaatt

SEQ ID NO: 464101 - DNA, 5744 bp, Homo sapiens
gagatcgggcgcgttcagggtgaggagccatgtaaggatcatgagaggaactcaagaaggaggggtgggctactgccagacttcccagagcagaagccatgtgaaggggaagttcactgacttggaaactcttgcaccacctgctgagtctggagggctgacagatgcggagcttgtgctgaaacttatggaaaacttagttttggcatctcacactcctggaaaactggctagcttaaaaaagaacgctttctcctcttttcctcaatccactccaactcaacctcagccttctcattttctaagaataatgtctactttgttgtccattgacagtgccctggggcattcacatgcaaagagacttagagaccaggataatttctgtggcctacaaatcatgaaaggggatgctctggggagagaaaggaaagagtgcaaactgaaatggcttttctccttgcatcaaaaatgccttgagctgcatcccttaacaccttaatggacacccaacagtcactgcactgataaggaagctactagaagctacttagcacagagttatcactcaatatgactgaccatcattcagtaactctgaaatgtaaaggatccaggtaatttctgtggccaatagttctcagccctcccaatacatagaaagcacctgggcgcttggcttattaaattggtagattcctgggcactgtcccagggatccattttatacctcacatttgggctctggaatctgcacttctaagaaagcctctgaattgttctgatacagacgatgcttagaccacactttaaggaacaccgcagaagtgtttcttattcgcagaataaaaggtttcatttccaaaaactgtttcgccaattagatcttctgttcatttatcccaccttctttactattgctgctttggaagaaaatcagattattgttggaaaattagaaaacacaggtgaataaaaatgaaaaatcaaactcacatccagagaaataactcatgctaaactgttaattttttgtgtatattcttaaaaaatgtatacatacacataatataaaatatttgtgtatatgtctatactttataggttgtttagttcacttaataaatcataaatgtctttgcatactggcaaatccataatatcttcatcatcacttttaatggttattccattaaacagatgtatggttattcagccagtgccctaacatcgaatatttagattttctcccaatagttctatcttataaaccaaacctgtgatgagcatttctgtacatatgcctacttgttcagtcatttcctaaggacaaattcctagtagcagaattatcaagtcaaaggataatagattttaaggctttgataaattgccaaatgtccccaagaaatgtttcctgatttactctctcagcggcactcaataaaaatgaggaaacaccccttcccaatctggatattataatttaaaaaaaaactattcccatatgctttgatagaaaaattgtttctattgttttaatgcgcagttatttgactcatagaatgaatctattctttcttactatatgtttgccacctaagattcttatgttacgagctgctttttcatatgctttgtccactatatttttgaaacatttgtcattttcttagttagtaggaagaactctttacactaacacttaacagtttgttaactatattttatgtgaacactttgttcactgcatatgtgcaaatatattacatatattaacactgtattggctacatatttgcaaatattcccagacattttaaatacttgttgatagtatttttaactggtttgcttttattgttgtacaagtatgattaacttttataaggcaaaaatgtatcattatgtttttagaatttctgtcttcaatgtcatatgtgacaagacctctcctccttcaaaattatataaatattcactcaaactttcttccagtattttgtagtttatttttacacttagatcttagattcatctgaaatttttttagagccacgagagcttaagaaaactcgtcctgctcagaagtccacctgttcagatttttatttatttagtttttaaggttatgctgattacataaactcagggaaagcttgactaaagtcatagggaatacattagggcagatatatcttatgtaggtgatcccacctgctggagcccaaaagaaaagaagaaaaagattccttctatttaaaaataaagcgatttatttaagcaaagagtatggatttatgctgcgctagatatctgcagaaaactcacattaatgttggccattgtgtggagggatgaggcatagctctaaataaaccaatatgctcaaggaataaggtgtcgtatgtgaagttatttcttttaaaataacatgaaaaactaaagtaataaaatgttaaaaataaaagaaataactttaccaatggtcctaaaccattccaaaaagtgaactactatttaccgttttctctcaaatttctgtccacgtgaattaataaatttggcataattttaatcatagtacagaacagcatttttatatatatcaagtccttcacttttgttgacatattgtttcaatttattatattgaagatctgcataatattcaagtaattagatgtgctcaataatttaattaataccatattgtggaattacattcttcataacatttttatgtaatataatattgcataaacgtcttgaagaatatacctggttccttttttttgccatgcaagtagaattattgggcaaaatagcatgcacattttctacttcttggcaataatatttaataatatatcacagtatattttggttctagcaatgtatgggtatattggtttgacaaccttgctagagatgcatattatctatatttttgaagttgtgctaaatggacatgtataaaatcttcttgataacatggttgactcctccaaatccagtatttattatttcaaattatgttattcaaaattttgcttaattagctcattggggaaaaccaaatattttaaatcattcaggtgctttcaagacctggggtttattattaaattactaaatgccaataatttttatatgactccatgtggaaatttggaagatatacaagatgtttctgaaggtgtatcgatgcccttttttgaccagtacttaacatgaacttaccgtgtactgtgtgattatttctctttttgaaagggaaccagagggtgcaaactctttatttgagggccctggtgtctcaaggttatactccagaaaatctcattctttcctttcccaactggcatttcaaagatatttcaagtactcatattaccagatattaagcacttcagcaagaaattatctaaatttcccaatttgctccttaaagacttcttgcagactctttttcaaatttgcctgtggagtgcagattttcttgtgcacaacactgaatttatttaggtagtagaaaccttcctaggtgatcctggttctctcaaaatgtgacagataagaaggccagttcataacagggcaaggtagatttttctggaaagtaacttgcagaaaaatgaaaggctaaaggtctaattagagatagaaattgttttttaacatattagttagtggtaaaaaaaataagtgaatgctttttcatgtccataacgctgcagggacacccttgaacatgtctctttataatatttctccaaagtatgtatctggaaatgacattaatggatggtaggaaatggacatcttcaaagttttccatcattgacaatattttctccaaaattcttttaacaatttagcacctccatcaataaggcatagaaatttctacttccttacattttcaagaaccctttgttatcagattttaattcctgtctaaaacttgtaaaagggtagggagtaattgttttaatgtgcattctctaatcactaatgaaatagagcagtttaacaacaacaaaaagaaaggaaagccctaatggccaatagaaagaataacttctgatgtttgatagaacagtggggtgcctacagttcataataatttattgaatatttcaaaatagcagaagaaaagatttgaaacattaccaacacaaaaaataataaatgtttgaggtgatgaataacctaaatgccatgatttgatcattatgctttatatgcatgtatcaaaatatcacatgtgccctataaatatgtgcaattattatgtatcaattttaaaaagattcgccagctgaagtcatctcactacaaatcaactgcaccaaatggtcattcaaccaacacagccccactcctcaagattttagatgacatttgtctttaaataatgaagatcgccctgcagggattattggattatctgttaccatgcaatgtcttagttactatttagtactttattaaaggttagttgaggataaggtaatatgctgaatggtttgggatgggacactacctggaagaaaggaaaggatattgattttaactagatagtatgtatcttacaaatggaattatattttacaataatagaagtggagtagtagttatttatgtaacacctacaattagacactatgctacagatttttgtatacagttgacccttgaacaacatgaaattaggggcactggccccacatacagttgaaaacccacatgcaatttttgaatccctaaaacttaactgctaataccctactgttgacctgaagccttactgatagcataaatagttgactaacatattttatatgttatatatattatatactgtactcttacaataagagagagagagagagagagagagagagagagagagagagagagagagagagagagagagagagattttagtttggagaaagaaaggccatggttacttttactatttatcctaaaaagaaattattgaaggacaagtgtaaaatgttgtcacgtgtaagggactaaatttagcctctccgatgtcagctagtggaagtgagtggaaggtacggatgcagacaacattgaaagagatcacattctaggaatgcaatgttacagcccaattagttcatgagaaagcatggttggaagatatattgtttctatttgtatgctatagaattctgaacggtaaacttaacatgatcagggaataagttattcctcacattttctgcatcctctgggagaggataacaaaggaagctgaggaagtctgttctggaggcaccatgacaaagcaccagacagaaagcagtcacgtgtggggagatgagcagagacaccacttctcaagcacctgattattctttctcagtatttagaagcaaaaattatccttaagaaaaacaaccgcaaacgcaacacaggctacacagatgagaaaatggggttccccatcttcgttgaaggccccacatcatttgccatgaacttgcagaatatttcaagagagaaggctgaaaaggaaggtgactggaatattaagaactgtgagatattctgaggaaactctaatttgtaaattggtagaaatgccagtaatttgttgggaattgaagaccctctgtattcaagagcgaagcttggcagctgtgcactgttgttttataaatcaatattacatctgaaagtggtgtttgaatgtttgtgtcatt

SEQ ID NO: 464102 - DNA, 5875 bp, Homo sapiens
gagatcgggcgcgttcagggtgaggagccatgtaaggatcatgagaggaactcaagaaggaggggtgggctactgccagacttcccagagcagaagccatgtgaaggggaagttcactgacttggaaactcttgcaccacctgctgagtctggagggctgacagatgcggagcttgtgctgaaacttatggaaaacttagttttggcatctcacactcctggaaaactggctagcttaaaaaagaacgctttctcctcttttcctcaatccactccaactcaacctcagccttctcattttctaagaataatgtctactttgttgtccattgacagtgccctggggcattcacatgcaaagagacttagagaccaggataatttctgtggcctacaaatcatgaaaggggatgctctggggagagaaaggaaagagtgcaaactgaaatggcttttctccttgcatcaaaaatgccttgagctgcatcccttaacaccttaatggacacccaacagtcactgcactgataaggaagctactagaagctacttagcacagagttatcactcaatatgactgaccatcattcagtaactctgaaatgtaaaggatccaggtaatttctgtggccaatagttctcagccctcccaatacatagaaagcacctgggcgcttggcttattaaattggtagattcctgggcactgtcccagggatccattttatacctcacatttgggctctggaatctgcacttctaagaaagcctctgaattgttctgatacagacgatgcttagaccacactttaaggaacaccgcagaagtgtttcttattcgcagaataaaaggtttcatttccaaaaactgtttcgccaattagatcttctgttcatttatcccaccttctttactattgctgctttggaagaaaatcagattattgttggaaaattagaaaacacaggtgaataaaaatgaaaaatcaaactcacatccagagaaataactcatgctaaactgttaattttttgtgtatattcttaaaaaatgtatacatacacataatataaaatatttgtgtatatgtctatactttataggttgtttagttcacttaataaatcataaatgtctttgcatactggcaaatccataatatcttcatcatcacttttaatggttattccattaaacagatgtatggttattcagccagtgccctaacatcgaatatttagattttctcccaatagttctatcttataaaccaaacctgtgatgagcatttctgtacatatgcctacttgttcagtcatttcctaaggacaaattcctagtagcagaattatcaagtcaaaggataatagattttaaggctttgataaattgccaaatgtccccaagaaatgtttcctgatttactctctcagcggcactcaataaaaatgaggaaacaccccttcccaatctggatattataatttaaaaaaaaactattcccatatgctttgatagaaaaattgtttctattgttttaatgcgcagttatttgactcatagaatgaatctattctttcttactatatgtttgccacctaagattcttatgttacgagctgctttttcatatgctttgtccactatatttttgaaacatttgtcattttcttagttagtaggaagaactctttacactaacacttaacagtttgttaactatattttatgtgaacactttgttcactgcatatgtgcaaatatattacatatattaacactgtattggctacatatttgcaaatattcccagacattttaaatacttgttgatagtatttttaactggtttgcttttattgttgtacaagtatgattaacttttataaggcaaaaatgtatcattatgtttttagaatttctgtcttcaatgtcatatgtgacaagacctctcctccttcaaaattatataaatattcactcaaactttcttccagtattttgtagtttatttttacacttagatcttagattcatctgaaatttttttagagccacgagagcttaagaaaactcgtcctgctcagaagtccacctgttcagatttttatttatttagtttttaaggttatgctgattacataaactcagggaaagcttgactaaagtcatagggaatacattagggcagatatatcttatgtaggtgatcccacctgctggagcccaaaagaaaagaagaaaaagattccttctatttaaaaataaagcgatttatttaagcaaagagtatggatttatgctgcgctagatatctgcagaaaactcacattaatgttggccattgtgtggagggatgaggcatagctctaaataaaccaatatgctcaaggaataaggtgtcgtatgtgaagttatttcttttaaaataacatgaaaaactaaagtaataaaatgttaaaaataaaagaaataactttaccaatggtcctaaaccattccaaaaagtgaactactatttaccgttttctctcaaatttctgtccacgtgaattaataaatttggcataattttaatcatagtacagaacagcatttttatatatatcaagtccttcacttttgttgacatattgtttcaatttattatattgaagatctgcataatattcaagtaattagatgtgctcaataatttaattaataccatattgtggaattacattcttcataacatttttatgtaatataatattgcataaacgtcttgaagaatatacctggttccttttttttgccatgcaagtagaattattgggcaaaatagcatgcacattttctacttcttggcaataatatttaataatatatcacagtatattttggttctagcaatgtatgggtatattggtttgacaaccttgctagagatgcatattatctatatttttgaagttgtgctaaatggacatgtataaaatcttcttgataacatggttgactcctccaaatccagtatttattatttcaaattatgttattcaaaattttgcttaattagctcattggggaaaaccaaatattttaaatcattcaggtgctttcaagacctggggtttattattaaattactaaatgccaataatttttatatgactccatgtggaaatttggaagatatacaagatgtttctgaaggtgtatcgatgcccttttttgaccagtacttaacatgaacttaccgtgtactgtgtgattatttctctttttgaaagggaaccagagggtgcaaactctttatttgagggccctggtgtctcaaggttatactccagaaaatctcattctttcctttcccaactggcatttcaaagatatttcaagtactcatattaccagatattaagcacttcagcaagaaattatctaaatttcccaatttgctccttaaagacttcttgcagactctttttcaaatttgcctgtggagtgcagattttcttgtgcacaacactgaatttatttaggtagtagaaaccttcctaggtgatcctggttctctcaaaatgtgacagataagaaggccagttcataacagggcaaggtagatttttctggaaagtaacttgcagaaaaatgaaaggctaaaggtctaattagagatagaaattgttttttaacatattagttagtggtaaaaaaaataagtgaatgctttttcatgtccataacgctgcagggacacccttgaacatgtctctttataatatttctccaaagtatgtatctggaaatgacattaatggatggtaggaaatggacatcttcaaagttttccatcattgacaatattttctccaaaattcttttaacaatttagcacctccatcaataaggcatagaaatttctacttccttacattttcaagaaccctttgttatcagattttaattcctgtctaaaacttgtaaaagggtagggagtaattgttttaatgtgcattctctaatcactaatgaaatagagcagtttaacaacaacaaaaagaaaggaaagccctaatggccaatagaaagaataacttctgatgtttgatagaacagtggggtgcctacagttcataataatttattgaatatttcaaaatagcagaagaaaagatttgaaacattaccaacacaaaaaataataaatgtttgaggtgatgaataacctaaatgccatgatttgatcattatgctttatatgcatgtatcaaaatatcacatgtgccctataaatatgtgcaattattatgtatcaattttaaaaagattcgccagctgaagtcatctcactacaaatcaactgcaccaaatggtcattcaaccaacacagccccactcctcaagattttagatgacatttgtctttaaataatgaagatcgccctgcagggattattggattatctgttaccatgcaatgtcttagttactatttagtactttattaaaggttagttgaggataaggtaatatgctgaatggtttgggatgggacactacctggaagaaaggaaaggatattgattttaactagatagtatgtatcttacaaatggaattatattttacaataatagaagtggagtagtagttatttatgtaacacctacaattagacactatgctacagatttttgtatacagttgacccttgaacaacatgaaattaggggcactggccccacatacagttgaaaacccacatgcaatttttgaatccctaaaacttaactgctaataccctactgttgacctgaagccttactgatagcataaatagttgactaacatattttatatgttatatatattatatactgtactcttacaataagagagagagagagagagagagagagagagagagagagagagagagagagagagagagagagagattttagtttggagaaagaaaggccatggttacttttactatttatcctaaaaagaaattattgaaggacaagtgtaaaatgttgtcacgtgtaagggactaaatttagcctctccgatgtcagctagtggaagtgagtggaaggtacggatgcagacaacattgaaagagatcacattctaggaatgcaatgttacagcccaattagttcatgagaaagcatggttggaagatatattgtttctatttgtatgctatagaattctgaacggtaaacttaacatgatcagggaataagttattcctcacattttctgcatcctctgggagaggataacaaaggaagctgaggaagtctgttctggaggcaccatgacaaagcaccagacagaaagcagtcacgtgtggggagatgagcagagacaccacttctcaagcacctgattattctttctcagtatttagaagcaaaaattatccttaagaaaaacaaccgcaaacgcaacacaggctacacagatgagaaaatggggcttgcagagctcaaaccattacaccattcagaagctggctttggtattacttcaagttattcaaaacagtcaccacttgctgagcctctgatgtctcatctgttgaatgggtacattttcttcctgatccttccacctctaaacttgtctatttccaaggatctatggcatccaggcatatgatttcaagagagaaggctgaaaaggaaggtgactggaatattaagaactgtgagatattctgaggaaactctaatttgtaaattggtagaaatgccagtaatttgttgggaattgaagaccctctgtattcaagagcgaagcttggcagctgtgcactgttgttttataaatcaatattacatctgaaagtggtgtttgaatgtttgtgtcatt

SEQ ID NO: 464103 - DNA, 5803 bp, Homo sapiens
gagatcgggcgcgttcagggtgaggagccatgtaaggatcatgagaggaactcaagaaggaggggtgggctactgccagacttcccagagcagaagccatgtgaaggggaagttcactgacttggaaactcttgcaccacctgctgagtctggagggctgacagatgcggagcttgtgctgaaacttatggaaaacttagttttggcatctcacactcctggaaaactggctagcttaaaaaagaacgctttctcctcttttcctcaatccactccaactcaacctcagccttctcattttctaagaataatgtctactttgttgtccattgacagtgccctggggcattcacatgcaaagagacttagagaccaggataatttctgtggcctacaaatcatgaaaggggatgctctggggagagaaaggaaagagtgcaaactgaaatggcttttctccttgcatcaaaaatgccttgagctgcatcccttaacaccttaatggacacccaacagtcactgcactgataaggaagctactagaagctacttagcacagagttatcactcaatatgactgaccatcattcagtaactctgaaatgtaaaggatccaggtaatttctgtggccaatagttctcagccctcccaatacatagaaagcacctgggcgcttggcttattaaattggtagattcctgggcactgtcccagggatccattttatacctcacatttgggctctggaatctgcacttctaagaaagcctctgaattgttctgatacagacgatgcttagaccacactttaaggaacaccgcagaagtgtttcttattcgcagaataaaaggtttcatttccaaaaactgtttcgccaattagatcttctgttcatttatcccaccttctttactattgctgctttggaagaaaatcagattattgttggaaaattagaaaacacaggtgaataaaaatgaaaaatcaaactcacatccagagaaataactcatgctaaactgttaattttttgtgtatattcttaaaaaatgtatacatacacataatataaaatatttgtgtatatgtctatactttataggttgtttagttcacttaataaatcataaatgtctttgcatactggcaaatccataatatcttcatcatcacttttaatggttattccattaaacagatgtatggttattcagccagtgccctaacatcgaatatttagattttctcccaatagttctatcttataaaccaaacctgtgatgagcatttctgtacatatgcctacttgttcagtcatttcctaaggacaaattcctagtagcagaattatcaagtcaaaggataatagattttaaggctttgataaattgccaaatgtccccaagaaatgtttcctgatttactctctcagcggcactcaataaaaatgaggaaacaccccttcccaatctggatattataatttaaaaaaaaactattcccatatgctttgatagaaaaattgtttctattgttttaatgcgcagttatttgactcatagaatgaatctattctttcttactatatgtttgccacctaagattcttatgttacgagctgctttttcatatgctttgtccactatatttttgaaacatttgtcattttcttagttagtaggaagaactctttacactaacacttaacagtttgttaactatattttatgtgaacactttgttcactgcatatgtgcaaatatattacatatattaacactgtattggctacatatttgcaaatattcccagacattttaaatacttgttgatagtatttttaactggtttgcttttattgttgtacaagtatgattaacttttataaggcaaaaatgtatcattatgtttttagaatttctgtcttcaatgtcatatgtgacaagacctctcctccttcaaaattatataaatattcactcaaactttcttccagtattttgtagtttatttttacacttagatcttagattcatctgaaatttttttagagccacgagagcttaagaaaactcgtcctgctcagaagtccacctgttcagatttttatttatttagtttttaaggttatgctgattacataaactcagggaaagcttgactaaagtcatagggaatacattagggcagatatatcttatgtaggtgatcccacctgctggagcccaaaagaaaagaagaaaaagattccttctatttaaaaataaagcgatttatttaagcaaagagtatggatttatgctgcgctagatatctgcagaaaactcacattaatgttggccattgtgtggagggatgaggcatagctctaaataaaccaatatgctcaaggaataaggtgtcgtatgtgaagttatttcttttaaaataacatgaaaaactaaagtaataaaatgttaaaaataaaagaaataactttaccaatggtcctaaaccattccaaaaagtgaactactatttaccgttttctctcaaatttctgtccacgtgaattaataaatttggcataattttaatcatagtacagaacagcatttttatatatatcaagtccttcacttttgttgacatattgtttcaatttattatattgaagatctgcataatattcaagtaattagatgtgctcaataatttaattaataccatattgtggaattacattcttcataacatttttatgtaatataatattgcataaacgtcttgaagaatatacctggttccttttttttgccatgcaagtagaattattgggcaaaatagcatgcacattttctacttcttggcaataatatttaataatatatcacagtatattttggttctagcaatgtatgggtatattggtttgacaaccttgctagagatgcatattatctatatttttgaagttgtgctaaatggacatgtataaaatcttcttgataacatggttgactcctccaaatccagtatttattatttcaaattatgttattcaaaattttgcttaattagctcattggggaaaaccaaatattttaaatcattcaggtgctttcaagacctggggtttattattaaattactaaatgccaataatttttatatgactccatgtggaaatttggaagatatacaagatgtttctgaaggtgtatcgatgcccttttttgaccagtacttaacatgaacttaccgtgtactgtgtgattatttctctttttgaaagggaaccagagggtgcaaactctttatttgagggccctggtgtctcaaggttatactccagaaaatctcattctttcctttcccaactggcatttcaaagatatttcaagtactcatattaccagatattaagcacttcagcaagaaattatctaaatttcccaatttgctccttaaagacttcttgcagactctttttcaaatttgcctgtggagtgcagattttcttgtgcacaacactgaatttatttaggtagtagaaaccttcctaggtgatcctggttctctcaaaatgtgacagataagaaggccagttcataacagggcaaggtagatttttctggaaagtaacttgcagaaaaatgaaaggctaaaggtctaattagagatagaaattgttttttaacatattagttagtggtaaaaaaaataagtgaatgctttttcatgtccataacgctgcagggacacccttgaacatgtctctttataatatttctccaaagtatgtatctggaaatgacattaatggatggtaggaaatggacatcttcaaagttttccatcattgacaatattttctccaaaattcttttaacaatttagcacctccatcaataaggcatagaaatttctacttccttacattttcaagaaccctttgttatcagattttaattcctgtctaaaacttgtaaaagggtagggagtaattgttttaatgtgcattctctaatcactaatgaaatagagcagtttaacaacaacaaaaagaaaggaaagccctaatggccaatagaaagaataacttctgatgtttgatagaacagtggggtgcctacagttcataataatttattgaatatttcaaaatagcagaagaaaagatttgaaacattaccaacacaaaaaataataaatgtttgaggtgatgaataacctaaatgccatgatttgatcattatgctttatatgcatgtatcaaaatatcacatgtgccctataaatatgtgcaattattatgtatcaattttaaaaagattcgccagctgaagtcatctcactacaaatcaactgcaccaaatggtcattcaaccaacacagccccactcctcaagattttagatgacatttgtctttaaataatgaagatcgccctgcagggattattggattatctgttaccatgcaatgtcttagttactatttagtactttattaaaggttagttgaggataaggtaatatgctgaatggtttgggatgggacactacctggaagaaaggaaaggatattgattttaactagatagtatgtatcttacaaatggaattatattttacaataatagaagtggagtagtagttatttatgtaacacctacaattagacactatgctacagatttttgtatacagttgacccttgaacaacatgaaattaggggcactggccccacatacagttgaaaacccacatgcaatttttgaatccctaaaacttaactgctaataccctactgttgacctgaagccttactgatagcataaatagttgactaacatattttatatgttatatatattatatactgtactcttacaataagagagagagagagagagagagagagagagagagagagagagagagagagagagagagagagagattttagtttggagaaagaaaggccatggttacttttactatttatcctaaaaagaaattattgaaggacaagtgtaaaatgttgtcacgtgtaagggactaaatttagcctctccgatgtcagctagtggaagtgagtggaaggtacggatgcagacaacattgaaagagatcacattctaggaatgcaatgttacagcccaattagttcatgagaaagcatggttggaagatatattgtttctatttgtatgctatagaattctgaacggtaaacttaacatgatcagggaataagttattcctcacattttctgcatcctctgggagaggataacaaaggaagctgaggaagtctgttctggaggcaccatgacaaagcaccagacagaaagcagtcacgtgtggggagatgagcagagacaccacttctcaagcacctgattattctttctcagtatttagaagcaaaaattatccttaagaaaaacaaccgcaaacgcaacacaggctacacagatgagaaaatggggcttgcagagctcaaaccattacaccattcagaagctggctttggtattacttcaagttattcaaaacagtcaccacttgctgagcctctgatgtctcatctgttgaatggatttcaagagagaaggctgaaaaggaaggtgactggaatattaagaactgtgagatattctgaggaaactctaatttgtaaattggtagaaatgccagtaatttgttgggaattgaagaccctctgtattcaagagcgaagcttggcagctgtgcactgttgttttataaatcaatattacatctgaaagtggtgtttgaatgtttgtgtcatt

SEQ ID NO: 464104 - DNA, 2392 bp, Homo sapiens
gcggcgcgcgggcgccctcggagccgcgtgctgggggtcgtaggggcccaccgcgctcagccagacgttcagacgctcggacaagcatggtctataacccaggaaaggggagcagggccactcccgcgggcggccccagcgatgaaccggacgcccccaccctgccgggaaaaaagcagtggcggtcaggccgcgctgtctctttaagatcgtgttcctactaacactgacgggctcctagagagggcggggagacgaagcaaggccaagttccaaagggaggataggcccagctggcttcagcgtccacacggcatagtccttcatgaatgttgatgcagaggcctccatggctgtgataagcctgctgttcttggcagtgatgtatgttgttcaccaccctctgatggtcagtgatcggatggacctggacacattagccaggagtcggcagctggagaagcgaatgagtgaggagatgcgcctgctagagatggagtttgaagagagaaagcgagccgctgagcagaggcagaaggcagagaacttctggacaggagacacatccagtgaccagttagtgctggggaagaaagacatggggtggccgttccaggccgatggccaggaagggcctctgggctggatgctgggaaacctgtggaacactggcctcttttgcctttttctcgtctttgagctcctgcgacagaacatgcagcatgaaccggcctttgattccagcagtgaggaggaggaggaggaagtccgtgttgtccctgtcacctcttacaactggcttactgacttcccctcccaggaggccctggactccttttacaaacactatgtccaaaatgccatccgtgacctgccctgcacctgtgagtttgtggagagttttgtggatgatctcattgaggcctgtcgggtgctcagccgccaagaggctcacccacaattggaagactgcctgggcatcggggctgcctttgagaaatggggaaccctccatgagacccagaaatttgatatcctggtgcccattgtccccccacagggcaccatgtttgtcctggagatgagggacccagccctgggccgccgctgtggctgtgtgctggtggagtcagaatgtgtgtgcaagcgtgagaaactcctaggggacgtgctgtgcctggtgcaccaccacagggacccctcggcagtcttggggaagtgtagtagctccatcaaggcagctctctgcaccggcttccacctagacgtgtgcaagactgtgcagtggttccggaacatgatgggcaatgcctgggcccttgtggcccacaagtatgactttaaactcagtctcccaccgtctaccacctcctgcaagctccggctggactatcgctcaggccgctttctctcaatccacttggtcctgggggtgcaacgagaagacaccttggtctacctggtgagtcaggctcctgaccaggagcagctcaccagtgtggactggcctgagtcctttgtggcctgtgagcacctgttcctgaagctggtggggcgctttgcccccgagaacacctgtcacctcaagtgcctccagatcattttaagtctccggcagcatcagagcttaccccatggagcatcccgccccatcctcacttcttaccattttaaaacagctctcatgcacctcttgctacggctgcccctcacggactgggcccacaacatgctctctcagcggctccaggacattctctggttcttgggccgtggcctccagcaaaggtccctccatcatttcctcattggtaacaattttctgcccctgaccatcccaatccctaagacatttaggaatgctgagccggtcaatctcttccaacacctggtgctcaaccccaaggcacattcacaggcagtggaagagttccaaaaccttctgacccaggtgaaaactctgcctcatgccccactggctgcagcaccttgatgtaaagaccattaaaaaaaaaacagaggaaggtatttctaattccttgggctacaaaagtgtttacttttcagatatatcagtggtatatgtgaccttcaccttgccagtgggggctatgatgagacaccttaaggagcgtgtgaggtggtcatgaggatgggcataatgaccctgcagggcctagtcaaggatgggtcatctgaggttttcttctgctaactttcatcatgacccaaagaaggtccagggaaacggatgttatgggaggatcttgctgctaaggaggaccttgtaggacgcttagaggttcccagggtggtggaacccctgaagtgttatacttccgggaggaagtggtgggggacaagtgggagtgacagctcagatttggactcc

SEQ ID NO: 464105 - DNA, 2169 bp, Homo sapiens
ccggggcagaggaaaggtgtcacccaggcaggttcagggctttctggctataaaagggagcctctgggatcagcaggtcatatctggtgcccatggttgactgaggagtcggatgcagaggcctccatggctgtgataagcctgctgttcttggcagtgatgtatgttgttcaccaccctctgatggtcagtgatcggatggacctggacacattagccaggagtcggcagctggagaagcgaatgagtgaggagatgcgcctgctagagatggagtttgaagagagaaagcgagccgctgagcagaggcagaaggcagagaacttctggacaggagacacatccagtgaccagttagtgctggggaagaaagacatggggtggccgttccaggccgatggccaggaagggcctctgggctggatgctgggaaacctgtggaacactggcctcttttgcctttttctcgtctttgagctcctgcgacagaacatgcagcatgaaccggcctttgattccagcagtgaggaggaggaggaggaagtccgtgttgtccctgtcacctcttacaactggcttactgacttcccctcccaggaggccctggactccttttacaaacactatgtccaaaatgccatccgtgacctgccctgcacctgtgagtttgtggagagttttgtggatgatctcattgaggcctgtcgggtgctcagccgccaagaggctcacccacaattggaagactgcctgggcatcggggctgcctttgagaaatggggaaccctccatgagacccagaaatttgatatcctggtgcccattgtccccccacagggcaccatgtttgtcctggagatgagggacccagccctgggccgccgctgtggctgtgtgctggtggagtcagaatgtgtgtgcaagcgtgagaaactcctaggggacgtgctgtgcctggtgcaccaccacagggacccctcggcagtcttggggaagtgtagtagctccatcaaggcagctctctgcaccggcttccacctagacgtgtgcaagactgtgcagtggttccggaacatgatgggcaatgcctgggcccttgtggcccacaagtatgactttaaactcagtctcccaccgtctaccacctcctgcaagctccggctggactatcgctcaggccgctttctctcaatccacttggtcctgggggtgcaacgagaagacaccttggtctacctggtgagtcaggctcctgaccaggagcagctcaccagtgtggactggcctgagtcctttgtggcctgtgagcacctgttcctgaagctggtggggcgctttgcccccgagaacacctgtcacctcaagtgcctccagatcattttaagtctccggcagcatcagagcttaccccatggagcatcccgccccatcctcacttcttaccattttaaaacagctctcatgcacctcttgctacggctgcccctcacggactgggcccacaacatgctctctcagcggctccaggacattctctggttcttgggccgtggcctccagcaaaggtccctccatcatttcctcattggtaacaattttctgcccctgaccatcccaatccctaagacatttaggaatgctgagccggtcaatctcttccaacacctggtgctcaaccccaaggcacattcacaggcagtggaagagttccaaaaccttctgacccaggtgaaaactctgcctcatgccccactggctgcagcaccttgatgtaaagaccattaaaaaaaaaacagaggaaggtatttctaattccttgggctacaaaagtgtttacttttcagatatatcagtggtatatgtgaccttcaccttgccagtgggggctatgatgagacaccttaaggagcgtgtgaggtggtcatgaggatgggcataatgaccctgcagggcctagtcaaggatgggtcatctgaggttttcttctgctaactttcatcatgacccaaagaaggtccagggaaacggatgttatgggaggatcttgctgctaaggaggaccttgtaggacgcttagaggttcccagggtggtggaacccctgaagtgttatacttccgggaggaagtggtgggggacaagtgggagtgacagctcagatttggactcc

SEQ ID NO: 464106 - DNA, 2502 bp, Homo sapiens
ccggggcagaggaaaggtgtcacccaggcaggttcagggctttctggctataaaagggagcctctgggatcagcaggtcatatctggtgcccatggttgactgaggagtcgggtgaggccaccctaccacaagggtccccctccccatcctacacaggaatgaaaacagtcccatgtacactttctggaagcctaaataccacccacaccatgtggaaggaaagcaggagagagactgagtggcacatcctttcgccctcttttctctcgaacctcctcccaggccgaccacccttgctgtgtccaagccaagctctgtgggctttctgttcctcctgagtagctgattttcagaatttggggtaccagggctctggggaatgtgagctagagagcagataagtctggaagatgaccactgactcctactctcctacttctccagatgcagaggcctccatggctgtgataagcctgctgttcttggcagtgatgtatgttgttcaccaccctctgatggtcagtgatcggatggacctggacacattagccaggagtcggcagctggagaagcgaatgagtgaggagatgcgcctgctagagatggagtttgaagagagaaagcgagccgctgagcagaggcagaaggcagagaacttctggacaggagacacatccagtgaccagttagtgctggggaagaaagacatggggtggccgttccaggccgatggccaggaagggcctctgggctggatgctgggaaacctgtggaacactggcctcttttgcctttttctcgtctttgagctcctgcgacagaacatgcagcatgaaccggcctttgattccagcagtgaggaggaggaggaggaagtccgtgttgtccctgtcacctcttacaactggcttactgacttcccctcccaggaggccctggactccttttacaaacactatgtccaaaatgccatccgtgacctgccctgcacctgtgagtttgtggagagttttgtggatgatctcattgaggcctgtcgggtgctcagccgccaagaggctcacccacaattggaagactgcctgggcatcggggctgcctttgagaaatggggaaccctccatgagacccagaaatttgatatcctggtgcccattgtccccccacagggcaccatgtttgtcctggagatgagggacccagccctgggccgccgctgtggctgtgtgctggtggagtcagaatgtgtgtgcaagcgtgagaaactcctaggggacgtgctgtgcctggtgcaccaccacagggacccctcggcagtcttggggaagtgtagtagctccatcaaggcagctctctgcaccggcttccacctagacgtgtgcaagactgtgcagtggttccggaacatgatgggcaatgcctgggcccttgtggcccacaagtatgactttaaactcagtctcccaccgtctaccacctcctgcaagctccggctggactatcgctcaggccgctttctctcaatccacttggtcctgggggtgcaacgagaagacaccttggtctacctggtgagtcaggctcctgaccaggagcagctcaccagtgtggactggcctgagtcctttgtggcctgtgagcacctgttcctgaagctggtggggcgctttgcccccgagaacacctgtcacctcaagtgcctccagatcattttaagtctccggcagcatcagagcttaccccatggagcatcccgccccatcctcacttcttaccattttaaaacagctctcatgcacctcttgctacggctgcccctcacggactgggcccacaacatgctctctcagcggctccaggacattctctggttcttgggccgtggcctccagcaaaggtccctccatcatttcctcattggtaacaattttctgcccctgaccatcccaatccctaagacatttaggaatgctgagccggtcaatctcttccaacacctggtgctcaaccccaaggcacattcacaggcagtggaagagttccaaaaccttctgacccaggtgaaaactctgcctcatgccccactggctgcagcaccttgatgtaaagaccattaaaaaaaaaacagaggaaggtatttctaattccttgggctacaaaagtgtttacttttcagatatatcagtggtatatgtgaccttcaccttgccagtgggggctatgatgagacaccttaaggagcgtgtgaggtggtcatgaggatgggcataatgaccctgcagggcctagtcaaggatgggtcatctgaggttttcttctgctaactttcatcatgacccaaagaaggtccagggaaacggatgttatgggaggatcttgctgctaaggaggaccttgtaggacgcttagaggttcccagggtggtggaacccctgaagtgttatacttccgggaggaagtggtgggggacaagtgggagtgacagctcagatttggactcc

SEQ ID NO: 464107 - DNA, 1694 bp, Homo sapiens
cagcgaaccttcagagggtgaagggaaaatttctcctaggccctgacacaaccataactactgcagtctgaaacaggtatgctccacagcctacaacagcagcctgatctggaacaaaggagacaggaatcagggcagcctctgacagagtgctcacaggagaaagagatggtgctgcccggtacagcccctcccagcattcacaggcaatggctggaggtaagaagcaccaggttaacaacgggactttctccagtcaagtacaagtcccagttctcttatcaaagagaactcaacttggatttatatgaagatcaaagaagccagctctatcaagaagcaattagcatcaacattcacagaacagtttgtgagcaacttgcaggaagatcccagagatggctgcagggcacagataagaaatgccacatcactagtgctctccatggcacagagaaatacttatggaaaaacatggactttgatgattcacaattgaaaagtgactcagaagagctggactttgtaggagaaaaacattgaaaataatctaaccaattatttcacttatttttcattttcatgtatgcacaaaatgcatgtttaaataaccctaaaaaactctttcaattgagaaaccctgactgtcaacgatagaacgggtcaagacttccatgtattatgaatatggcagacaaaataaaattcttagtttcataacggaaataaaggagaaatgtgatgttccgggaaagcagctgagacacattctaacagtatagcttatttgcaatacattgggtatttactcaaccagtgtttactaggcatcaaacaaactcaaaatacttgttagaaaaaaagacaatacctaagatgttttcacagattcactaatcaccaacatttctttgaatgtaaaaaatcttataaaggttgtttgcagaaattaaattagtaatttcccaaatttgacatgctatttgattctgttagcagataatacaactaacttttttttgttcgtacgttttcatggttacagagctggagaaagaaacgttatgtatgagaaaatactttggtttaaattgtttacgagtaatttctctcatactgatgtgctaaatggcttctctttgtccctccaggtcactctccatcttttccgccagtgcccaactgactgatctttacagatggtgtcaacagatgcatctaccctctggcttcaagttgagttggccaatgaagggaggcgctgcggaaagtacatgacatttgcagttgtgggcgactgtgctgtgggatgaaaccaggctcctcatcaagatgaacatagattcaagtctccatcttagccatttcctagttctgtgattataaataaactccttgacttttctgagccttagtttcatgatctctgtaatgagaataatattatctcttcccaagcatttgataataattaaccatttctaaattggggataacatcaataccgtaaggattagctaagcatatcttccctgtgaaatgtatgtgcctctaaaaactcaatgcattgatatacctaccctattgaaatggataatttcattaatagtaagttagagaatgctgattaaatgaagaaaacacatgaatatatttaaagtgatgatatcttcactttttatggtataattata

SEQ ID NO: 464108 - DNA, 5065 bp, Homo sapiens
tcgtcggcgcggcggtgggaaagcagagccgagccgggactgtccagtgggagcaggcgccccggccagcgcagacctggaggcgcacgggcgccgcaccgcacgattcggctcggggtagagcggagccgcagccccacgcgcagcccaggacccactcgccaccgccgcttcctcagcacccatggggaccaggagactttaaaggagtttggggtttcgggagcagggaaatcacggcccacccctcggtccttcctgggtgtccgtctcccacactgccacagccagcactctcctccccaccgggaccccgcaagctctccagccagcctgggtgttttcttctgggagttggaccgagttcccggaaggggtcggaggctgtgtggtggcgtctgctctcgcctgacctgtggcggcttctccgcccctcgtacccctggggaggcacggaggactcggctggaaagggtgactccgatccccgctcctggccctcgcctcgccacctcattgatgggcaaccaactggaccgcatcacccacctcaactacagcgagttgcccacaggggacccgtcggggattgaaaaggacgaactgcgggtcggggttgcctacttcttctcggatgatgaggaagacctggacgaacgcgggcagcccgacaagtttggcgtgaaggcccccccgggttgcaccccctgcccggagagccccagccgccaccaccaccacctgctgcaccagctggtcctcaacgagactcagttttccgcctttcggggccaggaatgcatcttttccaaagtgagcggtggccctcagggcgccgacctaagcgtctacgcggtcaccgcgctgccagcgctctgcgaacccggcgacctgctggagctgctgtggctgcagcccgcgccggagccgcccgcgcccgccccgcactgggccgtctacgtgggcggcgggcagatcatccacctgcaccaaggcgagatccgccaggacagcctgtatgaggcgggcgcggccaacgtgggccgggtggtgaatagctggtaccgctaccgcccgctggtggccgagctggtggtgcagaacgcctgcggccacctgggcctcaagagcgaggagatctgctggacgaactcggagagcttcgccgcctggtgccgctttggcaagcgggagttcaaggcgggaggggaggtgccggcaggcacgcagcccccgcagcagcagtactatctcaaggtgcacctgggagagaacaaggtccacaccgccaggtttcacagcctggaagacctcatccgcgagaagcgccgtatcgacgccagcggccgcctgcgagtgctccaggagctcgccgacctcgtggacgacaaggagtagccgcctaggggctgccggcccctctgcctcccccgcacctcgctcccttcccttccccgcacccggacttcgcagtcagcggttctcaacctctgccccgccccgccacgcgcgtccgccgccggtggcccgggcccgggctgcacccccgcatccccaagccagcggcaggaagtctcaggaactgccccagggccgaaagggcgccgctgcgagcgcctggctgacagccacagcggtggtgacggtgctgggagaccccgcgtgcgctttccccttgagatgtaaaccgggaacggggaaggggctgaggggagaaaggacatggccttccccgcgagtccatggccagtgactgtggcccgactcgaaaacaaccctcttctcaaaagggaccatcaccgccccgagcgtgcgcacacagaccggtcggaggcgagaactggtctctacagggcacagttcagctcctctgtggatgcgtccccagatcgcaggatttccaagaaatcgagcctgtcccttgtgcacttgggaataattccccaagacagcacttcgggattccgggttatcctgaggctgcccgggacttttccagctctccagccccaggtctcctgacattgtgttccaggctgcgggctaagccagacagtgtttgcctccggttctttccaccgtgggaagcgaacgccacccccacccgcctttgcctgcgagtctccctcgctggcagaagggaagccggcccggtcccgggaggaagatggcgctgcgaattcggtgaggacagccggccccgcccccgacaaggagctcgctcgttcacctggtgtctgggaacttgaatgtgtgaagggcgcttattgttctgaacccttgattgctccctcctcgggctgcatttcaaaaatagtcatatttttaaaggagttggaggagagggagggggaggacatggcaccattccagaaaccagcattgttacaacaccatagccagtatatttagtttggcttttcctaacatagaaatcttcaaagctggggaagtggaaataaagttttaaaaatgagagagcagttttccaactatgtcaacaaagcctatcgtgttgatgtttttattgaccattttagcaacaggctaataaaatttcaaattgaaatttttattttcatggctttaatccatgatagtttaaatactgggggccattaagagtggatgtagctaagagcttagctaacattgccttttcactctatttttctcagatattgtaagcattctgtttttcaatattgtagttaattttttggctttcaacagcagccctagtaatggtggagttgttaattaatgtgtatattgtactgaatttctgtcagttaaggggttcactgctttggtggaaattggtggaaattgctagcaggttccacgatgtttatttttttctccatgttgtatatcattaccatttcacatacgcgtttctatttttcttcctctcctcctgatctccttaaaaatgaatctagagttggtggctttttccccctcctctttggccagttccacagttcagttcttcctgaaaacagggatgatgaacttgtaggatcaggacaaatgtgtgtttttcaaaaacttaaggctgggtgtgaaacaccttctgtggacaaggatttgtaaacttctctcctccctccagctgcggccccagcctaactgatagttacttgattcagtgtgctagacacttaaatagcatctatgtctctttcaagggaatttgtcaaataatgctgtttagctaattgttgcaagcaattgcatattaacagctgtgattttgttggacagcaagtattatggccaaagccagtttcttggcatttcaaaaataatgcaataaaaactagttgaggttagctgaggctggaaatgcctttttcatggtaaatgattcacttctatatttttctttctttttctttttttttctttggttttcatcctggattcatcccctgatcttaaatcaaaacgtcagatcaatgaactatgaactaaagtatttttcttaagcctattgagtgatttattttttaaaaaatgtttaaatgcatatgcttttctttcagcacaaacaacagcaaaaacttttgtaataactaacttacctttgcatgtatgaagaactgagtcatttatttccctaacttactcctctttcaagtaacaggtggcagatcataaaatgaattctttattgtatctacacactccacattctttactgtgtcctactactgtatcttggctccctgctgtattaaacaccatcttaagcacttgttcctgcaggactccttcttgacattttgtctcccccttcaaagtcactcaaagagtgggacttcatcaaaagaaatgaattagtctctatcacaccgaatactaagatttatttcctctgatggtacatagatttctctctcactaagagggtcactctcatagaggaatgtcttgtcagttttatacttgctgaggctagactgacaataaaaatgagctgggcagttaaattagcatttgttactatattggcctataaaggatcaggttgatgataatacctctaaaaatatgcaataataaaacaatagttatgaaagaaacttgaaaggtttgcaaggtttctcctatccctgttaaaattatcatttattatctctttgtcagtgttagtaaggtaacccatgacagaataatttgagtgatagttcatcatgcagaggatatgatcaagatattacctaatggttttatcctgaaaaaggtgtatacttttagggcactgttaacaatgcgagtgaaaccaagatggtgcaagttccctttgcagatggcgtgggcacacttgatttttattatgagtgaatgtaatctttctgtattttaccagagttacagcaattacctgaaaagtttcctaacattttaataatgttagggatttcgttttggttttagttgtcctcaagagacaacaggttcacagtaatttccatgatgttgggtgtggctaagctggggattggttctgttccccctgctcccgtgtagagaaaagctatatttatactgcattctttctcaactttcaggtaaaacaaactatgatttaaaaaaagaaaaaagaaaagacaggtacttttacttcaaagagtgctttgctacatttttatttaaaccaaaaatcaaataaaataaggaggggggctgggtatactttaaacaaaaccagtcctgaaatgctgttattctcaaagtacattccaaaaaaaaaaaaaaaaaaaaactatagaatttacgtatgttacatttttaagtatgagttaaattgatataaagtgttcctcaatatttaataatgtaagctgttgtcatgacagtattttttaaaaataataacgtatattatagttacgaaacacttgtgccagattagaacatcaagcacagaagcagctgtatgatttacctgtttttttgaaactttaatgtttaccttcccctatgtttaatttttctgtggtgaacacttttgttagaacatggcttttttatttttcttggaaaaatatgctat

SEQ ID NO: 464109 - DNA, 969 bp, Homo sapiens
tgttccagccatataccctcggttctttccaagacatcgctgaatcaaaatccaaagcaggtattcccaaggtcagacacttctatgcaaactccacaccttattgatgctacctgcctcttcatgtgtactgctatttataaccaccttgttacaaacaccttacttagttcaggccttgtcatttcagccttcactgtctctactgctattggagacatggctctggcaattaccaaaacattgtttcaagacataggcacaggcaaatgtttcgtgatgaagatgccaaaagcaattgcaacaaaagcaaaaattgacaaatgggatctaattaaagaacttctggaggagccaagatggccgaataggaacagctccggtctacagctcccagcgtgagcgacgcagaagacggtgatttctgcatttccatctgaggtggaatgactgtggctctgtgccatctcgaaatctactggtctctaagcacaaacgaacattctcttaaactaatgaaatgagtggcaggcagcgtgtgcagagcaccagcaaaggctcagagggatgcccacagagttccaccgcaaccgtgcacagaggaggaggagaatgctccctacaggtgaaaactaggctaatacacaatgattgaagactaaaggatgagaagagccaccagtggggcgcattcacagagaaacggtcacatgatgaggcagcaagaaggcaaaaattgcgagccaacaagagaggcctcagaagaatccaaccctggtgccgccttcattttaaacttccaacaaccccagaactgtggaaaaaaattctattttttgtctgtggtattttgttatggcaaccctagcaaactaatacactgagcaaactaatacattaaacagaatattaaaacgaaaaaaacatactgttatttttagtatgtgctatagtctgtatctatttatt

SEQ ID NO: 464110 - DNA, 1681 bp, Homo sapiens
attaatcaatcttaatgggtcaaacaaaaggcgggagggtttctgcagagagatccgctgttagtctgatgggtttccctttggacccacttgaggaggcagtctgtcccttcacagagctcaagcgctgtgctaggagttccactgctctcttcagagctggcaggcaggaacatttaagtcagctgaagctgtacccacagccgccccttcccccaggtgctctgtccgagggagatgggagttttatctataagcccctgactgggactgctgcctttctttcagagatgcccttcccagagaggaggaatctagagaaaaagggagtgggcccatctgtgcacttccttgtaaaatccagctttagcaaagggacctgcttacatctagagggaggaaaattgcatgatctccaggggagaagcccgctggcctatgtgcaggttttcatgctgtcctctgaaaaccacctggttccttgtttctactgactcactgagtgtgagagaatgcatcattgactttttcctctattccctcttttcacatgtaaaatgtagatttactgaggctaataagagcctcacaagaatgtgaccacctgcctcactgcctgcctccttttcttccccctgctgcttgcagttccccttttgtgaactgaagttcacaaaaccccctttggaaaaaacataaatcacaggagcatctgtaatttatgctttttcccaggcgcatcctcagctttggccaaataaacctctaatggatggagacttgcttcagtcactttttggtttacattttggtaaccacaaaggggctttctgagtggagttggctcttggcctgtagcaactctcctactggggccctagtaccagctggagctctttattgctctgacctattggatgatttgctgaagtctgagagtttctccctccagagatccctaatcactcaaaaatttccagttgagatctgaagtttattccactgcagaactccttttctgagagttcttacttctaacaaggaagaagactttcctgcttccgtgatggcagagagcagttttcagcttgtgccccatctccagggtgaaagatatctccttcaaagcttttcaggggcccaactggaaaatcttaatgttaatttaaggtcaaaagacataatttagaatttgttttggacaggcacatagaccaatggaacagactagagaactcagaaataaaatcacacctctacaaccatctgatcttcaacaaagttgacaaaaacaagcaatggggaagtgattctctatttaacaagtggtgctgtgagaactggctagccatatgcaaaaattgaaactggaccccttccttacaccgtatacaaaaattaactcaagatggattaaagacttaaatgtaaaacccgaaattataaaaaccctagaagaaaatctaggcaataccattcaggacacagacgtgggcaaagattttacgatgaaattgccaaaaacaaaagcaatggcaacaaaagcaaaaattgacaaatgggatttaattaaactaaagagcttctgcacagcgaaagaaactatcatcagagcaaacaggcagaagaaggtggaaggagctgacttgctgagtcttcccaccttcatctttctcttgtg

SEQ ID NO: 464111 - DNA, 1817 bp, Homo sapiens
attaatcaatcttaatgggtcaaacaaaaggcgggagggtttctgcagagagatccgctgttagtctgatgggtttccctttggacccacttgaggaggcagtctgtcccttcacagagctcaagcgctgtgctaggagttccactgctctcttcagagctggcaggcaggaacatttaagtcagctgaagctgtacccacagccgccccttcccccaggtgctctgtccgagggagatgggagttttatctataagcccctgactgggactgctgcctttctttcagagatgcccttcccagagaggaggaatctagagaaaaagggagtgggcccatctgtgcacttccttgtaaaatccagctttagcaaagggacctgcttacatctagagggaggaaaattgcatgatctccaggggagaagcccgctggcctatgtgcaggttttcatgctgtcctctgaaaaccacctggttccttgtttctactgactcactgagtgtgagagaatgcatcattgactttttcctctattccctcttttcacatgtaaaatgtagatttactgaggctaataagagcctcacaagaatgtgaccacctgcctcactgcctgcctccttttcttccccctgctgcttgcagttccccttttgtgaactgaagttcacaaaaccccctttggaaaaaacataaatcacaggagcatctgtaatttatgctttttcccaggcgcatcctcagctttggccaaataaacctctaatggatggagacttgcttcagtcactttttggtttacattttggtaaccacaaaggggctttctgagtggagttggctcttggcctgtagcaactctcctactggggccctagtaccagctggagctctttattgctctgacctattggatgatttgctgaagtctgagagtttctccctccagagatccctaatcactcaaaaatttccagttgagatctgaagtttattccactgcagaactccttttctgagagttcttacttctaacaaggaagaagactttcctgcttccgtgatggcagagagcagttttcagcttgtgccccatctccagaatacagaatctaaaggggtatcagccagcctccctaacacagagatacagaatgtctgaggtattgcctttgtctccaagaagaatggctggagcagtagctaccactttgtgaccaagaaggaaaggctgagagaatcacagagaccttaactctggtgtcattgaactacccgctttcagactcctcactatgtgagaaaaatgactccccaatttgcctgagcctctgtttcttaggtttctaaatagacagccaaatgtaattctgaatcaatacaaataaaaatgttaaaacctctcagaggtattcattgttgatgagttgttatatattcttccagacttttaacactttacatttatgtgcaatattataaaaagtaagatttttttagtatcataaaaataaagattccttaaatctttaagaataagagctaatgtctttaaaaataaggttctacactgtagaatttggtgtgaatgtgaaagtcaagctttatttaaatgacaaatgtcttgaaaatccacatgaagctaagtgtcttttgtggatcacacattattggatgtctgtagaactttttaaagggtctgtaggagggggaaaataattttctcttctgcccttcatgagttcttagctggaactccatttaacaaaagacagattaacaagagaaaagcaaacaaaagtttaataatgtgt

SEQ ID NO: 464112 - DNA, 877 bp, Homo sapiens
gacgcggcgggcggctccgggaggcgacgggacccccaggccggcagccgagtgaagaggcaggaactgtctacaaatgctccggctccgaagccccgagggaaagagcatctttcacggagcaccaggaattgacgacggtggaatttgctcagatcccctgaggccggttctttgagtttctgtctggccctccgggagaaccgtcccaaagttaactttgaaaacactcacaggagagggaaggctgtggggtccttcgcttctcaaaccccagatgcccccggaaagaacaccgcccccgaccaccaccacaaccagatgtttttaaaaagagatgctaagcaaaaggcctgattatgaggaatgagccaaagtcatgcaaggcgtggggcgctatgggactgcgcagtgacgacccagtgaagtagatgccttgacgattcccatttcacggatgagacgactccggcacagagaagtcagagggcctgtcctgggtcacacagccacaggcggcccccagaacgggacttcagggtgcaccactgcaccccagcagagacctccgcctggcacacagggaatgctggagcaatacttaaatagcatggcagcttttcgtgtttggaagccttcagaatcatttcctaccctctcaaggaacccattctttagaggtacacaccgttcctgtcagagaggctatcttcctagtgctaaatgattttttgatgcactgaaaattaaattcacactcaaatttctgcatttgaggagattttcctgtacgctgagctctgtcaaaagaggtatattgaagagagggtagttctgggaccatttgcaagacagcgcattgattggaagcctatac

SEQ ID NO: 464113 - DNA, 749 bp, Homo sapiens
gacgcggcgggcggctccgggaggcgacgggacccccaggccggcagccgagtgaagaggcaggaactgtctacaaatgctccggctccgaagccccgagggaaagagcatctttcacggagcaccaggaattgacgacggtggaatttgctcagatcccctgaggccggttctttgagtttctgtctggccctccgggagaaccgtcccaaagttaactttgaaaacactcacaggagagggaaggctgtggggtccttcgcttctcaaaccccagatgcccccggaaagaacaccgcccccgaccaccaccacaaccagatgtttttaaaaagagatgctaagcaaaaggcctgattatgaggaatgagccaaagtcatgcaaggcgtggggcgctatgggactgcgcagtgacgacccagtgaagtagatgccttgacgattcccatttcacggatgagacgactccggcacagagaagtcagagggcctgtcctgggtcacacagccacaggcggcccccagaacgggacttcagggtgcaccactgcaccccagcagagacctccgcctggcacacagggaatgctggagcaatacttaaataggggaggtcagaaatctcacgggctctgctggcttctgtgcttcgtctctcaaggccaaaatcaagatgtcatcagtgctgagctctggtgcaggatccacgtccaggctcactggggctgctggcagaattcagctgtgt

SEQ ID NO: 464114 - DNA, 1539 bp, Homo sapiens
gacgcggcgggcggctccgggaggcgacgggacccccaggccggcagccgagtgaagaggcaggaactgtctacaaatgctccggctccgaagccccgagggaaagagcatctttcacggagcaccaggaattgacgacggtggaatttgctcagatcccctgaggccggttctttgagtttctgtctggccctccgggagaaccgtcccaaagttaactttgaaaacactcacaggagagggaaggctgtggggtccttcgcttctcaaaccccagatgcccccggaaagaacaccgcccccgaccaccaccacaaccagatgtttttaaaaagagatgctaagcaaaaggcctgattatgaggaatgagccaaagtcatgcaaggcgtggggcgctatgggactgcgcagtgacgacccagtgaagtagatgccttgacgattcccatttcacggatgagacgactccggcacagagaagtcagagggcctgtcctgggtcacacagccacaggcggcccccagaacgggacttcagggtgcaccactgcaccccagcagagacctccgcctggcacacagggaatgctggagcaatacttaaataggaacatacagtggcataagagagaccaacttggtgataactgatcataggattagaccaaggtgcagaagcaaacagaacctccataaaatgtaatgatgtcttgtgcctgcaatcctagtgctttcagaggccaaggtgggaagattccttgagctcaggagttcgagaccagcctgaacaacacaacaagacctcgtatctatgaaaaaataaaaataataaaattagctgcacacctatttggtggcacacacctgtggtcccaggtactcgggaggctgagatgagatcatttgagcccaggagatcaaggctgcaatcagctgtgatcatgccactgccctccagcctggacaactgagcgagaccctgtctccaaaaaaagtaaaattaaaaaaaaaattaaaatgtgatggagtgcagaggaaagttagtggcttcatcctcaggcatgtctgtccctccttctgcaggagcacacagcacgctgcactgtggggaccgctgtcctttggtctgcatgctgctcatcgcatctgggggagaggacccgatatcgtttgtttttacgtccgcgaacttcacatggtgttaccatgactctccttcctgcagccaagtgaaggacaagtttgcttccccttccacaatgattgacttgggctgtagagggaaattcttctatgtccctgatgtgctcagcctagaacagctgagcttgaaatggttaacgccacccccaccactccttaagaaagtctttcaattctgcaatgaccattatctgcaaactctagaattatctagttcagatagatagagttaacactaaatagaagaaaattaacatatcagattacaaagtttcttgtaataaatgctttatacagacttgtaagcacttatataaattttaaatagaataaat

SEQ ID NO: 464115 - DNA, 819 bp, Homo sapiens
agcgggacatttgtcttggcgctctggggaaaaaggctggagggcaatggcgcgatcttggctcactgcaacctccgcctccctggttcaagtgattctcctgcctcagcctcctgagtagctgggataacagacatgcatcaccacgaccagataaggacactgcaacccagagaagaaacctgcaaaggccgtgttcacacactcacaagagatatggctgtgatttggatccagatgtgatgggctgacaacaaaactcctgtgataccatgaagtcttcgggaggcagaattgaagtgaacatgaagtttagcttagagaagaaaagaataaatacatacaaaacatttgatggtgaataaacagaaaatggtgtattcaacagaatttgactcagcaataaaaatgaaccaaactatggaaaacaacaccaacaacaggaagaaatctcaaaataattatggtgggtgaaagaggccagaccaaaaaaaaaaaaaaaaaaagactagaaaatgttaactacccaatagtgttgaaaaacaagcagatcagggattgcctagggaagtggagggaagggcacccttgaaaagaggtaggaaggaagggatgataaacaggcagaagggaaacttttgaggggtgggggatatattcactaccttgatggagatgcttgcaagggtgtcaaaatgcatcacatcgtatgctttaaacatgcacagtttatcgtatgttaattatagttcaatgaagccaaaaaacatatttgaatttaaatatgtttagtacaatccacaaatcctatgaagtaga

SEQ ID NO: 464116 - DNA, 1102 bp, Homo sapiens
cagccagtgacatgcgggaaatgccagttgtgtggtgtcctaggagaacggtgactgtaaggtccagttgcctgagatggtccaagttgaggcctgtgtctcagcttcaaaagctgagagtgaggatggtggaggaggcatggatgtttgaggagggaggaaaaagtgtgaaacagccaccgaggagtgtggcagtccattcactcgaatggactgggaaaaatggagaaggattccagggcagcaacgaaagccccctgagttgcaggggcagagtaggaggagagttggagtcaagcggggatggagttttgccaagctggagggcaatggcgcgatcttggctcactgcaacctccgcctccctggttcaagtgattctcctgcctcagcctcctgagtagctgggataacagacatgcatcaccacgaccagataaggacactgcaacccagagaagaaacctgcaaaggccgtgttcacacactcacaagagatatggctgtgatttggatccagatgtgatgggctgacaacaaaactcctgtgataccatgaagtcttcgggaggcagaattgaagtgaacatgaagtttagcttagagaagaaaagaataaatacatacaaaacatttgatggtgaataaacagaaaatggtgtattcaacagaatttgactcagcaataaaaatgaaccaaactatggaaaacaacaccaacaacaggaagaaatctcaaaataattatggtgggtgaaagaggccagaccaaaaaaaaaaaaaaaaaaagactagaaaatgttaactacccaatagtgttgaaaaacaagcagatcagggattgcctagggaagtggagggaagggcacccttgaaaagaggtaggaaggaagggatgataaacaggcagaagggaaacttttgaggggtgggggatatattcactaccttgatggagatgcttgcaagggtgtcaaaatgcatcacatcgtatgctttaaacatgcacagtttatcgtatgttaattatagttcaatgaagccaaaaaacatatttgaatttaaatatgtttagtacaatccacaaatcctatgaagtaga

SEQ ID NO: 464117 - DNA, 1011 bp, Homo sapiens
gagaccaatgaggtcagtctctctgggacccagattggagaccttggctctaggaagttcctgcggttccaacaagagcacctgagcctcagcttgatcaagtctgacaagtttcggaagtagcaggagaagggtgtggggctgcggggaagagatggcctgtagctgattcttctccctctcacgttcccttccacttcttctcctcttccagcccacccaggaagtggcctccagcctccctcgtggtctgagaccatttggcatttgggataaggatttctatgtggcccctatcccagatggtgtcttgtaagcacggcacgtcatgggtgcttagcaaacatttgtcgaacagattcttgaaagactcctccatccgttgctttcaggcagatgagattgcctggattgattttgcaggacttgaaagaacatccacaatgggccccagtgtcacccaccccagcagagagaaatgtaactgccaaagggaccggatacacgtgtcctccagccaacacgtcagctccctgcaggcacactccgcagaaagccaagttcaaatcaaaatggtgcttggcttgcttctcccaggcaggctgcctgatggttcctggatatgccgtgtgtgtccacacctctgggcctctgctcagtgtagagatggcatacaggaactgaatggatgagcaggtcactgagcagacacgctggggaaagcaccacgtggagggaatcaagagagctggattctcattccagtcttctggctcctcaggaaataacacaatagagacaaagctgaagtccctttatctactacccaagtcccacagataactaatgaatttggtgtatatccttctcattattttccaatattttaacatacctatccatatatttagcatttgatattgatttatgtcttaatttacataaatggtatcatatgattcacattggtgtacatcttgcctttatcaacaaatgttatgtttttgaaat

SEQ ID NO: 464118 - DNA, 3171 bp, Homo sapiens
agcctgcagcggtcaggcagtggagagtgaccacataggaggagaaagccatgcctgtccctggagacctctgagagctcacaggagggaaagagtccgagggtggagctgatagccactcagaggtcccttgccagatgctagatggcaacagtgggttgagttctgagaagatcagccagaaggccctggagccgtgcggtgtcacaaagcagcagcgtgagccgcatgcggctccgagtccaaggaccgaaagctctacaagttcctcctgcttgagaacgtggtgcaccacttcaagtacccctgcgtgttggacctgaagatgggcacgcggcagcatggcgatgacgcgtcagctgagaaggcagcccggcagatgcggaaatgcgagcagagcacatcagccacgctgggcgtcagggtctgcggcatgcaggtgtaccagctggacacagggcattacctctgcaggaacaagtactatggccgtgggctctccattgaaggcttccgcaatgccctctatcaatatctgcacaatggcctggacctgcgacgtgacctgtttgagcctatcctgagcaaactgcggggcctgaaagctgtgctggagcggcaggcctcttaccgcttctactccagttccctgcttgtcatctatgatggcaaggagtgccgggctgagtcctgcctggaccgccggtctgagatgcgtctcaagcacctggacatggtgctccctgaggtggcgtcatcctgtggccccagcaccagccccagcaacaccagccccgaggcgggtccctcctctcagcccaaggtggatgtccgcatgattgactttgcacacagcacattcaagggcttccgggatgaccccaccgtgcatgatgggccagacagaggctacgtgtttggcctggagaacctcatcagcatcatggaacagatgcgggacgagaaccacccggcgtactcgggcgctcattggctacgtctgtcgcagcgctgcgctccaacgttccgacgccggcggccgtgccacgtacgcggcagccgattggcccgcggtggtcgcgtcactgcccgcgccgggtccggcctgagttcggggccagcagccgtctacccggtgtcgcgttctgtgttgtggcggccctggatccggcgtcagggcgaccgggcggacgaggtggagccagagtctgtcaggcgggttgtggggggctatgggacgcggctacggccgctgacgctgagcaccccgaagccactggtggacttctgcaataagcccatcttgctgcaccaagtggaggcgctagccgcggcaggcgtggaccacgtgatcctggccgtgagctacatgtcgcaggtgctggagaaggaaatgaaggcacaggagcagaggctgggaatccgaatctccatgtcccatgaagaggagcctttggggacagctgggcccctggcgctggcccgtgacctactctctgagactgcagaccctttcttcgtcctcaacagtgacgtgatctgcgatttccccttccaagccatggtgcagttccaccggcaccatggccaggagggctccatcctggtgaccaaggtggaggaaccctccaagtacggtgtggtggtgtgtgaggctgacacaggccgcattcaccggttcgtggagaagccacaggtgtttgtgtccaataagatcaacgcaggcatgtacatcctgagccctgcagtgctgcagcgcatccagctgcagcctacgtccattgagaaggaggtcttccccattatggccaaggaggggcagctatatgccatggagttacagggcttctggatggacattgggcagcccaaggacttcctcactggcatgtgcctcttcctgcagtcactgaggcagaagcagcctgagcggctgtgctcaggccctggcattgtgggcaacgtgctggtggacccaagtgcccgcatcggccagaactgcagcattggccccaatgtgagcctgggacctggcgtggtggtcgaagatggtgtgtgtatccggcggtgcacggtgctgcgggatgcccggatccgttcccattcctggcttgagtcctgcattgtgggctggcgctgccgcgtgggtcagtgggtaagcctgtgggctgggctgggtggggagaggggcggggagtgtgcctgcctccctgacaaggcctatcctctcctggaggtacgcatggagaacgtgacagtgctgggtgaggacgtcatagttaatgatgagctctacctcaacggagccagcgtgctgccccacaagtctattggcgagtcagtgccagagcctcgtatcatcatgtgaggggatgcagtggggctggccgagccccggttttcccatcagcaaggggagtgctggcctgacacatcagaagaccctggacttgtcattatttgtctggggggcactgggtgaagctgaagctgttggacacctgccttctcatgtggacatcatctggcaggatccctgctgggcacaccccacaaaccccactccctcaagaagggccagggccagggctgtatggaataataatttaatgctcactgtggccctgactgaaagtcaagctcaggcacaattagggccatggctgggctcccaccaatgaggatacaggcaggcaaggaggttggatgtggtggtgtgggatacaggagaagggcaaagggagctcataaatagggcccagcctggctctgggttcaaaggtggaggttccaggatggcacaggctgtgagggctaggcagctgaggaggtagtactcgtattggctcccttctcccagtcctctacagacacgatggtggttttgcagaagaagcagtccttgttgttcatcaggtgctggttgatacaggctctacaacaggggaggggatgaggactgccctgcatgtacctactgctctccccaccaccaagctgtggggcccacttacttgcaggacttgtggccacagggctggaacacagcagagatggggtgggcatagcagatggggcagaggtcctcctcactggtgggctgcagggaggagagtgaagggtgggctggagttggatgcctggctatgtggatgtccgttgtgcctgtgt

SEQ ID NO: 464119 - DNA, 1424 bp, Homo sapiens
agcgctgcaaacaagggaggagtggaggaaactctcaagggcctctgaggctctggctgctctgtggaagacccgaaaacgagtggggaagaggcaagctgatggcaaaagaggaagttagagagatgctcttgagaagaactctgtggggcattgctgatttgcagatggaggggcagcctctagaagcagagagtggcccctggctgactgctggcaaggctgggtggaagaatgaatgcttgcctcctaaaggcggggatgaaaggggcggagatcaatgtgctccacagcatctaacacgatgtaaaagaagatgcaccagtgtgatggggctctatgtcactaaaggggttcagccttctgaagaatttgagaatccatcattgcactggaaaatggaacaaaaagtcgacttcaaaggaccttgcccacaaaagacaccagaatggcatgaaaatgcacctcacagacagagcacccagctgctgtgctttgaagtcagccacacctcccattcattgctgttaccaatggactgactgaatgctgtggcgatactgaggccgtcttagtcccggaagacaggtggggctcctttgtccaccgcttaggctggagtacttccccatggctttgacaaacaatccttagactgcagagtagtgtaggattcttccattcaaccttctctccctcatcctggggtcagacttggatgcagtccgacagctgtcccagcctttcctagctccttctttatttctttttacacaggcatttcccactattaaaatcctgacatatttaatcctgtctttgtatctgtttctctgaggtcctgggctaacacaatttcccttctggaacttttatgaaaaatgagcaagtggagacattgatcttattttctaatatctgggtgatctactatttggttcttatgcattaaattagattttgaaatcttaaactcaggtccgggtctctttgagctttgctaattagtgcatggtgtggaaaagctcatgtgtcctagggaaccacttgacactttgatgctccatggcatcaaagcatgaagaatgaaataaaatggtataattattttgtattttaactataagatctcaaaggatgttatagttaaaattcaaagtaattatactatttacatgatataactatataccatataaggtataaaggctctctgtgatcctttaattctccaggatctcagagaaacagatgcaaagacaggattaataaatataaataaatttatataataaaaatattaaagatagggtcaaaagcctccaatttttaactgatagagttgaccaaagtatattaaaataatatacttaattacttaatttagtcagcatgttattgtttgcactagtcacaagggcttt

SEQ ID NO: 464120 - DNA, 751 bp, Homo sapiens
agcagtccacgccttgtggcggctttgcggagctgctgctttggcgggagttggaagctggtgtgaggctctcatggccaccatgttggaaggcagatgccaaactcagccaaggagcagccccagtggccgagaggctagcctgtggtcgtcaggctttgggatgaagctggaggctgtcactccattcctggggaagtatcgcccctttgtgggtcgctgttgccagacctgcacccccaagagctgggagtccctcttccacagaagcataacggacctaggcttctgcaatgtgatcctggtgaaggaggagaacacaaggtttcggggctggctggttcggaggctctgctatttcctgtggtccctggagcagcacatccccccctgccaggatgtcccacagaagatcatggaaagcaccggggtgcagaacctcctctcagggagggtcccaggaggcactggggaaggccaggtgcctgaccttgtgaagaaggaggtacagcgcatcctgggtcacatccaggccccaccccgtcccttcctggtcaggctgttcagctgggcgctgctgaggttcctgaactgcctgttcctgaatgtgcagctccacaagggtcagatgaagatggtccagaaggccgcccaggcagtaaggcccgccctccattgggttggggatggtgggagcagaagagcagaggctgggccaagcccttaagtcaggagcagtccccatctggtc

SEQ ID NO: 464121 - DNA, 1611 bp, Homo sapiens
agcagtccacgccttgtggcggctttgcggagctgctgctttggcgggagttggaagctggtgtgaggtgagaggcgcggtggtcgctccccggcgaggccaggtttctgtggggagaaggagagtgccagaggtgactggttcatggttcttctaggctctcatggccaccatgttggaaggcagatgccaaactcagccaaggagcagccccagtggccgagaggctagcctgtggtcgtcaggctttgggatgaagctggaggctgtcactccattcctggggaagtatcgcccctttgtgggtcgctgttgccagacctgcacccccaagagctgggagtccctcttccacagaagcataacggacctaggcttctgcaatgtgatcctggtgaaggaggagaacacaaggtttcggggctggctggttcggaggctctgctatttcctgtggtccctggagcagcacatccccccctgccaggatgtcccacagaagatcatggaaagcaccggggtgcagaacctcctctcagggagggtcccaggaggcactggggaaggccaggtgcctgaccttgtgaagaaggaggtacagcgcatcctgggtcacatccaggccccaccccgtcccttcctggtcaggctgttcagctgggcgctgctgaggttcctgaactgcctgttcctgaatgtgcagctccacaagggtcagatgaagatggtccagaaggccgcccaggcaggcttgccgcttgtcctcctctctactcacaaaaccctcctggatgggatcctgctgccctttatgctgctctcccagggcctgggtgtgcttcgtgtggcctgggactcccgcgcctgctcccctgccctcaggctctgccctatgtcccacagagctctgctgaggaagcttggggggcttttcctgcccccagaggccagcctctccctggacagctctgaggggctccttgccagggctgtggtccaggcggtcatagagcagctgctggttagtgggcagcccctgctcatcttcctggaggaacctcctggggctctggggccacggctgtcagccctgggccaggcttgggtggggtttgtggtgcaggcagtccaggtgggcatcgtcccagatgctctgctggtaccagtggccgtcacctatgacctggcctcggcccccctggggctgtggacaggagctctggctgtcctacgtagcttgtggagccgctggggctgcagccaccggatctgctcccgggtgcacctagctcagcccttttccctgcagctttgcctacttccagtgggctgtgtgcaagtttcctggtgggcccgagcaggccacctaagagccttctcttgggcaggaatacatcgtcagtgccagaagctgctggggcggcagacagaccctggagcagctactgcagcccatcgtgctgggccaatggtaggggcacaggagcgtggggtctcagggggcaaggcaagcagcccttcagcaccagcttatgtatcccccatatacacacactagcagccctccctcaccaagtatcctggggtcatctagaatagttccaggtactc

SEQ ID NO: 464122 - DNA, 1014 bp, Homo sapiens
cctccatttcctattctgcaaagttagaatcttagtagctcctcgaatatgggggattgtaagggtagagtggctgatgtagatattttattttttattcattttattttttttatttttattttttggagacagactctcgctctatcacaccactgcactgtaccctgggcgtcagagcaagactccatctcaaaaaaaaaagaaaaaaacatcctgcatcccttgttcctttgtgttcccctagacaagcctctgggctggctttgcctatctcatgcatgcaggcagtcatcctcctttggccagtgcatacctgactcctactcagtgccaggcctggagaagactgtgagacctgcccttgaggagttctgtttgcaggaagagagtgataggcacacaaattatttccaataaactacagaaaatgtcaccagaatctctattgtgatcatgtcccccacccatatctcacagtaccctatcaggctaccccctttaggcggtgccctcaggagctctctggctggaggaaggagagacagagaggccctgcaagcgctgagctctatctataccgtgtgcaggtcccgcgctggctccgcggggcacggggcctggaggcaggcaaacgctaaggcgagggaggagaagggcactggcgaatcacaggctccccagttgcagctacactcgccccgatgccctcagggactgtgcggcagtggtggagagaagacaagtctagttacaccaccagctagcggccgcgctcggactggctccccgcggttgggctactcgcgggcttcgccccgcccgcccgccggccccacggccttagccctgcccacagccccgctcggccccgcgctgccggagattttcgtccgctcccgagcggcctcagctcgacccacggccggcctccggaggctagcgctttccgggagctggcggcgttattagccccgcccacagcccgactcttcagccccgcccaccgctggc

SEQ ID NO: 464123 - DNA, 1950 bp, Homo sapiens
cggggataggggctcagaaaagttcctgagccaatgatgtggacctaaggtctgaaggatgaataaaagtttactgggtgaagaggggagggaagagtgttcctggcagagggaccagcatgtgtccaggatctcttggcatacatttacctcagccgcactcttcagtgctctgcatccaggctacgcggaggctgcatgttacaggagccgtgcatccctgaagacttggaataagtcaagatttacataatcccagagacatccttccaaagcgtgatagtaactctgttccatggctggagtggctcctccaggtgccagcagcataaacccacctttcaatcagtctgcagctcagaaatactacctgattctagacaggcttttcaacgtaataggttgaattattatgtcttgtacataaattaagactttacatttttatactgctatttataatgtatataatgcaaatccatgtaaactatgggaaaataatatttctgcattccccgtgtctagggatgtttccttcagacatctgttttggcttcattagaagggacagagatgctgttttctatatttttgcattgccagagctcagcacagtgacatatggtagaaatgcaataaaaaaagagatatctgaggctgtgttccatggtgagcaggtctatgcaaacctacccccaaaggccaaggaagatgaaagaccaaagaaagaagctgacaaatccaatttcttagaaaaaaaatatttaacagagatttatgaacagaagcatgttttgggcagccataagacaagatggtggatccccgcactgaagggcgtgaccttaaaggggcttgtgcctttctttgccccttccgccttccggatggatgaaagcagaagcagtggctggagctagagcagctatttaggactatgagatggaagaaatgtggtgacaatagcagaacaaaaatatagaaatcttgggtacttgatgaccacggagccgccatacaaactctggactataatttccagagactgtttatagaatgaagatactgtcattacctctgcaaagaatgcatcctagcacagatcaaagatcttccaagtccagccacaccattttacagttctgaacctcgacttaggaaagcagtggatctttatacatttgacacatcccttccctctaggatctctgtggctattgaaaatggactggagaagatgagtgggagtgagaagaggataacagaatcagataaaaacctgtcatgttactaagagcaggagatgaggcagcctggaccaagatggtggcagagagaagaaaattgcttgagagaattgattaaactacttggttagcacagatagagctgaatcaaaaattaggatggtaagctaagtaattttacacacaaaaaggcagagttgcattcataattagtctctccttcagactgaatattacagacaaaatatagccattggtgttgcaatcacttcctttgggtttgtatccaaggttaagaatgtcagcatccaaagacccaaattcttaatgtttttagttgataaagtttattcaaggtagacagcctgtgttgaataacttagtcttccacaaatttcaagaaaaatccattgtccctcttctccgccacagacacactttagttgaacattaagcatatttattaaagaaacattctccttgtgctttttctcccaagatggatggtgttcttacttagagttataagtgtcagaataaaaatgcccatgaggttgaattgtatgatgttatagtaaagtgagataaacattctcagaaacatgattgtgacttaaaaaaaaaaaaaaccaacaaaccactttctgtagaggaattatgctttggggacagaaactttcctttataatttttacagctgcac

SEQ ID NO: 464124 - DNA, 1007 bp, Homo sapiens
tccaccacacgtggggtgtggttctatgtgtgagagttttgctgcctcttccttcagcagcgtccagaagccgtcgtctctgctgcggcctgagacacagtctcacagctgctcgggcctcgagggcctaaggagacaaagtgagcagagggaaatgccacattcaacttatgcttcagtgtcggattccattggaaagggggcggtgactggaagtgaggacaccaacccatcaggcgtgctctctaacagtctaataagtcatgccttgcacaactggcttctgcttcgggatgagccattggctgatgaggcatgggaggctcagcaggtctgttcccttggcatgtgggacatcttgcagtggatgcagggagggaccatgcctctagcattctctgggaagaataaaggagaagtttatcttcccacctacctcccattgcctgtttttcattggtcaaaacttgtcccactaggaattaactccttcacatttccaagtttatatcatatgactgctccaactacatgggaccccaaaccccaaacctgatgtatgtatagtgttcctgtttcatccaagcctggaaatgaggggaagagccagaacctctaggcttggtgctctggaaaaagaattagaattgcattcaaatagtcaggcttcaagttgcttctgcctctgtgtgaagcaaatagtaacaactcacttcgaaactcaggctcctggactgtaaatgaggataatgatactcaccctaccaacctcagggactgttctaagagcaaaatgaaatgagactgagctctgaaaatgcttaaatgcttttcaaagtagagtgatcgtgctttctgtagcatcaaaacagtcctctataaatgggcaaagtcaaggcatggactggatctgacaacagagaatggcttgagggctggaaaaagaaaaaaatgcaaatgccccaaatctctgcttcccttacagtgtggaaatcgccccataacac

SEQ ID NO: 464125 - DNA, 739 bp, Homo sapiens
gtgccaccaccagtctccaccactattctgaggcagaatgcacctattggctcacaatgctgtgaaagaaaacaagaaagtcgtgatgataacaatgcagtgtcttcattcataatggattgcagttccccactcaggaagaggacattttttttaaaactacatgatacaactgagagcttggaagctatccatgcataagttttaaaacccagcagcttcatggtttcctccttctgttggcctggccagtggacacagtggtcacgttcctggcatggagatgtcattcatggtctctcagacccaagtgttaccagtgaagggtgtccaggttcttggcgctttgaacaaagaattggacaaaactcacaaacaaagcaagaaaagaaagaagcaacaaaagcagagatgtattgaaaatgaaaacacactccacagggtgggagcaggccgagcaagcagctcaagggcccagttacagaactttctggggtttaaataccctttagaagtttccattggttacttggttctcaagaacacctgcagactaacacctggtgttctctgtaacaggtgtatgctagagatagcaatggtaaaagaattatatgatgttagcctacattataatttgcagactgtctcttctgccaagtgggtcagttgcgatggagaccacaattttagcagatgtgtattaatgattaagggaagcataacaatttaagagtat

SEQ ID NO: 464126 - DNA, 1207 bp, Homo sapiens
atttcctgaaaacctacttcacttgctaaaggcacatgcactggtggcaggggctggctgcaggcaaatacatgatggtgagggctgctgccagtggcaagggttggtccaagtgcagtgcatgcgtggctgtgcgggccagatgcatgtgcatgcgaagctttggaggctggggctggcatcatgcacacatgcagctgcaggggttggcggtgggcacacatgcagaagtgggggcagctctggcagggaaaaacatcttcctaaatctatattggagaggcagagagactgaagaaatgggcagagaagttacagggatgagaagaaaatggctggaccagaaagggccaatccagccagcaatgaggactgtctcagaggaggaccactgtgagaggcattgtcaagcgtccaagggcttctggagagtgaggtcagtgtcctcgcacccagggactctgctagttgcctttcccattggagcccagtgaggacttcccttggccatgctacgactttgcctggactgccaaaatcacatagttatgagggtcatgattgtacacccaactagcatagtgcctgatacataatataaatgtttagtaaatagtcattctaaaatctgttcttctttgaatgtctttgctctttttaccaccgagtgtttcctccccaatagatgtgtttaatagcaaaaacaatgatttgagatgttttggtgaatgcacaatgactttcatgtttgactgatatacattatagacattcgtctaattatatttatatacatttttttgtagacacacaagtggagaagataaatagtaatttggaaccaaaactcaggacgtcccaggagaggctagattaggaattctttgatttgggatcacgaaaatgaagtatccatattttaacagaatgattagtggcagaggaatcatctaagaaaactgagaagactctgccagagtgatgggaagaaaactagatgagaaagcaccattctggaagacatgctcccatgaaccatggagagaagaggagagggaagaagttatttgtgatgtcatttgcctgtgtcatggcctgccttcccaggagaggctagattaggaattctttgatttgggatcacgaaaatgaagtatccatattttaacagaatgattagtggcagaggaatcatctaagaaaactg

SEQ ID NO: 464127 - DNA, 1406 bp, Homo sapiens
atttcctgaaaacctacttcacttgctaaaggcacatgcactggtggcaggggctggctgcaggcaaatacatgatggtgagggctgctgccagtggcaagggttggtccaagtgcagtgcatgcgtggctgtgcgggccagatgcatgtgcatgcgaagctttggaggctggggctggcatcatgcacacatgcagctgcaggggttggcggtgggcacacatgcagaagtgggggcagctctggcagggaaaaacatcttcctaaatctatattggagaggcagagagactgaagaaatgggcagagaagttacagggatgagaagaaaatggctggaccagaaagggccaatccagccagcaatgaggactgtctcagaggaggaccactgtgagaggcattgtcaagcgtccaagggcttctggagagtgaggtcagtgtcctcgcacccagggactctgctagttgcctttcccattggagcccagtgaggacttcccttggccatgctacgactttgcctggactgccaaaatcacatagttatgagggtcatgattgtacacccaactagcatagtgcctgatacataatataaatgtttagtaaatagtcattctaaaatctgttcttctttgaatgtctttgctctttttaccaccgagtgtttcctccccaatagatgtgtttaatagcaaaaacaatgatttgagatgttttggtgaatgcacaatgactttcatgtttgactgatatacattatagacattcgtctaattatatttatatacatttttttgtagacacacaagtggagaagataaatagtaatttggaaccaaaactcaggacgtcccaggagaggctagattaggaattctttgatttgggatcacgaaaatgaagtatccatattttaacagaatgattagtggcagaggaatcatctaagaaaactgagaagactctgccagagtgatgggaagaaaactagatgagaaagcaccattctggaagacatgctcccatgaaccatggagagaagaggagagggaagaagttatttgtgatgtcatttgcctgtgtcatggcctgccttccctagatattgtcctaatgtgagcatcacacctaaggtactgaagtagagttctggctgttccttacggacatctctggtgctagctaccaaaacccccctttcaaagtattgactgcaaataattaagtgtagtacatttgccaggaatatttgtggtttaatatatgaccacaaaggaaggtagcgttcattcactgagttaagtggtgaaggaaacattgtttttcagttattctgcatgatattcagaaattacaatgacaaccacctgttatatctaaaaatgaagctcttcttggct

SEQ ID NO: 464128 - DNA, 2126 bp, Homo sapiens
tttctctctcgctctctcctctgcttaattgctctggctaaaattttcattgctatgtttaaataaatgatcagtagatgatggttatgggcaattggctgatccatgaattgcacagaggtctggattccctgctcagccccattgggaaggccaagatgagtggcactagactgggcaggcctgactctaggaagtatgttgcagctcatgctgctgatcttggtgaaaagatgctccaactgcctggcgatctgcatgagtatggggcagagagggccctgctacatcatggtctatgtgcaggaagcgtgaagtggctcaggctgctgatccaggactggcctgtacgttggaagacgttcgatggaagtcctggcctctacccactagatgccagcagtgtctttcctcaggttatgacaatcaaaaaagtcttgagcaatttgaagaaaaaggcaaatgctccaggatggatgtgttcaaaagacctggaaagaaattcttggagggttgccctttcttcctatgacacatcacaacttctggtagaaaatcaagaaaggaaactgggcaaccatgatgattagtcataaggaaggagacaacaggcattatgaagccaacagctgcagaacaatgggaaccatgagaggctatttttgtttggtttcaacaattaattgaacctgacagtgtactctgccttctctcaatcttctcttactaaaagtggaaagtttccatgctaaaaaaaaatagttatctttttcctgcttaagaatgattaaaatgccattctgctctttcatcttcatgtgtttatctcaaaatgtacttattacaaatataaaaatattcaaacctataaaatgacaagtatctgttattgtgtttccactgctagtgctttgctgctatttaaaaggctgccatttggaatcctaaatttgagattgtaatatgttagggacctcccttggcagtaaatatggaaaagaatagccaaaggcctttagtagcagatggcttatgtggcggtctttatattttttgtgttgttttgttttgttttaattccagttggtgtcatcacaaaaataaaaattcacctaggaatgatttggttacctcctaatttttttctagtattttccaaactgctccaaagtgaaagcagatggaaattttacactatcaaatcagaaaataaaattgtgaaacttttgaaaaagctgttgccaacttattgggtcttggagaagctggttatgggtttggcagtatcttcccaaacaacagtggttctttggagcttgtggttctgaacagtgagtggttcttctgacttaaggggatttagtacattttcttaagcatagacactcctttgagctgaaagtttcaaatatccaagacagccttcaaataaatggatgcaggtaccctagaaaggtaacagatgattttcatagacatctactactcattaatgccatgagaaatatgggcaaattcaggtgcattctcttaaagggactgtcgcagaattacagaaaggtagcgataaatggaaaggttttacatccttgggcaggagtcatgaaatgccagtgggagaaagacatgaacaagcaagagtgagtgtgaatacagaatagttacatgggatgaggaagatgtttgggaaaaataatagtgaacaggaggtggagatatgcaggaaaaagcccccataaactgtttctatgtcttgtgccttcatcagtgcttctctacctcttagcttctctaacatctctgagatttaaataaattttctggtcccttctcccaacccaccagtatgtatgtgtcactcacaggagttaatcatttggttcatctatttaattcacttagtatagagaattatattgcctgatgcacttgaatgtttcaccaatcttttcattacattaaagtgcatagcctatttacaaaattttcatgaggcttttaacttggcagagctcattcaaaatgtccaaattacttatttgcatcctgctctgaataaactgactagattcaattacctgatacctcactctgaatcactgtaatccaggtctctagttaatata

SEQ ID NO: 464129 - DNA, 3315 bp, Homo sapiens
cacccacaggtgtggaggggcaacccacccctacattgctcaactgagcctccaaccctgatgctttctacaacctgggaagctgaggcccggagacggaagtgaccaagcgcgactagatctaaagccttcccgacttccatttttctcagtaggcaagtggtccaagccccaccgtttccttcttggatttgagtctcaactccagccactcccctcaagtctggtctcccactctcacgcccctccagccactggcctcaaaaccaccgagcacatccacgcggccctcgccgactcccgcagggctgcctccaccccgctgcttcttgccggcgcatagcctcccagagcctccaatgaccgcccaagcgactgccctccctccctccctccctccttcgcctccccatctgtgcaattgaacattcattcattgccgcggactcgaggctgcccagtcctcttccggacagggccctgaggacaggacctggctatccggcttcgcggtgtgtcctcagtgcctggcccagagcggccaatttggcgagagcaggaatctctgtccctggttcctttagtccccagctttgctcccaagtgaccatccgcgaggcagcgtcccctccttggcatctgcggcttctaagacgctcaagggcccaagggggtgaatgaggtgtgggcgactaactgtagccctgtcctctgggggcagcgtgctgcgcaagtgatgcccggccagggaacggggtgctggggccgcagtcaccgcaacttctgggtggagcagcgagggcccggggggctcgggaagctgggggtgtacccgcagccggggaagcggaggcacaggacctgggcccagggctcggagcccttgctccctccaagcgaggcgggacgagcacgggctgcgggacctccgccccgtgcccccgcccccctaggccggctgggagctggccaggggctcagaggtcgcacctctggccgcgggaggacgaggcggagccggaacggaagcgcggacaatgggccctccggggccgcttccggcctctctctgcggggcgggagcacgggagagcctggggcctggcctgggcggggctcgggcgccctccctgggttgccttcgcagcaccccagcctgggcccctcccacccctgccgccactgagcgcctactgtgtgcagcccagcctctgggggtgaggaaggcaaggctggaggtgagaacctggctgggagagctgactcgggcctcctgctcctccggcctttcctccttcctccttcctcccggtgggggagcctgacccccttggacaaacatcttgcggctgtttccgcctcgccagcccggagccccagcccagcctgaacaaacactcgggactcgtgcttccggccttggctctgggaaaagcccaaccaggagctgctgaggtcaaccctggagggaagtggaagggggaggcacccagtccctacgtagggtccccatagtgctgtcggcagagccagcagatgagggctggcagggaactaactgaagttattagggaagagcgcccacacacagcatggtcagcaccgctgtcccaccccagcagcagcagcgaccgcccagcacctgctgagctaggaggtggaggagcatccgcctgcagtgtctggccctcaggtcccagcggtggacgggacagaggaggaccctgccctgtgccatctgcagacgttaatcaaacgacacagctgccgtgcagagcacatgaggacggctgagccaccggggcaggcggggtgcagccctcagccggaggacccttgagctgagccggatgcatggggtgtttatgggctggggggaagtacaggtggtcgcaggcgagggggacggtaatgacgaaggcctggtgggaggcagtaggagcgcagggctccgcccttgctgtgccctgcctggaaggctctcttcaccctcctgactctgctgcatcctgcagatctcagccccaggggcccgaggaagatgggctggagtccccttgggagaaacttttccagaaccacctggcagcacgaggctgggatctgaacccagatccagggccacaggatgatgactccacagcctcgactggggtgccacctgcccctcactgggctccacccctggagaacagggaacagccagacctcagtgaaaatcccagctccaacttgggcggctcggtggccccaggcaagttgcttcctgtggggcctcagtcccctcctctgtaggtgggcctcacagtccctcccttgtgaagacggccttcatcctggattctcagtgacgttgtacacggccataagcccgccccatgtgctcctgctggcctggctgtctgatctgcccctgtgtattccctcagccctcctgccacggggtgtggtcactgttgtgtccctaaggcaaacagtaggttctcactcaacatccactggattagtcatggtcagacagacaccggttcaaatccaggaccagggcctcatctcctgagcctcaatttatgcacctatcaaatggggtcagcagcacagctgtttgatggcttttataaggactggctggcaaatgtttaacacacagaaggtgctcaacccacacaacgcccagtcctcatcagccctcggctttccctgctccttgtagctcctgtcattggggatgtggtcattaagcacctactgtctgtgcagggagcgcctgcctcccagcccactcaggcggttgtcgcctggagatggcagccagggaatgtgggtgggggcccccgcggcggccctgcccctctgaggcttctgctggacagaggcctcagtgtggagctgcccgggtcctttcacgggcccagacccatgactggacgtctgagaatgccgcccattatccaactcacagagcacaaaggggccatgcgggggctcggcaggccaggcgcccccagtgagcacacggggctccgggtccccaccccggcccatgagtcccctgagcacagagggcaaggacctgcccagagtcgggagagggcgtcgttcacatgcaggaatgagaaccatttcctccagccccacggggacacagagatgagaggaaccaccctgggggctgggtttgagggccagggcaggccatcgctcttgggcccggaaaccagacctggaaggtcgcctcctcctccagaagaggcagagagggaacacttcaggggccaggaggggcccctagaatgtgaagggtggcaaagcctc

SEQ ID NO: 464130 - DNA, 936 bp, Homo sapiens
tgtagattagctgtgaatatcttgactcctttaaggtaataaggcttttgtttgtttttatctttcacactagaaaattatggcatgccgtttagcagaactgaagatgggaagatttatcagcgtgcatttggtggacagagcctcaagtttggaaagggcaggcaggcccatcggtgctgctgtgtggctgatcggaccggccactcaatattgcacacctcatatgggaggtctctgagatatgataccagctgttttgtggagtattttgccttggatctcctgatagagaacagggagtgccgtggtgtcattgcactgtgcatagaggacgggtccatccatcacataagagcaaagaacactgttgttgccacagggtaggaatctaatttctactttatttcctttgtaaaaatgaataaatttcttttagagtgtctttattttaaggaaaatagaggcattgtagaatagcagttcagacacaggccttgatataaccatgtgagggtgatggcctttcccagccgtggttcctcacctgtaaagagtgaggacagcagcacctgcctcggggtgagaaagcatggccctcagtagtcggtagtggctgccgtcagcttcacagcttacctctcccgattttagatgaggcacctgcggcccaaagagtcacatggggttttctggcaaaatctctcttgttttagtgggttctgtgtttatactgattcctgggatagataagtctgtcttctccgcataatgaaaatgaaaaactttaattttatacagtggcagttactttagtcactttaaaagttaagaagtgtcagtacagccaagaaaaaaaatcagcaaaactacaggttgggaaaaaatattttccaaaccatatatctaatgatatcttagtatctaaaatagaaa

SEQ ID NO: 464131 - DNA, 1061 bp, Homo sapiens
  misc_feature (905)..(905): n is a, c, g, or t
  misc_feature (914)..(914): n is a, c, g, or t
  misc_feature (924)..(924): n is a, c, g, or t
  misc_feature (928)..(928): n is a, c, g, or t
tgcgcagggactggcgggactgcgcggaggcgactgcagacgtatcgggggtccggagcctgtcgcggctgctaagcgctcggcgcctggcgctggcgctggccaaggctgtgagtccctgccgcggaccggggcagggcaggcgggggacgaggcggcggtaggagcgggacggtccccagcgggtccgagcggagcgggcgccgggtccccgcgccccctgcccggggatcgggaaggggctgggagagccctgggccggtgcgagggggagccgcggagtgtactcgggggcctggggagctcggtccttagcagtggccaacagtgttgcaaacaggaacccgaggtgttcacttcactgttgaaggaacgagagggcatctgctaaagtttcagattccatttctgctcagtatccagtagtggatcatgaatttgatgcagtggtggtaggcgctggaggggcaggctttgcgagctgcatttggcctttccgaggcagagtttgatacagcatgtgttaccaagctgtttcctaccaggtcacacactgttgcagcgcagctagaaaattatggcatgccgtttagcagaactgaagatgggaagatttatcagcgtgcatttggtggacagagcctcaagtttggaaagggcaggcaggcccatcggtgctgctgtgtggctgatcggaccggccactcaatattgcacacctcatatgggaggtctctgagatatgataccagctgttttgtggagtattttgccttggatctcctgatagagaacagggagtgccgtggtgtcattgcactgtgcatagaggacgggtccatccatcacataagagcaaagaacactgttgttgccacaggagtcagaaacttctttgggcttgncggtttcangtttttctcnttancaattggagctttggtccctccgcggttcctggaattgaacttttgctgggttccccggtaaggtctatccagccttgctggtacacccgtgaccgacggccgacttttagtccattcaaggggggaatgcca

SEQ ID NO: 464132 - DNA, 3474 bp, Homo sapiens
tgcgcagggactggcgggactgcgcggaggcgactgcagacgtatcgggggtccggagcctgtcgcggctgctaagcgctcggcgcctggcgctggcgctggccaaggcttggccaacagtgttgcaaacaggaacccgaggtgttcacttcactgttgaaggaacgagagggcatctgctaaagtttcagattccatttctgctcagtatccagtagtggatcatgaatttgatgcagtggtggtaggcgctggaggggcaggctttgcgagctgcatttggcctttccgaggcagagtttgatacagcatgtgttaccaagctgtttcctaccaggtcacacactgttgcagcgcaggttggaatcaatgctgctctggggaacatggaggaggacaactggaggtggcatttctatgacaccgtgaagggctccgactggctgggggaccaggatgccatccactacgtgacggagcaggcccccactgccatggtcgagctagaaaattatggcatgccgtttagcagaactgaagatgggaagatttatcagcgtgcatttggtggacagagcctcaagtttggaaagggcaggcaggcccatcggtgctgctgtgtggctgatcggaccggccactcaatattgcacacctcatatgggaggtctctgagatatgataccagctgttttgtggagtattttgccttggatctcctgatagagaacagggagtgccgtggtgtcattgcactgtgcatagaggacgggtccatccatcacataagagcaaagaacactgttgttgccacaggagtcaagaaacttttcttttgagctattgacagcttttaacaagttattatactcctatgaacaaaatttggagcatatttgtttctctctgcctgatttctcctgaatttggaaactatttgacatgaggattctcaacctgataaaaatgagctttcctaataactcaagacccatctgcctaggaataaaccatcccagctgtgagagaccagacgaaacctgagaccagagactcgttttcttctaaaatgctttctccaaaagatttttaaacagaaaaagggggaaatgtgaaaggaaaagaaaacttgaggcccccaaaatcactaagctaaaaggaaaagtcaagctgggaatggcttagggcaaacctgcctcccattctatgcaaagtcatccctccgtgcactgagataaatgcttatctaattgcctcctttggagaggctcatcagaaactcaaaataatgcaaccatttgactctcacctacctgtgacctggaagatccctctctgcttgagttgtcctgcttttctggatggaaccaatgttcatcttacatatattgattgatgtctcatgtctccctaaaatgtataaaaccaagctgtgccctgaccaccttgggcacatgtcgtcaggacctcctgaggctgtgccacaggcatgcagcctcaaccttggcaaaataaactttctaaattgactgagaccagtctcagatattcagggttcacagtatccaaaaatccaatcacatctgaaaccgcctttgcaaaaattatcacagtgagaaaataatggcagtgaaagaaagctgatctagccaacctccctcttgcctttagctttcaagctgcttttacttattcctgggtttaagccaagctacatgtgggagtcatttagttgatagtttaaattataataacccttccccgaaactcaaccacccttgtaatactgagagaccaccaggctaggaggaggagaggagcctaaattctgctaaggtgtagacaaaaacaattgtgaggcgttattccagaagccacaagatatgcaacttcctcagttacccctgcagataatgttacttttgtagaacctaggattggccttctgagatatcttctcaggattttgcatgtctgatgaccgatggctccaccgggaccagccaacggcttctgtgtccccacccagaagcgactcagagaaagaggacagcttcgacaccctatgatttcatctctgacccaaccaatcagcactccccataccctagcctgctacctaccaaattacctttgaaaaatccctaacctccaagccttagatgagtttgatttgagtaataactctgcctcccacatggtgtggctggcatcatgtcaattaacctctttctttactgcagtgccatggtctccatgaactgatttttttgtgcagtgggcaggaagaacccatcgggcagctacacatcttgaaagagaagctcttcctgtgaggtacatcaactgtggttaagaatcttacatacttatcattttttgttgttgtgagaacatttaaaatctacccttttctttcttttttttttttttttttttgggatggcgtctcactctgttgcccaggctggagtgcaatggcatgatcttggctcaccacaacctgctgggttcaagtgattctgttgcctcagcctcctgagtagctgggattacaggcatgcaccactcttttagcaattttatttatttattttgttattttgaaaaagtatttttaacttttactttagattaatggggtatatgtgcaggcttgctatatgggtatattgtgtgatgctgaggtttggggtatgaatgatcctgtcagccagatcgtgagcatcgtacacaagcaattttaaaatatacaaatggtgtggtatggtggtacatgcctgtagtcccagctactcaggaggatggggccagaggatcgcttgagcctaggtgtttgacaccagcctggacaacattgtgagactctgtctcaaaaataataaataacaaaacaaaataaaatatacaatgcattattatttaatacagtcattattctatgcaataaatcactaaagcttatttttcctgtctaactgaaactttgtactctttgatgaacttctccgctttccccatccaccccacttccctggattttattaaattaaattgtattatattgaatttaccagaattaatcactacattagaagaaactccagtgggtattcctaaaatcatggagaagtagatagatttaaaagcaaaagaaatgctgcaatttcttcagagttcataagagaacttctattggagaaatggaaaatttgagctggctaagccttgagacctcccaagactaagttataggagtttagccttctaaactacctcagggtacagcctggtcttaatttttaattttaaatttatttttatttttaatttatttttatttttatttttgagacagagtctcattctgtcgcccttgggcctcaattttaaggggggcccatattgagggtttcatgggaatcctctggccttcccaggttaaagcttttttttttggccttaattttcacg

SEQ ID NO: 464133 - DNA, 3143 bp, Homo sapiens
tgcgcagggactggcgggactgcgcggaggcgactgcagacgtatcgggggtccggagcctgtcgcggctgctaagcgctcggcgcctggcgctggcgctggccaaggcttggccaacagtgttgcaaacaggaacccgaggtgttcacttcactgttgaaggaacgagagggcatctgctaaagtttcagattccatttctgctcagtatccagtagtggatcatgaatttgatgcagtggtggtaggcgctggaggggcaggctttgcgagctgcatttggcctttccgaggcagagtttgatacagcatgtgttaccaagctgtttcctaccaggtcacacactgttgcagcgcaggttggaatcaatgctgctctggggaacatggaggaggacaactggaggtggcatttctatgacaccgtgaagggctccgactggctgggggaccaggatgccatccactacgtgacggagcaggcccccactgccatggtcgagctagaaaattatggcatgccgtttagcagaactgaagatgggaagatttatcagcgtgcatttggtggacagagcctcaagtttggaaagggcaggcaggcccatcggtgctgctgtgtggctgatcggaccggccactcaatattgcacacctcatatgggaggtctctgagatatgataccagctgttttgtggagtattttgccttggatctcctgatagagaacagggagtgccgtggtgtcattgcactgtgcatagaggacgggtccatccatcacataagagcaaagaacactgttgttgccacaggagtcaagaaacttttcttttgagctattgacagcttttaacaagttattatactcctatgaacaaaatttggagcatatttgtttctctctgcctgatttctcctgaatttggaaactatttgacatgaggattctcaacctgataaaaatgagctttcctaataactcaagacccatctgcctaggaataaaccatcccagctgtgagagaccagacgaaacctgagaccagagactcgttttcttctaaaatgctttctccaaaagatttttaaacagaaaaagggggaaatgtgaaaggaaaagaaaacttgaggcccccaaaatcactaagctaaaaggaaaagtcaagctgggaatggcttagggcaaacctgcctcccattctatgcaaagtcatccctccgtgcactgagataaatgcttatctaattgcctcctttggagaggctcatcagaaactcaaaataatgcaaccatttgactctcacctacctgtgacctggaagatccctctctgcttgagttgtcctgcttttctggatggaaccaatgttcatcttacatatattgattgatgtctcatgtctccctaaaatgtataaaaccaagctgtgccctgaccaccttgggcacatgtcgtcaggacctcctgaggctgtgccacaggcatgcagcctcaaccttggcaaaataaactttctaaattgactgagaccagtctcagatattcagggttcacagtatccaaaaatccaatcacatctgaaaccgcctttgcaaaaattatcacagtgagaaaataatggcagtgaaagaaagctgatctagccaacctccctcttgcctttagctttcaagctgcttttacttattcctgggtttaagccaagctacatgtgggagtcatttagttgatagtttaaattataataacccttccccgaaactcaaccacccttgtaatactgagagaccaccaggctaggaggaggagaggagcctaaattctgctaaggtgtagacaaaaacaattgtgaggcgttattccagaagccacaagatatgcaacttcctcagttacccctgcagataatgttacttttgtagaacctaggattggccttctgagatatcttctcaggattttgcatgtctgatgaccgatggctccaccgggaccagccaacggcttctgtgtccccacccagaagcgactcagagaaagaggacagcttcgacaccctatgatttcatctctgacccaaccaatcagcactccccataccctagcctgctacctaccaaattacctttgaaaaatccctaacctccaagccttagatgagtttgatttgagtaataactctgcctcccacatggtgtggctggcatcatgtcaattaacctctttctttactgcagtgccatggtctccatgaactgatttttttgtgcagtgggcaggaagaacccatcgggcagctacacatcttgaaagagaagctcttcctgtgaggtacatcaactgtggttaagaatcttacatacttatcattttttgttgttgtgagaacatttaaaatctacccttttctttcttttttttttttttttttttgggatggcgtctcacttcccagctactcaggaggatggggccagaggatcgcttgagcctaggtgtttgacaccagcctggacaacattgtgagactctgtctcaaaaataataaataacaaaacaaaataaaatatacaatgcattattatttaatacagtcattattctatgcaataaatcactaaagcttatttttcctgtctaactgaaactttgtactctttgatgaacttctccgctttccccatccaccccacttccctggattttattaaattaaattgtattatattgaatttaccagaattaatcactacattagaagaaactccagtgggtattcctaaaatcatggagaagtagatagatttaaaagcaaaagaaatgctgcaatttcttcagagttcataagagaacttctattggagaaatggaaaatttgagctggctaagccttgagacctcccaagactaagttataggagtttagccttctaaactacctcagggtacagcctggtcttaatttttaattttaaatttatttttatttttaatttatttttatttttatttttgagacagagtctcattctgtcgcccttgggcctcaattttaaggggggcccatattgagggtttcatgggaatcctctggccttcccaggttaaagcttttttttttggccttaattttcacg

SEQ ID NO: 464134 - DNA, 2820 bp, Homo sapiens
tgcgcagggactggcgggactgcgcggaggcgactgcagacgtatcgggggtccggagcctgtcgcggctgctaagcgctcggcgcctggcgctggcgctggccaaggcttggccaacagtgttgcaaacaggaacccgaggtgttcacttcactgttgaaggaacgagagggcatctgctaaagtttcagattccatttctgctcagtatccagtagtggatcatgaatttgatgcagtggtggtaggcgctggaggggcaggctttgcgagctgcatttggcctttccgaggcagagtttgatacagcatgtgttaccaagctgtttcctaccaggtcacacactgttgcagcgcagctagaaaattatggcatgccgtttagcagaactgaagatgggaagatttatcagcgtgcatttggtggacagagcctcaagtttggaaagggcaggcaggcccatcggtgctgctgtgtggctgatcggaccggccactcaatattgcacacctcatatgggaggtctctgagatatgataccagctgttttgtggagtattttgccttggatctcctgatagagaacagggagtgccgtggtgtcattgcactgtgcatagaggacgggtccatccatcacataagagcaaagaacactgttgttgccacaggagtcaagaaacttttcttttgagctattgacagcttttaacaagttattatactcctatgaacaaaatttggagcatatttgtttctctctgcctgatttctcctgaatttggaaactatttgacatgaggattctcaacctgataaaaatgagctttcctaataactcaagacccatctgcctaggaataaaccatcccagctgtgagagaccagacgaaacctgagaccagagactcgttttcttctaaaatgctttctccaaaagatttttaaacagaaaaagggggaaatgtgaaaggaaaagaaaacttgaggcccccaaaatcactaagctaaaaggaaaagtcaagctgggaatggcttagggcaaacctgcctcccattctatgcaaagtcatccctccgtgcactgagataaatgcttatctaattgcctcctttggagaggctcatcagaaactcaaaataatgcaaccatttgactctcacctacctgtgacctggaagatccctctctgcttgagttgtcctgcttttctggatggaaccaatgttcatcttacatatattgattgatgtctcatgtctccctaaaatgtataaaaccaagctgtgccctgaccaccttgggcacatgtcgtcaggacctcctgaggctgtgccacaggcatgcagcctcaaccttggcaaaataaactttctaaattgactgagaccagtctcagatattcagggttcacagtatccaaaaatccaatcacatctgaaaccgcctttgcaaaaattatcacagtgagaaaataatggcagtgaaagaaagctgatctagccaacctccctcttgcctttagctttcaagctgcttttacttattcctgggtttaagccaagctacatgtgggagtcatttagttgatagtttaaattataataacccttccccgaaactcaaccacccttgtaatactgagagaccaccaggctaggaggaggagaggagcctaaattctgctaaggtgtagacaaaaacaattgtgaggcgttattccagaagccacaagatatgcaacttcctcagttacccctgcagataatgttacttttgtagaacctaggattggccttctgagatatcttctcaggattttgcatgtctgatgaccgatggctccaccgggaccagccaacggcttctgtgtccccacccagaagcgactcagagaaagaggacagcttcgacaccctatgatttcatctctgacccaaccaatcagcactccccataccctagcctgctacctaccaaattacctttgaaaaatccctaacctccaagccttagatgagtttgatttgagtaataactctgcctcccacatggtgtggctggcatcatgtcaattaacctctttctttactgcagtgccatggtctccatgaactgatttttttgtgcagtgggcaggaagaacccatcgggcagctacacatcttgaaagagaagctcttcctgtgaggtacatcaactgtggttaagaatcttacatacttatcattttttgttgttgtgagaacatttaaaatctacccttttctttcttttttttttttttttttttgggatggcgtctcactctgttgcccaggctggagtgcaatggcatgatcttggctcaccacaacctgctgggttcaagtgattctgttgcctcagcctcctgagtagctgggattacaggcatgcaccactcttttagcaattttatttatttattttgttattttgaaaaagtatttttaacttttactttagattaatggggtatatgtgcaggcttgctatatgggtatattgtgtgatgctgaggtttggggtatgaatgatcctgtcagccagatcgtgagcatcgtacacaagcaattttaaaatatacaaatggtgtggtatggtggtacatgcctgtagtcccagctactcaggaggatggggccagaggatcgcttgagcctaggtgtttgacaccagcctggacaacattgtgagactctgtctcaaaaataataaataacaaaacaaaataaaatatacaatgcattattatttaatacagtcattattctatgcaataaatcactaaagctta

SEQ ID NO: 464135 - DNA, 3014 bp, Homo sapiens
tgcgcagggactggcgggactgcgcggaggcgactgcagacgtatcgggggtccggagcctgtcgcggctgctaagcgctcggcgcctggcgctggcgctggccaaggctgtgagtccctgccgcggaccggggcagggcaggcgggggacgaggcggcgtggccaacagtgttgcaaacaggaacccgaggtgttcacttcactgttgaaggaacgagagggcatctgctaaagtttcagattccatttctgctcagtatccagtagtggatcatgaatttgatgcagtggtggtaggcgctggaggggcaggctttgcgagctgcatttggcctttccgaggcagagtttgatacagcatgtgttaccaagctgtttcctaccaggtcacacactgttgcagcgcaggttggaatcaatgctgctctggggaacatggaggaggacaactggaggtggcatttctatgacaccgtgaagggctccgactggctgggggaccaggatgccatccactacgtgacggagcaggcccccactgccatggtcgagctagaaaattatggcatgccgtttagcagaactgaagatgggaagatttatcagcgtgcatttggtggacagagcctcaagtttggaaagggcaggcaggcccatcggtgctgctgtgtggctgatcggaccggccactcaatattgcacacctcatatgggaggtctctgagatatgataccagctgttttgtggagtattttgccttggatctcctgatagagaacagggagtgccgtggtgtcattgcactgtgcatagaggacgggtccatccatcacataagagcaaagaacactgttgttgccacaggagtcaagaaacttttcttttgagctattgacagcttttaacaagttattatactcctatgaacaaaatttggagcatatttgtttctctctgcctgatttctcctgaatttggaaactatttgacatgaggattctcaacctgataaaaatgagctttcctaataactcaagacccatctgcctaggaataaaccatcccagctgtgagagaccagacgaaacctgagaccagagactcgttttcttctaaaatgctttctccaaaagatttttaaacagaaaaagggggaaatgtgaaaggaaaagaaaacttgaggcccccaaaatcactaagctaaaaggaaaagtcaagctgggaatggcttagggcaaacctgcctcccattctatgcaaagtcatccctccgtgcactgagataaatgcttatctaattgcctcctttggagaggctcatcagaaactcaaaataatgcaaccatttgactctcacctacctgtgacctggaagatccctctctgcttgagttgtcctgcttttctggatggaaccaatgttcatcttacatatattgattgatgtctcatgtctccctaaaatgtataaaaccaagctgtgccctgaccaccttgggcacatgtcgtcaggacctcctgaggctgtgccacaggcatgcagcctcaaccttggcaaaataaactttctaaattgactgagaccagtctcagatattcagggttcacagtatccaaaaatccaatcacatctgaaaccgcctttgcaaaaattatcacagtgagaaaataatggcagtgaaagaaagctgatctagccaacctccctcttgcctttagctttcaagctgcttttacttattcctgggtttaagccaagctacatgtgggagtcatttagttgatagtttaaattataataacccttccccgaaactcaaccacccttgtaatactgagagaccaccaggctaggaggaggagaggagcctaaattctgctaaggtgtagacaaaaacaattgtgaggcgttattccagaagccacaagatatgcaacttcctcagttacccctgcagataatgttacttttgtagaacctaggattggccttctgagatatcttctcaggattttgcatgtctgatgaccgatggctccaccgggaccagccaacggcttctgtgtccccacccagaagcgactcagagaaagaggacagcttcgacaccctatgatttcatctctgacccaaccaatcagcactccccataccctagcctgctacctaccaaattacctttgaaaaatccctaacctccaagccttagatgagtttgatttgagtaataactctgcctcccacatggtgtggctggcatcatgtcaattaacctctttctttactgcagtgccatggtctccatgaactgatttttttgtgcagtgggcaggaagaacccatcgggcagctacacatcttgaaagagaagctcttcctgtgaggtacatcaactgtggttaagaatcttacatacttatcattttttgttgttgtgagaacatttaaaatctacccttttctttcttttttttttttttttttttgggatggcgtctcactctgttgcccaggctggagtgcaatggcatgatcttggctcaccacaacctgctgggttcaagtgattctgttgcctcagcctcctgagtagctgggattacaggcatgcaccactcttttagcaattttatttatttattttgttattttgaaaaagtatttttaacttttactttagattaatggggtatatgtgcaggcttgctatatgggtatattgtgtgatgctgaggtttggggtatgaatgatcctgtcagccagatcgtgagcatcgtacacaagcaattttaaaatatacaaatggtgtggtatggtggtacatgcctgtagtcccagctactcaggaggatggggccagaggatcgcttgagcctaggtgtttgacaccagcctggacaacattgtgagactctgtctcaaaaataataaataacaaaacaaaataaaatatacaatgcattattatttaatacagtcattattctatgcaataaatcactaaagctta

SEQ ID NO: 464136 - DNA, 2991 bp, Homo sapiens
tgcgcagggactggcgggactgcgcggaggcgactgcagacgtatcgggggtccggagcctgtcgcggctgctaagcgctcggcgcctggcgctggcgctggccaaggcttggccaacagtgttgcaaacaggaacccgaggtgttcacttcactgttgaaggaacgagagggcatctgctaaagtttcagattccatttctgctcagtatccagtagtggatcatgaatttgatgcagtggtggtaggcgctggaggggcaggctttgcgagctgcatttggcctttccgaggcagagtttgatacagcatgtgttaccaagctgtttcctaccaggtcacacactgttgcagcgcaggttggaatcaatgctgctctggggaacatggaggaggacaactggaggtggcatttctatgacaccgtgaagggctccgactggctgggggaccaggatgccatccactacgtgacggagcaggcccccactgccatggtcgagctagaaaattatggcatgccgtttagcagaactgaagatgggaagatttatcagcgtgcatttggtggacagagcctcaagtttggaaagggcaggcaggcccatcggtgctgctgtgtggctgatcggaccggccactcaatattgcacacctcatatgggaggtctctgagatatgataccagctgttttgtggagtattttgccttggatctcctgatagagaacagggagtgccgtggtgtcattgcactgtgcatagaggacgggtccatccatcacataagagcaaagaacactgttgttgccacaggagtcaagaaacttttcttttgagctattgacagcttttaacaagttattatactcctatgaacaaaatttggagcatatttgtttctctctgcctgatttctcctgaatttggaaactatttgacatgaggattctcaacctgataaaaatgagctttcctaataactcaagacccatctgcctaggaataaaccatcccagctgtgagagaccagacgaaacctgagaccagagactcgttttcttctaaaatgctttctccaaaagatttttaaacagaaaaagggggaaatgtgaaaggaaaagaaaacttgaggcccccaaaatcactaagctaaaaggaaaagtcaagctgggaatggcttagggcaaacctgcctcccattctatgcaaagtcatccctccgtgcactgagataaatgcttatctaattgcctcctttggagaggctcatcagaaactcaaaataatgcaaccatttgactctcacctacctgtgacctggaagatccctctctgcttgagttgtcctgcttttctggatggaaccaatgttcatcttacatatattgattgatgtctcatgtctccctaaaatgtataaaaccaagctgtgccctgaccaccttgggcacatgtcgtcaggacctcctgaggctgtgccacaggcatgcagcctcaaccttggcaaaataaactttctaaattgactgagaccagtctcagatattcagggttcacagtatccaaaaatccaatcacatctgaaaccgcctttgcaaaaattatcacagtgagaaaataatggcagtgaaagaaagctgatctagccaacctccctcttgcctttagctttcaagctgcttttacttattcctgggtttaagccaagctacatgtgggagtcatttagttgatagtttaaattataataacccttccccgaaactcaaccacccttgtaatactgagagaccaccaggctaggaggaggagaggagcctaaattctgctaaggtgtagacaaaaacaattgtgaggcgttattccagaagccacaagatatgcaacttcctcagttacccctgcagataatgttacttttgtagaacctaggattggccttctgagatatcttctcaggattttgcatgtctgatgaccgatggctccaccgggaccagccaacggcttctgtgtccccacccagaagcgactcagagaaagaggacagcttcgacaccctatgatttcatctctgacccaaccaatcagcactccccataccctagcctgctacctaccaaattacctttgaaaaatccctaacctccaagccttagatgagtttgatttgagtaataactctgcctcccacatggtgtggctggcatcatgtcaattaacctctttctttactgcagtgccatggtctccatgaactgatttttttgtgcagtgggcaggaagaacccatcgggcagtcccagctactcaggaggatggggccagaggatcgcttgagcctaggtgtttgacaccagcctggacaacattgtgagactctgtctcaaaaataataaataacaaaacaaaataaaatatacaatgcattattatttaatacagtcattattctatgcaataaatcactaaagcttatttttcctgtctaactgaaactttgtactctttgatgaacttctccgctttccccatccaccccacttccctggattttattaaattaaattgtattatattgaatttaccagaattaatcactacattagaagaaactccagtgggtattcctaaaatcatggagaagtagatagatttaaaagcaaaagaaatgctgcaatttcttcagagttcataagagaacttctattggagaaatggaaaatttgagctggctaagccttgagacctcccaagactaagttataggagtttagccttctaaactacctcagggtacagcctggtcttaatttttaattttaaatttatttttatttttaatttatttttatttttatttttgagacagagtctcattctgtcgcccttgggcctcaattttaaggggggcccatattgagggtttcatgggaatcctctggccttcccaggttaaagcttttttttttggccttaattttcacg

SEQ ID NO: 464137 - DNA, 3379 bp, Homo sapiens
caggatacagatctcctgattcaggtgtccagtgccttttgaactgaacgcaagccctcctggacgattggaactgtaatgtggaaagggctctgatggagccagttaaaatgcttcattatttgcaaaataccacatacagtaatacgatctggatgtctttcccctcctccactaagtagcataagtgaagacttcccagaggaagtgcgcctttttcatctcgtatctgagtcatggccaacagtgttgcaaacaggaacccgaggtgttcacttcactgttgaaggaacgagagggcatctgctaaagtttcagattccatttctgctcagtatccagtagtggatcatgaatttgatgcagtggtggtaggcgctggaggggcaggctttgcgagctgcatttggcctttccgaggcagagtttgatacagcatgtgttaccaagctgtttcctaccaggtcacacactgttgcagcgcagaaaaggagatcatctaaagaggaggattcagaatttaggttggggaagaaaagggcaagggtttcatttgtccctgtgctgctgtcttctgggactctctgaggggaagcacttctgatctttaacacatgcccgtaaatgccgttgggaagatttgttaatacaattatgtggagagattcatggagtaccttttctgtgccagatacgttagcgggtggatttgggcctggaagacaaagctggggctcctgtttgtggcttgtaaggagtggttggtgtttccaggttggaatcaatgctgctctggggaacatggaggaggacaactggaggtggcatttctatgacaccgtgaagggctccgactggctgggggaccaggatgccatccactacgtgacggagcaggcccccactgccatggtcgagctagaaaattatggcatgccgtttagcagaactgaagatgggaagatttatcagcgtgcatttggtggacagagcctcaagtttggaaagggcaggcaggcccatcggtgctgctgtgtggctgatcggaccggccactcaatattgcacacctcatatgggaggtctctgagatatgataccagctgttttgtggagtattttgccttggatctcctgatagagaacagggagtgccgtggtgtcattgcactgtgcatagaggacgggtccatccatcacataagagcaaagaacactgttgttgccacaggagtcaagaaacttttcttttgagctattgacagcttttaacaagttattatactcctatgaacaaaatttggagcatatttgtttctctctgcctgatttctcctgaatttggaaactatttgacatgaggattctcaacctgataaaaatgagctttcctaataactcaagacccatctgcctaggaataaaccatcccagctgtgagagaccagacgaaacctgagaccagagactcgttttcttctaaaatgctttctccaaaagatttttaaacagaaaaagggggaaatgtgaaaggaaaagaaaacttgaggcccccaaaatcactaagctaaaaggaaaagtcaagctgggaatggcttagggcaaacctgcctcccattctatgcaaagtcatccctccgtgcactgagataaatgcttatctaattgcctcctttggagaggctcatcagaaactcaaaataatgcaaccatttgactctcacctacctgtgacctggaagatccctctctgcttgagttgtcctgcttttctggatggaaccaatgttcatcttacatatattgattgatgtctcatgtctccctaaaatgtataaaaccaagctgtgccctgaccaccttgggcacatgtcgtcaggacctcctgaggctgtgccacaggcatgcagcctcaaccttggcaaaataaactttctaaattgactgagaccagtctcagatattcagggttcacagtatccaaaaatccaatcacatctgaaaccgcctttgcaaaaattatcacagtgagaaaataatggcagtgaaagaaagctgatctagccaacctccctcttgcctttagctttcaagctgcttttacttattcctgggtttaagccaagctacatgtgggagtcatttagttgatagtttaaattataataacccttccccgaaactcaaccacccttgtaatactgagagaccaccaggctaggaggaggagaggagcctaaattctgctaaggtgtagacaaaaacaattgtgaggcgttattccagaagccacaagatatgcaacttcctcagttacccctgcagataatgttacttttgtagaacctaggattggccttctgagatatcttctcaggattttgcatgtctgatgaccgatggctccaccgggaccagccaacggcttctgtgtccccacccagaagcgactcagagaaagaggacagcttcgacaccctatgatttcatctctgacccaaccaatcagcactccccataccctagcctgctacctaccaaattacctttgaaaaatccctaacctccaagccttagatgagtttgatttgagtaataactctgcctcccacatggtgtggctggcatcatgtcaattaacctctttctttactgcagtgccatggtctccatgaactgatttttttgtgcagtgggcaggaagaacccatcgggcagctacacatcttgaaagagaagctcttcctgtgaggtacatcaactgtggttaagaatcttacatacttatcattttttgttgttgtgagaacatttaaaatctacccttttctttcttttttttttttttttttttgggatggcgtctcactctgttgcccaggctggagtgcaatggcatgatcttggctcaccacaacctgctgggttcaagtgattctgttgcctcagcctcctgagtagctgggattacaggcatgcaccactcttttagcaattttatttatttattttgttattttgaaaaagtatttttaacttttactttagattaatggggtatatgtgcaggcttgctatatgggtatattgtgtgatgctgaggtttggggtatgaatgatcctgtcagccagatcgtgagcatcgtacacaagcaattttaaaatatacaaatggtgtggtatggtggtacatgcctgtagtcccagctactcaggaggatggggccagaggatcgcttgagcctaggtgtttgacaccagcctggacaacattgtgagactctgtctcaaaaataataaataacaaaacaaaataaaatatacaatgcattattatttaatacagtcattattctatgcaataaatcactaaagctta

SEQ ID NO: 464138 - DNA, 2272 bp, Homo sapiens
taccctgcacctctcttctgatgggactcactgaacgctaagctgtgctttgtgaacccctgtgaactgaagctagacaacttaaacttcagaagaaaataacagcaacctgtttacatatataagctactgtcataccggcctactgatgtatggacttcagagtagtgtggcctatatcgattttctaggatcattattttgtttgttgtttttctcccttcctccacctattttctcttcataggacatgaggattctcaacctgataaaaatgagctttcctaataactcaagacccatctgcctaggaataaaccatcccagctgtgagagaccagacgaaacctgagaccagagactcgttttcttctaaaatgctttctccaaaagatttttaaacagaaaaagggggaaatgtgaaaggaaaagaaaacttgaggcccccaaaatcactaagctaaaaggaaaagtcaagctgggaatggcttagggcaaacctgcctcccattctatgcaaagtcatccctccgtgcactgagataaatgcttatctaattgcctcctttggagaggctcatcagaaactcaaaataatgcaaccatttgactctcacctacctgtgacctggaagatccctctctgcttgagttgtcctgcttttctggatggaaccaatgttcatcttacatatattgattgatgtctcatgtctccctaaaatgtataaaaccaagctgtgccctgaccaccttgggcacatgtcgtcaggacctcctgaggctgtgccacaggcatgcagcctcaaccttggcaaaataaactttctaaattgactgagaccagtctcagatattcagggttcacagtatccaaaaatccaatcacatctgaaaccgcctttgcaaaaattatcacagtgagaaaataatggcagtgaaagaaagctgatctagccaacctccctcttgcctttagctttcaagctgcttttacttattcctgggtttaagccaagctacatgtgggagtcatttagttgatagtttaaattataataacccttccccgaaactcaaccacccttgtaatactgagagaccaccaggctaggaggaggagaggagcctaaattctgctaaggtgtagacaaaaacaattgtgaggcgttattccagaagccacaagatatgcaacttcctcagttacccctgcagataatgttacttttgtagaacctaggattggccttctgagatatcttctcaggattttgcatgtctgatgaccgatggctccaccgggaccagccaacggcttctgtgtccccacccagaagcgactcagagaaagaggacagcttcgacaccctatgatttcatctctgacccaaccaatcagcactccccataccctagcctgctacctaccaaattacctttgaaaaatccctaacctccaagccttagatgagtttgatttgagtaataactctgcctcccacatggtgtggctggcatcatgtcaattaacctctttctttactgcagtgccatggtctccatgaactgatttttttgtgcagtgggcaggaagaacccatcgggcagctacacatcttgaaagagaagctcttcctgtgaggtacatcaactgtggttaagaatcttacatacttatcattttttgttgttgtgagaacatttaaaatctacccttttctttcttttttttttttttttttttgggatggcgtctcactctgttgcccaggctggagtgcaatggcatgatcttggctcaccacaacctgctgggttcaagtgattctgttgcctcagcctcctgagtagctgggattacaggcatgcaccactcttttagcaattttatttatttattttgttattttgaaaaagtatttttaacttttactttagattaatggggtatatgtgcaggcttgctatatgggtatattgtgtgatgctgaggtttggggtatgaatgatcctgtcagccagatcgtgagcatcgtacacaagcaattttaaaatatacaaatggtgtggtatggtggtacatgcctgtagtcccagctactcaggaggatggggccagaggatcgcttgagcctaggtgtttgacaccagcctggacaacattgtgagactctgtctcaaaaataataaataacaaaacaaaataaaatatacaatgcattattatttaatacagtcattattctatgcaataaatcactaaagctta

SEQ ID NO: 464139 - DNA, 1660 bp, Homo sapiens
tgcgcagggactggcgggactgcgcggaggcgactgcagacgtatcgggggtccggagcctgtcgcggctgctaagcgctcggcgcctggcgctggcgctggccaaggcttggccaacagtgttgcaaacaggaacccgaggtgttcacttcactgttgaaggaacgagagggcatctgctaaagtttcagattccatttctgctcagtatccagtagtggatcatgaatttgatgcagtggtggtaggcgctggaggggcaggctttgcgagctgcatttggcctttccgaggcagagtttgatacagcatgtgttaccaagctgtttcctaccaggtcacacactgttgcagcgcaggttggaatcaatgctgctctggggaacatggaggaggacaactggaggtggcatttctatgacaccgtgaagggctccgactggctgggggaccaggatgccatccactacgtgacggagcaggcccccactgccatggtcgagctagaaaattatggcatgccgtttagcagaactgaagatgggaagatttatcagcgtgcatttggtggacagagcctcaagtttggaaagggcaggcaggcccatcggtgctgctgtgtggctgatcggaccggccactcaatattgcacacctcatatgggaggtctctgagatatgataccagctgttttgtggagtattttgccttggatctcctgatagagaacagggagtgccgtggtgtcattgcactgtgcatagaggacgggtccatccatcacataagagcaaagaacactgttgttgccacaggagtcaagaaacttttcttttgagctattgacagcttttaacaagttattatactcctatgaacaaaatttggagcatatttgtttctctctgcctgatttctcctgaatttggaaactattttgccatggtctccatgaactgatttttttgtgcagtgggcaggaagaacccatcgggcagctacacatcttgaaagagaagctcttcctgtgaggtacatcaactgtggttaagaatcttacatacttatcattttttgttgttgtgagaacatttaaaatctacccttttctttcttttttttttttttttttttgggatggcgtctcactctgttgcccaggctggagtgcaatggcatgatcttggctcaccacaacctgctgggttcaagtgattctgttgcctcagcctcctgagtagctgggattacaggcatgcaccactcttttagcaattttatttatttattttgttattttgaaaaagtatttttaacttttactttagattaatggggtatatgtgcaggcttgctatatgggtatattgtgtgatgctgaggtttggggtatgaatgatcctgtcagccagatcgtgagcatcgtacacaagcaattttaaaatatacaaatggtgtggtatggtggtacatgcctgtagtcccagctactcaggaggatggggccagaggatcgcttgagcctaggtgtttgacaccagcctggacaacattgtgagactctgtctcaaaaataataaataacaaaacaaaataaaatatacaatgcattattatttaatacagtcattattctatgcaataaatcactaaagctta

SEQ ID NO: 464140 - DNA, 1424 bp, Homo sapiens
agcttcggtacacccctacgttgttagaagtgttcaatagcatctgaaaccgcctttgcaaaaattatcacagtgagaaaataatggcagtgaaagaaagctgatctagccaacctccctcttgcctttagctttcaagctgcttttacttattcctgggtttaagccaagctacatgtgggagtcatttagttgatagtttaaattataataacccttccccgaaactcaaccacccttgtaatactgagagaccaccaggctaggaggaggagaggagcctaaattctgctaaggtgtagacaaaaacaattgtgaggcgttattccagaagccacaagatatgcaacttcctcagttacccctgcagataatgttacttttgtagaacctaggattggccttctgagatatcttctcaggattttgcatgtctgatgaccgatggctccaccgggaccagccaacggcttctgtgtccccacccagaagcgactcagagaaagaggacagcttcgacaccctatgatttcatctctgacccaaccaatcagcactccccataccctagcctgctacctaccaaattacctttgaaaaatccctaacctccaagccttagatgagtttgatttgagtaataactctgcctcccacatggtgtggctggcatcatgtcaattaacctctttctttactgcagtgccatggtctccatgaactgatttttttgtgcagtgggcaggaagaacccatcgggcagctacacatcttgaaagagaagctcttcctgtgaggtacatcaactgtggttaagaatcttacatacttatcattttttgttgttgtgagaacatttaaaatctacccttttctttcttttttttttttttttttttgggatggcgtctcactctgttgcccaggctggagtgcaatggcatgatcttggctcaccacaacctgctgggttcaagtgattctgttgcctcagcctcctgagtagctgggattacaggcatgcaccactcttttagcaattttatttatttattttgttattttgaaaaagtatttttaacttttactttagattaatggggtatatgtgcaggcttgctatatgggtatattgtgtgatgctgaggtttggggtatgaatgatcctgtcagccagatcgtgagcatcgtacacaagcaattttaaaatatacaaatggtgtggtatggtggtacatgcctgtagtcccagctactcaggaggatggggccagaggatcgcttgagcctaggtgtttgacaccagcctggacaacattgtgagactctgtctcaaaaataataaataacaaaacaaaataaaatatacaatgcattattatttaatacagtcattattctatgcaataaatcactaaagctta

SEQ ID NO: 464141 - DNA, 1284 bp, Homo sapiens
ggtgatagctgactctagaggatacacagatgacgcggagaacctcatttagttgatagtttaaattataataacccttccccgaaactcaaccacccttgtaatactgagagaccaccaggctaggaggaggagaggagcctaaattctgctaaggtgtagacaaaaacaattgtgaggcgttattccagaagccacaagatatgcaacttcctcagttacccctgcagataatgttacttttgtagaacctaggattggccttctgagatatcttctcaggattttgcatgtctgatgaccgatggctccaccgggaccagccaacggcttctgtgtccccacccagaagcgactcagagaaagaggacagcttcgacaccctatgatttcatctctgacccaaccaatcagcactccccataccctagcctgctacctaccaaattacctttgaaaaatccctaacctccaagccttagatgagtttgatttgagtaataactctgcctcccacatggtgtggctggcatcatgtcaattaacctctttctttactgcagtgccatggtctccatgaactgatttttttgtgcagtgggcaggaagaacccatcgggcagctacacatcttgaaagagaagctcttcctgtgaggtacatcaactgtggttaagaatcttacatacttatcattttttgttgttgtgagaacatttaaaatctacccttttctttcttttttttttttttttttttgggatggcgtctcactctgttgcccaggctggagtgcaatggcatgatcttggctcaccacaacctgctgggttcaagtgattctgttgcctcagcctcctgagtagctgggattacaggcatgcaccactcttttagcaattttatttatttattttgttattttgaaaaagtatttttaacttttactttagattaatggggtatatgtgcaggcttgctatatgggtatattgtgtgatgctgaggtttggggtatgaatgatcctgtcagccagatcgtgagcatcgtacacaagcaattttaaaatatacaaatggtgtggtatggtggtacatgcctgtagtcccagctactcaggaggatggggccagaggatcgcttgagcctaggtgtttgacaccagcctggacaacattgtgagactctgtctcaaaaataataaataacaaaacaaaataaaatatacaatgcattattatttaatacagtcattattctatgcaataaatcactaaagctta

SEQ ID NO: 464142 - DNA, 465 bp, Homo sapiens
gtaagacggtggtgggcacacacagccaaaggaagtaggggtacaggggagtgcgactctgagtatggagtctattacttggcaggaagcacttctgatctttaacacatgcccgtaaatgccgttgggaagatttgttaatacaattatgtggagagattcatggagtaccttttctgtgccagatacgttaggtaataagcatattacaggtagcctttcactcactgctccagtcagcccttcctggagttccctctgtctccaccacacagatgaggagactgaggctaagggatggaatcactgggtgagtctgggaggggttgtgatctggaatctgtcaggcctggctgctcctctgctgaggtcagccctcactgggagtcaccatgtgagtagttggctttctctgaatcccccagcgggtggatttgggcctggaagacaaagctggggctcctg

SEQ ID NO: 464143 - DNA, 1723 bp, Homo sapiens
agcgtgttgctgtggttggtgctgactgagcagagacccccgccgcatcttgggctcttaggagctgctgggagggcgtccacaagcaggaggtgaagcccatggtcagtgggactttttaggggcagtggacactaaccctctggatctgtgtcttctgtgtctccagtggccaacagtgttgcaaacaggaacccgaggtgttcacttcactgttgaaggaacgagagggcatctgctaaagtttcagattccatttctgctcagtatccagtagtggatcatgaatttgatgcagtggtggtaggcgctggaggggcaggctttgcgagctgcatttggcctttccgaggcagagtttgatacagcatgtgttaccaagctgtttcctaccaggtcacacactgttgcagcgcagaaaaggagatcatctaaagaggaggattcagaatttaggttggggaagaaaagggcaagggtttcatttgtccctgtgctgctgtcttctgggactctctgaggggaagcacttctgatctttaacacatgcccgtaaatgccgttgggaagatttgttaatacaattatgtggagagattcatggagtaccttttctgtgccagatacgttagcgggtggatttgggcctggaagacaaagctggggctcctgtttgtggcttgtaaggagtggttggtgtttccaggttggaatcaatgctgctctggggaacatggaggaggacaactggaggtggcatttctatgacaccgtgaagggctccgactggctgggggaccaggatgccatccactacgtgacggagcaggcccccactgccatggtcgaggtgatgggcgggaggctctgggtgctctcgtggtctgtttctagtacaagagtcctggaaaaaatctcccatctgggctgtgaccccatggtctgcggacctcactctggcaccagactccgagtggagctgcatgcggccaccggacagtgtggagtgcctcttcgggtttctctgagatatgataccagctgttttgtggagtattttgccttggatctcctgatagagaacagggagtgccgtggtgtcattgcactgtgcatagaggacgggtccatccatcacataagagcaaagaacactgttgttgccacagggtaggaatctaatttctactttatttcctttgtaaaaatgaataaatttcttttagagtgtctttattttaaggaaaatagaggcattgtagaatagcagttcagacacaggccttgatataaccatgtgagggtgatggcctttcccagccgtggttcctcacctgtaaagagtgaggacagcagcacctgcctcggggtgagaaagcatggccctcagtagtcggtagtggctgccgtcagcttcacagcttacctctcccgattttagatgaggcacctgcggcccaaagagtcacatggggttttctggcaaaatctctcttgttttagtgggttctgtgtttatactgattcctgggatagataagtctgtcttctccgcataatgaaaatgaaaaactttaattttatacagtggcagttactttagtcactttaaaagttaagaagtgtcagtacagccaagaaaaaaaatcagcaaaactacaggttgggaaaaaatattttccaaaccatatatctaatgatatcttagtatctaaaatagaaa

SEQ ID NO: 464144 - DNA, 2964 bp, Homo sapiens
tgcgcagggactggcgggactgcgcggaggcgactgcagacgtatcgggggtccggagcctgtcgcggctgctaagcgctcggcgcctggcgctggcgctggccaaggcttggccaacagtgttgcaaacaggaacccgaggtgttcacttcactgttgaaggaacgagagggcatctgctaaagtttcagattccatttctgctcagtatccagtagtggatcatgaatttgatgcagtggtggtaggcgctggaggggcaggctttgcgagctgcatttggcctttccgaggcagagtttgatacagcatgtgttaccaagctgtttcctaccaggtcacacactgttgcagcgcaggttggaatcaatgctgctctggggaacatggaggaggacaactggaggtggcatttctatgacaccgtgaagggctccgactggctgggggaccaggatgccatccactacgtgacggagcaggcccccactgccatggtcgagctagaaaattatggcatgccgtttagcagaactgaagatgggaagatttatcagcgtgcatttggtggacagagcctcaagtttggaaagggcaggcaggcccatcggtgctgctgtgtggctgatcggaccggccactcaatattgcacacctcatatgggaggtctctgagatatgataccagctgttttgtggagtattttgccttggatctcctgatagagaacagggagtgccgtggtgtcattgcactgtgcatagaggacgggtccatccatcacataagagcaaagaacactgttgttgccacaggagtcaagaaacttttcttttgagctattgacagcttttaacaagttattatactcctatgaacaaaatttggagcatatttgtttctctctgcctgatttctcctgaatttggaaactatttgacatgaggattctcaacctgataaaaatgagctttcctaataactcaagacccatctgcctaggaataaaccatcccagctgtgagagaccagacgaaacctgagaccagagactcgttttcttctaaaatgctttctccaaaagatttttaaacagaaaaagggggaaatgtgaaaggaaaagaaaacttgaggcccccaaaatcactaagctaaaaggaaaagtcaagctgggaatggcttagggcaaacctgcctcccattctatgcaaagtcatccctccgtgcactgagataaatgcttatctaattgcctcctttggagaggctcatcagaaactcaaaataatgcaaccatttgactctcacctacctgtgacctggaagatccctctctgcttgagttgtcctgcttttctggatggaaccaatgttcatcttacatatattgattgatgtctcatgtctccctaaaatgtataaaaccaagctgtgccctgaccaccttgggcacatgtcgtcaggacctcctgaggctgtgccacaggcatgcagcctcaaccttggcaaaataaactttctaaattgactgagaccagtctcagatattcagggttcacagtatccaaaaatccaatcacatctgaaaccgcctttgcaaaaattatcacagtgagaaaataatggcagtgaaagaaagctgatctagccaacctccctcttgcctttagctttcaagctgcttttacttattcctgggtttaagccaagctacatgtgggagtcatttagttgatagtttaaattataataacccttccccgaaactcaaccacccttgtaatactgagagaccaccaggctaggaggaggagaggagcctaaattctgctaaggtgtagacaaaaacaattgtgaggcgttattccagaagccacaagatatgcaacttcctcagttacccctgcagataatgttacttttgtagaacctaggattggccttctgagatatcttctcaggattttgcatgtctgatgaccgatggctccaccgggaccagccaacggcttctgtgtccccacccagaagcgactcagagaaagaggacagcttcgacaccctatgatttcatctctgacccaaccaatcagcactccccataccctagcctgctacctaccaaattacctttgaaaaatccctaacctccaagccttagatgagtttgatttgagtaataactctgcctcccacatggtgtggctggcatcatgtcaattaacctctttctttactgcagtgccatggtctccatgaactgatttttttgtgcagtgggcaggaagaacccatcgggcagctacacatcttgaaagagaagctcttcctgtgaggtacatcaactgtggttaagaatcttacatacttatcattttttgttgttgtgagaacatttaaaatctacccttttctttcttttttttttttttttttttgggatggcgtctcactctgttgcccaggctggagtgcaatggcatgatcttggctcaccacaacctgctgggttcaagtgattctgttgcctcagcctcctgagtagctgggattacaggcatgcaccactcttttagcaattttatttatttattttgttattttgaaaaagtatttttaacttttactttagattaatggggtatatgtgcaggcttgctatatgggtatattgtgtgatgctgaggtttggggtatgaatgatcctgtcagccagatcgtgagcatcgtacacaagcaattttaaaatatacaaatggtgtggtatggtggtacatgcctgtagtcccagctactcaggaggatggggccagaggatcgcttgagcctaggtgtttgacaccagcctggacaacattgtgagactctgtctcaaaaataataaataacaaaacaaaataaaatatacaatgcattattatttaatacagtcattattctatgcaataaatcactaaagctta

SEQ ID NO: 464145 - DNA, 2633 bp, Homo sapiens
tgcgcagggactggcgggactgcgcggaggcgactgcagacgtatcgggggtccggagcctgtcgcggctgctaagcgctcggcgcctggcgctggcgctggccaaggcttggccaacagtgttgcaaacaggaacccgaggtgttcacttcactgttgaaggaacgagagggcatctgctaaagtttcagattccatttctgctcagtatccagtagtggatcatgaatttgatgcagtggtggtaggcgctggaggggcaggctttgcgagctgcatttggcctttccgaggcagagtttgatacagcatgtgttaccaagctgtttcctaccaggtcacacactgttgcagcgcaggttggaatcaatgctgctctggggaacatggaggaggacaactggaggtggcatttctatgacaccgtgaagggctccgactggctgggggaccaggatgccatccactacgtgacggagcaggcccccactgccatggtcgagctagaaaattatggcatgccgtttagcagaactgaagatgggaagatttatcagcgtgcatttggtggacagagcctcaagtttggaaagggcaggcaggcccatcggtgctgctgtgtggctgatcggaccggccactcaatattgcacacctcatatgggaggtctctgagatatgataccagctgttttgtggagtattttgccttggatctcctgatagagaacagggagtgccgtggtgtcattgcactgtgcatagaggacgggtccatccatcacataagagcaaagaacactgttgttgccacaggagtcaagaaacttttcttttgagctattgacagcttttaacaagttattatactcctatgaacaaaatttggagcatatttgtttctctctgcctgatttctcctgaatttggaaactatttgacatgaggattctcaacctgataaaaatgagctttcctaataactcaagacccatctgcctaggaataaaccatcccagctgtgagagaccagacgaaacctgagaccagagactcgttttcttctaaaatgctttctccaaaagatttttaaacagaaaaagggggaaatgtgaaaggaaaagaaaacttgaggcccccaaaatcactaagctaaaaggaaaagtcaagctgggaatggcttagggcaaacctgcctcccattctatgcaaagtcatccctccgtgcactgagataaatgcttatctaattgcctcctttggagaggctcatcagaaactcaaaataatgcaaccatttgactctcacctacctgtgacctggaagatccctctctgcttgagttgtcctgcttttctggatggaaccaatgttcatcttacatatattgattgatgtctcatgtctccctaaaatgtataaaaccaagctgtgccctgaccaccttgggcacatgtcgtcaggacctcctgaggctgtgccacaggcatgcagcctcaaccttggcaaaataaactttctaaattgactgagaccagtctcagatattcagggttcacagtatccaaaaatccaatcacatctgaaaccgcctttgcaaaaattatcacagtgagaaaataatggcagtgaaagaaagctgatctagccaacctccctcttgcctttagctttcaagctgcttttacttattcctgggtttaagccaagctacatgtgggagtcatttagttgatagtttaaattataataacccttccccgaaactcaaccacccttgtaatactgagagaccaccaggctaggaggaggagaggagcctaaattctgctaaggtgtagacaaaaacaattgtgaggcgttattccagaagccacaagatatgcaacttcctcagttacccctgcagataatgttacttttgtagaacctaggattggccttctgagatatcttctcaggattttgcatgtctgatgaccgatggctccaccgggaccagccaacggcttctgtgtccccacccagaagcgactcagagaaagaggacagcttcgacaccctatgatttcatctctgacccaaccaatcagcactccccataccctagcctgctacctaccaaattacctttgaaaaatccctaacctccaagccttagatgagtttgatttgagtaataactctgcctcccacatggtgtggctggcatcatgtcaattaacctctttctttactgcagtgccatggtctccatgaactgatttttttgtgcagtgggcaggaagaacccatcgggcagctacacatcttgaaagagaagctcttcctgtgaggtacatcaactgtggttaagaatcttacatacttatcattttttgttgttgtgagaacatttaaaatctacccttttctttcttttttttttttttttttttgggatggcgtctcacttcccagctactcaggaggatggggccagaggatcgcttgagcctaggtgtttgacaccagcctggacaacattgtgagactctgtctcaaaaataataaataacaaaacaaaataaaatatacaatgcattattatttaatacagtcattattctatgcaataaatcactaaagctta

SEQ ID NO: 464146 - DNA, 2481 bp, Homo sapiens
tgcgcagggactggcgggactgcgcggaggcgactgcagacgtatcgggggtccggagcctgtcgcggctgctaagcgctcggcgcctggcgctggcgctggccaaggcttggccaacagtgttgcaaacaggaacccgaggtgttcacttcactgttgaaggaacgagagggcatctgctaaagtttcagattccatttctgctcagtatccagtagtggatcatgaatttgatgcagtggtggtaggcgctggaggggcaggctttgcgagctgcatttggcctttccgaggcagagtttgatacagcatgtgttaccaagctgtttcctaccaggtcacacactgttgcagcgcaggttggaatcaatgctgctctggggaacatggaggaggacaactggaggtggcatttctatgacaccgtgaagggctccgactggctgggggaccaggatgccatccactacgtgacggagcaggcccccactgccatggtcgagctagaaaattatggcatgccgtttagcagaactgaagatgggaagatttatcagcgtgcatttggtggacagagcctcaagtttggaaagggcaggcaggcccatcggtgctgctgtgtggctgatcggaccggccactcaatattgcacacctcatatgggaggtctctgagatatgataccagctgttttgtggagtattttgccttggatctcctgatagagaacagggagtgccgtggtgtcattgcactgtgcatagaggacgggtccatccatcacataagagcaaagaacactgttgttgccacaggagtcaagaaacttttcttttgagctattgacagcttttaacaagttattatactcctatgaacaaaatttggagcatatttgtttctctctgcctgatttctcctgaatttggaaactatttgacatgaggattctcaacctgataaaaatgagctttcctaataactcaagacccatctgcctaggaataaaccatcccagctgtgagagaccagacgaaacctgagaccagagactcgttttcttctaaaatgctttctccaaaagatttttaaacagaaaaagggggaaatgtgaaaggaaaagaaaacttgaggcccccaaaatcactaagctaaaaggaaaagtcaagctgggaatggcttagggcaaacctgcctcccattctatgcaaagtcatccctccgtgcactgagataaatgcttatctaattgcctcctttggagaggctcatcagaaactcaaaataatgcaaccatttgactctcacctacctgtgacctggaagatccctctctgcttgagttgtcctgcttttctggatggaaccaatgttcatcttacatatattgattgatgtctcatgtctccctaaaatgtataaaaccaagctgtgccctgaccaccttgggcacatgtcgtcaggacctcctgaggctgtgccacaggcatgcagcctcaaccttggcaaaataaactttctaaattgactgagaccagtctcagatattcagggttcacagtatccaaaaatccaatcacatctgaaaccgcctttgcaaaaattatcacagtgagaaaataatggcagtgaaagaaagctgatctagccaacctccctcttgcctttagctttcaagctgcttttacttattcctgggtttaagccaagctacatgtgggagtcatttagttgatagtttaaattataataacccttccccgaaactcaaccacccttgtaatactgagagaccaccaggctaggaggaggagaggagcctaaattctgctaaggtgtagacaaaaacaattgtgaggcgttattccagaagccacaagatatgcaacttcctcagttacccctgcagataatgttacttttgtagaacctaggattggccttctgagatatcttctcaggattttgcatgtctgatgaccgatggctccaccgggaccagccaacggcttctgtgtccccacccagaagcgactcagagaaagaggacagcttcgacaccctatgatttcatctctgacccaaccaatcagcactccccataccctagcctgctacctaccaaattacctttgaaaaatccctaacctccaagccttagatgagtttgatttgagtaataactctgcctcccacatggtgtggctggcatcatgtcaattaacctctttctttactgcagtgccatggtctccatgaactgatttttttgtgcagtgggcaggaagaacccatcgggcagtcccagctactcaggaggatggggccagaggatcgcttgagcctaggtgtttgacaccagcctggacaacattgtgagactctgtctcaaaaataataaataacaaaacaaaataaaatatacaatgcattattatttaatacagtcattattctatgcaataaatcactaaagctta

SEQ ID NO: 464147 - DNA, 3028 bp, Homo sapiens
tgcgcagggactggcgggactgcgcggaggcgactgcagacgtatcgggggtccggagcctgtcgcggctgctaagcgctcggcgcctggcgctggcgctggccaaggctgtgagtccctgccgcggaccggggcagggcaggcgggggacgaggcggcggtaggagcgggacggtccccagcgggtccgagcggagcgggcgccgggtccccgcgccccctgcccggggatcgggaaggggctgggagagccctgggccggtgcgagggggagccgcggagtgtactcgggggcctggggagctcggtccttagcagtggccaacagtgttgcaaacaggaacccgaggtgttcacttcactgttgaaggaacgagagggcatctgctaaagtttcagattccatttctgctcagtatccagtagtggatcatgaatttgatgcagtggtggtaggcgctggaggggcaggctttgcgagctgcatttggcctttccgaggcagagtttgatacagcatgtgttaccaagctgtttcctaccaggtcacacactgttgcagcgcagctagaaaattatggcatgccgtttagcagaactgaagatgggaagatttatcagcgtgcatttggtggacagagcctcaagtttggaaagggcaggcaggcccatcggtgctgctgtgtggctgatcggaccggccactcaatattgcacacctcatatgggaggtctctgagatatgataccagctgttttgtggagtattttgccttggatctcctgatagagaacagggagtgccgtggtgtcattgcactgtgcatagaggacgggtccatccatcacataagagcaaagaacactgttgttgccacaggagtcaagaaacttttcttttgagctattgacagcttttaacaagttattatactcctatgaacaaaatttggagcatatttgtttctctctgcctgatttctcctgaatttggaaactatttgacatgaggattctcaacctgataaaaatgagctttcctaataactcaagacccatctgcctaggaataaaccatcccagctgtgagagaccagacgaaacctgagaccagagactcgttttcttctaaaatgctttctccaaaagatttttaaacagaaaaagggggaaatgtgaaaggaaaagaaaacttgaggcccccaaaatcactaagctaaaaggaaaagtcaagctgggaatggcttagggcaaacctgcctcccattctatgcaaagtcatccctccgtgcactgagataaatgcttatctaattgcctcctttggagaggctcatcagaaactcaaaataatgcaaccatttgactctcacctacctgtgacctggaagatccctctctgcttgagttgtcctgcttttctggatggaaccaatgttcatcttacatatattgattgatgtctcatgtctccctaaaatgtataaaaccaagctgtgccctgaccaccttgggcacatgtcgtcaggacctcctgaggctgtgccacaggcatgcagcctcaaccttggcaaaataaactttctaaattgactgagaccagtctcagatattcagggttcacagtatccaaaaatccaatcacatctgaaaccgcctttgcaaaaattatcacagtgagaaaataatggcagtgaaagaaagctgatctagccaacctccctcttgcctttagctttcaagctgcttttacttattcctgggtttaagccaagctacatgtgggagtcatttagttgatagtttaaattataataacccttccccgaaactcaaccacccttgtaatactgagagaccaccaggctaggaggaggagaggagcctaaattctgctaaggtgtagacaaaaacaattgtgaggcgttattccagaagccacaagatatgcaacttcctcagttacccctgcagataatgttacttttgtagaacctaggattggccttctgagatatcttctcaggattttgcatgtctgatgaccgatggctccaccgggaccagccaacggcttctgtgtccccacccagaagcgactcagagaaagaggacagcttcgacaccctatgatttcatctctgacccaaccaatcagcactccccataccctagcctgctacctaccaaattacctttgaaaaatccctaacctccaagccttagatgagtttgatttgagtaataactctgcctcccacatggtgtggctggcatcatgtcaattaacctctttctttactgcagtgccatggtctccatgaactgatttttttgtgcagtgggcaggaagaacccatcgggcagctacacatcttgaaagagaagctcttcctgtgaggtacatcaactgtggttaagaatcttacatacttatcattttttgttgttgtgagaacatttaaaatctacccttttctttcttttttttttttttttttttgggatggcgtctcactctgttgcccaggctggagtgcaatggcatgatcttggctcaccacaacctgctgggttcaagtgattctgttgcctcagcctcctgagtagctgggattacaggcatgcaccactcttttagcaattttatttatttattttgttattttgaaaaagtatttttaacttttactttagattaatggggtatatgtgcaggcttgctatatgggtatattgtgtgatgctgaggtttggggtatgaatgatcctgtcagccagatcgtgagcatcgtacacaagcaattttaaaatatacaaatggtgtggtatggtggtacatgcctgtagtcccagctactcaggaggatggggccagaggatcgcttgagcctaggtgtttgacaccagcctggacaacattgtgagactctgtctcaaaaataataaataacaaaacaaaataaaatatacaatgcattattatttaatacagtcattattctatgcaataaatcactaaagctta

SEQ ID NO: 464148 - DNA, 2950 bp, Homo sapiens
tttataagatccttttgcggtgcctttctacagacgtgtcgggggtcggggctgttgtggttgcaagtgctcggtgcttggtgtggtgtggcaaggtggccaacagtgttgcaaacaggaacccgaggtgttcacttcactgttgaaggaacgagagggcatctgctaaagtttcagattccatttctgctcagtatccagtagtggatcatgaatttgatgcagtggtggtaggcgctggaggggcaggctttgcgagctgcatttggcctttccgaggcagagtttgatacagcatgtgttaccaagctgtttcctaccaggtcacacactgttgcagcgcaggttggaatcaatgctgctctggggaacatggaggaggacaactggaggtggcatttctatgacaccgtgaagggctccgactggctgggggaccaggatgccatccactacgtgacggagcaggcccccactgccatggtcgagctagaaaattatggcatgccgtttagcagaactgaagatgggaagatttatcagcgtgcatttggtggacagagcctcaagtttggaaagggcaggcaggcccatcggtgctgctgtgtggctgatcggaccggccactcaatattgcacacctcatatgggaggtctctgagatatgataccagctgttttgtggagtattttgccttggatctcctgatagagaacagggagtgccgtggtgtcattgcactgtgcatagaggacgggtccatccatcacataagagcaaagaacactgttgttgccacaggagtcaagaaacttttcttttgagctattgacagcttttaacaagttattatactcctatgaacaaaatttggagcatatttgtttctctctgcctgatttctcctgaatttggaaactatttgacatgaggattctcaacctgataaaaatgagctttcctaataactcaagacccatctgcctaggaataaaccatcccagctgtgagagaccagacgaaacctgagaccagagactcgttttcttctaaaatgctttctccaaaagatttttaaacagaaaaagggggaaatgtgaaaggaaaagaaaacttgaggcccccaaaatcactaagctaaaaggaaaagtcaagctgggaatggcttagggcaaacctgcctcccattctatgcaaagtcatccctccgtgcactgagataaatgcttatctaattgcctcctttggagaggctcatcagaaactcaaaataatgcaaccatttgactctcacctacctgtgacctggaagatccctctctgcttgagttgtcctgcttttctggatggaaccaatgttcatcttacatatattgattgatgtctcatgtctccctaaaatgtataaaaccaagctgtgccctgaccaccttgggcacatgtcgtcaggacctcctgaggctgtgccacaggcatgcagcctcaaccttggcaaaataaactttctaaattgactgagaccagtctcagatattcagggttcacagtatccaaaaatccaatcacatctgaaaccgcctttgcaaaaattatcacagtgagaaaataatggcagtgaaagaaagctgatctagccaacctccctcttgcctttagctttcaagctgcttttacttattcctgggtttaagccaagctacatgtgggagtcatttagttgatagtttaaattataataacccttccccgaaactcaaccacccttgtaatactgagagaccaccaggctaggaggaggagaggagcctaaattctgctaaggtgtagacaaaaacaattgtgaggcgttattccagaagccacaagatatgcaacttcctcagttacccctgcagataatgttacttttgtagaacctaggattggccttctgagatatcttctcaggattttgcatgtctgatgaccgatggctccaccgggaccagccaacggcttctgtgtccccacccagaagcgactcagagaaagaggacagcttcgacaccctatgatttcatctctgacccaaccaatcagcactccccataccctagcctgctacctaccaaattacctttgaaaaatccctaacctccaagccttagatgagtttgatttgagtaataactctgcctcccacatggtgtggctggcatcatgtcaattaacctctttctttactgcagtgccatggtctccatgaactgatttttttgtgcagtgggcaggaagaacccatcgggcagctacacatcttgaaagagaagctcttcctgtgaggtacatcaactgtggttaagaatcttacatacttatcattttttgttgttgtgagaacatttaaaatctacccttttctttcttttttttttttttttttttgggatggcgtctcactctgttgcccaggctggagtgcaatggcatgatcttggctcaccacaacctgctgggttcaagtgattctgttgcctcagcctcctgagtagctgggattacaggcatgcaccactcttttagcaattttatttatttattttgttattttgaaaaagtatttttaacttttactttagattaatggggtatatgtgcaggcttgctatatgggtatattgtgtgatgctgaggtttggggtatgaatgatcctgtcagccagatcgtgagcatcgtacacaagcaattttaaaatatacaaatggtgtggtatggtggtacatgcctgtagtcccagctactcaggaggatggggccagaggatcgcttgagcctaggtgtttgacaccagcctggacaacattgtgagactctgtctcaaaaataataaataacaaaacaaaataaaatatacaatgcattattatttaatacagtcattattctatgcaataaatcactaaagctta

SEQ ID NO: 464149 - DNA, 1543 bp, Homo sapiens
tgcgcagggactggcgggactgcgcggaggcgactgcagacgtatcgggggtccggagcctgtcgcggctgctaagcgctcggcgcctggcgctggcgctggccaaggcttggccaacagtgttgcaaacaggaacccgaggtgttcacttcactgttgaaggaacgagagggcatctgctaaagtttcagattccatttctgctcagtatccagtagtggatcatgaatttgatgcagtggtggtaggcgctggaggggcaggctttgcgagctgcatttggcctttccgaggcagagtttgatacagcatgtgttaccaagctgtttcctaccaggtcacacactgttgcagcgcaggttggaatcaatgctgctctggggaacatggaggaggacaactggaggtggcatttctatgacaccgtgaagggctccgactggctgggggaccaggatgccatccactacgtgacggagcaggcccccactgccatggtcgagctagaaaattatggcatgccgtttagcagaactgaagatgggaagatttatcagcgtgcatttggtggacagagcctcaagtttggaaagggcaggcaggcccatcggtgctgctgtgtggctgatcggaccggccactcaatattgcacacctcatatgggaggtctctgagatatgataccagctgttttgtggagtattttgccttggatctcctgatagagaacagggagtgccgtggtgtcattgcactgtgcatagaggacgggtccatccatcacataagagcaaagaacactgttgttgccacaggagtcaagaaacttttcttttgagctattgacagcttttaacaagttattatactcctatgaacaaaatttggagcatatttgtttctctctgcctgatttctcctgaatttggaaactatttgacatgaggattctcaacctgataaaaatgagctttcctaataactcaagacccatctgcctaggaataaaccatcccagctgtgagagaccagacgaaacctgagaccagagactcgttttcttctaaaatgctttctccaaaagatttttaaacagaaaaagggggaaatgtgaaaggaaaagaaaacttgaggcccccaaaatcactaagctaaaaggaaaagtcaagctgggaatggcttagggcaaacctgcctcccattctatgcaaagtcatccctccgtgcactgagataaatgcttatctaattgcctcctttggagaggctcatcagaaactcaaaataatgcaaccatttgactctcacctacctgtgacctggaagatccctctctgcttgagttgtcctgcttttctggatggaaccaatgttcatcttacatatattgattgatgtctcatgtctccctaaaattgccatggtctccatgaactgatttttttgtgcagtgggcaggaagaacccatcgggcagctacacatcttgaaagagaagctcttctggaacgcagaacctctggacttcacagatgcctgggga

SEQ ID NO: 464150 - DNA, 3227 bp, Homo sapiens
tatttattcagtgcggattgcagagggcgcagctccaccgtggtaacttgcaatgtggccgcccctgcgctggcttctttctcctcggccctcggtgaacccagcttttcctttaaagcatagacaaatccttgcttagggtcagccagaccgtgggcttgctttgggctcccgcgtggacgctgaaggctcttcatgatttctcagaaaccttggtgggccacccaaaaagtgtgttggaaatccacggtgatccttaatatggtgatgggattgtccgaaaaggatttcagatgcatgccaggtttccactgattgccagaactcgagatcactacacatggatccccaaaatcaacatggcagtggcagttcgttagttgtgatccagcagccttctttggatagccgtcagagattagactatgagagagagattcagcctactgctattttgtccttagaccagatcaaggccataagaggcagcaatgaatacacagaagggccttcggtggtgaaaagacctgctcctcggacagcaccaagacaagaaaagcatgaaaggactcatgaaatcataccaattaatgtgaataataactacgagcacagacacacaagccacctgggacatgcagtactcccaagtaatgccaggggccccattttgagcagatcaaccagcactggaagtgcagccagctctgggagcaacagcagtgcctcttctgaacagggactgttaggaaggtcaccaccaaccagaccagtccctggtcataggtctgaaagggcaatccggacccagcccaagcaactgattgtggatgacttgaagggttccttgaaagaggacctgacacagcacaagttcatttgtgaacagtgtgggaagtgcaagtgtggagaatgcactgctcccaggaccctaccatcctgtttggcctgtaaccggcagtgcctttgctctgctgagagcatggtggaatatggaacctgcatgtgcttagtcaagggcatcttctaccactgctccaatgacgacgaaggggattcctattcagataatccttgctcctgttcacaatcacactgctgctctagatacctgtgtatgggagccatgtctttatttttaccttgcttactctgttatcctcctgctaaaggatgcctgaagctgtgcaggaggtgttatgactggatccatcgcccagggtgcagatgtaagaactccaacactgtctattgtaagctggagagctgcccctcccggggtcagggtaaaccatcatgatttttggaggtgggttgtacctcctgaacttttagctttcaagttgtggctgttttttgtttttgtttttgtttttgttttctttagaatttttccctgtttcccaccttctcttcccctgttgccaaggtctaactcatggatttttctctttcctcatggatgatcttcagcaagagtggactgggaagctgcacctggctcccactttcaacaagagcctctgccatccacttgagggtattgagagccagtgggcttttgtgtagcctttttgttctgcaagcaactttctaaagttgtgtacatgaacatacacccacatccagactacagtgatttagagttgttttgattgggtaccgtgggagcagggaaattggttttttaaaaagcaactgtttaattgcttaaataagctatgtattaaatctgtctccagttagggctatcttcctagcataggccccttaagtagcatgggggatatattttttgctataacgtaaaaattttcctttaaccactgccctctccttctttctccttcaaggttctttccccctcagttttgttgttgtcttactctggagatgccaagtgtattttttctttctatgtaattttagattcgccttacaatgtaaatcttcacattggagataatattggttggaccttgcccatcttcactctagccttcgtatttgtgaaggactcagccaccttccttcttcaccccatgcttctcaccaaatttttgttgtcattgagggcacttggataactcaagttgatatttatagctgatcaatctatatgtgtcacagaactatgctgcctaaagtgatcttggctccttaatggtccttttggccccttggatagttaacagctgagtaattctaatctcttctgtgttttccttgccttaaccacaaattgtggtgctttttgtatattttatgtataaatcacaaagttgaattctgactatttttaagacaaaagtctgttaaacttttttattgtaaagaatatttattatgcgaatctctattattttatggtatttattgcaaaagactgttgaaatgtactcatgtttgaatataacaaaatatcaatacttaacggaaaataaggtgacacgaagaaagtacatatgttaactataatgcagaaaatatattaattaatgaaactgtctctcgatttcttcatttattagcctgtactattatgatgatttttgcttatttgctttgactttttcttcttacacacccattttacttctttccctatagatgttgaatctagacataggtgagcccaaattatgaactggataattaggttggtgcaaaagtaattgcagttttgggtcatttttaatggcaaaaacacagttacttttgcaccaacctagtatttcctggaaagtgcattaatcaaaattttgtaatccaaattatcttttaacaaatgctcaagtgagttattttgtacagtaaaaattttttgtaatactctctccctactttgactattttgtaagcatgaggttttgtgtatattatagtttcttgaaatggggcatatctacagtagaagcttttttaaatgtttatcctaacttttaagttaataaaaagttagatttatcagctagacttaatgaacttagttctgtagatatgctaggagtcgctggtactgtcactttaataaagcattctagaagttaccaagggaataattcacagtatcagagacatttcaaaaacattcctgtccctgtcttttcacttgtttcgtaagtctaatgtggcctgaccaaattacacctcatcaagtcctgtgcaataagaaacctgaaggcctaaaattttacgtagaaaaagtgttttaaatcttatttttt

SEQ ID NO: 464151 - DNA, 2641 bp, Homo sapiens
gagtggaggtggaggtggaggcaaggagctgaaattctgcgtagccggagtgagaccgctctgcaaaccactgcgtgctttgcagagtgattatcagcacagttccctgccctggataaggaacagctacagtcgctgttaaatgtgcctgaaaagcaatttgcaatctttgcattaggcatttcggccgtggaaccccaggctcggaggactgggtgtgagcgctgcccgggagaggctgacctgccgggaccggagtgcccggggacgctgtgcccccacttgcccaacgtgcggaatcggctaagcgcgtcggcctgcgcggggcacaagggacgacgcccgcctttctctctccgagaaggatccccaaacctcactctcttcactcctccccgctaaaaaaaaaaaaaaaaagaaaagggatttcagatgcatgccaggtttccactgattgccagaactcgagatcactacacatggatccccaaaatcaacatggcagtggcagttcgttagttgtgatccagcagccttctttggatagccgtcagagattagactatgagagagagattcagcctactgctattttgtccttagaccagatcaaggccataagaggcagcaatgaatacacagaagggccttcggtggtgaaaagacctgctcctcggacagcaccaagacaagaaaagcatgaaaggactcatgaaatcataccaattaatgtgaataataactacgagcacagacacacaagccacctgggacatgcagtactcccaagtaatgccaggggccccattttgagcagatcaaccagcactggaagtgcagccagctctgggagcaacagcagtgcctcttctgaacagggactgttaggaaggtcaccaccaaccagaccagtccctggtcataggtctgaaagggcaatccggacccagcccaagcaactgattgtggatgacttgaagggttccttgaaagaggacctgacacagcacaagttcatttgtgaacagtgtgggaagtgcaagtgtggagaatgcactgctcccaggaccctaccatcctgtttggcctgtaaccggcagtgcctttgctctgctgagagcatggtggaatatggaacctgcatgtgcttagtcaagggcatcttctaccactgctccaatgacgacgaaggggattcctattcagataatccttgctcctgttcacaatcacactgctgctctagatacctgtgtatgggagccatgtctttatttttaccttgcttactctgttatcctcctgctaaaggatgcctgaagctgtgcaggaggtgttatgactggatccatcgcccagggtgcagatgtaagaactccaacactgtctattgtaagctggagagctgcccctcccggggtcagggtaaaccatcatgatttttggaggtgggttgtacctcctgaacttttagctttcaagttgtggctgttttttgtttttgtttttgtttttgttttctttagaatttttccctgtttcccaccttctcttcccctgttgccaaggtctaactcatggatttttctctttcctcatggatgatcttcagcaagagtggactgggaagctgcacctggctcccactttcaacaagagcctctgccatccacttgagggtattgagagccagtgggcttttgtgtagcctttttgttctgcaagcaactttctaaagttgtgtacatgaacatacacccacatccagactacagtgatttagagttgttttgattgggtaccgtgggagcagggaaattggttttttaaaaagcaactgtttaattgcttaaataagctatgtattaaatctgtctccagttagggctatcttcctagcataggccccttaagtagcatgggggatatattttttgctataacgtaaaaattttcctttaaccactgccctctccttctttctccttcaaggttctttccccctcagttttgttgttgtcttactctggagatgccaagtgtattttttctttctatgtaattttagattcgccttacaatgtaaatcttcacattggagataatattggttggaccttgcccatcttcactctagccttcgtatttgtgaaggactcagccaccttccttcttcaccccatgcttctcaccaaatttttgttgtcattgagggcacttggataactcaagttgatatttatagctgatcaatctatatgtgtcacagaactatgctgcctaaagtgatcttggctccttaatggtccttttggccccttggatagttaacagctgagtaattctaatctcttctgtgttttccttgccttaaccacaaattgtggtgctttttgtatattttatgtataaatcacaaagttgaattctgactatttttaagacaaaagtctgttaaacttttttattgtaaagaatatttattatgcgaatctctattattttatggtatttattgcaaaagactgttgaaatgtactcatgtttgaatataacaaaatatcaatacttaacggaaaataaggtgacacgaagaaagtacatatgttaactataatgcagaaaatatattaattaatga

SEQ ID NO: 464152 - DNA, 2546 bp, Homo sapiens
ttgtaaaaactggttcttggaaaggggctgcagaagacctcccgaggtggatgttactgagccgcccggcgagcaccagccgtgacaggtccgggcccggccgcgcggagccgcgggagaactgccctccgcagccggaagggggccgcggggagcgctcctggccggtggcggcgggggcgggggaggccgcgagccgaggcgctccaactccggcgatgccgcctcgccctccccgccgcggttgatgcggcacgtgcacgccgccgcccgcaccaggacctgggccgggtcgcacggcttggcccccggccaccgcttcggcctaggatttcagatgcatgccaggtttccactgattgccagaactcgagatcactacacatggatccccaaaatcaacatggcagtggcagttcgttagttgtgatccagcagccttctttggatagccgtcagagattagactatgagagagagattcagcctactgctattttgtccttagaccagatcaaggccataagaggcagcaatgaatacacagaagggccttcggtggtgaaaagacctgctcctcggacagcaccaagacaagaaaagcatgaaaggactcatgaaatcataccaattaatgtgaataataactacgagcacagacacacaagccacctgggacatgcagtactcccaagtaatgccaggggccccattttgagcagatcaaccagcactggaagtgcagccagctctgggagcaacagcagtgcctcttctgaacagggactgttaggaaggtcaccaccaaccagaccagtccctggtcataggtctgaaagggcaatccggacccagcccaagcaactgattgtggatgacttgaagggttccttgaaagaggacctgacacagcacaagttcatttgtgaacagtgtgggaagtgcaagtgtggagaatgcactgctcccaggaccctaccatcctgtttggcctgtaaccggcagtgcctttgctctgctgagagcatggtggaatatggaacctgcatgtgcttagtcaagggcatcttctaccactgctccaatgacgacgaaggggattcctattcagataatccttgctcctgttcacaatcacactgctgctctagatacctgtgtatgggagccatgtctttatttttaccttgcttactctgttatcctcctgctaaaggatgcctgaagctgtgcaggaggtgttatgactggatccatcgcccagggtgcagatgtaagaactccaacactgtctattgtaagctggagagctgcccctcccggggtcagggtaaaccatcatgatttttggaggtgggttgtacctcctgaacttttagctttcaagttgtggctgttttttgtttttgtttttgtttttgttttctttagaatttttccctgtttcccaccttctcttcccctgttgccaaggtctaactcatggatttttctctttcctcatggatgatcttcagcaagagtggactgggaagctgcacctggctcccactttcaacaagagcctctgccatccacttgagggtattgagagccagtgggcttttgtgtagcctttttgttctgcaagcaactttctaaagttgtgtacatgaacatacacccacatccagactacagtgatttagagttgttttgattgggtaccgtgggagcagggaaattggttttttaaaaagcaactgtttaattgcttaaataagctatgtattaaatctgtctccagttagggctatcttcctagcataggccccttaagtagcatgggggatatattttttgctataacgtaaaaattttcctttaaccactgccctctccttctttctccttcaaggttctttccccctcagttttgttgttgtcttactctggagatgccaagtgtattttttctttctatgtaattttagattcgccttacaatgtaaatcttcacattggagataatattggttggaccttgcccatcttcactctagccttcgtatttgtgaaggactcagccaccttccttcttcaccccatgcttctcaccaaatttttgttgtcattgagggcacttggataactcaagttgatatttatagctgatcaatctatatgtgtcacagaactatgctgcctaaagtgatcttggctccttaatggtccttttggccccttggatagttaacagctgagtaattctaatctcttctgtgttttccttgccttaaccacaaattgtggtgctttttgtatattttatgtataaatcacaaagttgaattctgactatttttaagacaaaagtctgttaaacttttttattgtaaagaatatttattatgcgaatctctattattttatggtatttattgcaaaagactgttgaaatgtactcatgtttgaatataacaaaatatcaatacttaacggaaaataaggtgacacgaagaaagtacatatgttaactataatgcagaaaatatattaattaatga

SEQ ID NO: 464153 - DNA, 2676 bp, Homo sapiens
gagtggaggtggaggtggaggcaaggagctgaaattctgcgtagccggagtgagaccgctctgcaaaccactgcgtgctttgcagagtgattatcagcacagttccctgccctggataaggaacagctacagtcgctgttaaatgtgcctgaaaagcaatttgcaatctttgcattaggcatttcggccgtggaaccccaggctcggaggactgggtgtgagcgctgcccgggagaggctgacctgccgggaccggagtgcccggggacgctgtgcccccacttgcccaacgtgcggaatcggctaagcgcgtcggcctgcgcggggcacaagggacgacgcccgcctttctctctccgagaaggatccccaaacctcactctcttcactcctccccgctaaaaaaaaaaaaaaaaagaaaagggatttcagatgcatgccaggtttccactgattgccagaactcgagatcactacacatggatccccaaaatcaacatggcagtggcagttcgttagttgtgatccagcagccttctttggatagccgtcagagattagactatgagagagagattcagcctactgctattttgtccttagaccagatcaaggccataagaggcagcaatgaatacacagaagggccttcggtggtgaaaagacctgctcctcggacagcaccaagacaagaaaagcatgaaaggactcatgaaatcataccaattaatgtgaataataactacgagcacagacacacaagccacctgggacatgcagtactcccaagtaatgccaggggccccattttgagcagatcaaccagcactggaagtgcagccagctctgggagcaacagcagtgcctcttctgaacagggactgttaggaaggtcaccaccaaccagaccagtccctggtcataggtctgaaagggcaatccggacccagcccaagcaactgattgtggatgacttgaagggttccttgaaagaggacctgacacagcacaagttcatttgtgaacagtgtgggaagtgcaagtgtggagaatgcactgctcccaggaccctaccatcctgtttggcctgtaaccggcagtgcctttgctctgctgagagcatggtggaatatggaacctgcatgtgcttagtcaagggcatcttctaccactgctccaatgacgacgaaggggattcctattcagataatccttgctcctgttcacaatcacactgctgctctagatacctgtgtatgggagccatgtctttatttttaccttgcttactctgttatcctcctgctaaaggatgcctgaagctgtgcaggaggtgttatgactggatccatcgcccagggtgcagatgtaagaactccaacactgtctattgtaagctggagagctgcccctcccggggtcagggtaaaccatcatgatttttggaggtgggttgtacctcctgaacttttagctttcaagttgtggctgttttttgtttttgtttttgtttttgttttctttagaatttttccctgtttcccaccttctcttcccctgttgccaaggtctaactcatggatttttctctttcctcatggatgatcttcagcaagagtggactgggaagctgcacctggctcccactttcaacaagagcctctgccatccacttgagggtattgagagccagtgggcttttgtgtagcctttttgttctgcaagcaactttctaaagttgtgtacatgaacatacacccacatccagactacagtgatttagagttgttttgattgggtaccgtgggagcagggaaattggttttttaaaaagcaactgtttaattgcttaaataagctatgtattaaatctgtctccagttagggctatcttcctagcataggccccttaagtagcatgggggatatattttttgctataacgtaaaaattttcctttaaccactgccctctccttctttctccttcaaggttctttccccctcagttttgttgttgtcttactctggagatgccaagtgtattttttctttctatgtaattttagattcgccttacaatgtaaatcttcacattggagataatattggttggaccttgcccatcttcactctagccttcgtatttgtgaaggactcagccaccttccttcttcaccccatgcttctcaccaaatttttgttgtcattgagggcacttggataactcaagttgatatttatagctgatcaatctatatgtgtcacagaactatgctgcctaaagtgatcttggctccttaatggtccttttggccccttggatagttaacagctgagtaattctaatctcttctgtgttttccttgccttaaccacaaattgtggtgctttttgtatattttatgtataaatcacaaagttgaattctgactatttttaagacaaaagtctgttaaacttttttattgtaaagaatatttattatgcgaatctctattattttatggtatttattgcaaaagactgttgaaatgtactcatgtttgaatataacaaaatattctttacaataaaaaagtttaacagacttttgtcttaaaaatagtcagaattcaactttgtgatttatacataaaatatacaaaaagcaccacaatttgtggttagtcgcacc

SEQ ID NO: 464154 - DNA, 1949 bp, Homo sapiens
gagtggaggtggaggtggaggcaaggagctgaaattctgcgtagccggagtgagaccgctctgcaaaccactgcgtgctttgcagagtgattatcagcacagttccctgccctggataaggaacagctacagtcgctgttaaatgtgcctgaaaagcaatttgcaatctttgcattaggcatttcggccgtggaaccccaggctcggaggactgggtgtgagcgctgcccgggagaggctgacctgccgggaccggagtgcccggggacgctgtgcccccacttgcccaacgtgcggaatcggctaagcgcgtcggcctgcgcggggcacaagggacgacgcccgcctttctctctccgagaaggatccccaaacctcactctcttcactcctccccgctaaaaaaaaaaaaaaaaagaaaagggatttcagatgcatgccaggtttccactgattgccagaactcgagatcactacacatggatccccaaaatcaacatggcagtggcagttcgttagttgtgatccagcagccttctttggatagccgtcagagattagactatgagagagagattcagcctactgctattttgtccttagaccagatcaaggccataagaggcagcaatgaatacacagaagggccttcggtggtgaaaagacctgctcctcggacagcaccaagacaagaaaagcatgaaaggactcatgaaatcataccaattaatgtgaataataactacgagcacagacacacaagccacctgggacatgcagtactcccaagtaatgccaggggccccattttgagcagatcaaccagcactggaagtgcagccagctctgggagcaacagcagtgcctcttctgaacagggactgttaggaaggtcaccaccaaccagaccagtccctggtcataggtctgaaagggcaatccggacccagcccaagcaactgattgtggatgacttgaagggttccttgaaagaggacctgacacagcacaagttcatttgtgaacagtgtgggaagtgcaagtgtggagaatgcactgctcccaggaccctaccatcctgtttggcctgtaaccggcagtgcctttgctctgctgagagcatggtggaatatggaacctgcatgtgcttagtcaagggcatcttctaccactgctccaatgacgacgaaggggattcctattcagataatccttgctcctgttcacaatcacactgctgctctagatacctgtgtatgggagccatgtctttatttttaccttgcttactctgttatcctcctgctaaaggatgcctgaagctgtgcaggaggtgttatgactggatccatcgcccagggtgcagatgtaagaactccaacactgtctattgtaagctggagagctgcccctcccggggtcagggtaaaccatcatgatttttggaggtgggttgtacctcctgaacttttagctttcaagttgtggctgttttttgtttttgtttttgtttttgttttctttagaatttttccctgtttcccaccttctcttcccctgttgccaaggtctaactcatggatttttctctttcctcatggatgatcttcagcaagagtggactgggaagctgcacctggctcccactttcaacaagagcctctgccatccacttgagggtattgagagccagtgggcttttgtgtagcctttttgttctgcaagcaactttctaaagttgtgtacatgaacatacacccacatccagactacagtgatttagagttgttttgattgggtaccgtgggagcagggaaattggttttttaaaaagcaactgtttaattgcttaaataagctatgtattaaatctgtctccagttagggctatcttcctagcataggccccttaagtagcatgggggataaaccgcgagggtaccgagctc

SEQ ID NO: 464155 - DNA, 2502 bp, Homo sapiens
tatttattcagtgcggattgcagagggcgcagctccaccgtggtaacttgcaatgtggccgcccctgcgctggcttctttctcctcggccctcggtgaacccagcttttcctttaaagcatagacaaatccttgcttagggtcagccagaccgtgggcttgctttgggctcccgcgtggacgctgaaggctcttcatgatttctcagaaaccttggtgggccacccaaaaagtgtgttggaaatccacggtgatccttaatatggtgatgggattgtccgaaaaggatttcagatgcatgccaggtttccactgattgccagaactcgagatcactacacatggatccccaaaatcaacatggcagtggcagttcgttagttgtgatccagcagccttctttggatagccgtcagagattagactatgagagagagattcagcctactgctattttgtccttagaccagatcaaggccataagaggcagcaatgaatacacagaagggccttcggtggtgaaaagacctgctcctcggacagcaccaagacaagaaaagcatgaaaggactcatgaaatcataccaattaatgtgaataataactacgagcacagacacacaagccacctgggacatgcagtactcccaagtaatgccaggggccccattttgagcagatcaaccagcactggaagtgcagccagctctgggagcaacagcagtgcctcttctgaacagggactgttaggaaggtcaccaccaaccagaccagtccctggtcataggtctgaaagggcaatccggacccagcccaagcaactgattgtggatgacttgaagggttccttgaaagaggacctgacacagcacaagttcatttgtgaacagtgtgggaagtgcaagtgtggagaatgcactgctcccaggaccctaccatcctgtttggcctgtaaccggcagtgcctttgctctgctgagagcatggtggaatatggaacctgcatgtgcttagtcaagggcatcttctaccactgctccaatgacgacgaaggggattcctattcagataatccttgctcctgttcacaatcacactgctgctctagatacctgtgtatgggagccatgtctttatttttaccttgcttactctgttatcctcctgctaaaggatgcctgaagctgtgcaggaggtgttatgactggatccatcgcccagggtgcagatgtaagaactccaacactgtctattgtaagctggagagctgcccctcccggggtcagggtaaaccatcatgatttttggaggtgggttgtacctcctgaacttttagctttcaagttgtggctgttttttgtttttgtttttgtttttgttttctttagaatttttccctgtttcccaccttctcttcccctgttgccaaggtctaactcatggatttttctctttcctcatggatgatcttcagcaagagtggactgggaagctgcacctggctcccactttcaacaagagcctctgccatccacttgagggtattgagagccagtgggcttttgtgtagcctttttgttctgcaagcaactttctaaagttgtgtacatgaacatacacccacatccagactacagtgatttagagttgttttgattgggtaccgtgggagcagggaaattggttttttaaaaagcaactgtttaattgcttaaataagctatgtattaaatctgtctccagttagggctatcttcctagcataggccccttaagtagcatgggggatatattttttgctataacgtaaaaattttcctttaaccactgccctctccttctttctccttcaaggttctttccccctcagttttgttgttgtcttactctggagatgccaagtgtattttttctttctatgtaattttagattcgccttacaatgtaaatcttcacattggagataatattggttggaccttgcccatcttcactctagccttcgtatttgtgaaggactcagccaccttccttcttcaccccatgcttctcaccaaatttttgttgtcattgagggcacttggataactcaagttgatatttatagctgatcaatctatatgtgtcacagaactatgctgcctaaagtgatcttggctccttaatggtccttttggccccttggatagttaacagctgagtaattctaatctcttctgtgttttccttgccttaaccacaaattgtggtgctttttgtatattttatgtataaatcacaaagttgaattctgactatttttaagacaaaagtctgttaaacttttttattgtaaagaatatttattatgcgaatctctattattttatggtatttattgcaaaagactgttgaaatgtactcatgtttgaatataacaaaatatcaatacttaacggaaaataaggtgacacgaagaaagtacatatgttaactataatgcagaaaatatattaattaatga

SEQ ID NO: 464156 - DNA, 424 bp, Homo sapiens
ttgtaaaaactggttcttggaaaggggctgcagaagacctcccgaggtggatgttactgagccgcccggcgagcaccagccgtgacaggtccgggcccggccgcgcggagccgcgggagaactgccctccgcagccggaagggggccgcggggagcgctcctggccggtggcggcgggggcgggggaggccgcgagccgaggcgctccaactccggcgatgccgcctcgccctccccgccgcggttgatgcggcacgtgcacgccgccgcccgcaccaggacctgggccgggtcgcacggcttggcccccggccaccgcttcggcctaggatttcagatgcatgccaggtttccactgattgccagaactcgagatcactacacatggatccccaaacctcactctcttcactcctccccgcta

SEQ ID NO: 464157 - DNA, 2857 bp, Homo sapiens
tatgcgaagaggggctagcactcggtgtgtggaccaaatgcgtgtttgtttaggcattgttggcgaccgaatcccgagtgaagcattggtttaaaacctgaatttcccgtctctgtgtattgattcctaacgcgcagaggcgttgcttgaacgttgtttgaactcctaggcattccagggggcaaaagcacctcggcaaaaacgtgcaggactgcatgttactttggttcgcggctgacacgccgactgtgcgccggcctgtcaatcaccgggagcagcaacagggagcacatggcaacgggctgcgggcgagctggccagcggcccgcccggggtcccagcccttcgaagaaagggacattcacgagcttctatctctaattctctgtcgcaggcatttcggccgtggaaccccaggctcggaggactgggtgtgagcgctgcccgggagaggctgacctgccgggaccggagtgcccggggacgctgtgcccccacttgcccaacgtgcggaatcggctaagcgcgtcggcctgcgcggggcacaagggacgacgcccgcctttctctctccgagaaggatccccaaacctcactctcttcactcctccccgctaaaaaaaaaaaaaaaaagaaaagggatttcagatgcatgccaggtttccactgattgccagaactcgagatcactacacatggatccccaaaatcaacatggcagtggcagttcgttagttgtgatccagcagccttctttggatagccgtcagagattagactatgagagagagattcagcctactgctattttgtccttagaccagatcaaggccataagaggcagcaatgaatacacagaagggccttcggtggtgaaaagacctgctcctcggacagcaccaagacaagaaaagcatgaaaggactcatgaaatcataccaattaatgtgaataataactacgagcacagacacacaagccacctgggacatgcagtactcccaagtaatgccaggggccccattttgagcagatcaaccagcactggaagtgcagccagctctgggagcaacagcagtgcctcttctgaacagggactgttaggaaggtcaccaccaaccagaccagtccctggtcataggtctgaaagggcaatccggacccagcccaagcaactgattgtggatgacttgaagggttccttgaaagaggacctgacacagcacaagttcatttgtgaacagtgtgggaagtgcaagtgtggagaatgcactgctcccaggaccctaccatcctgtttggcctgtaaccggcagtgcctttgctctgctgagagcatggtggaatatggaacctgcatgtgcttagtcaagggcatcttctaccactgctccaatgacgacgaaggggattcctattcagataatccttgctcctgttcacaatcacactgctgctctagatacctgtgtatgggagccatgtctttatttttaccttgcttactctgttatcctcctgctaaaggatgcctgaagctgtgcaggaggtgttatgactggatccatcgcccagggtgcagatgtaagaactccaacactgtctattgtaagctggagagctgcccctcccggggtcagggtaaaccatcatgatttttggaggtgggttgtacctcctgaacttttagctttcaagttgtggctgttttttgtttttgtttttgtttttgttttctttagaatttttccctgtttcccaccttctcttcccctgttgccaaggtctaactcatggatttttctctttcctcatggatgatcttcagcaagagtggactgggaagctgcacctggctcccactttcaacaagagcctctgccatccacttgagggtattgagagccagtgggcttttgtgtagcctttttgttctgcaagcaactttctaaagttgtgtacatgaacatacacccacatccagactacagtgatttagagttgttttgattgggtaccgtgggagcagggaaattggttttttaaaaagcaactgtttaattgcttaaataagctatgtattaaatctgtctccagttagggctatcttcctagcataggccccttaagtagcatgggggatatattttttgctataacgtaaaaattttcctttaaccactgccctctccttctttctccttcaaggttctttccccctcagttttgttgttgtcttactctggagatgccaagtgtattttttctttctatgtaattttagattcgccttacaatgtaaatcttcacattggagataatattggttggaccttgcccatcttcactctagccttcgtatttgtgaaggactcagccaccttccttcttcaccccatgcttctcaccaaatttttgttgtcattgagggcacttggataactcaagttgatatttatagctgatcaatctatatgtgtcacagaactatgctgcctaaagtgatcttggctccttaatggtccttttggccccttggatagttaacagctgagtaattctaatctcttctgtgttttccttgccttaaccacaaattgtggtgctttttgtatattttatgtataaatcacaaagttgaattctgactatttttaagacaaaagtctgttaaacttttttattgtaaagaatatttattatgcgaatctctattattttatggtatttattgcaaaagactgttgaaatgtactcatgtttgaatataacaaaatatcaatacttaacggaaaataaggtgacacgaagaaagtacatatgttaactataatgcagaaaatatattaattaatga

SEQ ID NO: 464158 - DNA, 2013 bp, Homo sapiens
gagtggaggtggaggtggaggcaaggagctgaaattctgcgtagccggagtgagaccgctctgcaaaccactgcgtgctttgcagagtgattatcagcacagttccctgccctggataaggaacagctacagtcgctgttaaatgtgcctgaaaagcaatttgcaatctttgcattaggcatttcggccgtggaaccccaggctcggaggactgggtgtgagcgctgcccgggagaggctgacctgccgggaccggagtgcccggggacgctgtgcccccacttgcccaacgtgcggaatcggctaagcgcgtcggcctgcgcggggcacaagggacgacgcccgcctttctctctccgagaaggatccccaaacctcactctcttcactcctccccgctaaaaaaaaaaaaaaaaagaaaagggatttcagatgcatgccaggtttccactgattgccagaactcgagatcactacacatggatccccaaaatcaacatggcagtggcagttcgttagttgtgatccagcagccttctttggatagccgtcagagattagactatgagagagagattcagcctactgctattttgtccttagaccagatcaaggccataagaggcagcaatgaatacacagaagggccttcggtggtgaaaagacctgctcctcggacagcaccaagacaagaaaagcatgaaaggactcatgaaatcataccaattaatgtgaataataactacgagcacagacacacaagccacctgggacatgcagtactcccaagtaatgccaggggccccattttgagcagatcaaccagcactggaagtgcagccagctctgggagcaacagcagtgcctcttctgaacagggactgttaggaaggtcaccaccaaccagaccagtccctggtcataggtctgaaagggcaatccggacccagcccaagcaactgattgtggatgacttgaagggttccttgaaagaggacctgacacagcacaagttcatttgtgaacagtgtgggaagtgcaagtgtggagaatgcactgctcccaggaccctaccatcctgtttggcctgtaaccggcagtgcctttgctctgctgagagcatggtggaatatggaacctgcatgtgcttagtcaagggcatcttctaccactgctccaatgacgacgaaggggattcctattcagataatccttgctcctgttcacaatcacactgctgctctagatacctgtgtatgggagccatgtctttatttttaccttgcttactctgttatcctcctgctaaaggatgcctgaagctgtgcaggaggtgttatgactggatccatcgcccagggtgcagatgtaagaactccaacactgtctattgtaagctggagagctgcccctcccggggtcagggtaaaccatcatgatttttggaggtgggttgtacctcctgaacttttagctttcaagttgtggctgttttttgtttttgtttttgtttttgttttctttagaatttttccctgtttcccaccttctcttcccctgttgccaaggtctaactcatggatttttctctttcctcatggatgatcttcagcaagagtggactgggaagctgcacctggctcccactttcaacaagagcctctgccatccacttgagggtattgagagccagtgggcttttgtgtagcctttttgttctgcaagcaactttctaaagttgtgtacatgaacatacacccacatccagactacagtgatttagagttgttttgattgggtaccgtgggagcagggaaattggttttttaaaaagcaactgtttaattgcttaaataagctatgtattaaatctgtctccagttagggctatcttcctagcataggccccttaagtagcatgggggatatattttttgctataacgtaaaaattttcctttaaccactgccctctccttctttctcccctcactctcttcactcctccccgcta

SEQ ID NO: 464159 - DNA, 2609 bp, Homo sapiens
tccatgtcttcaccacagaaaatttttactgcttgtcactaggtgatccttacggattattacagaatccttccatatgccagatactagtctaaatgtttacacaggtcacatgaaatggttgagcatggaccctgttgctacccacagctgccatctgctacagcaactgcatgatcagtgaatccaaggcctgctttgtgactgtatgttggtggtaaaaggagtctgctttaaagcgcataagaatgtcctggcagcattcagccagtattttaggagcctctttcagaattcttcaagccagaagaatgatgtttttcacttggatgttaaaaatgtcagtggcatagggcagatcctggacttcatgtacacttctcatctagatcttaaccaggacaatatacaagtaatgctggacacagcacagtgtttgcaagttcaaaatgttctgagtctgtgtcacacatttttaaaatcagccactgtagtacagccacctggcatgccttgtaatagtacattgtctctacaaagcaccctgaccccagatgccacttgtgttatcagtgaaaactacccccctcatttactgcaggaatgttcagcagatgcacagcagaacaaaacgttggatgaatcgcatccgcatgcttcaccatcagttaatcgtcatcactccgcaggtgaaatctcaaaacaagctcctgatacttcagatggcagctgcacagaactgcctttcaaacagccaaattactattacaaactcataaacttttacagtaagcagtaccataaacacgcagctggtcccagtcaggagagagttgttgagcagccttttgctttcagcacctctacagaccttaccacggtagagagccagccttgtgccgtcagtcattctgaatgcatcctggagtctcccgagcacttaccttccaacttcctggcccagcctgtgaatgactctgccccacaccctgagtcagacgccacatgccaacaacctgtcaagcagatgaggctcaaaaaggccattcatctgaagaagctcaatttcctgaagtcacagaaatacgcagagcaagtatctgaacccaagtcagatgatggtttgacaaagaggttggaatctgctagtaaaaataccctagagaaagctagcagccaaagtgctgaagaaaaagaaagtgaagaagtcgtcagttgtgagaattttaattgcattagtgagacggagaggcctgaagacccggctgccctggaagaccagtcccagacacttcagtcccagagacaatacgcgtgtgaattatgcgggaaaccttttaaacacccaagcaacttggagcttcacaaacggtctcatacaggcaggtaacttgcagactcacttacgacggcattctggtgaaaaaccatacatctgcgagatctgtggaaagagggaaatgttttgggggatcaggtgacctccgcaggcatgtccgcactcacactggggagaagccgtacacatgtgagatctgtaacaagtgctttacccgctctgcggtgctccggcggcacaagaagatgcactgcaaagctggtgacgagagcccagatgtgctggaggagctcagccaagccatcgagacctccgacctcgagaaatctcagagctcagactctttctcccaagacacgtctgtgacgctgatgccagtgtcggttaaactccctgtccacccagtggaaaattctgtggcagaatttgatagccactctggcggctcctattgtaagttacggtccatgatccaacctcatggagttagtgaccaggagaagctgagtttggatcctggtaaacttgccaagccccagatgcagcagacacagcctcaggcctatgcttactcggatgtggacaccccagccggtggcgaaccactgcaggccgatggcatggccatgatccgttcctctctggctgctttggacaaccacggcggtgaccccctgggcagtcgagcatcttccaccacttataggaactcagagggtcagtttttctccagcatgactctctgggggctagcgatgaagacgctgcagaatgaaaacgagttagaccagtgatgtaccgcgcttctccacggtagaggcgtgttctcagtttagcaggctggtgttaaggctgtaggaggacccagtttccccatgacagtgccttctaactagccagagaataggtagcttccctcctgatgatggctcataatctgaagcatcttgagctgggggtgtgagggggagggcctgctggctcaccgtgaggcagccgcgggagggagcgctgacgtcacagaagcgaaggcttgatgctgtctcagcagcctcagctgtgggggggaagcgcgtgtgcatcgtgtcaactactgtacatgttggtcatgtgaaaggaattatatatgtatagtattacaagtatttttgcatttttacaagattgaaatttgtagcattttgtattatttacacagaatttatttgtatatgaaactcataccataatttaattcgaataaatgaaacttttctatatattatatgtt

SEQ ID NO: 464160 - DNA, 1421 bp, Homo sapiens
tgaattttcaaattacattctaggtttgcagcctctggcgacgtccagcgtcacattattattcactcaggagaaaaaccacacttgtgtgacatctgtggtcgagggtttagtaacttcagtaatttgaaggagcacaaaaagacacacacggctgataaagtcttcacctgtgatgagtgtggaaagtcttttaatatgcaaaggaagttagtaaagcacagaattcggcacacgggggagcggccttacagctgctctgcctgcgggaaatgttttgggggatcaggtgacctccgcaggcatgtccgcactcacactggggagaagccgtacacatgtgagatctgtaacaagtgctttacccgctctgcggtgctccggcggcacaagaagatgcactgcaaagctggtgacgagagcccagatgtgctggaggagctcagccaagccatcgagacctccgacctcgagaaatctcagagctcagactctttctcccaagacacgtctgtgacgctgatgccagtgtcggttaaactccctgtccacccagtggaaaattctgtggcagaatttgatagccactctggcggctcctattgtaagttacggtccatgatccaacctcatggagttagtgaccaggagaagctgagtttggatcctggtaaacttgccaagccccagatgcagcagacacagcctcaggcctatgcttactcggatgtggacaccccagccggtggcgaaccactgcaggccgatggcatggccatgatccgttcctctctggctgctttggacaaccacggcggtgaccccctgggcagtcgagcatcttccaccacttataggaactcagagggtcagtttttctccagcatgactctctgggggctagcgatgaagacgctgcagaatgaaaacgagttagaccagtgatgtaccgcgcttctccacggtagaggcgtgttctcagtttagcaggctggtgttaaggctgtaggaggacccagtttccccatgacagtgccttctaactagccagagaataggtagcttccctcctgatgatggctcataatctgaagcatcttgagctgggggtgtgagggggagggcctgctggctcaccgtgaggcagccgcgggagggagcgctgacgtcacagaagcgaaggcttgatgctgtctcagcagcctcagctgtgggggggaagcgcgtgtgcatcgtgtcaactactgtacatgttggtcatgtgaaaggaattatatatgtatagtattacaagtatttttgcatttttacaagattgaaatttgtagcattttgtattatttacacagaatttatttgtatatgaaactcataccataatttaattcgaataaatgaaacttttctatatattatatgtt

SEQ ID NO: 464161 - DNA, 1950 bp, Homo sapiens
gctgatacctccaaggcctatcaggatggtcagccatcccagctgcttctgtcccgctgcagcagcaagaacttcctctgaaagcgcctctgcatgcctccctctgggcgcagctctgtttggggctccttcaggggagggggacgggggttcatccctttcttttgtgctgcctttccctcccacttccgctcccctcgctgctccagtgacctttcacccctcccttggacgtccctcaaaggcagctcccgtggttaataacttcggctggcagccccacataaagccagggccggaaatcattgtcccggggacaatggccgagcagcccaataatgaggtggccatagtgttgtctgacatcccacgttgccctggcaaagggggaggggcagcggggctcgccatgccctcgcctcctggagttgaattcttccgctcgcacatggtggttcctctttctgaggcagcaccacgcacctgtgccctccagtggctgcatttccctgggactgcatgctgaggggatgtcacccagagaccccgacccccctcaacacacagcaccgttgttactttgcctcattttcctgctcccatgtcccagggagccagtcagtaccgcatagtagggcaattgatcggttctggctaatccataagggaggggagatctcagcctgccgcccaatggggagcatgtggcactctggaaagagcatgtgctctagagccagagggcatgggttcaaggtctcccttctacctttctagctgtgtgactttggggaagctgcttgacttctctgagtctccacttactaatctataaaagcagaagtcggatgggagctgagaggaggactctcacaagcaacctcagaggtgaataactgtgacctccaagaagtcaccatgtccttgccactctggtgggtctgggcatcttctgctgggctggcagagtaggaggcagaccaggctgctggaagcagcagctccagggcagtgctctctgcctttatctggtttgagaagcaggatgtagctgtcttccatggggcctgccataatatgaaagggactcatgccttttgacattatccaagatgctgggataggcctggtgactgcccagctcagttcctcattttataagtaatgtttaagagcaatgacccactcctactttcagcaaagaggtgcacatagcatagacccatagaagaggaaggatctgagaaggagtttgaaaaaagtgtaggagaggctgcgagaaaacaaggcaggtgtcctggctgagggcaggaaggagacattgcgatggaaattgtgccccattttcttggaggattgggaagaggacctgtggactgggcggcccacacaactgctgtaacctcaggcagttttcaagcagattgaccttcctgctggaacacggcacatgagggttgcttggccttgcctccaccatgcctgacactggcgctctgctgggaggaaaaagcttgctctgttgctggctgtgtggaacagagagggaagtggcagacagtctgggcccagcacttgggtatcgtgctctagccatgcgactcatctctccagttcagacctgcccctggaaaaaagagcccagacctcatcatgaatgctttcctaggagaaaatgaacagctggacaatgctcctggtcagtaggcctgaaggatgctgggatgcagccctcaagatggaacagccaggatgccaagtatccctcttgcccagatcctaaggcactttttctactgatccatattggcctcaggagatgtctcaacacagcaccccagccaatggagctgccacataagatgaactcttgatcatctctaaactagagagttaaactcaacactagcaaacgactttgggtttatgcatatgtcatgttttctctgg

SEQ ID NO: 464162 - DNA, 724 bp, Homo sapiens
gttcctcattttataagtaatgtttaagagcaatgacccactcctactttcagcaaagaggtgcacatagcatagacccatagaagaggaaggatctgagaaggagtttgaaaaaagtgtaggagaggctgcgagaaaacaaggcaggtgtcctggctgagggcaggaaggagacattgcgatggaaattgtgccccattttcttggaggattgggaagaggacctgtggactgggcggcccacacaactgctgtaacctcaggcagttttcaagcagattgaccttcctgctggaacacggcacatgaggtgaagttctcctctacccaggtctgtccttagcaccttatgcagggtttaacccccatgggcataaacagggtgtgtatctggggtggtttggggattaggtcccatgagcactgggacctgaagatgcttggtctagagaagggacggtgtttggtctgggaaacatgggggtcatgtttaatattatatagacagtcacatgggatatttaattagcaatgtggaatttagagagaggcaggtttcacttcacctttgggaagtactaggttctaacacacctccctcgcctggaaagagattgaactaccacagattgaatcccttgggaggaaggaatttcagtccctgaatgtggacagctgaggctggatgagaacagagagatgtcagatgtccaagcttctgtgt

SEQ ID NO: 464163 - DNA, 1971 bp, Homo sapiens
gctgatacctccaaggcctatcaggatggtcagccatcccagctgcttctgtcccgctgcagcagcaagaacttcctctgaaagcgcctctgcatgcctccctctgggcgcagctctgtttggggctccttcaggggagggggacgggggttcatccctttcttttgtgctgcctttccctcccacttccgctcccctcgctgctccagtgacctttcacccctcccttggacgtccctcaaaggcagctcccgtggttaataacttcggctggcagccccacataaagccagggccggaaatcattgtcccggggacaatggccgagcagcccaataatgaggtggccatagtgttgtctgacatcccacgttgccctggcaaagggggaggggcagcggggctcgccatgccctcgcctcctggagttgaattcttccgctcgcacatggtggttcctctttctgaggcagcaccacgcacctgtgccctccagtggctgcatttccctgggactgcatgctgaggggatgtcacccagagaccccgacccccctcaacacacagcaccgttgttactttgcctcattttcctgctcccatgtcccagggagccagtcagtaccgcatagtagggcaattgatcggttctggctaatccataagggaggggagatctcagcctgccgcccaatggggagcatgtggcactctggaaagagcatgtgctctagagccagagggcatgggttcaaggtctcccttctacctttctagctgtgtgactttggggaagctgcttgacttctctgagtctccacttactaatctataaaagcagaagtcggatgggagctgagaggaggactctcacaagcaacctcagaggtgaataactgtgacctccaagaagtcaccatgtccttgccactctggtgggtctgggcatcttctgctgggctggcagagtaggaggcagaccaggctgctggaagcagcagctccagggcagtgctctctgcctttatctggtttgagaagcaggatgtagctgtcttccatggggcctgccataatatgaaagggactcatgccttttgacattatccaagatgctgggataggcctggtgactgcccagctcagttcctcattttataagtaatgtttaagagcaatgacccactcctactttcagcaaagaggtgcacatagcatagacccatagaagaggaaggatctgagaaggagtttgaaaaaagtgtaggagaggctgcgagaaaacaaggcaggtgtcctggctgagggcaggaaggagacattgcgatggaaattgtgccccattttcttggaggattgggaagaggacctgtggactgggcggcccacacaactgctgtaacctcaggcagttttcaagcagattgaccttcctgctggaacacggcacatgaggtgaagttctcctctacccagggttgcttggccttgcctccaccatgcctgacactggcgctctgctgggaggaaaaagcttgctctgttgctggctgtgtggaacagagagggaagtggcagacagtctgggcccagcacttgggtatcgtgctctagccatgcgactcatctctccagttcagacctgcccctggaaaaaagagcccagacctcatcatgaatgctttcctaggagaaaatgaacagctggacaatgctcctggtcagtaggcctgaaggatgctgggatgcagccctcaagatggaacagccaggatgccaagtatccctcttgcccagatcctaaggcactttttctactgatccatattggcctcaggagatgtctcaacacagcaccccagccaatggagctgccacataagatgaactcttgatcatctctaaactagagagttaaactcaacactagcaaacgactttgggtttatgcatatgtcatgttttctctgg

SEQ ID NO: 464164 - DNA, 760 bp, Homo sapiens
tgagttcatgtcctttgtagggacatggatgaagctggaaaccatcattctcagcaaactattgcaagaacagaaaaccaaacaccgcatgttctcactcataggtgggaattgaccaatgagaacacttggacacaggaaggggaacatcacacacccccagggcctgtttctcctgtggctgcagccagaggtagtcaagactggaacattcaaaatggcatctccctggagacagatcaaaagctggaatcttcctctggcagctatcttcaaaagtaccacctccaacactggggatcaaatttaagcacggtatttgaagaagacaaacatccaaaaaatggcaaggatcttaagaaaatttttcatgataatctgagtggaccttacttgaattcattgaaagagtttaagtgtggaactggaggggaaaaaaaaagtcactatggattacagcttcatctcctgcccaagagataacagcctgacctttctggaagcctgccttatagacttagaacttgtctattgagccaccagagtggtaactcaacacttgatcttccacccaaacatgttccttgcccagtctacaccagcattattttatgtgatcccacccttgtcttttccaatttcagctacaataaagcacaagcataattctttataactcccttgtttaaaacctttcacatttggcttttcatatttaacattaattttggtacctatcacatggcctacaagaccctac

SEQ ID NO: 464165 - DNA, 795 bp, Homo sapiens
  misc_feature (6)..(6): n is a, c, g, or t
  misc_feature (8)..(9): n is a, c, g, or t
  misc_feature (11)..(12): n is a, c, g, or t
  misc_feature (14)..(14): n is a, c, g, or t
aaaatnanntnntnagggttaagccactgggtctgcggtgctctgccatggcagccccgcaaactaatccagatgctgagagaatgtacaagttttttgtttggtttgtttcattggtaggtctcactgagaaaaatgacatcagaacaaagacctgtggaagagtcagttatataaatatttgggggcaggagcattctggaagaggaaaaagcaatccccaaagccctgatctggaaggaggccagggaggtttgatacatagagcattagaagatgaggttagaaaggttggaacagcgaggcagtggcagatcacaggagagaagggttctcagtggatgcagggccgtactgtgcaccaatgggatattttgaaaaactgtgaggaattttggcattactatgattggggtggtggtaatgttagtgggcaggcaacatttatgttaaaagaatagccatgctcaggacccttccacccagcaaagtattttttctacaatcaatgtgacttttaaatgccctgctgctcattcatggagatgtaacactttataaccttttatgctaacttctaaactccactaatggcaaaataggttatgggatcaactcttcattaaacaagtaaacattctggataaatatatttgatcatatttggggaatctttgctaatactttttcaagtatttttctgcctgatagtttctctctttgacttctaaaagtccaatttcatgtaagttagatgtcttgacattatttcatgggtcactgatgttctgttta

SEQ ID NO: 464166 - DNA, 646 bp, Homo sapiens
  misc_feature (24)..(24): n is a, c, g, or t
cctagctgcaacgactctcttaanatccaccgctacacgcccactttcaaaggacttaacttgattttgaatgaaaagacatgcagaaatgttaacgcatttcctcaaagttacagggaggtggccaagatggtcgactagaagcagctagtgtgcgtggctctctcggagaggggcaaaaggggcaggtaaattcagcaccttcaactgaaacatctaagtacttgcattgggactaatagaggaaacaactcaacccatggagaatggagaaaagccaggcaggatgacggcccacgcaggcatgacacagagacaaagtaacctccccagcccagcgaagtgccttcaatggtgatacctccaggtacaggaaaatctgaggtgactagagactgaagtgggcccccagcatacctcagcagccctacagaaaagtggccagatgtacattggtgcccacatttcctcaccagacagttcctctgggactgggcttccagccacctcttgccagagctgagtgagtagaaacttggcaactccctggacagagcctccaagggcaactgaaagcctctctgccactgcctctgcagtggaactgctcttgcttcccttggagtaatgaagtagcaaagacccc

SEQ ID NO: 464167 - DNA, 1258 bp, Homo sapiens
  misc_feature (24)..(24): n is a, c, g, or t
cctagctgcaacgactctcttaanatccaccgctacacgcccactttcaaaggacttaacttgattttgaatgaaaagacatgcagaaatgttaacgcatttcctcaaagttacagggaggtggccaagatggtcgactagaagcagctagtgtgcgtggctctctcggagaggggcaaaaggggcaggtaaattcagcaccttcaactgaaacatctaagtacttgcattgggactaatagaggaaacaactcaacccatggagaatggagaaaagccaggcaggatgacggcccacgcaggcatgacacagagacaaagtaacctccccagcccagcgaagtgccttcaatggtgatacctccaggttggggaagaaacataaggactgagatcaccggagagatacagtgggcagcccaggagtgccaagccaccttctacagccagcactcaatgggagaggaacccacactttcagagagcattgagaaagaaaacagttacaactgagaggaaacaggggagccacatagctggacaagagtctaccagctgaccagtatgcctaagtgccacctactggatcacaccccaaagcttcaacacaaaaaatactttgctagcatactttcttccaaaaccagagacaaaaaatcagcttcaaataaaaaccttgcacaaagcctcggcctgggtatatgtgcacaacttaaccaggccaagctggctgcaatgacaggaatagaatttggaatttggctaggaacaaagatcatcaagtttcaacaggaaggcaaaacccaatctaaggaaaataagaatcacaataaggcaatacagggggtgaaggacaaaatagccagtataaaaaggaacctaataggtctgacagagctgaataacgcaaaacaagaatttcacaatgcaatcacaagtattaacagcagaataaaccaagctgataaaagaatctcagaacttaaagactggttaactgaaataagacagtcagacaaaaataaaggcagtgaacagcagagtgggggaaaatagatttgtttttattcagcaaattatctgtgtcagagtctttcttagtcaacatttaaaaatgaactcaatttattcctttcaataacttttttgagatttaatgaagttttaagtttgaaaagaagcaggcaaggctaccacaatgaaagaagtaaacaacattctcaaagcaccctattcatgatttttaaaatgtgctatc

SEQ ID NO: 464168 - DNA, 4315 bp, Homo sapiens
tggcagtctcatcaccatgctggaacaagcaagtgccagcccatcttttcactcattgtcttatttcctcaaggtccaaattctagggaatgaattcagacaatccagcttgatccatatgcccaacccttgccttcccggagaccctgatgagtatgagcctaccttggaagccacagttcctccaggactaagggacattcacactcacatccacaaaccgtcaagttctgtaacagcactaatagcaggaagcttttctccaactttgaccaaagaagctaaggcaagagagactcggccaccagggaaggacccagctctgctgcaggaaggggagagaacggagtcgggttgtacttttactcagaagcacaacgaccatctaacagaggacagagtcatcagggacacgctaagaagatggtgggtggcctccaggacggcggcttccagggccagcgcttccgcgggctcctcctcgtagtctgacagaaactgcagaaagtaatgagggtgggcacccatcagccagcccaaggttccaggccgccgcagccgttccacgctattaggtgtctggatggcaggagtgactgatttataggctcctgcagagtggcccatgtgagacccagcctgggaagagaggtggcctgtcctggatggaatgaccacagatccccttccagagagaaggacacagatacagttactgctgtggcctcctgtttaccactttacagttctgcaaaatctctctactctccttcgttacataacaagagccaagcgcggggatgtgtccctttcggagacagcaacgtggccagagggctctagctccaaaaggacttactccttggccagtcggcaagtcttgaacatgttcttcatgtgacacagctggacccgcagcagctgaaaagaaagagaggggggcaggagtgggagggagatgtgagaagaggaatccagtgtgggaagcccagggcctttaaaccctggggttctagaagccttgcatgctgcacccagagcagactgtcctacgctctgacaactggctccagactgtcctatgctctgactcgacacctggcttcagattgtcccacactctgactgacaactggcttcagactgtcctacgctctaactcgacacctggcttcagactgtcccacactctgactgacagctggcttcagactgtcccacgctctaactcgacaactggttccagactgtcctatgctctaactcgacacctggcttcagactgtcccacactctgactgacaactggcttcagactgtcctacgctctaactcgacacctggcttcagactgtcccacactctgactgacagctggcttcagactgtcccacgctctaactcgacaactggttccagactgtcctatgctctaactcgacacctggcttctgactgtcccacactctgactgacaactggcttcagactgtcctacgctctaactcgacacctggcttcagactgtcccacactctgacagctggcttcagactgtcccacgctctaactcgacaactggcttcagactgttgtatgctctaactcgatacctggcttcagactgtcccacactctgactgacaactggctccagactgtcctatgctctgacaactggcttcagactgtcctatgctctaactcgacaactggcttcagactgtcctatgctctaacaactggcttcagactgtcctacactctgacaactggcttcagactgtcctacgctctaactcgtcaactggcttcagactgtcctatgctctaactgacaactggcttcagactgtcctacgctctaactgacaactggctccagactgtcctacgctctaacaactggcttcagactgtcctacgctctgactgacaactggcttcagactgtcctacactctgacaactggctccagactgtcctacgctctgacaactggctccagactgtcctacgctctaactgacaactggcttcagattgtcctacgctctgacaactggctccagactgtcgtatgctctaactgacaactggcttcagactgtcctacgctctaactgacaactggctccagactgtcctacgctctaacaactggcttcagactgtcctacgctctgacaactggctccagactgtcgtacgctctaactgacaactggcttcagactgtcctacgctctaactgacaactggctccagactgtcctacgctctaacaactggcttcagactgtcctacgctctgacaactggctccagactgtcgtatgctctaactgacaactggcttcagactgtcctacgctctaactcgtcaactggcttcagactgtcctacgctctgacaactggctccagactgtcctacgctctgacaactggcttcagactgtcctgtgctctaactgacaactggcttcagactgtcctatgctctgacaactggcttcagactgtcctatgctctaactcgacaagtggcttcagactgtcctacgctctgacaactggcttcagactgtcctacgctctaactcgacaagtggcttcagactgtcctacgctctgacaactggctccagactgtcctatgctctgacaactggcttcagactgtcctacgctctgactgacaactggcttcagcctgtcctacgctctgactgacaactggctttagactgtcctacgctctaacttgtcaactggcttcagactgtcctacgctctaactgacaactggcttcagactgtcctacgctctgacaactggctccagactgtcctacgctctgacaactggctccagactgtcctacgctctaactgacaactggctccagactgtcctacgctctgacaactggctccagactgtcctatgctctgaccactggctccagactgtcctacgctctgacaactggcttcagactgtcctacgctctaactgacaactggcttcagactgtcctacgctctgacaactggctccagactgtcctatgctctaactgacaactggctccagactgtcctacgctctgacaactggctccagactgtcctacgctctgacaactggcttcagactgtcctacgctctaactgacaactggctccagactgtcctacgctctgacaactggctccagactgtcctacgctctgacaactggctccagactgtcctgtgctctgacaactggcttcagactgtcctacgctctgacaactggctccagactgtcctacgctctgacaactggctccagactgtcctacgctctaactgacaactggcttcagattgtcctgtgctctgacaactggcttcagactgtcctacgctctgacaactggcttcagactgtcctacgctctaactgacaactggcttcagactgtcctgtgctctgacaactggcttcagactgtcctacgctctgacaactggctccagactgtcctacgctctgacaactggctccagactgtcctacgctctaactgacaactggctccagactgtcctgtgctctaactgacaactggcttcagactgtcctgtgctctgacaactggcttcagactgtcctacgctctgacaactggctccagactgtcctacgctctgacaactggctccagactgtcctacgctctaactgacaactggctccagactgtcctgtgctctaactgacaactggcttcagactgtcctacgctctaactcgacaagtggcttcagactgtcctacgctctaactgacaactggctccagactgtcctacgctctaactcgacaagtggcttcagactgtcctacgctctaactgacaactggcttcagactgtcttacgctctaactgacaactggcttcagactgtcctatgctctaacttgctctaactcactctgacaactggcttcagagtgccctctagtcagggaaggcccctccgccaggtctgtctgcccgagtcacataagcagtctgggcagaggagtgctccgaaattccaatttcttactcgatacccgattcctcattcattcactaatgtttttagtgaaggaagaaattctgcttttgccctcaagtgctatctacagcttcctagctgccattgccacgtttgaggctccaactagacagataacctgggaaatgggaagagattaagaaagtacatagtgagggcatgaacggagagacggttatagctttgacactgc

SEQ ID NO: 464169 - DNA, 957 bp, Homo sapiens
gtaagtgtatatgtttgtctcagatctacgcctagagtggaatagccacggcggtgtcccaccaggaggcccgagccacagcagcctcccggtgggacgccgccaccccccggtgctacgcatggtgctggaggcgctgcaggctggggagcagcgccggggcacgtcggtggcagctatcaagctctacatcctgcacaagtacccaacagtggacgtcctccgcttcaagtacctgctgaagcaggcgctggccactggcatgcgccgtggcctcctcgccaggcccctcaactccaaagccaggggggccactggcagcttcaaagaccaggcggctaagcagggagaagagccagaggggcgtcaggtgtctgatgcggtgtgctggcagttgaggggtgaagttagttcccaagcacaagaagaaaatccagcccaggaagatggcccccgcgacggctcccaggagagcgggtgaggccaaggggaagggccccaagaaaccaagtgaggccaaggaggaccctcccaacgtgggcaaggtgaaaaaggcagccaagaggccagcaaaggtgcagaagcctcctcccaagccaggcgcagccacagagaaggctcgcaagcaaggcggcgcggccaaggacaccagggcacagtcgggagaggctaggaaggtgccccccaagccagacaaggccatgcgggcaccttccagtgctggtgggctcagcaggaaggcaaaggccaaaggcagcaggagcagccaaggtagttgtgtgacttgtagggggtggtgtggggatgggggtcttgacagccactggagcgggggcggggagccagctctggagaggggtttccttatctagtgcatgtgtcctgagtgctgggcttgacctggagagagagaactcatggtagctggttgggggaaggaggcagacatttcaaggg

SEQ ID NO: 464170 - DNA, 2565 bp, Homo sapiens
gcatccgcaagatctctctggaccagctcgggtgcagggcctctgcgggagccctcctagacctctgcggcttctcctctaacatggccgactcggaaaaccaggggcctgcggagcctagccaggcggcggcagcggcggaggcagcggcggaggaggtaatggcggaaggcggtgcgcagggtggagactgtgacagcgcggctggtgaccctgacagcgcggctggtcagatggctgaggagccccagacccctgcagagaatgccccaaagccgaaaaatgactttatcgagagcctgcctaattcggtgaaatgccgagtcctggccctcaaaaagctgcagaagcgatgcgataagatagaagccaaatttgataaggaatttcaggctctggaaaaaaagtataatgacatctataagcccctactcgccaagatccaagagctcaccggcgagatggaggggtgtgcatggaccttggagggggaggaggaggaggaagaggagtacgaggatgacgaggaggagggggaagacgaggaggaggaggaggctgcggcagaggctgccgcgggggccaaacatgacgatgcccacgccgagatgcctgatgacgccaagaagtaaggggggcagagatggatgaagagaaagcccacgaagaaaaaagcctggttttgtttttcccagaatatcgatggacttaaaaaggctcaggtttttgaccaaaatacaatgtgaatttattctgacattcctaaaatagattaaattaaagcaattagatcctggccagctcgattcaaatttgactttcattttgaacataataaatatatcaaaaggtgttaaagaaaactgaattaaacccaaaattatgttttcatggtctcttctctgaggattgaggtttacaaagggtgttagcagatgcgaagtaaagaacgtcactttgaaacccattcatcacacagcatacgctacacatggaacacccaagccatgactgaacacgttctcagtgcttaattcttaaatttctttactcatgacatttcgcagtgcagagaaggcagaacccaagaaaaacgtcatctttgagactttgcttttgtaacgcagacatcagctttacacttcacaggagattgatggcattgaggaagattgcaatggagatcatgacactactgttaataaggccaggaaaactgccatttcaagttctgaaaaatgttttgagtatttgaatttagagaaacaacatggttccaagaaggagggtgtaaaacctgtaaaatactgtcaacatatgtattcattagttacaatctcatgtttgtgttttcttagtactgtctatttacaaacacgtaaaaaataccccaaatatgtttaagtattaaatcactttacctagcgttttagaaatattaatttacttgaagagatgtagaatgtagcaaattatgtaaagcatgtgtatccagcgttatgtactttgcgccttgtgacgtctttctgtcatgtagcttttagggtttagctgtgaaaatcatcagaactcttcactgaagctaatgtttggaaaaaatacatacttgaagaaccaatccaagtgtgtgcccctacccccagctcagaagtagaaagggtttaagtttgcttgtattagctgtgccttcattattttgctatgtaaatgtgacatattaattataaaatggtgcataatcaaattttactgcttgaggacagatgcatacagtaaggatttttaggaagaatatatttaatgtaaagactcttagcttctgtgtgggttttgaattatgtgtgagccagtgatctataaagaaacataagcttaaagttgtttatcactgtggtgttaataaaacagtattttcaaaaaatatatataaaagactcggtactgtgactgcctgcattcaaatcccagctctgcctcctattagtaatgtaccttaggcaactcagctaatactctcagtggccagtttctcctcatctacaaaagggaataggaatagtcccttcctcatgggttactatgaagagcaaatggattaatacatataaatcctatagaatagcatccaaaccatgaaaggataaaaaaggctatttcaactttatgtttgcttcattctgaatgaagcagaaagttttttttaaaaactggactccagaaaaattaaaaaatcagatgccatttgcttccttttcccctgaagggttaaaattacaaagaagcaaaattatattgctttatcctagggaatggaaggcagcactgacctgttgctaatcacaacagattgttgagtacaaacaaaccttaaggtaaagttaatcttcattatgctcaggccaaccaaaagagaaaatcagaataatacgttacatacaaagttctgattatcttaatcatatgattatcttaatagagaaaaaatctaataaaatttaatattgatttcttatatccaggaatgagagaaactatcattttactatttttctggttccagtaaaa

SEQ ID NO: 464171 - DNA, 540 bp, Homo sapiens
ggtacaagtgacaagaacgattctgtttcgaacacagccacagaaataaaagatgaacaaaaatctgggacagtgtcttctcagaaacaaccggccttgaaggatacaagtgacaagaacgattctgtttcgaacacagccacagaaataaaagatgaacaaaaatctgggacagtgcttcctgctgttgaacagtgtttaaacaggagtctctacagaccggatgctgttgcacagcctgtgacagaggatgagtttgctttggaatctgagattatttcaaaactatacatcccaaagagaaagattatttctccacgatctatagaagatgtgcttcctcctgttgaagaggctgttgacaggtgtctctacctactggaccgttttgcacaggctgtgacaaaggataagtttgctttggaatctgagaatatttcagaaccatactttacaaacagaaggactatttctcaacaatctgcagaaaagttagatgctgcatgtggcattgccaaaacagactgcaccttctcccag

SEQ ID NO: 464172 - DNA, 426 bp, Homo sapiens
catttttgaactaatttatgaatatgaaagaaagaaacatgaagagctttctataaatagcaatccaggtaagatttctgatagtgaattactcttgatggtactaccatagataaaaaagaataaagatgttttgattacaaaaaagcagtttaaaaaaatcactgtttaaattgcacacatttaaaaaatacttagtagtctagattttataattatttaaaaagttaattgtaggtaatttataatctcagtattgtatgaaaaaaattattatttaattatggttcctaatattctagatgatctttttgtgtaaataagaaaacaaatttttaagttattatgttgtatttttttatagtcacatgataatgaattagactttttatataattagaacttctatttaatttgtaaaataaa

SEQ ID NO: 464173 - DNA, 2809 bp, Homo sapiens
agggcggtttctctgcctcgggcctgttgggcagggccggctaaggtgcgcgtgctcgctggttctaacccttctgttgggcgtttctgctgagaggcgggaggcgctgagagtctgtgcgaaggtccgtggacagactgctttgcctgttgttgctcttcggaggcggcgatccccgaaggcgagctgaaatacggctgcaggctacaatttgcagccgaccattatggatgacaaggagccgaagaggtggcccaccctcagggaccgcttgtgctcggatggcttcttatttccccaataccccattaaaccgtatcatctgaaggggatccacagagctgtcttctatcgtgatctggaggaactgaagttcgttctgctcacgcgttatgacatcaataagagagacaggaaggaaaggaccgccctacatttggcctgtgccactggccaaccggaaatggtacatctcctggtgtccagaagatgtgagcttaacctctgcgaccgtgaagacaggacacctctgatcaaggctgtacaactgaggcaggaggcttgtgcaactcttctgctgcaaaatggcgccgatccaaatattacggatgtctttggaaggactgctctgcactacgctgtgtataatgaagatacatccatgatagaaaaacttctttcatatggtgcaaatattgaagaatgcagcgaggatgaatatccgccactgttccttgctgtgagtcaaagaaaagtgaaaatggtggaatttttattaaagaaaaaagcaaatataaatgccgttgattatcttggcagatcagccctcatacatgctgttactcttggagaaaaagatatagtcattcttcttctgcagcacaatattgatgtgttttctcgagatgtgtatggaaagcttgcagaagattatgccagcgaggctaagaacagagtcatttttgaactaatttatgaatatgaaagaaagaaacatgaagagctttctataaatagcaatccagtgtcttctcagaaacaaccagccttgaaggctacaagtggcaaggaagattctatctcgaatatagccacagaaataaaggatggacaaaaatctgggacagtgtcttctcagaaacaaccggccttgaaggatacaagtgacaagaacgattctgtttcgaacacagccacagaaataaaagatgaacaaaaatctgggacagtgcttcctgctgttgaacagtgtttaaacaggagtctctacagaccggatgctgttgcacagcctgtgacagaggatgagtttgctttggaatctgagattatttcaaaactatacatcccaaagagaaagattatttctccacgatctatagaagatgtgcttcctcctgttgaagaggctgttgacaggtgtctctacctactggaccgttttgcacaggctgtgacaaaggataagtttgctttggaatctgagaatatttcagaaccatactttacaaacagaaggactatttctcaacaatctgcagaaaagttgtcttctcagaaacaaccagctgagaaggctacaagtgacgacaaagattctgtttcaaatatagccacagaaataaaggagggaccaatatctgggacagtgtcttctcagaaacaaccagctgagaaggttatatttaaaaagaaagtttctcttttgaatattgccacaagaataacgggcggtgggaaatctggaacagtgtcttctcagaaacaaccaccctcaaaggctacaagtgacaagacagattctgctttgaatatagctacagaaataaaggatggactacaatgtgggacagtgtcttctcagaaacaaccagccttgaaggctacaactgacgaggaagattctgtttcgaatatagccacagaaataaaggatggagaaaaatctgggacagtgtcttctcagaaacaaccagccttgaaggctacaactgacgaggaagattctgttttgaatatagccacagaaataaaggatggagaaaaatctgagacagtgtcttctcagaaacaaccagccttgaaggctacaactgacgaggaagattctgtttcgattatagccacagaaataaaggacggagaaaaatctgggacagtgtcttctcggaaaaaaccagccttgaaggctacaagtgatgagaaagattctttttcgaatataaccagagaaaaaaaggatggagaaatatctaggacagtgtcttctcagaaaccaccagccttgaaggctacaagtgacgaggaagattctgttttgagtatagccagagaagaaaaggatggagaaaaatctaggacagtgtacttctgtcaccttctggtccccagagacaaagtagaagccatcaaagcctccactaatacaggcaggaggacagaggttgatgctaacaccgtgtgaatgtatggataactttatcatatttacatgtgagtgattatgtatcccttttgcttttcagtgtcttctcggaaaaaagcagccttgaaggctacaagtgatgagaaagattctttttcaaatataaccagagaaagaaaggatggagaaacatctaggacaggtaactttgcaaaacacatttaatgtcatgttcagtccagataagaagttctcttccccgaataaatcagtggggggctggtcgaaactgcacattctgattcagtaggcctgagattcttcatttctaataagttcttgggttatgctgatgctgctggtctggaacatgatcttcactgt

SEQ ID NO: 464174 - DNA, 1204 bp, Homo sapiens
agggcggtttctctgcctcgggcctgttgggcagggccggctaaggtgcgcgtgctcgctggttctaacccttctgttgggcgtttctgctgagaggcgggaggcgctgagagtctgtgcgaaggtccgtggacagactgctttgcctgttgttgctcttcggaggcggcgatccccgaaggcgagctgaaatacggctgcaggctacaatttgcagccgaccattatggatgacaaggagccgaagaggtggcccaccctcagggaccgcttgtgctcggatggcttcttatttccccaataccccattaaaccgtatcatctgaaggggatccacagagctgtcttctatcgtgatctggaggaactgaagttcgttctgctcacgcgttatgacatcaataagagagacaggaaggaaaggaccgccctacatttggcctgtgccactggccaaccggaaatggtacatctcctggtgtccagaagatgtgagcttaacctctgcgaccgtgaagacaggacacctctgatcaaggctgtacaactgaggcaggaggcttgtgcaactcttctgctgcaaaatggcgccgatccaaatattacggatgtctttggaaggactgctctgcactacgctgtgtataatgaagatacatccatgatagaaaaacttctttcatatggtgcaaatattgaagaatgcagcgaggatgaatatccgccactgttccttgctgtgagtcaaagaaaagtgaaaatggtggaatttttattaaagaaaaaagcaaatataaatgccgttgattatcttggcagatcagccctcatacatgctgttactcttggagaaaaagatatagtcattcttcttctgcagcacaatattgatgtgttttctcgagatgtgtatggaaagcttgcagaagattatgccagcgaggctaagaacagagttgtcttctcagaaacaaccagccttgaaggctacaagtggcaaggaagattctatctcgaatatagccacagaaataaaggatggacaaaaatctgggacagtgtcttctcagaaacaaccggccttgaaggatacaagtgacaagaacgattctgtttcgaacacagccacagaaataaaagatgaacaaaaatctgggacagtgtcttctcagaaacaaccggtcttgaagaacactgggtaccg

SEQ ID NO: 464175 - DNA, 3420 bp, Homo sapiens
atcgggccgcctccagagccagagtaggctcagagactgcagcgcagctgcgtggtggaagaggatttatggacagaaaaaataaagtgacatacacaaaacagaagatcccaaagaagcaggccctgggacaaggatttggaattggcttggagttaattgaagggagcaacagtacagaagtagcaaatttagataggaaagtgagagggacaataaagggtgcattgacagttaagtcagtgcttgtgagtgctgaggttcgaaacattaattccccagaacttctggctgcctgccctgaacacaggcagaacaggctccaccggccagagaaagccctcagcaaagaattacaggtgctggaagttggaagtgttttaaataggcaccaaaatggcaatctcttcccatgttgtggaaaagacgtcaggccagtagcagacagtgctaggttcaggcttccaatattcttacaccaactttcccagtgaaaagaaaaaaaagaagccactttttcaaccactcaaatgaaattccagggaggattctgttgccttggtatccctacacctcttataccaacatggccagagagatggggttctctgatagctagagactggctcatctaactaccctgagttgaatttctcacaaggaagaactgttcagttagcagaaggaaagtgaaagaaagtgtaaagggaagccagaaattttatcttgcttagaagttaaagagtatgcacatgaaggtaaatatttgaaataggaattttgggctaatatggaaggacgtgtcttcattagagtttaatattagcaaacaaataacatacccaattgtttcagcagaaaatcactctgtacactgagtttggaggtcctcattcttgtaggttttgcatataatcacactctgtttatttcccctgaagttcatggaaacagaaatgtacatcatcattatgacacctgcaggatgcactcctaagagaagactacctgaaaggagtgtacactggtctagcagttgagatcagctagtgttccatctatcttctgtcatgtcagggaagactctctgatcctctcataatttacctattgttgatttcctgaatctttttaaatcctttgcaactgaagatggtctctccatcagagaagcaattaaccaaatgcctgactacagcgtatatagcatctgttataaaagcatgaaaggttaacttaaatcctggcacacaaaggagatgtcagaccagaacaaatcagcatggaaatacctggaggagatacaaggttaaggtggagcatatgtacagtcaagaggatgttcatgactagtggaatgtgtttttcagattgcaaagactggaaggtgcaggtgacaaggagattaaacaaggtcacttgttttctttccttctctgaaataaagaagaagtggccgtatcacacaatttcgacccatgggatataaatggaagtcgactgtgatttttcccagtcattgctttctgttaatgagatctgttttatttctcttttcttttttcgtcctactaaaaatgcatgtgattgtcatagctgaaacagccttgttacttcgaagagaaaactagcaaacatagtagctaggccatgtgatactgctgaactagtcatgaaaatggactaaaacactctggcttagggtaataacctgcaagttactcattccaattgaaaaatgagataagcatgaattatataaagtcatgtctaccattaatatttgataagaccattaagcatttttgcatcatatcatgcttagatttctcttaccaaagtctttgatccatttttcaatcacttccattttcttactaactaaagacaccaaactagaatgtctcttagtgcagggagtttgctttctccataggggatatggccattgggaagtacatctgttcttgctgtttgaggtttctttgttagcttattcctcccgcacaaccagtatcaattgtcccctgtgcatatactcacttcatttctgccaaattttgccagatgttagttgcgttactgagacaagaagatggccaatatccaaagtcccagatcaggtatctcctgccaatgctcaccttaatttctaggggatacaggtatacagaaaatccccctatatagcaactcacagtgacaatttcagtgtcaagccagttttatcctagtatgctgttatatttgcatataataaaggtgcctagcataatatctttgctgtctccaaacccaggattataatatttaagtctttttagtttattttccaatttttttcacatctatgcatctaagtgaaaataaatgtgatgggattgatgtaaatagcaaatgccattacatctagaccatgaatttctaattaaaaaagtcagaatgccaagaagagaaagttgtgtagatctcattgttttgagaagactagtaaaggacacagccagacagagatgagctttcagggggaagccaggagaataaatttgctttaattgctcccctttcttccccagatctcttctaagatgtcttgatcgactgaccccaaagccagagggtaccaggtcaaaaagcaaggtactaagggggttgggggtaaatttggaatacctgatagaagacatctcttattacttccctttcaaaattcagtcaatgaaaactcacccatgtttatgtgcctgttattgcactaaaactggatatacttcagtaaatgaagctgactcatagtctagtccatgggtcacctggtgggcagtgtagcattataaaatgaaaaagtgaaatcaataagtgctagtactagagggcaagaacatatgcagaataaataaacagaaatcacaaatgaagtattattctgttttgtttgtattttcacaacagatggttgaatgaaaaactccaataaccacagaagactgatttaataatggaatactatcagtaaagctcatttagaatctgtaattagatttcatccttgattatatgtgcaaatacctcctaagaaaataaccgtttaatagcttaattttggtttagaagccatttccagactttgaatctaatgttctaaatggtttctaaatttttgtgtagtatgatattctatgaaaacaatatgcattattaagttaaaacttattatttcttacattatttctaagaaaacaaacaatactgacattagagagaagcaaagtttctatagaaaacctattacactgtggtataaatcaagatgaacctgcagacatctattttaggtatgtattaaagttaatgtaataagactggcaccccaaatgctactattaaaagttttatatcaatgacaatgctattactact

SEQ ID NO: 464176 - DNA, 952 bp, Homo sapiens
ctttggagtctagctaacacagcatcttggatgcactcctaagagaagactacctgaaaggagtgtacactggtctagcagttgagatcagctagtgttccatctatcttctgtcatgtggaggagttcttgctctgtcacctagtctggaatgcaagggcacaatcatagctcactgcagcctcatactcctggactcaaatgatcctcctgcctcaccctcctgagtagttgggactacaggctatactggttattgtggatccaaaaatcctaggacacagactttgccctcaaattatttactgcatagtgggtggcctgaaaagcaaacataagcactaaatatggaaaaatgcaaaaggcaatgggaccataaaaggaacagatctcttctaagatgtcttgatcgactgaccccaaagccagagggtaccaggtcaaaaagcaagaaaacaaacaatactgacattagagagaagcaaagtttctatagaaaacctattacactgtggtataaatcaagatgaacctgcagacatctattttagtttggaagtctggaaaagttcaagattggccatctgcagctggtgagagcctcaggctgcttcccctcatggtggaaggtgaaggggagctggtgtgtgcagagattacatgcttttctaggtcatcattctaggctttgttgaagcatgcatttttggcatgagggtggcagcctttgcactatgtcatggctgaggagttaggatctggagggtgatgaaagcaaaggtgctgctggttactcttggttcatctagcaatagatgatctgaatgttagagttcgccaaatattgttcctgggcagtctttgctctaccaaatcaactttctccatgggggagctagaagtcaccccacattctccgccatggccagctctacattctaagaggtaaaaa

SEQ ID NO: 464177 - DNA, 654 bp, Homo sapiens
gagactttcttactataaatcgtaaatgttaaagactggccccaaagctaagccaaccaaccaccaattcatccattcagcgaacatttgccatacattaaccaagaggaatggtaaaaatcactgtgttctctgcaaagttttgattaatgggaaaaaggattttggtctcttcacacagatgcgtatgacatttggtgctgaagaccagggtcagagggactgcttcaagagaccagttccctgtcctcaccctcactctgtgaagagatccacctacaacctccggtcctcagaccaaccagcccaaggaacatctcaccaatttcaaatcagatggattctcgctctgttgcccaggctggagtccagtggcgccatctgcaagctccgcctcctgggttcacgccattctcctgcctcagcctccccagcagctgggactacaggcgcccgccaccatgcccggctaatttttggtatttttagtagagacggggtttcaccctgttagccaggatggtctccatctcctgacctcgtgatccacccgcctcggcctcccaaagtgctgggattacaggcgtgagccactgcgcccagcctaggtatttcaatagaagtggaataaagccaatttattgtctttgaaaa

SEQ ID NO: 464178 - DNA, 699 bp, Homo sapiens
gaagctgttgctgttgctagacgacgggaactagctctcgtcacttcctcagcccgccgtctgcccactcctctagccggaacctgggggcccggagccggggtaggcacagagttgtcctcggaggtccaggacagcggccagcccggcggcgggagtcagggccacgccacctgcagggaagaacccgagtcgaagcgggaagatggctggtctcttcacacagatgcgtatgacatttggtgctgaagaccagggtcagagggactgcttcaagagaccagttccctgtcctcaccctcactctgtgaagagatccacctacaacctccggtcctcagaccaaccagcccaaggaacatctcaccaatttcaaatcagatggattctcgctctgttgcccaggctggagtccagtggcgccatctgcaagctccgcctcctgggttcacgccattctcctgcctcagcctccccagcagctgggactacaggcgcccgccaccatgcccggctaatttttggtatttttagtagagacggggtttcaccctgttagccaggatggtctccatctcctgacctcgtgatccacccgcctcggcctcccaaagtgctgggattacaggcgtgagccactgcgcccagcctaggtatttcaatagaagtggaataaagccaatttattgtctttgaaaa

SEQ ID NO: 464179 - DNA, 1579 bp, Homo sapiens
  misc_feature (84)..(84): n is a, c, g, or t
tacccgagccttaacctttcatggaccagaaggattccagagctcttgccctaggtcctggggcagcgatgactcactgcagcnccccctcccacttcgccaagctgccgtctccgcccacccccaaacaatctcgacagcgcatttcgggagccacggctccgggcgctttgctgggggctaaaggggtttatccctttccttgaatcccagcaggctagaactaccccctcccagtcttcaggcttgcacgctctccacccgatccttccattgaaaggagagaaggaaggatgtgcttgggaactttaagacccacgaacgacagcgcactgatggagcagcccagtgtctggggcaaagtcctcgaggttcattcattcaggaagcctctgaccagcctttaccatgcgctgagtgagaagctgaggataaggaaagagcaagacccccaagaaaccctgatgtctggctgaaagccgaagcatgacgcaactttgctatatttctctccaacaaggatttgtatattttcgctttctcctcaagtaacacctggacctggtcctttcccctcaaacgctgagggctcagtctccaagttcctttatgaaacagggtgtaccatcagagacgcaggtattccccacatctgtaggagatggaagggagagaatcagagaaagaagagtcccaggcaagcaagaagctgcgggagaatatgcagcaataaattcaagtgccatttgctcttcaccaactctccggctcaggtatttattgaaacctgctttgtgctgggcaatgtgccagatgttggggataaaatgttggatctttttcatctacttcaatcaaaaccacgtatcacaacagactgaaggcagaacagatatgatcatcaagctgtcttctgttaatccagatgttaaatgtaaaacagtgctactctttgtactaaatgctttattttggaaaatatcattatttctcttaaaaatgtgctatttatgttaacataggagtttattgttatttttgagtgaataaagcaatatttttaaatttcttagttttaagattgaatacagtaaatattgataggtataatacatataaataaaactctttggggtccttaatactttttaggagtgtaaggggttcctgagagcaaaattttgaggatcctacctagtgcatgagaacatgggctctggagccaggcctgcctgggtatatcctattatcgctgggttttttttttaattttattttacgtttaggggtacatgtgcaggtttgttatgtagataataaactcatgtcatggggatttgttgtacagattattttgttacccagcctctgaaaggagtgtacttgcattgtatggacaaaggaagttactttgaaattattcctagctctgccatagatttgctctttggatttgaacttagatactttttagaatttgctcactctgatcaagtgttttgattatgaacgttagcagcaggcatccagttgcattcagctttccaagcaaatatttacagagccccttctgtgcaat

SEQ ID NO: 464180 - DNA, 832 bp, Homo sapiens
  misc_feature (84)..(84): n is a, c, g, or t
tacccgagccttaacctttcatggaccagaaggattccagagctcttgccctaggtcctggggcagcgatgactcactgcagcnccccctcccacttcgccaagctgccgtctccgcccacccccaaacaatctcgacagcgcatttcgggagccacggctccgggcgctttgctgggggctaaaggggtttatccctttccttgaatcccagcaggctagaactaccccctcccagtcttcaggcttgcacgctctccacccgatccttccattgaaaggagagaaggaaggatgtgcttgggaactttaagacccacgaacgacagcgcactgatggagcagcccagtgtctggggcaaagtcctcgaggttcattcattcaggaagcctctgaccagcctttaccatgcgctgagtgagaagctgaggataaggaaagagcaagacccccaagaaaccctgatgtctggctgaaagccgaagcatgacgcaactttgctatatttctctccaacaaggatttgtatattttcgctttctcctcaagtaacacctggacctggtcctttcccctcaaacgctgagggctcagtctccaagttcctttatgaaacagggtgtaccatcagagacgcaggtatttattgaaacctgctttgtgctgggcaatgtgccagatgttggggataaaatggtgagcagacagatcctgtgcctgtctttattgagcttggagcctagtatgtatgacaaactttaatcaaataatcatatattggaatattgcagctgcgtttcacttccaggtaccgagctgattgtatagctat

SEQ ID NO: 464181 - DNA, 1200 bp, Homo sapiens
  misc_feature (84)..(84): n is a, c, g, or t
tacccgagccttaacctttcatggaccagaaggattccagagctcttgccctaggtcctggggcagcgatgactcactgcagcnccccctcccacttcgccaagctgccgtctccgcccacccccaaacaatctcgacagcgcatttcgggagccacggctccgggcgctttgctgggggctaaaggggtttatccctttccttgaatcccagcaggctagaactaccccctcccagtcttcaggcttgcacgctctccacccgatccttccattgaaaggagagaaggaaggatgtgcttgggaactttaagacccacgaacgacagcgcactgatggagcagcccagtgtctggggcaaagtcctcgaggttcattcattcaggaagcctctgaccagcctttaccatgcgctgagtgagaagctgaggataaggaaagagcaagacccccaagaaaccctgatgtctggctgaaagccgaagcatgacgcaactttgctatatttctctccaacaaggatttgtatattttcgctttctcctcaagtaacacctggacctggtcctttcccctcaaacgctgagggctcagtctccaagttcctttatgaaacagggtgtaccatcagagacgcaggagacttcagaaatgaagatgcaaagacaacaggggaaaccatatatgtttatggacagtcatgccaaagtatgattggaagacaaaaagatttcttgcaatttcactgctcactaaacatctccatcaaagggtacctgggttggggcaccgccgtgtgggaaggcgaggaaggaaaccgacgaatcggcagtttccattaacctgtagacaactctggtaactaggttagtacggggaactgtcgacacatcagttattcagactattctgagctgtcaaccattgcttgttacaccctcctcccattagcatagactcggaagaatgcccctatttgactggcggaattgtgcctgcaccacgactgggtcatgcatatcggggcccttaaactgttgttcttcattggcactcccaccgaattcgcgggaaaggttctcttatcccagataaaatttacacttaggaagggcactaaccagacctttgggtgagacatttcctttgggggcaaaaattgggcccgacaaaatattacaacgactgtcctgttggtcg

SEQ ID NO: 464182 - DNA, 551 bp, Homo sapiens
acagcatcttcaggcagcaacaatcttcagggggagacctcatggcctatgacagaagagggagacctggagaccgttacgacggcatggttggtttcagtgctgatgaaacttgggactctgcaatagatacatggagcccatcagaatggcagatggcttatgaaccacagggtggctccggatatgattattcctatgcagggggtcgtggctcatatggtgatcttggtggacctattattactacacaagtaactattcccaaagatttggctggatctattattggcaaaggtggtctgcagattaaacaaatccgtcatgagtcgggagcttcgatcaaaattgatgagcctttagaaggattggaagattggatcattaccattagagaaacacaggaccagatacagaatgcacagtatttgctgcagaacagtgtgaagcagtgtgcagatgttgaaggagtataatgcaagatatttttttcttttttatagtgtgacgcagtattctggaaagtttttctaagactagtgaagaactac

SEQ ID NO: 464183 - DNA, 1290 bp, Homo sapiens
  misc_feature (2)..(2): n is a, c, g, or t
  misc_feature (7)..(8): n is a, c, g, or t
  misc_feature (11)..(12): n is a, c, g, or t
tntaaannatnnagaaacactgatgagatggttgaattacgcattctgcttcagaccaagaatgctggggcagtgattggaaaaggaggcaagaatatcaaggctctccgtacagactacaatgccagtgtttcagtcccagacagcagtggccccgagcacatattgagtatcagtgctggtattgacacaattggagaaattctgaagaaaatcatccctaccttggaagagggcctgcagtttccatcacccactgcaaccagccagctgccgctcgaatctgttgctgtggaatgcttaagttaccaacactataaaggaagtgactttgactgcgagttgaggctgttgattcatcagagtctagcaggaggaattattggggtcgaaggtgctaaaatcaaagaacttcgagagaacactcaaaccaccatcaagcttttccaggaatgctgtccttattccactgacaagagacgtgcacagccttatgatcccaatttttatgatgaaacctatgattatggtggttttacaattatgtttgatgaccgctgtggacgcccagtgggatttcccatgcggggaagaggtggttttgacagaatgcctcctggtcagggtgggcgtcccatgcctccatctagaagagattatgatgatatgagccctcgtcaaggaccacctccacctcctccaggacaaggtggtgagggtggtagcagagctcggaatcttcctcttcctcctccaccaccacctagagggggagacctcatggcctatgacagaagagggagacctggagaccgttacgacggcatggttggtttcagtgctgatgaaacttgggactctgcaatagatacatggagcccatcagaatggcagatggcttatgaaccacagggtggctccggatatgattattcctatgcagggggtcgtggctcatatggtgatcttggtggacctattattactacacaagtaactattcccaaagatttggctggatctattattggcaaaggtggtctgcagattaaacaaatccgtcatgagtcgggagcttcgatcaaaattgatgagcctttagaaggattggaagattggatcattaccattagagaaacacaggaccagatacagaatgcacagtatttgctgcagaacagtgtgaagcagtgtgcagatgttgaaggagtataatgcaagatatttttttcttttttatagtgtgacgcagtattctggaaagtttttctaagactagtgaagaactac

SEQ ID NO: 464184 - DNA, 785 bp, Homo sapiens
tttttttttaatttgtattgctatttattaaaatattaatatttacataatttattgatataatattcaattgtttgataggtaattaatacattccgactcacccagcaagaacatttttgtggtgacaaggtaaagagtaggatgacaattggatgacccaaaacttagacctcagtaagtgaaaaacgtgttgttatcaatgctcctaacttgtatcattatctaacaagattttccaggcagtggcagctttagaatcctatcttctctcagtttccttttcctagtagctgccagttaggatgccaaccatccctgattttatgtaggatgatgatagccaggggcaaatgaggaagactcacagaaatctaggactaaatataagaattttaaaaatgggagatttttatggtaaagaatgtgaggtttgtagttttttaatctccacaggagaaatgaacaaatgattccatgtaagaacactggaagatactaaattccaccttgatattttccaggaatgtcagtcacatcctcagtcttggttgacttcctgaaagtgtcctctccagtcttgagggacctcctgctccaggaagcctgccctgatgtcccagccagagatggtcctctgaatttcccctggccttcacctggcttctctgggagcacagtcacaattcattgtatattatcactaattggatacttatttcatgtcctgtgttcacagtggtaactagcatgtatacattacttatagtttgataacagccttt

SEQ ID NO: 464185 - DNA, 829 bp, Homo sapiens
tcctttatttagaataactgtgttattttgttgttgtgaggtctaggtaattaatacattccgactcacccagcaagaacatttttgtggtgacaaggtaaagagtaggatgacaattggatgacccaaaacttagacctcactttccttcccagaatgcagatgctatcctggagggcgagctgcccaaatgggatgtggaggcagcagcatgacgacaaaagatgcaatctgaagctggtggagccacaggacgggagctggacagtgagggtttcatggaggccgtgcacaggactgcccccatctgcagggacactgtggttattcagtcttgctgtgcacctaagggcagttgccaagcggtggcagctacaaagctggggaggggctctgtgaaccagggcctcctatggctcctgttgggtttgggccaatgggaggctccaagatacacctcagcctcgcactcttggctcccattcttggtgggtacaggttccccccgccttgtgtctgcaggcctagcactgggaacgacttccttctgagctactttctgagtgcttccaccccttcctggcttccttaatcctacctgcgcctctccaaagggtcccttcattcaattatcttcagtttaaccctttgagctgccatccatttgctgcacacagggacaggtggctcactgcttcacaggcagcaaccatacaactgtggcttgtcttcctacgtcttctgcatctgaaataacaaagaacttccatcagggctcagtgtcaggcagaattaatttcaagtctctattttatttacttcctgcagg

SEQ ID NO: 464186 - DNA, 503 bp, Homo sapiens
tttttttttaatttgtattgctatttattaaaatattaatatttacataatttattgatataatattcaattgtttgataggtaattaatacattccgactcacccagcaagaacatttttgtggtgacaaggtaaagagtaggatgacaattggatgacccaaaacttagacctcagtaagtgaaaaacgtgttgttatcaatgctcctaacttgtatcattatctaacaagattttccaggcagtggcagctttagaatcctatcttctctcagtttccttttcctagtagctgccagttaggatgccaaccatccctgattttatgtaggatgatgatagccaggggcaaacttggtactctgacccgagtcttagggtaaatataaaaatttcccgaatgttattttcttctaaggaaaagggaggggccataattttaaatccaaattccccaaaccccaaaggactcccaatccactcggtttttaaaattacccca

SEQ ID NO: 464187 - DNA, 1222 bp, Homo sapiens
tccaaggttaatcagtgggtgagaagcaggtgcaggaccccaggctattctgttcacaagggtagtgcttttttcatcagacaacacacatctctatggcagtgtccaaatggtgcctaacgtagaagcaagcttaaatgtgtctgactgcggccatcttggctccctcaaggccaccaaagcaagtcctgtggttgcttccttttgctattgcgaagccccttcagagtctactttgtcctactgcagtagcagtgaggcccgtccatcagggatgctgggctatgaaccgggcttcttgtcttgcagccacttccatcatcccagggatacaagttactccaaacctagcttccctgcaattccatttcccacaccaaaacatggaaaggataatgctgacatcccaccagggcctgtggggacaaccgattttgttgtaattaatacattccgactcacccagcaagaacatttttgtggtgacaaggtaaagagtaggatgacaattggatgacccaaaacttagacctcactttccttcccagaatgcagatgctatcctggagggcgagctgcccaaatgggatgtggaggcagcagcatgacgacaaaagatgcaatctgaagctggtggagccacaggacgggagctggacagtgagggtttcatggaggccgtgcacaggactgcccccatctgcagggacactgtggttattcagtcttgctgtgcacctaagggcagttgccaagcggtggcagctacaaagctggggaggggctctgtgaaccagggcctcctatggctcctgttgggtttgggccaatgggaggctccaagatacacctcagcctcgcactcttggctcccattcttggtgggtacaggttccccccgccttgtgtctgcaggcctagcactgggaacgacttccttctgagctactttctgagtgcttccaccccttcctggcttccttaatcctacctgcgcctctccaaagggtcccttcattcaattatcttcagtttaaccctttgagctgccatccatttgctgcacacagggacaggtggctcactgcttcacaggcagcaaccatacaactgtggcttgtcttcctacgtcttctgcatctgaaataacaaagaacttccatcagggctcagtgtcaggcagaattaatttcaagtctctattttatttacttcctgcagg

SEQ ID NO: 464188 - DNA, 731 bp, Homo sapiens
tactctaagcactaaccgcttcctcctccaccttcccttctcagctttccttcccagaatgcagatgctatcctggagggcgagctgcccaaatgggatgtggaggcagcagcatgacgacaaaagatgcaatctgaagctggtggagccacaggacgggagctggacagtgagggtttcatggaggccgtgcacaggactgcccccatctgcagggacactgtggttattcagtcttgctgtgcacctaagggcagttgccaagcggtggcagctacaaagctggggaggggctctgtgaaccagggcctcctatggctcctgttgggtttgggccaatgggaggctccaagatacacctcagcctcgcactcttggctcccattcttggtgggtacaggttccccccgccttgtgtctgcaggcctagcactgggaacgacttccttctgagctactttctgagtgcttccaccccttcctggcttccttaatcctacctgcgcctctccaaagggtcccttcattcaattatcttcagtttaaccctttgagctgccatccatttgctgcacacagggacaggtggctcactgcttcacaggcagcaaccatacaactgtggcttgtcttcctacgtcttctgcatctgaaataacaaagaacttccatcagggctcagtgtcaggcagaattaatttcaagtctctattttatttacttcctgcagg

SEQ ID NO: 464189 - DNA, 2858 bp, Homo sapiens
accccccgctcgggcgccgacggttccgtttccggagtggagggcacgccagggtgtctgaagctgagaccccgggctcgcagtcgccccatgaatttcgagttccgcaactgacgctactgggcggggcttcatggccagggcctcgctcaggcctaagtttccccacctgtgctcaatgcacaggtgcggtgccgcctccagggccggccgagaagagaggccgcacccgcacggggactgcatctcccagagcgccccgcgagcggccgagcggcgggactccatgccctagagtgccccgcgggcggccgggcggcgggactccatgtcctagagtgccccgcgggcggccgggcggcgggactccatgtcctagagtgccccgcgggcggccgggcggcgggactccatgtcctagagtgccccgcgggcggccgggcggcggccgccgcaaccgacaggtccgggactgggcgctgcggcctcgtccgcgcgccggggcgggggcctagctcgacagcttcccggcggctgcgcgatggacagccccgaggtgaccttcactctcgcctatctggtgttcgccgtgtgcttcgtgttcacgcccaacgagttccacgcggcggggctcacggtgcagaacctgctgtcgggctggctgggcagcgaggacgccgccttcgtgcccttccacttgcgccgcacggccgccacgctgttgtgccactcgctgctgccgctcggctactacgtgggcatgtgccttgcggcttcagaaaagcggctccacgccctcagccaggcccctgaggcctggcggctcttcctgctgctggccgtgaccctcccctccatcgcctgcatcctgatctactactggtcccgtgaccggtgggcctgccacccactggcgcgcaccctggccctctacgccctcccacagtctggctggcaggctgttgcctcctctgtcaacactgagttccggcggattgacaagtttgccaccggtgcaccaggtgcccgtgtgattgtgacagacacgtgggtgatgaaggtaaccacctaccgagtgcacgtggcccagcagcaggacgtgcacctgactgtgacggagtctcggcagcatgagctctcgccagactcgaacttgcccgtgcagctcctcaccatccgtgtggccagcaccaaccctgctgtgcaggcctttgacatctggctgaactccactgagtacggggagctctgcgagaagctccgggcacccatccgcagggcagcccatgtggtcatccaccagagcctgggcgacctgttcctggagacatttgcctccctggtagaggtcaacccggcctactcagtgcccagcagccaggagctggaggcctgcataggctgcatgcagacacgtgccagcgtgaagctggtgaagacctgccaggaggcagccacaggcgagtgccagcagtgttactgccgccccatgtggtgcctcacctgcatgggcaagtggttcgccagccgccaggaccccctgcgccctgacacctggctggccagccgcgtgccctgccccacctgccgcgcacgcttctgcatcctggatgtgtgcaccgtgcgctgagtgggctggggccttgaggtgactctgtgtctccccgcaaagccacagggcagggaagggggtggctgggcctcctggctggcaaagggctctacttaaagcacatgatgtagagcaactcgcctctgccctgggtctgcagaaggctgaggacttttggttaaaagcaatcctcatgaaaacaccccaccctgcttggcagccagggtacaagtcctgggcacctcctctttgcctccctcctgcccctttcctgctggtgggggcagatcctgcacacacagacacagcgtctgcccccgagccattccctggagaccctgggtctaccccaggtggtcgtcatctgggccatttgccttacttctctggagcatacccaccctcagttacgtgccagacctggaccgcattctcctgccctgtcctggagctggcccctggctgcctggaggaccctgggtaggtcctgagggtgggatggagaagagggcactgctgtggtgtgggagcagtcctggggcttcctggtggctgtgaccagttgaggggctgttcctgggtggggtggcaatgggaggacaggtcagagcgccctcatttgtggggctgcccctccgggtttctcatcctgtccttggtgcctttttctgcccaacaagtccagggaaggccgaggtctcagactcctgggtaggggtgggggtttgagttgaggaccaaagtgccatagcgacatccagaacacaagcccaccaggggtccagcccaggctacccactcccctagggtctcccaggctcagaaggggatgcacgccccctgtggtcaagcctctggtgggcgtcttgcccagttcctgatggttcaaggggaggggggatgttggccaggccccagggcacagccctgacacaggtgtggctactggaggggccttcatacctgcggccccaaagcccctgggcttggctgtttgaggcagaggtgatggactccgggggcctgacacttgggatttgggaggcttcctagagcgctcagcaggtgaaggcagcaggggccatggccgggagccaggcctagctttgaactgagtttcaagggctgccaaagaggggcagtgggttggggttgtttttactacaaaataagttacttagttttataaagacaaaccgattgtagccaaatgacaccatatttaataaaatttagtctgaagtga

SEQ ID NO: 464190 - DNA, 2975 bp, Homo sapiens
accccccgctcgggcgccgacggttccgtttccggagtggagggcacgccagggtgtctgaagctgagaccccgggctcgcagtcgccccatgaatttcgagttccgcaactgacgctactgggcggggcttcatggccagggcctcgctcaggcctaagtttccccacctgtgctcaatgcacaggtgcggtgccgcctccagggccggccgagaagagaggccgcacccgcacggggactgcatctcccagagcgccccgcgagcggccgagcggcgggactccatgccctagagtgccccgcgggcggccgggcggcgggactccatgtcctagagtgccccgcgggcggccgggcggcgggactccatgtcctagagtgccccgcgggcggccgggcggcgggactccatgtcctagagtgccccgcgggcggccgggcggcggccgccgcaaccgacaggtccgggactgggcgctgcggcctcgtccgcgcgccggggcgggggcctagctcgacagcttcccggcggctgcgcgatggacagccccgaggtgaccttcactctcgcctatctggtgttcgccgtgtgcttcgtgttcacgcccaacgagttccacgcggcggggctcacggtgcagaacctgctgtcgggctggctgggcagcgaggacgccgccttcgtgcccttccacttgcgccgcacggccgccacgctgttgtgccactcgctgctgccgctcggctactacgtgggcatgtgccttgcggcttcagaaaagcggctccacgccctcagccaggcccctgaggcctggcggctcttcctgctgctggccgtgaccctcccctccatcgcctgcatcctgatctactactggtcccgtgaccggtgggcctgccacccactggcgcgcaccctggccctctacgccctcccacagtctggctggcaggctgttgcctcctctgtcaacactgagttccggcggattgacaagtttgccaccggtgcaccaggtgcccgtgtgattgtgacagacacgtgggtgatgaaggtaaccacctaccgagtgcacgtggcccagcagcaggacgtgcacctgactgtgacggagtctcggcagcatgagctctcgccagactcgaacttgcccgtgcagctcctcaccatccgtgtggccagcaccaaccctgctgtgcaggcctttgacatctgggccatctctcctggttggtcctggtgcgacagctgccctgtcactccttggggtgtagcctccatcttccgctccctttgccctgcagaggggcccagcagctctcctccctgcaggctgaactccactgagtacggggagctctgcgagaagctccgggcacccatccgcagggcagcccatgtggtcatccaccagagcctgggcgacctgttcctggagacatttgcctccctggtagaggtcaacccggcctactcagtgcccagcagccaggagctggaggcctgcataggctgcatgcagacacgtgccagcgtgaagctggtgaagacctgccaggaggcagccacaggcgagtgccagcagtgttactgccgccccatgtggtgcctcacctgcatgggcaagtggttcgccagccgccaggaccccctgcgccctgacacctggctggccagccgcgtgccctgccccacctgccgcgcacgcttctgcatcctggatgtgtgcaccgtgcgctgagtgggctggggccttgaggtgactctgtgtctccccgcaaagccacagggcagggaagggggtggctgggcctcctggctggcaaagggctctacttaaagcacatgatgtagagcaactcgcctctgccctgggtctgcagaaggctgaggacttttggttaaaagcaatcctcatgaaaacaccccaccctgcttggcagccagggtacaagtcctgggcacctcctctttgcctccctcctgcccctttcctgctggtgggggcagatcctgcacacacagacacagcgtctgcccccgagccattccctggagaccctgggtctaccccaggtggtcgtcatctgggccatttgccttacttctctggagcatacccaccctcagttacgtgccagacctggaccgcattctcctgccctgtcctggagctggcccctggctgcctggaggaccctgggtaggtcctgagggtgggatggagaagagggcactgctgtggtgtgggagcagtcctggggcttcctggtggctgtgaccagttgaggggctgttcctgggtggggtggcaatgggaggacaggtcagagcgccctcatttgtggggctgcccctccgggtttctcatcctgtccttggtgcctttttctgcccaacaagtccagggaaggccgaggtctcagactcctgggtaggggtgggggtttgagttgaggaccaaagtgccatagcgacatccagaacacaagcccaccaggggtccagcccaggctacccactcccctagggtctcccaggctcagaaggggatgcacgccccctgtggtcaagcctctggtgggcgtcttgcccagttcctgatggttcaaggggaggggggatgttggccaggccccagggcacagccctgacacaggtgtggctactggaggggccttcatacctgcggccccaaagcccctgggcttggctgtttgaggcagaggtgatggactccgggggcctgacacttgggatttgggaggcttcctagagcgctcagcaggtgaaggcagcaggggccatggccgggagccaggcctagctttgaactgagtttcaagggctgccaaagaggggcagtgggttggggttgtttttactacaaaataagttacttagttttataaagacaaaccgattgtagccaaatgacaccatatttaataaaatttagtctgaagtga

SEQ ID NO: 464191 - DNA, 2305 bp, Homo sapiens
tggctaggtagaggctgggtgttgaatcggccgagggtgtgcttcgtgttcacgcccaacgagttccacgcggcggggctcacggtgcagaacctgctgtcgggctggctgggcagcgaggacgccgccttcgtgcccttccacttgcgccgcacggccgccacgctgttgtgccactcgctgctgccgctcggctactacgtgggcatgtgccttgcggcttcagaaaagcggctccacgccctcagccaggcccctgaggcctggcggctcttcctgctgctggccgtgaccctcccctccatcgcctgcatcctgatctactactggtcccgtgaccggtgggcctgccacccactggcgcgcaccctggccctctacgccctcccacagtctggctggcaggctgttgcctcctctgtcaacactgagttccggcggattgacaagtttgccaccggtgcaccaggtgcccgtgtgattgtgacagacacgtgggtgatgaaggtaaccacctaccgagtgcacgtggcccagcagcaggacgtgcacctgactgtgacggagtctcggcagcatgagctctcgccagactcgaacttgcccgtgcagctcctcaccatccgtgtggccagcaccaaccctgctgtgcaggcctttgacatctggctgaactccactgagtacggggagctctgcgagaagctccgggcacccatccgcagggcagcccatgtggtcatccaccagagcctgggcgacctgttcctggagacatttgcctccctggtagaggtcaacccggcctactcagtgcccagcagccaggagctggaggcctgcataggctgcatgcagacacgtgccagcgtgaagctggtgaagacctgccaggaggcagccacaggcgagtgccagcagtgttactgccgccccatgtggtgcctcacctgcatgggcaagtggttcgccagccgccaggaccccctgcgccctgacacctggctggccagccgcgtgccctgccccacctgccgcgcacgcttctgcatcctggatgtgtgcaccgtgcgctgagtgggctggggccttgaggtgactctgtgtctccccgcaaagccacagggcagggaagggggtggctgggcctcctggctggcaaagggctctacttaaagcacatgatgtagagcaactcgcctctgccctgggtctgcagaaggctgaggacttttggttaaaagcaatcctcatgaaaacaccccaccctgcttggcagccagggtacaagtcctgggcacctcctctttgcctccctcctgcccctttcctgctggtgggggcagatcctgcacacacagacacagcgtctgcccccgagccattccctggagaccctgggtctaccccaggtggtcgtcatctgggccatttgccttacttctctggagcatacccaccctcagttacgtgccagacctggaccgcattctcctgccctgtcctggagctggcccctggctgcctggaggaccctgggtaggtcctgagggtgggatggagaagagggcactgctgtggtgtgggagcagtcctggggcttcctggtggctgtgaccagttgaggggctgttcctgggtggggtggcaatgggaggacaggtcagagcgccctcatttgtggggctgcccctccgggtttctcatcctgtccttggtgcctttttctgcccaacaagtccagggaaggccgaggtctcagactcctgggtaggggtgggggtttgagttgaggaccaaagtgccatagcgacatccagaacacaagcccaccaggggtccagcccaggctacccactcccctagggtctcccaggctcagaaggggatgcacgccccctgtggtcaagcctctggtgggcgtcttgcccagttcctgatggttcaaggggaggggggatgttggccaggccccagggcacagccctgacacaggtgtggctactggaggggccttcatacctgcggccccaaagcccctgggcttggctgtttgaggcagaggtgatggactccgggggcctgacacttgggatttgggaggcttcctagagcgctcagcaggtgaaggcagcaggggccatggccgggagccaggcctagctttgaactgagtttcaagggctgccaaagaggggcagtgggttggggttgtttttactacaaaataagttacttagttttataaagacaaaccgattgtagccaaatgacaccatatttaataaaatttagtctgaagtga

SEQ ID NO: 464192 - DNA, 2891 bp, Homo sapiens
accccccgctcgggcgccgacggttccgtttccggagtggagggcacgccagggtgtctgaagctgagaccccgggctcgcagtcgccccatgaatttcgagttccgcaactgacgctactgggcggggcttcatggccagggcctcgctcaggcctaagtttccccacctgtgctcaatgcacaggtgcggtgccgcctccagggccggccgagaagagaggccgcacccgcacggggactgcatctcccagagcgccccgcgagcggccgagcggcgggactccatgccctagagtgccccgcgggcggccgggcggcgggactccatgtcctagagtgccccgcgggcggccgggcggcgggactccatgtcctagagtgccccgcgggcggccgggcggcgggactccatgtcctagagtgccccgcgggcggccgggcggcggccgccgcaaccgacaggtccgggactgggcgctgcggcctcgtccgcgcgccggggcgggggcctagctcgacagcttcccggcggctgcgcgatggacagccccgaggtgaccttcactctcgcctatctggtgttcgccgtgtgcttcgtgttcacgcccaacgagttccacgcggcggggctcacggtgcagaacctgctgtcgggctggctgggcagcgaggacgccgccttcgtgcccttccacttgcgccgcacggccgccacgctgttgtgccactcgctgctgccgctcggctactacgtgggcatgtgccttgcggcttcagaaaagcggctccacgccctcagccaggcccctgaggcctggcggctcttcctgctgctggccgtgaccctcccctccatcgcctgcatcctgatctactactggtcccgtgaccggtgggcctgccacccactggcgcgcaccctggccctctacgccctcccacagtctggctggcaggctgttgcctcctctgtcaacactgagttccggcggattgacaagtttgccaccggtgcaccaggtgcccgtgtgattgtgacagacacgtgggtgatgaaggtaaccacctaccgagtgcacgtggcccagcagcaggacgtgcacctgactgtgacggagtctcggcagcatgagctctcgccagactcgaacttgcccgtgcagctcctcaccatccgtgtggccagcaccaaccctgctgtgcaggcctttgacatctggctgaactccactgagtacggggagctctgcgagaagctccgggcacccatccgcagggcagcccatgtggtcatccaccagagcctgggcgacctgttcctggagacatttgcctccctggtagaggtcaacccggcctactcagtgcccagcagccaggagctggaggcctgcataggctgcatgcagacacgtgccagcgtgaagctggtgaagacctgccaggaggcagccacaggcgagtgccagcagtgttactgccgccccatgtggtgcctcacctgcatgggcaagtggttcgccagccgccaggaccccctgcgccctgacacctggctggccagccgcgtgccctgccccacctgccgcgcacgcttctgcatcctggatgtgtgcaccgtgcgctgagtgggctggggccttgaggtgactctgtgtctccccgcaaagccacagggcagggaagggggtggctgggcctcctggctggcaaagggctctacttaaagcacatgatgtagagcaactcgcctctgccctgggtctgcagaaggctgaggacttttggttaaaagcaatcctcatgaaaacaccccaccctgcttggcagccagggtacaagtcctgggcacctcctctttgcctccctcctgcccctttcctgctggtgggggcagatcctgcacacacagacacagcgtctgcccccgagccattccctggagaccctgggtctaccccaggtggtcgtcatctgggccatttgccttacttctctggagcatacccaccctcagttacgtgccagacctggaccgcattctcctgccctgtcctggagctggcccctggctgcctggaggaccctgggtaggtcctgagggtgggatggagaagagggcactgctgtggtgtgggagcagtcctggggcttcctggtggctgtgaccagttgaggggctgttcctgggtggggtggcaatgggaggacaggtcagagcgccctcatttgtggggctgcccctccgggtttctcatcctgtccttggtgcctttttctgcccaacaagtccagggaaggccgaggtctcagactcctgggtaggggtgggggtttgagttgaggaccaaagtgccatagcgacatccagaacacaagcccaccaggggtccagcccaggctacccactcccctagggtctcccaggctcagaaggggatgcacgccccctgtggtcaagcctctggtgggcgtcttgcccagttcctgatggttcaaggggaggggggatgttggccaggccccagggcacagccctgacacaggtgtggctactggaggggccttcatacctgcggccccaaagcccctgggcttggctgtttgaggcagaggtgatggactccgggggcctgacacttgggatttgggaggcttcctagagcgctcagcaggtgaaggcagcaggggccatggccgggagccaggcctagctttgaactgagtttcaagggctgccaaagaggggcagtgggttggggttgtttttactacaaaataagttacttagttttataaagacaaaccgattgtagccaaatgacaccatatttaataaaatttagtctgaagtgaaaaaaaaaaaagtcgacgcggccgcgaatttag

SEQ ID NO: 464193 - DNA, 2063 bp, Homo sapiens
accccccgctcgggcgccgacggttccgtttccggagtggagggcacgccagggtgtctgaagctgagaccccgggctcgcagtcgccccatgaatttcgagttccgcaactgacgctactgggcggggcttcatggccagggcctcgctcaggcctaagtttccccacctgtgctcaatgcacaggtgcggtgccgcctccagggccggccgagaagagaggccgcacccgcacggggactgcatctcccagagcgccccgcgagcggccgagcggcgggactccatgccctagagtgccccgcgggcggccgggcggcgggactccatgtcctagagtgccccgcgggcggccgggcggcgggactccatgtcctagagtgccccgcgggcggccgggcggcgggactccatgtcctagagtgccccgcgggcggccgggcggcggccgccgcaaccgacaggtccgggactgggcgctgcggcctcgtccgcgcgccggggcgggggcctagctcgacagcttcccggcggctgcgcgatggacagccccgaggtgaccttcactctcgcctatctggtgttcgccgtgtgcttcgtgttcacgcccaacgagttccacgcggcggggctcacggtgcagaacctgctgtcgggctggctgggcagcgaggacgccgccttcgtgcccttccacttgcgccgcacggccgccacgctgttgtgccactcgctgctgccgctcggctactacgtgggcatgtgccttgcggcttcagaaaagcggctccacgccctcagccaggcccctgaggcctggcggctcttcctgctgctggccgtgaccctcccctccatcgcctgcatcctgatctactactggtcccgtgaccggtgggcctgccacccactggcgcgcaccctggccctctacgccctcccacagtctggctggcaggctgttgcctcctctgtcaacactgagttccggcggattgacaagtttgccaccggtgcaccaggtgcccgtgtgattgtgacagacacgtgggtgatgaaggtaaccacctaccgagtgcacgtggcccagcagcaggacgtgcacctgactgtgacggagtctcggcagcatgagctctcgccagactcgaacttgcccgtgcagctcctcaccatccgtgtggccagcaccaaccctgctgtgcaggcctttgacatctggctgaactccactgagtacggggagctctgcgagaagctccgggcacccatccgcagggcagcccatgtggtcatccaccagagcctgggcgacctgttcctggagacatttgcctccctggtagaggtcaacccggcctactcagtgcccagcagccaggagctggaggcctgcataggctgcatgcagacacgtgccagcgtgaagctggtgaagacctgccaggaggcagccacaggcgagtgccagcagtgttactgccgccccatgtggtgcctcacctgcatgggcaagtggttcgccagccgccaggaccccctgcgccctgacacctggctggccagccgcgtgccctgccccacctgccgcgcacgcttctgcatcctggatgtgtgcaccgtgcgctgagtgggctggggccttgaggtgactctgtgtctccccgcaaagccacagggcagggaagggggtggctgggcctcctggctggcaaagggctctacttaaagcacatgatgtagagcaactcgcctctgccctgggtctgcagaaggctgaggacttttggttaaaagcaatcctcatgaaaacaccccaccctgcttggcagccagggtacaagtcctgggcacctcctctgcttcctagagcgctcagcaggtgaaggcagcaggggccatggccgggagccaggcctagctttgaactgagtttcaagggctgccaaagaggggcagtgggttggggttgtttttactacaaaataagttacttagttttataaagacaaaccgattgtagccaaatgacaccatatttaataaaatttagtctgaagtga

SEQ ID NO: 464194 - DNA, 1933 bp, Homo sapiens
accccccgctcgggcgccgacggttccgtttccggagtggagggcacgccagggtgtctgaagctgagaccccgggctcgcagtcgccccatgaatttcgagttccgcaactgacgctactgggcggggcttcatggccagggcctcgctcaggcctaagtttccccacctgtgctcaatgcacaggtgcggtgccgcctccagggccggccgagaagagaggccgcacccgcacggggactgcatctcccagagcgccccgcgagcggccgagcggcgggactccatgccctagagtgccccgcgggcggccgggcggcgggactccatgtcctagagtgccccgcgggcggccgggcggcgggactccatgtcctagagtgccccgcgggcggccgggcggcgggactccatgtcctagagtgccccgcgggcggccgggcggcggccgccgcaaccgacaggtccgggactgggcgctgcggcctcgtccgcgcgccggggcgggggcctagctcgacagcttcccggcggctgcgcgatggacagccccgaggtgaccttcactctcgcctatctggtgttcgccgtgtgcttcgtgttcacgcccaacgagttccacgcggcggggctcacggtgcagaacctgctgtcgggctggctgggcagcgaggacgccgccttcgtgcccttccacttgcgccgcacggccgccacgctgttgtgccactcgctgctgccgctcggctactacgtgggcatgtgccttgcggcttcagaaaagcggctccacgccctcagccaggcccctgaggcctggcggctcttcctgctgctggccgtgaccctcccctccatcgcctgcatcctgatctactactggtcccgtgaccggtgggcctgccacccactggcgcgcaccctggccctctacgccctcccacagtctggctggcaggctgttgcctcctctgtcaacactgagttccggcggattgacaagtttgccaccggtgcaccaggtgcccgtgtgattgtgacagacacgtgggtgatgaaggtaaccacctaccgagtgcacgtggcccagcagcaggacgtgcacctgactgtgacggagtctcggcagcatgagctctcgccagactcgaacttgcccgtgcagctcctcaccatccgtgtggccagcaccaaccctgctgtgcaggcctttgacatctggagctggaggcctgcataggctgcatgcagacacgtgccagcgtgaagctggtgaagacctgccaggaggcagccacaggcgagtgccagcagtgttactgccgccccatgtggtgcctcacctgcatgggcaagtggttcgccagccgccaggaccccctgcgccctgacacctggctggccagccgcgtgccctgccccacctgccgcgcacgcttctgcatcctggatgtgtgcaccgtgcgctgagtgggctggggccttgaggtgactctgtgtctccccgcaaagccacagggcagggaagggggtggctgggcctcctggctggcaaagggctctacttaaagcacatgatgtagagcaactcgcctctgccctgggtctgcagaaggctgaggacttttggttaaaagcaatcctcatgaaaacaccccaccctgcttggcagccagggtacaagtcctgggcacctcctcttccgggggcctgacacttgggatttgggaggcttcctagagcgctcagcaggtgaaggcagcaggggccatggccgggagccaggcctagctttgaactgagtttcaagggctgccaaagaggggcagtgggttggggttgtttttactacaaaataagttacttagttttataaagacaaaccgattgtagccaaatgacaccatatttaataaaatttagtctgaagtga

SEQ ID NO: 464195 - DNA, 1571 bp, Homo sapiens
accccccgctcgggcgccgacggttccgtttccggagtggagggcacgccagggtgtctgaagctgagaccccgggctcgcagtcgccccatgaatttcgagttccgcaactgacgctactgggcggggcttcatggccagggcctcgctcaggcctaagtttccccacctgtgctcaatgcacaggtgcggtgccgcctccagggccggccgagaagagaggccgcacccgcacggggactgcatctcccagagcgccccgcgagcggccgagcggcgggactccatgccctagagtgccccgcgggcggccgggcggcgggactccatgtcctagagtgccccgcgggcggccgggcggcgggactccatgtcctagagtgccccgcgggcggccgggcggcgggactccatgtcctagagtgccccgcgggcggccgggcggcggccgccgcaaccgacaggtccgggactgggcgctgcggcctcgtccgcgcgccggggcgggggcctagctcgacagcttcccggcggctgcgcgatggacagccccgaggtgaccttcactctcgcctatctggtgttcgccgtgtgcttcgtgttcacgcccaacgagttccacgcggcggggctcacggtgcagaacctgctgtcgggctggctgggcagcgaggacgccgccttcgtgcccttccacttgcgccgcacggccgccacgctgttgtgccactcgctgctgccgctcggctactacgtgggcatgtgccttgcggcttcagaaaagcggctccacgccctcagccaggcccctgaggcctggcggctcttcctgctgctggccgtgaccctcccctccatcgcctgcatcctgatctactactggtcccgtgaccggtgggcctgccacccactggcgcgcaccctggccctctacgccctcccacagtctggctggcaggctgttgcctcctctgtcaacactgagttccggcggattgacaagtttgccaccggtgcaccaggtgcccgtgtgattgtgacagacacgtgggtgatgaaggtaaccacctaccgagtgcacgtggcccagcagcaggacgtgcacctgactgtgacggagtctcggcagcatgagctctcgccagactcgaacttgcccgtgcagctcctcaccatccgtgtggccagcaccaaccctgctgtgcaggcctttgacatctggctgaactccactgagtacggggagctctgcgagaagctccgggcacccatccgcagggcagcccatgtggtcatccaccagagcctgggcgacctgttcctggagacatttgcctccctggtagaggtcaacccggcctactcagtgcccagcagccaggagctggaggcctgcataggctgcatgcagacacgtgccagcgcctagctttgaactgagtttcaagggctgccaaagaggggcagtgggttggggttgtttttactacaaaataagttacttagttttataaagacaaaccgattgtagccaaatgacaccatatttaataaaatttagtctgaagtga

SEQ ID NO: 464196 - DNA, 962 bp, Homo sapiens
catccgtgtggccagcaccaaccctgctgtgcaggcctttgacatctggtaagagtgtggtgcctgtggggctgcggagggcacatggcaggccagagccaggctctggcgccacgacccctgggaggtgctgggtgtagctggtgtggactccaacactcctgggcttgtgtgacaccaggcaaggtgtccacaagacaccagtcactgagccctcccgcatagccctccctcgggtccccctgcactcttggcctccccttccactccctggagccacctcccccagattcgtggggagcactcaggacagtgcagccctcaggctggacagctgccttgctcctaggtccgccccgtgcccaggctgggctgtctggcactgggtccgtgggctctggccttagggccatctctcctggttggtcctggtgcgacagctgccctgtcactccttggggtgtagcctccatcttccgctccctttgccctgcagaggggcccagcagctctcctccctgcaggctgaactccactgagtacggggagctctgcgagaagctccgggcacccatccgcagggcagcccatgtggtcatccaccagagcctgggcgacctgttcctggagacatttgcctccctggtagaggtcaacccggcctactcagtgcccagcagccaggtggggggcctgggccagggccgggtggatgggtgggtgcccacgggtgtctgcctgggctcctggtgacgctccacctgcccgcaggagctggaggcctgcataggctgcatgcagacacgtgccagcgtgaagctggtgaagacctgccaggaggcagccacaggcgagtgccagcagtgttactgccgccccatgtggtgcctcacctgcatgggcaagtggttcgccagccgccaggaccccctgcgccctgacacctggctggccagccgcgt

SEQ ID NO: 464197 - DNA, 2387 bp, Homo sapiens
accctgggagctgaccctggaacccgggcagagggccaggtccagggctgtcggggggtggacagcggcctgccactcactttcccctgaggctcaccctgtcctttgcaggctactacgtgggcatgtgccttgcggcttcagaaaagcggctccacgccctcagccaggcccctgaggcctggcggctcttcctgctgctggccgtgaccctcccctccatcgcctgcatcctgatctactactggtcccgtgaccggtgggcctgccacccactggcgcgcaccctggccctctacgccctcccacagtctggctggcaggctgttgcctcctctgtcaacactgagttccggcggattgacaagtttgccaccggtgcaccaggtgcccgtgtgattgtgacagacacgtgggtgatgaaggtaaccacctaccgagtgcacgtggcccagcagcaggacgtgcacctgactgtgacggagtctcggcagcatgagctctcgccagactcgaacttgcccgtgcagctcctcaccatccgtgtggccagcaccaaccctgctgtgcaggcctttgacatctgggccatctctcctggttggtcctggtgcgacagctgccctgtcactccttggggtgtagcctccatcttccgctccctttgccctgcagaggggcccagcagctctcctccctgcaggctgaactccactgagtacggggagctctgcgagaagctccgggcacccatccgcagggcagcccatgtggtcatccaccagagcctgggcgacctgttcctggagacatttgcctccctggtagaggtcaacccggcctactcagtgcccagcagccaggagctggaggcctgcataggctgcatgcagacacgtgccagcgtgaagctggtgaagacctgccaggaggcagccacaggcgagtgccagcagtgttactgccgccccatgtggtgcctcacctgcatgggcaagtggttcgccagccgccaggaccccctgcgccctgacacctggctggccagccgcgtgccctgccccacctgccgcgcacgcttctgcatcctggatgtgtgcaccgtgcgctgagtgggctggggccttgaggtgactctgtgtctccccgcaaagccacagggcagggaagggggtggctgggcctcctggctggcaaagggctctacttaaagcacatgatgtagagcaactcgcctctgccctgggtctgcagaaggctgaggacttttggttaaaagcaatcctcatgaaaacaccccaccctgcttggcagccagggtacaagtcctgggcacctcctctttgcctccctcctgcccctttcctgctggtgggggcagatcctgcacacacagacacagcgtctgcccccgagccattccctggagaccctgggtctaccccaggtggtcgtcatctgggccatttgccttacttctctggagcatacccaccctcagttacgtgccagacctggaccgcattctcctgccctgtcctggagctggcccctggctgcctggaggaccctgggtaggtcctgagggtgggatggagaagagggcactgctgtggtgtgggagcagtcctggggcttcctggtggctgtgaccagttgaggggctgttcctgggtggggtggcaatgggaggacaggtcagagcgccctcatttgtggggctgcccctccgggtttctcatcctgtccttggtgcctttttctgcccaacaagtccagggaaggccgaggtctcagactcctgggtaggggtgggggtttgagttgaggaccaaagtgccatagcgacatccagaacacaagcccaccaggggtccagcccaggctacccactcccctagggtctcccaggctcagaaggggatgcacgccccctgtggtcaagcctctggtgggcgtcttgcccagttcctgatggttcaaggggaggggggatgttggccaggccccagggcacagccctgacacaggtgtggctactggaggggccttcatacctgcggccccaaagcccctgggcttggctgtttgaggcagaggtgatggactccgggggcctgacacttgggatttgggaggcttcctagagcgctcagcaggtgaaggcagcaggggccatggccgggagccaggcctagctttgaactgagtttcaagggctgccaaagaggggcagtgggttggggttgtttttactacaaaataagttacttagttttataaagacaaaccgattgtagccaaatgacaccatatttaataaaatttagtctgaagtgatgtactgtgttttgtgttgcccgatattaaaaccaaacttttgtcat

SEQ ID NO: 464198 - DNA, 2698 bp, Homo sapiens
accccccgctcgggcgccgacggttccgtttccggagtggagggcacgccagggtgtctgaagctgagaccccgggctcgcagtcgccccatgaatttcgagttccgcaactgacgctactgggcggggcttcatggccagggcctcgctcaggcctaagtttccccacctgtgctcaatgcacaggtgcggtgccgcctccagggccggccgagaagagaggccgcacccgcacggggactgcatctcccagagcgccccgcgagcggccgagcggcgggactccatgccctagagtgccccgcgggcggccgggcggcgggactccatgtcctagagtgccccgcgggcggccgggcggcgggactccatgtcctagagtgccccgcgggcggccgggcggcgggactccatgtcctagagtgccccgcgggcggccgggcggcggccgccgcaaccgacaggtccgggactgggcgctgcggcctcgtccgcgcgccggggcgggggcctagctcgacagcttcccggcggctgcgcgatggacagccccgaggtgaccttcactctcgcctatctggtgttcgccgtgtgcttcgtgttcacgcccaacgagttccacgcggcggggctcacggtgcagaacctgctgtcgggctggctgggcagcgaggacgccgccttcgtgcccttccacttgcgccgcacggccgccacgctgttgtgccactcgctgctgccgctcggctactacgtgggcatgtgccttgcggcttcagaaaagcggctccacgccctcagccaggcccctgaggcctggcggctcttcctgctgctggccgtgaccctcccctccatcgcctgcatcctgatctactactggtcccgtgaccggtgggcctgccacccactggcgcgcaccctggccctctacgccctcccacagtctggctggcaggctgttgcctcctctgtcaacactgagttccggcggattgacaagtttgccaccggtgcaccaggtgcccgtgtgattgtgacagacacgtgggtgatgaaggtaaccacctaccgagtgcacgtggcccagcagcaggacgtgcacctgactgtgacggagtctcggcagcatgagctctcgccagactcgaacttgcccgtgcagctcctcaccatccgtgtggccagcaccaaccctgctgtgcaggcctttgacatctggagctggaggcctgcataggctgcatgcagacacgtgccagcgtgaagctggtgaagacctgccaggaggcagccacaggcgagtgccagcagtgttactgccgccccatgtggtgcctcacctgcatgggcaagtggttcgccagccgccaggaccccctgcgccctgacacctggctggccagccgcgtgccctgccccacctgccgcgcacgcttctgcatcctggatgtgtgcaccgtgcgctgagtgggctggggccttgaggtgactctgtgtctccccgcaaagccacagggcagggaagggggtggctgggcctcctggctggcaaagggctctacttaaagcacatgatgtagagcaactcgcctctgccctgggtctgcagaaggctgaggacttttggttaaaagcaatcctcatgaaaacaccccaccctgcttggcagccagggtacaagtcctgggcacctcctctttgcctccctcctgcccctttcctgctggtgggggcagatcctgcacacacagacacagcgtctgcccccgagccattccctggagaccctgggtctaccccaggtggtcgtcatctgggccatttgccttacttctctggagcatacccaccctcagttacgtgccagacctggaccgcattctcctgccctgtcctggagctggcccctggctgcctggaggaccctgggtaggtcctgagggtgggatggagaagagggcactgctgtggtgtgggagcagtcctggggcttcctggtggctgtgaccagttgaggggctgttcctgggtggggtggcaatgggaggacaggtcagagcgccctcatttgtggggctgcccctccgggtttctcatcctgtccttggtgcctttttctgcccaacaagtccagggaaggccgaggtctcagactcctgggtaggggtgggggtttgagttgaggaccaaagtgccatagcgacatccagaacacaagcccaccaggggtccagcccaggctacccactcccctagggtctcccaggctcagaaggggatgcacgccccctgtggtcaagcctctggtgggcgtcttgcccagttcctgatggttcaaggggaggggggatgttggccaggccccagggcacagccctgacacaggtgtggctactggaggggccttcatacctgcggccccaaagcccctgggcttggctgtttgaggcagaggtgatggactccgggggcctgacacttgggatttgggaggcttcctagagcgctcagcaggtgaaggcagcaggggccatggccgggagccaggcctagctttgaactgagtttcaagggctgccaaagaggggcagtgggttggggttgtttttactacaaaataagttacttagttttataaagacaaaccgattgtagccaaatgacaccatatttaataaaatttagtctgaagtga

SEQ ID NO: 464199 - DNA, 2223 bp, Homo sapiens
accctgggagctgaccctggaacccgggcagagggccaggtccagggctgtcggggggtggacagcggcctgccactcactttcccctgaggctcaccctgtcctttgcaggctactacgtgggcatgtgccttgcggcttcagaaaagcggctccacgccctcagccaggcccctgaggcctggcggctcttcctgctgctggccgtgaccctcccctccatcgcctgcatcctgatctactactggtcccgtgaccggtgggcctgccacccactggcgcgcaccctggccctctacgccctcccacagtctggctggcaggctgttgcctcctctgtcaacactgagttccggcggattgacaagtttgccaccggtgcaccaggtgcccgtgtgattgtgacagacacgtgggtgatgaaggtaaccacctaccgagtgcacgtggcccagcagcaggacgtgcacctgactgtgacggagtctcggcagcatgagctctcgccagactcgaacttgcccgtgcagctcctcaccatccgtgtggccagcaccaaccctgctgtgcaggcctttgacatctggctgaactccactgagtacggggagctctgcgagaagctccgggcacccatccgcagggcagcccatgtggtcatccaccagagcctgggcgacctgttcctggagacatttgcctccctggtagaggtcaacccggcctactcagtgcccagcagccaggagctggaggcctgcataggctgcatgcagacacgtgccagcgtgaagctggtgaagacctgccaggaggcagccacaggcgagtgccagcagtgttactgccgccccatgtggtgcctcacctgcatgggcaagtggttcgccagccgccaggaccccctgcgccctgacacctggctggccagccgcgtgccctgccccacctgccgcgcacgcttctgcatcctggatgtgtgcaccgtgcgctgagtgggctggggccttgaggtgactctgtgtctccccgcaaagccacagggcagggaagggggtggctgggcctcctggctggcaaagggctctacttaaagcacatgatgtagagcaactcgcctctgccctgggtctgcagaaggctgaggacttttggttaaaagcaatcctcatgaaaacaccccaccctgcttggcagccagggtacaagtcctgggcacctcctctttgcctccctcctgcccctttcctgctggtgggggcagatcctgcacacacagacacagcgtctgcccccgagccattccctggagaccctgggtctaccccaggtggtcgtcatctgggccatttgccttacttctctggagcatacccaccctcagttacgtgccagacctggaccgcattctcctgccctgtcctggagctggcccctggctgcctggaggaccctgggtaggtcctgagggtgggatggagaagagggcactgctgtggtgtgggagcagtcctggggcttcctggtggctgtgaccagttgaggggctgttcctgggtggggtggcaatgggaggacaggtcagagcgccctcatttgtggggctgcccctccgggtttctcatcctgtccttggtgcctttttctgcccaacaagtccagggaaggccgaggtctcagactcctgggtaggggtgggggtttgagttgaggaccaaagtgccatagcgacatccagaacacaagcccaccaggggtccagcccaggctacccactcccctagggtctcccaggctcagaaggggatgcacgccccctgtggtcaagcctctggtgggcgtcttgcccagttcctgatggttcaaggggaggggggatgttggccaggccccagggcacagccctgacacaggtgtggctactggaggggccttcatacctgcggccccaaagcccctgggcttggctgtttgaggcagaggtgatggactccgggggcctgacacttgggatttgggaggcttcctagagcgctcagcaggtgaaggcagcaggggccatggccgggagccaggcctagctttgaactgagtttcaagggctgccaaagaggggcagtgggttggggttgtttttactacaaaataagttacttagttttataaagacaaaccgattgtagccaaatgacaccatatttaataaaatttagtctgaagtga

SEQ ID NO: 464200 - DNA, 2905 bp, Homo sapiens
accccccgctcgggcgccgacggttccgtttccggagtggagggcacgccagggtgtctgaagctgagaccccgggctcgcagtcgccccatgaatttcgagttccgcaactgacgctactgggcggggcttcatggccagggcctcgctcaggcctaagtttccccacctgtgctcaatgcacaggtgcggtgccgcctccagggccggccgagaagagaggccgcacccgcacggggactgcatctcccagagcgccccgcgagcggccgagcggcgggactccatgccctagagtgccccgcgggcggccgggcggcgggactccatgtcctagagtgccccgcgggcggccgggcggcgggactccatgtcctagagtgccccgcgggcggccgggcggcgggactccatgtcctagagtgccccgcgggcggccgggcggcggccgccgcaaccgacaggtccgggactgggcgctgcggcctcgtccgcgcgccggggcgggggcctagctcgacagcttcccggcggctgcgcgatggacagccccgaggtgaccttcactctcgcctatctggtgttcgccgtgtgcttcgtgttcacgcccaacgagttccacgcggcggggctcacggtgcagaacctgctgtcgggctggctgggcagcgaggacgccgccttcgtgcccttccacttgcgccgcacggccgccacgctgttgtgccactcgctgctgccgctcggctactacgtgggcatgtgccttgcggcttcagaaaagcggctccacgccctcagccaggcccctgaggcctggcggctcttcctgctgctggccgtgaccctcccctccatcgcctgcatcctgatctactactggtcccgtgaccggtgggcctgccacccactggcgcgcaccctggccctctacgccctcccacagtctggctggcaggctgttgcctcctctgtcaacactgagttccggcggattgacaagtttgccaccggtgcaccaggtgcccgtgtgattgtgacagacacgtgggtgatgaaggtaaccacctaccgagtgcacgtggcccagcagcaggacgtgcacctgactgtgacggagtctcggcagcatgagctctcgccagactcgaacttgcccgtgcagctcctcaccatccgtgtggccagcaccaaccctgctgtgcaggcctttgacatctggctgaactccactgagtacggggagctctgcgagaagctccgggcacccatccgcagggcagcccatgtggtcatccaccagagcctgggcgacctgttcctggagacatttgcctccctggtagaggtcaacccggcctactcagtgcccagcagccaggagctggaggcctgcataggctgcatgcagacacgtgccagcgtgaagctggtgaagacctgccaggaggcagccacaggcgagtgccagcagtgttactgccgccccatgtggtgcctcacctgcatgggcaagtggttcgccagccgccaggaccccctgcgccctgacacctggctggccagccgcgtgccctgccccacctgccgcgcacgcttctgcatcctggatgtgtgcaccgtgcgctgagtgggctggggccttgaggtgactctgtgtctccccgcaaagccacagggcagggaagggggtggctgggcctcctggctggcaaagggctctacttaaagcacatgatgtagagcaactcgcctctgccctgggtctgcagaaggctgaggacttttggttaaaagcaatcctcatgaaaacaccccaccctgcttggcagccagggtacaagtcctgggcacctcctctttgcctccctcctgcccctttcctgctggtgggggcagatcctgcacacacagacacagcgtctgcccccgagccattccctggagaccctgggtctaccccaggtggtcgtcatctgggccatttgccttacttctctggagcatacccaccctcagttacgtgccagacctggaccgcattctcctgccctgtcctggagctggcccctggctgcctggaggaccctgggtaggtcctgagggtgggatggagaagagggcactgctgtggtgtgggagcagtcctggggcttcctggtggctgtgaccagttgaggggctgttcctgggtggggtggcaatgggaggacaggtcagagcgccctcatttgtggggctgcccctccgggtttctcatcctgtccttggtgcctttttctgcccaacaagtccagggaaggccgaggtctcagactcctgggtaggggtgggggtttgagttgaggaccaaagtgccatagcgacatccagaacacaagcccaccaggggtccagcccaggctacccactcccctagggtctcccaggctcagaaggggatgcacgccccctgtggtcaagcctctggtgggcgtcttgcccagttcctgatggttcaaggggaggggggatgttggccaggccccagggcacagccctgacacaggtgtggctactggaggggccttcatacctgcggccccaaagcccctgggcttggctgtttgaggcagaggtgatggactccgggggcctgacacttgggatttgggaggcttcctagagcgctcagcaggtgaaggcagcaggggccatggccgggagccaggcctagctttgaactgagtttcaagggctgccaaagaggggcagtgggttggggttgtttttactacaaaataagttacttagttttataaagacaaaccgattgtagccaaatgacaccatatttaataaaatttagtctgaagtgatgtactgtgttttgtgttgcccgatattaaaaccaaacttttgtcat

SEQ ID NO: 464201 - DNA, 2093 bp, Homo sapiens
accccccgctcgggcgccgacggttccgtttccggagtggagggcacgccagggtgtctgaagctgagaccccgggctcgcagtcgccccatgaatttcgagttccgcaactgacgctactgggcggggcttcatggccagggcctcgctcaggcctaagtttccccacctgtgctcaatgcacaggtgcggtgccgcctccagggccggccgagaagagaggccgcacccgcacggggactgcatctcccagagcgccccgcgagcggccgagcggcgggactccatgccctagagtgccccgcgggcggccgggcggcgggactccatgtcctagagtgccccgcgggcggccgggcggcgggactccatgtcctagagtgccccgcgggcggccgggcggcgggactccatgtcctagagtgccccgcgggcggccgggcggcggccgccgcaaccgacaggtccgggactgggcgctgcggcctcgtccgcgcgccggggcgggggcctagctcgacagcttcccggcggctgcgcgatggacagccccgaggtgaccttcactctcgcctatctggtgttcgccgtgtgcttcgtgttcacgcccaacgagttccacgcggcggggctcacggtgcagaacctgctgtcgggctggctgggcagcgaggacgccgccttcgtgcccttccacttgcgccgcacggccgccacgctgttgtgccactcgctgctgccgctcggctactacgtgggcatgtgccttgcggcttcagaaaagcggctccacgccctcagccaggcccctgaggcctggcggctcttcctgctgctggccgtgaccctcccctccatcgcctgcatcctgatctactactggtcccgtgaccggtgggcctgccacccactggcgcgcaccctggccctctacgccctcccacagtctggctggcaggctgttgcctcctctgtcaacactgagttccggcggattgacaagtttgccaccggtgcaccaggtgcccgtgtgattgtgacagacacgtgggtgatgaaggtaaccacctaccgagtgcacgtggcccagcagcaggacgtgcacctgactgtgacggagtctcggcagcatgagctctcgccagactcgaacttgcccgtgcagctcctcaccatccgtgtggccagcaccaaccctgctgtgcaggcctttgacatctggctgaactccactgagtacggggagctctgcgagaagctccgggcacccatccgcagggcagcccatgtggtcatccaccagagcctgggcgacctgttcctggagacatttgcctccctggtagaggtcaacccggcctactcagtgcccagcagccaggagctggaggcctgcataggctgcatgcagacacgtgccagcgtgaagctggtgaagacctgccaggaggcagccacaggcgagtgccagcagtgttactgccgccccatgtggtgcctcacctgcatgggcaagtggttcgccagccgccaggaccccctgcgccctgacacctggctggccagccgcgtgccctgccccacctgccgcgcacgcttctgcatcctggatgtgtgcaccgtgcgctgagtgggctggggccttgaggtgactctgtgtctccccgcaaagccacagggcagggaagggggtggctgggcctcctggctggcaaagggctctacttaaagcacatgatgtagagcaactcgcctctgccctgggtctgcagaaggctgaggacttttggttaaaagcaatcctcatgaaaacaccccaccctgcttggcagccagggtacaagtcctgggcacctcctcttccgggggcctgacacttgggatttgggaggcttcctagagcgctcagcaggtgaaggcagcaggggccatggccgggagccaggcctagctttgaactgagtttcaagggctgccaaagaggggcagtgggttggggttgtttttactacaaaataagttacttagttttataaagacaaaccgattgtagccaaatgacaccatatttaataaaatttagtctgaagtga

SEQ ID NO: 464202 - DNA, 971 bp, Homo sapiens
accccccgctcgggcgccgacggttccgtttccggagtggagggcacgccagggtgtctgaagctgagaccccgggctcgcagtcgccccatgaatttcgagttccgcaactgacgctactgggcggggcttcatggccagggcctcgctcaggcctaagtttccccacctgtgctcaatgcacaggtgcggtgccgcctccagggccggccgagaagagaggccgcacccgcacggggactgcatctcccagagcgccccgcgagcggccgagcggcgggactccatgccctagagtgccccgcgggcggccgggcggcgggactccatgtcctagagtgccccgcgggcggccgggcggcgggactccatgtcctagagtgccccgcgggcggccgggcggcgggactccatgtcctagagtgccccgcgggcggccgggcggcggccgccgcaaccgacaggtccgggactgggcgctgcggcctcgtccgcgcgccggggcgggggcctagctcgacagcttcccggcggctgcgcgatggacagccccgaggtgaccttcactctcgcctatctggtgttcgccgtgtgcttcgtgttcacgcccaacgagttccacgcggcggggctcacggtgcagaacctgctgtcgggctggctgggcagcgaggacgccgccttcgtgcccttccacttgcgccgcacggccgccacgctgttgtgccactcgctgctgccgctcggtgaggctgctcgggccggccggccgcatcctctcctgcgcagggcttgctgggaggtcaggaggaggcctccgccagctccccgaggccccgaaagcgcctgggcgcagctggggagaggcgccggtcctcatccagagggaccgcggcgtgggctgagcgcgcttaggggtgccgccggcactgacttgcaggtgacgggaacccaagttcagaaccttgggc

SEQ ID NO: 464203 - DNA, 420 bp, Homo sapiens
  misc_feature (21)..(21): n is a, c, g, or t
  misc_feature (23)..(23): n is a, c, g, or t
cctatttccgagtagaaagtngntttaaacctgaagtgtaagagaaagattatgcccctaaatgatttttttttcctcctaatgtattagggcaaaatccctcaatgatgatacctgctcctcaaagaatataaaattgatgagaaaaactttgtggtggttatggtgacccaaagtaagtttcaacctcattctgtatatctttatgcatgtaggtctttttaaaaatgatgatcacaagtccacacaatggacacagtttatacacatccatagtggtgtacacttaactactatgaaaggtttttaagaatttaccttaagtgaaacataaagttattaatgttttacattaattacacattaaactataatatagttttaataaaattttatgtaaattaaaacaaaagaaaaaaa

SEQ ID NO: 464204 - DNA, 1312 bp, Homo sapiens
gaggccgcagaccctgcccagcagccagcacctggcacaggccctgcagccgagctgtacagtggcaccatgcaggtcaccctgaagaccctccagccgcagaccttgacctgcaagatagacattgaccccgaggagacagtgaaagcactgaaagagaagacggaatctgaaaaggggaaagttgcctctctggtagcaggtcaaacattaatttatgcaggcaaaatccctcaatgatgatacctgctcctcaaagaatataaaattgatgagaaaaactttgtggtggttatggtgaccgaacccaaagcagtgtccacaccagcactagctacaactcagcagtcagctcctgccagcactacagcagttacttcctccacaacaacaactgtggctcaggctccaacccctgtccctgctttggctccccctttcacacctgcattcatcactccagtatcagtgacagtgtcctctgaacctgcaactgctagtgcaactaaacaagagaaacctgcagaaaagccagcagagacaccagtggctactagcctgacatcaactcatagtacatcaggagattcttcttggtcaaacctttttgaagatgcaacgagtgcacttgtgatgggtcagtcttacgataatatggtaactgagatcatgtcaatgggctatgaacgagagcaagtaattgcagccccaagagccagttccaacaaccctgacagggcagtggagtaccttttaatgggaatccctggagataaagtcaggttgtggttgacccccaccaagcagctagtactggggctcctcagtcttcaacagtggctgcagctgcagcaactacgacagcaacaactacagcaacctggcttcccaagagtggcttgcaaaaactacctttacatttttactgaattcactcttcaacaagttctagaatggcatctacgcctgccaattcacaaaaactgcttttgtaagaccatcaacaaccttcatggtaccaatttcaaagatccattttctgaccttatctttattgaccatctaacggcatctagtgatatctttaatgaaataagacccaattctctaaaattggctgatgcaaagaatctccaaatgggagagaggcggttgtgcctgtaaacttctctccattcccaagatgcatatttatttcctttgggagacttcccagtaaccatatgccacacagaagcccctgttccttctcttctctaacttctagttcagatgtggtggacttatctctcagtactcttaattcagatgt

SEQ ID NO: 464205 - DNA, 1038 bp, Homo sapiens
gctctcctccctcctctggcctctaggctcccaggactggtttggaacccgcgccatgtgctctggaggctgtggcagggcaggcaaagggcctctgagggagtattacagccgcctcatccaccagaagcatttccagcacatccaggtctgcatcccctggctggagggccgaggactacccccgcttctagtttacatgagctggtgaaacatgaagaaaaccgcctggtctttgaggactcagaggaactggcagctcagctgcagagccaagagctgggtagagctgcaaggacaccgcctgcacaggatgcccggggctgggcattacctgctgtaatgacaacatctggctggaaggcagagagctgatggaccgtcgctacgtcccagtccagctgggccactgtcaccctggggctatctaagttggcagtgatgtctgcctctaatgagaggccattgagaaggacattccctcggagctgctcgaggacccggctgtgacagtcgctgaagatgtatgtccgggggtggcacatcttgcagatggacaggcctgtaaggccggcgccactgccaagctctaggacagtcctggcgggaggaaaggggaccgtgttttcgactgcaccagggtaagcctgcctcggtgccctgccctgtgccccgaggtcacctgttagtgaaggctgccaggttctcaatgacccattctgcaaggtagatggcggctgccctgtgccccgaggtcacctgttagtgaaggctgccaggttcttgatggcccattctgcaaggtagcgggcagcgtcccatgtgaccaggcctgtggtaccgtgggagatgatggctgtgctcggagagtgtgaccgagccttccgagggctgtaccaagagagggtgagacagtcttccggagagattcaggaggcagggtcatgagtcccagggactctggaattcttaccttctgcaaaatatcccgcagcagctcagaatctgatgagtctcttaattttgcttctaagctcc

SEQ ID NO: 464206 - DNA, 1680 bp, Homo sapiens
ccaacagagctcgacaaacagacaggagggtggaagggcaccgccttccaccccacccgcttagacagcctttcaactctgcccactttgaggatctgtaggatgatccaggtgggaggtgacaccaggaggtaaccaggtggaaatcaccctcaagtagcagagacaggtgtgcaaaggctcagagggagcttctccaggatcagcagagctcgattgtagggtgtgaggctgtcacagaggctggagaaataagcagttccttgctaagaagtctgaattttaacctgaagggacatgggagctactgcaggctgggctgtgaccgtctacgacaagccggcatctttctttaaagaggcacctctggacctgcagcaccggctcttcatgaagctgggcagcacgcactctccgttcagggcccgctcagaacctgaggacccagacacagagcggtcggccttcacggagcgggattctgggagcgggctggtgacgcgtctccacgagcggccagccctgctggtcagcagcacaagctggacagagtttgaacaactgactcttgacggacagaaccttccttctctcgtctgtgtgataacaggcaaagggcctctgagggagtattacagccgcctcatccaccagaagcatttccagcacatccaggtctgcatcccctggctggagggccgaggactacccccgcttctagggtcggtggacctggatgtctgtctggacacgtcctccagtggcctggacctgcccatgaaggtggtggacatgttcaggtgctgtttgcctgcgtgtgccgtgaacttcaagtgtttacatgagctggtgaaacatgaagaaaaccgcctggtctttgaggactcagaggaactggcagctcagctgcagagccaagagctgggtagagctgcaaggacaccgcctgcacaggatgcccggggctgggcattacctgctgtaatgacaacatctggctggaaggcagagagctgatggaccgtcgctacgtcccagtccagctgggccactgtcaccctggggctatctaagttggcagtgatgtctgcctctaatgagaggccattgagaaggacattccctcggagctgctcgaggacccggctgtgacagtcgctgaagatgtatgtccgggggtggcacatcttgcagatggacaggcctgtaaggccggcgccactgccaagctctaggacagtcctggcgggaggaaaggggaccgtgttttcgactgcaccagggtaagcctgcctcggtgccctgccctgtgccccgaggtcacctgttagtgaaggctgccaggttctcaatgacccattctgcaaggtagatggcggctgccctgtgccccgaggtcacctgttagtgaaggctgccaggttcttgatggcccattctgcaaggtagcgggcagcgtcccatgtgaccaggcctgtggtaccgtgggagatgatggctgtgctcggagagtgtgaccgagccttccgagggctgtaccaagagagggtgagacagtcttccggagagattcaggaggcagggtcatgagtcccagggactctggaattcttaccttctgcaaaatatcccgcagcagctcagaatctgatgagtctcttaattttgcttctaagctcc

SEQ ID NO: 464207 - DNA, 2043 bp, Homo sapiens
agcatctgcctcaggtgccagaatgcccactacctgctgctcggggaccactgtgttcctgactgcccttcaggatactatgcagagagaggagcttgtaaaaaatgccactcctcctgcagaacctgccagggcagaggacctttctcctgctcctcatgtgacaccaacctcgtgctgtcccacactggcacctgcagcaccacctgcttccctgggcactatcttgatgacaatcatgtttgccagcagccaatggagtattgaagtaggagtggatgaccatttcttagacctacagcagaaaacaagtctgtttaagaaggtgattgaacccccacactcatgcaacacacactgtggaagctgtgattcacaggccagctgtacctcctgccgagatccaaacaaggttctgctctttggggaatgtcaatacgagagctgcgccccacagtactatcttgacttctccaccaacacgtgcaaaggagataatgtcaaatgccaagtgcctttttctttgctctccagtagttggaattctcggggcttacacactttgaatggtagtgctcagcaacaggaaagcaaagctgcagacagagtcctcataaatgaactgctgggtctgagggtggacagaaaggaagataatctaatgcagactttctttttagagtgtgattggagctgcagtgcatgcagtgggcccctgaaaacagactgcctgcagtgcatggatggctatgttctccaggatggggcctgcgtggagcagtgcttgtcatcattttaccaggactcgggcctctgcaagaactgtgacagctactgtctccagtgccaaggtccccatgagtgtacccgctgcaaagggccatttctcctcttggaagcccagtgtgtccaggaatgtgggaaggggtactttgcagatcatgcaaagcacaaatgcacagcctgccctcaggggtgcttgcagtgcagccacagggaccgttgtcacctctgtgaccatgggttctttctgaagagtggcctctgtgtttacaactgtgttcctggcttttctgtccacacctctaatgaaacatgttctggcaaaatacacacccctagtcttcatgtgaatggttccctgatcctcccaattggttcaataaagccactggatttttccctcctgaatgtccaagaccaggagggtagggtcgaagatctcctatttcatgttgtgagcactcccaccaatggtcagctagtgctctcaagaaatggaaaagaggttcagctggacaaggctggccgttttagctggaaagatgtgaacgagaagaaagccccctatgtgctgagaaatgaagttctccacattagcagaggagagagggcaaccatcaccacccagatgcttgacatccgagatgatgacaacccacaggatgtggtcattgaaataatcgatcctccacttcatggccaattgcttcagacacttcagtccccggcaacccctatctatcaattccagctggatgaactctctagaggccttctccactatgctcatgatggttcagacagcacatccgatgttgcagtcttgcaggccaatgatggacactccttccataatatactgttccaagtgaagaccgtgcctcaggtgaagaacaagcagtacaaacagattgctggtgatggtggtgtttagatttagatttccttgcctcagttccaataaagtttaaagaatgaaggaggagaaaacatgataagttatttagcagtgtaaatactggtacatgttcacaaaataatgatgattggtaacagagcttcatgaccagcttcatgatcagattcaaatcccagctcatcaacttaacatttgtgtaacttctaacgttattaaactctgaacctgaagaccttcatctgtaaaatgaagacaataatggcatcattcagaataattaaatagaattaatagaagtgtattagtctgttttcacactgctgataaaggcatacctaaga

SEQ ID NO: 464208 - DNA, 1191 bp, Homo sapiens
ccgaagctgctggcaagtaggccacctgagaaagacgtcaaaatgtcctcatcgtgctctggagaattcccttccggttttagcatggtacccacagattcacctcctggtggtgatgcttgtcagctacaaaggcagggcacagaatatgtgatatttcagagagaaatcaagctacttggtttgaggaaactcaacaaaattcaagataacacagagaaggaattcagaatgctatcagataaatttaaccaagagattgaaataattaaaaaagaaggagaaattctggagttgaaaaattcaactgacatactgaagaatgcatcaggatcttttaacaacagaataggtcaagcaaaagaaagaattggtgaacttgaagacagcctatttgaaaatacacagtcagatgagacaaaagaaaataaattttctaaatcttctaggtgtgtttcactcttttttacttatataaaagcaaaaacttatataaacatgaaggagaagactttctcagacaaacaaaagctgagagataacaccagacctgtcttacaagaaatgctaaaggaagttagaaaagaaagttaatgagcaataagaaatcaactgaaggtgcaaaactcactggtaataatgaaatgtagaccttttcatcatgtactcctaacatggcagctgccttcctcaaaaaagaagagagagagaacaagagagagtgaccaagatggccatcacagactttttgtaacctaatcttggaagtgacaccccattccctctgctgcattatcttctctagaagaacttatgttctggttcaggaggcagaactattgaaatgtgatcagtgctataaaagctgtaggagttgtgggagcagaaaaactttttaagatgaagtgaagcttgggcttgtgttgaagaaaagaataggagagaaagcatctgccgacatgtacctgtgagaaccttgcaagaattacagacacttttaatgacaaaaccaggcatctgcattgggaggagtggtaaggaagaaggaggctggataaaggagctagaagccatgctgggagggtcctattaggccacactcaggactttggaatctgcagtacgtggagtggaaacactgaaggatataatcagttatgtacagaataaagaatgttctgagccaagctc

SEQ ID NO: 464209 - DNA, 817 bp, Homo sapiens
aaatattgtcagtaatgctagacatgatgaattggtgtaaccaaattatttctgaatttgactttattttgcggattttccttgcaaatgttcagcctgggcctttgagaaaactgcataaatataatctttggtgctcccaacttccatgcattttacctattggtttgactgtgattttaagaagtcttactaagtatccagcattacccttgggtctgtatgacacaaattttgatttaagaaactcaattatctgggaaactcaggacatctcaggttctggaaaattgcctcaagggattaaccggtttaatgggggaaggatggatccaagggcttcaaatgtgcttcacagacaaggaaaaaatctcccagttggccgctcctggattccttagctcggaactccagacacatattcagacatggcctagtacagatatgttctacaactggaaaaaaatggttatgattgaggcttagaagtggagtgcagtgaagaaactttagggaagcctgacaaccacaccctctgctgatccctgtggaattttacatggataatgagtaaaagactgtcctgccaatagagaatacagtgaaacggtatggaacatacacagtggaacagaggacactgatggaacagtgtttataagcacaaagtttggaagtacggaatcctagataaaatcctgactgtggaattaactgcgtgaccttcggcaaattacttcatctctttgagcctcagtgtcttcacatataaaatgagaataataaaagcccttatctcatagtatttctgaaaggg

SEQ ID NO: 464210 - DNA, 917 bp, Homo sapiens
gctgcaatccgtagaggaacccgccgccgagccaccatcatgcctgggcacttacaggaaggcttcggctgtgtggtcaccaaccgattcgaccagttatttgacgacgaatcggaccccttcgaggtgctgaaggcagcggagaacaagaaaaaagaagccggcaggggtggcgttgggggccctggggccaagagcgcagctcaggcggcggcccagaccaactccaacgcggcaggcaaacagctgcgcaaggagtcccagaaagaccgcaagaacccgctgccccgcagcgttggcgtggttgacaagaaagaggagacgcagccgcccgtggcgcttaagaaagaaggaataagacgagttggaagaagacctgatcaacaacttcaggttgatagaccgattattgaccgacctattcgaggtcgtggtggtcttggaagaggtcgagggggccgtggacgtggaatgggccgaggagatggatttgattctcgtggcaaacgtgaatttgataggcatagtggaagtgatagatcttctttttcacattacagtggcctgaagcacgaggacaaacgtggaggtagcggatctcacaactggggaactgtcaaagacgaattaactgacttggatcaatcaaatgtgactgacgaaacacctgaaggtgaagaacatcatccagtggcagacactgaaaataaggagaatgatgttgaagaggtaaaagaggagggtccaaaagagatgactttggatgagtggaaggctattcaaaataaggaccgggcaaaagtagaatttaatatctgaaaaccaaatgaaggtgctgatgggcagtggaagaagggatttgttttcataaatcaaagagtgaagaggcttatgctgagtattcagttatggagatc

SEQ ID NO: 464211 - DNA, 632 bp, Homo sapiens
agaatgaggaaaggtggtgagagagagggcacatcaaagacaatagtgctcagagcagcttttacttattgaatgcctgctatatactggataaacctggtttatacaacatctgccttctccaaattttatgagcagtctgttgttgcagatgtcagcagcaacaacaaaggcggcctccttgtccacttttggattgtttttgtcatgccacgtgccaaaggccacatcttctgtgaagactgtgttgccgccatcttgaaggactccatccagacaagcatcataaaccggacctctgtggggagcttgcagggactggctgtggacatggactctgtggtactaaatgctgggcttcggtcggattactcgtcaaccataggatctgacaaaggctgctctcagtacttctatgcagagcatctgtctctccactacccgctggagatttctgcagcctcagggaggctgatgtgtcacttcaagctggtggccatagtgggctacctgattcgtctctcaatcaagtccatccaaatcgaagccgacaactgtgtcactgactccctgaccatttacgactcccttttgcccatccggagcagcatcttgtacaggtacgatgcagg

SEQ ID NO: 464212 - DNA, 1358 bp, Homo sapiens
agaatgaggaaaggtggtgagagagagggcacatcaaagacaatagtgctcagagcagcttttacttattgaatgcctgctatatactggataaacctggtttatacaacatctgccttctccaaattttatgagcagtctgttgttgcagatgtcagcagcaacaacaaaggcggcctccttgtccacttttggattgtttttgtcatgccacgtgccaaaggccacatcttctgtgaagactgtgttgccgccatcttgaaggactccatccagacaagcatcataaaccggacctctgtggggagcttgcagggactggctgtggacatggactctgtggtactaaatgctgggcttcggtcggattactcgtcaaccataggatctggtaaattctttcatgtggttccccctccccccatgttaatattgtttttggctgtaattttcattttctaattgatggtatttgttagtgctcttttaattgcaagtgacagaaatgcattcaaactgccttaagcacaaaagaaacttgactggctcatgtaagtgggacatacatggagtgtgctggcgttagttatggttgagtctaggatctaaaataaaaatatcatcagaactctgcatctctgcctacttctatggagccttctttatcaagtgtgctcttccactgtatttgtaacaaggaccaccaagcagatccaaacttataatttatcattttctaaaccatgatgaaaaccacctccacgtatttcctgattgctcttgcagaagtcctggggctgactctcattgtctggattgactgacatgcctattcttgaaatgacttctttgactctgattggccagcctgggttatgtgcccacctctgaaactaggggtgagtttaaccccaaccaaactatatagacagagtgtggatagtttctaaaggcaaaatgctgggctgttaccagaaggcagggaagtggacctaggctggccatatgtccttcacatgacctcttttgccctttacttttctataaagatttctgtttttataaaagtcattcctaaaaaaaaagaaaagaaaggaaaatggtgctgtctccacagacaaaggctgctctcagtacttctatgcagagcatctgtctctccactacccgctggagatttctgcagcctcagggaggctgatgtgtcacttcaagctggtggccatagtgggctacctgattcgtctctcaatcaagtccatccaaatcgaagccgacaactgtgtcactgactccctgaccatttacgactcccttttgcccatccggagcagcatcttgtacaggtacgatgcagg

SEQ ID NO: 464213 - DNA, 1848 bp, Homo sapiens
  misc_feature (4)..(4): n is a, c, g, or t
  misc_feature (8)..(8): n is a, c, g, or t
  misc_feature (10)..(11): n is a, c, g, or t
  misc_feature (13)..(14): n is a, c, g, or t
gggngtgncnncnnggtggttgtctctgctttttgaaaaagaagtccccgcccgacccccgccccgccaggcgctggtctgagcgtctgagcccagatggtgcgcttgctccagagggcgggcggctccagtggcccgcgggacggtggggccagagggccgtgggggtgggggagccgcccgcaggagaaggagccccgcccgcgccggccctggagtcgccggtgtcgccgccctgcccgcgggccgccctcctggcccagcccagggccctgcgagctattttgaaagtgaccctgggctggggcgccgggggagcgcggcgcgcaaaaccatgacagaagatgaccgaggcggcgctggtggagggccaggtcaagctgcgggacggcaagaaggtggctggtgctgcggaacgcgtcgcccgtggcagagtgagcggggcgggcgggggacggcggggcgcgggggtagcgacacgggttaccgaggcccggggcagtaatgccagcttgcccaaaatcgccgccgctgtcaccccgccgggaaacccgagagccccgtgcggacccggaccccccggcgcccctgggagcgcagactgcctgctgatgctggtctacaaggacaagtcggagcgtatcaagggcctgcgggagcgcagcagcctgacgctagaggacatctgcgggctggagcccggcctgccctacgagggcctggtccacacgctggccattgtctgcctgtcccaggccatcatgctgggctttgacagccacgaggccatgtgtgcgtgggatgcccggatccgctatgcgctcggcgagggggctggcgtcttcttcctgtcctcggccgagggggagcagatcagcttcctgttcgactgcatcgtccgaggcatctcccccaccaagggcccctttggctgcggccggttctaccagacccaagtcccccgggaccctcgactgtggaggagcgtgtggcccaggaagccctggaaaccctacagctggagaagcggctgagcctcctctcacatgcgggcaggccgggcagtggaggggatgaccgcagcctgtccagctcatcctcagaggccagtcacttggacgtcagcgccaacaaccggctcaccgcatggccagagcaatcctcgtcgtcagccagcacgtcacaggaggggcctagaccagcagctgcccaggccgccggggaagccatggtgggtgcctcaaggcaccccccaagccgctgcgtccgcggagtgcaggaggttggccgccagagctcctcggacagcggcatcgcactggcagccactcctcttactccagcagcctctcgtcctacgcgggcacagcctggacgtgtggcgggccaagatgaactgggctcactgctcagcctgccagcagcgggggcccccgagccagcctgtgcacctgcctgcccgggacagtcgagtaccaggtgcccacctccctgcgggcccactatgacacaccacgcagcctttgcctggctcctagagaccacagccccccctcacagggcagccccgacaacagtgcggccagggactcaggcggccagacagcaggagcctctgccctagaccaccccctctgttcagcaggcccaggctggtccctctcggcacccgtgccacaggaagcctggagcgtccgggacgaggcgaggcccgtgcagacccgatggcaccgcacactcacgccccacacacggatgggacctgggctcagcccagctaccagcagctcacatgtggggtgtggggacctcgccgtccccatgtcccaagcagccaaacgctggcac

SEQ ID NO: 464214 - DNA, 4889 bp, Homo sapiens
tgtgatcaattcaggactcttccactgaagagatgtgaagtttcttgggttatgctgatgctgctggtctggaacatgatctttgctgtaagattatacacatccccacattgcaattgggaggaagaaatatggagagcagttgaagacgctacaagtgacgaggaagattctgttttgaatatagccagagaaaaaaaggatggagaaaaatctagaacagtgtcttctcggaaaaaagcagccttgaaggctacaagtgacgagaaagattctgttttgaatatagccagaggaaaaaagcatggagaaaaaactaggagagtgtcttctcataaacaaccagccttgaaggctacaagtgacaaggaaaattctgttccgaatatggccacagaaacaaaggatgaacaaatatctgggacagtgtcttctcagaaacaaccagccttgaaggctacaagtgacaagaaagattctgtttcgaatatacccacagaaataaaggatggacaacaatctggaacagtgtcttctcagaaacaactggcctggaaggctacaagtgtcaagaaagattctgtttcgaatatagccacagagataaaggatggacaaatacgtgggacagtgtcttctcagagacaaccagccttgaaggctacaggtgatgagaaagattctgtttcgaatatagccagagaaataaaggatggagaaaaatctgggacagtgtctcctcagaaacaatcggcccagaaggttatatttaaaaagaaagtttctcttttgaatattgccacaagaataacgggcggttggaaatctggaacagagtatcctgagaatctgcccaccttgaaggctacaattgaaaataaaaattctgttctgaatacagccaccaaaatgaaagatgtacaaacatccacaccagaacaagacttagaaatggcatcagagggagagcaaaagaggcttgaagaatatgaaaataaccagccacaggtgaaaaaccaaatacattctagggatgaccttgatgacataattcagtcatctcaaacagtctcagaggacggtgactcgctttgctgtaattgtaagaatgtcatattactcattgatcaacatgaaatgaagtgtaaagattgtgttcacctattgaaaattaaaaagacattttgtttatgtaaaagattaacagaacttaaagataatcactgtgagcaacttagagtaaaaattcgaaaactgaaaaataaggctagtgtactacaaaagagactatctgaaaaagaagaaataaaatcgcagttaaagcatgaaacacttgaattggaaaaagaactctgtagtttgagatttgccatacagcaagaaaaaaagaaaagaagaaatgttgaagagttgcaccaaaaagttagggaaaagttaagaatcacagaagagcaatataggatagaagctgatgtgacaaaaccaattaaaccggctctcaaatcagcagaggtggaattgaagacaggaggaaataattcaaatcaggtttctgaaactgatgaaaaagaagacctgctgcatgaaaaccgcttgatgcaagatgaaattgccaggctcaggctggaaaaagacacaataaaaaaccaaaacctggaaaagaaatacttaaaagactttgaaattgtgaaaagaaagcatgaagaccttcaaaaggctctaaaacggaatgaggaaacattagcagaaacgatagcctgttatagtggacagcttgctgctctgacggatgaaaacacaacgctccgttctaaactggagaagcaaagagagagcgggcaaagactggaaacagaaatgcaatcataccgttgtagactgaatgctgctctatgtgatcatgatcaaagtcactcatcaaaaagagaccaagagcttgctttccagggcacagtagataaatgttgtcatttacaggaaaatttgaattctcatgttctgattctttctctgcaactttctaaagctgagagtaagttcagagtcctcgaaactgagctccattacacaggagaggctctgaaagaaaaggctttggtttttgaacacgtgcaaagtgagctaaagcaaaaacagagtcaaatgaaggacattgaaaaaatgtacaaaagtggatacaatacaatggaaaaatgcatagaaaagcaggaaagattttgtcaactaaaaaaacaaaatatgttgcttcaacagcaactggatgatgctcgcaacaaagctgacaatcaagaaaaagcaatacttaatattcaagccagatgtgatgctagagtagaaaaccttcaagctgagtgcagaaagcaccgtctcttactagaagaagacaataaaatgttggtgaatgaattgaatcattcgaaagaaaaaaaatgccaatatgaaaaagagaaagcagaaagagaagtagctgtgagacagcttcaacaaaaacaagatgatgtcttaaacaaacgatcagcaacaaaagctttgctggatgcttcatcgcgtcactgcatctatttagaaaatgggatgcaggattcaaggaagaaattagaccagatgagaagtcaagtatgtatgcaactttgcacaccaacaactgttaatctgtagctagttaactaatataaagtgttttggggtactaattttagtggatggctttcttttgtatttttatgataattaatgttattaaaattttatagtggatggctttcttctgtattttccttattattaattttattaagattttattataatgcacctatatcttaatctctggctttcattctgccattttttatacatatatttttttcttaaatatttaaccttaggaaagttgagaattatgcatcatttctcacagaaattgagagagtttttttcctgttaaacgtctatttttaatgatttctctattggcatggtgaggcaagccagattaattcagaggataatgtctaatggaatgtttcagaaaattatcttctttttagtctctacttttctgaatgtataaagaacctgtgtatacttatttcatagatttcaggttaatttgttcagaaaggccattttactgaataaatttttatttcgatgaaaatcgttactccttttgtattgggctcagagagcacactctgtctctatatgaatatggacagttcgcatttgccaacatgtatctattttctcttatttgtagaaaaagctaaactaaaaagggggttatagaaggtcagcaaaggatgggtttgagatgtttgggttggttaagtgggcatttagacaacagggcttctcctttggcatgtttaatggacacctttgcagtttaagatgatgcttttaaattacttctctcctaatgatgacctgagtcctgctattcaatgggagagtcaataatatcctgtaggatcttatttggaactgactttgtcgattttaattttgttcctgcttgtttttaaattttcttgttgtttccctagaaagaaaagatgacgcttagttttaaatatttaaaaatgtgcaagttgctttgctataataaaactaaatgcatacatacaaaaaataaaattatagttgatgtggtagtgtttggaattcaaaatataaatgcttagcctgatgtaatcctttatctttccacattttaccagtttgtagaaaaatgacacagtagcccaatcgtctacttttgtgattgctaagaatttgtgtaattataccttcagaagtttgtttagaatttacatgatttaaaaacaattatgtgtgagagtaattattttaaaatgcacattttaggcttgaagtagaaaatgtcatgatgagaaaaattattaaaaaacaggatgaacaaattgagcggtttgagaaaatcctgcagcattcaagtttgattttggaatatttgcatatacctaatgaaatatcttgcggatggtacctgagtctaaacatgaaattcatttatgtttcatatataccttatgcacatagcctgaaggtaattctctacaatgttttacagtaattttttgcagaaactgatattatatgaaagttgggttgtttgattgagtcccataattgccatatgcatttgttattcttttttgttgttgtttttcccctgatggaatcatttcaaatgttttttctgtaagctcactgattctttttttctgctaataaaatcagctgctgaagcattgtattaaatttttagtttgttgtattctctatatctagaatttctatttgttttttgttatcatatctatttctacttcagaactatcattctgttaatgaattttttcccaaatttattttagtatgttatccatattttcttgtacaggcatacttcagggatattgcaggtgtggttccaggcaaccacaatgtaacaagaacttgaatttttggttttacactgcatataaaagttttttatactataccatagtctataaaatgtgcaatagccttatgtctacaattacatactttaaaaactactttattgctaaaaatgcaaatgatcatctgagccttcagtgaattttaatttttgctgataaagagtctttcctctgtgttgatggctgctgaatgattaaggtggtggttgctgcatgattaaggtggtggttgctgcagattgaggtggttgtggcaatttcttaaaataaaacaagagtaaagtttgctgcatcagttgactccttgattcctttgatgaaaggtttatctgtagtgtgccatgctgttggatagcattttacttcacagtagaacacctttcaaaatgagtc

SEQ ID NO: 464215 - DNA, 297 bp, Homo sapiens
ccaatttaattgttgaattacagattttgcattttgtgtcatatgtaaaaatgtttgcctagcacaaggtcacaaagattgttcctgtgtttgttctagaaattttatagatttggatcttccatttaaatctgtgctccattttgagtttccttttgtctatggagtgaggtgaggtatggattcaagttcactttttggatatggacagccaattgttccaacaccgcatgttgaaaaggctatcctttctccactgcattgccatcctgccgtcgacgcgggccgcgaaattta

SEQ ID NO: 464216 - DNA, 3958 bp, Homo sapiens
accatcgactcggcccctccgacggcttagagggagagcaaaagaggcttgaagaatatgaaaataaccagccacaggtgaaaaaccaaatacattctagggatgaccttgatgacataattcagtcatctcaaacagtctcagaggacggtgactcgctttgctgtaattgtaagaatgtcatattactcattgatcaacatgaaatgaagtgtaaagattgtgttcacctattgaaaattaaaaagacattttgtttatgtaaaagattaacagaacttaaagataatcactgtgagcaacttagagtaaaaattcgaaaactgaaaaataaggctagtgtactacaaaagagactatctgaaaaagaagaaataaaatcgcagttaaagcatgaaacacttgaattggaaaaagaactctgtagtttgagatttgccatacagcaagaaaaaaagaaaagaagaaatgttgaagagttgcaccaaaaagttagggaaaagttaagaatcacagaagagcaatataggatagaagctgatgtgacaaaaccaattaaaccggctctcaaatcagcagaggtggaattgaagacaggaggaaataattcaaatcaggtttctgaaactgatgaaaaagaagacctgctgcatgaaaaccgcttgatgcaagatgaaattgccaggctcaggctggaaaaagacacaataaaaaaccaaaacctggaaaagaaatacttaaaagactttgaaattgtgaaaagaaagcatgaagaccttcaaaaggctctaaaacggaatgaggaaacattagcagaaacgatagcctgttatagtggacagcttgctgctctgacggatgaaaacacaacgctccgttctaaactggagaagcaaagagagagcgggcaaagactggaaacagaaatgcaatcataccgttgtagactgaatgctgctctatgtgatcatgatcaaagtcactcatcaaaaagagaccaagagcttgctttccagggcacagtagataaatgttgtcatttacaggaaaatttgaattctcatgttctgattctttctctgcaactttctaaagctgagagtaagttcagagtcctcgaaactgagctccattacacaggagaggctctgaaagaaaaggctttggtttttgaacacgtgcaaagtgagctaaagcaaaaacagagtcaaatgaaggacattgaaaaaatgtacaaaagtggatacaatacaatggaaaaatgcatagaaaagcaggaaagattttgtcaactaaaaaaacaaaatatgttgcttcaacagcaactggatgatgctcgcaacaaagctgacaatcaagaaaaagcaatacttaatattcaagccagatgtgatgctagagtagaaaaccttcaagctgagtgcagaaagcaccgtctcttactagaagaagacaataaaatgttggtgaatgaattgaatcattcgaaagaaaaaaaatgccaatatgaaaaagagaaagcagaaagagaagtagctgtgagacagcttcaacaaaaacaagatgatgtcttaaacaaacgatcagcaacaaaagctttgctggatgcttcatcgcgtcactgcatctatttagaaaatgggatgcaggattcaaggaagaaattagaccagatgagaagtcaagtatgtatgcaactttgcacaccaacaactgttaatctgtagctagttaactaatataaagtgttttggggtactaattttagtggatggctttcttttgtatttttatgataattaatgttattaaaattttatagtggatggctttcttctgtattttccttattattaattttattaagattttattataatgcacctatatcttaatctctggctttcattctgccattttttatacatatatttttttcttaaatatttaaccttaggaaagttgagaattatgcatcatttctcacagaaattgagagagtttttttcctgttaaacgtctatttttaatgatttctctattggcatggtgaggcaagccagattaattcagaggataatgtctaatggaatgtttcagaaaattatcttctttttagtctctacttttctgaatgtataaagaacctgtgtatacttatttcatagatttcaggttaatttgttcagaaaggccattttactgaataaatttttatttcgatgaaaatcgttactccttttgtattgggctcagagagcacactctgtctctatatgaatatggacagttcgcatttgccaacatgtatctattttctcttatttgtagaaaaagctaaactaaaaagggggttatagaaggtcagcaaaggatgggtttgagatgtttgggttggttaagtgggcatttagacaacagggcttctcctttggcatgtttaatggacacctttgcagtttaagatgatgcttttaaattacttctctcctaatgatgacctgagtcctgctattcaatgggagagtcaataatatcctgtaggatcttatttggaactgactttgtcgattttaattttgttcctgcttgtttttaaattttcttgttgtttccctagaaagaaaagatgacgcttagttttaaatatttaaaaatgtgcaagttgctttgctataataaaactaaatgcatacatacaaaaaataaaattatagttgatgtggtagtgtttggaattcaaaatataaatgcttagcctgatgtaatcctttatctttccacattttaccagtttgtagaaaaatgacacagtagcccaatcgtctacttttgtgattgctaagaatttgtgtaattataccttcagaagtttgtttagaatttacatgatttaaaaacaattatgtgtgagagtaattattttaaaatgcacattttaggcttgaagtagaaaatgtcatgatgagaaaaattattaaaaaacaggatgaacaaattgagcggtttgagaaaatcctgcagcattcaagtttgattttggaatatttgcatatacctaatgaaatatcttgcggatggtacctgagtctaaacatgaaattcatttatgtttcatatataccttatgcacatagcctgaaggtaattctctacaatgttttacagtaattttttgcagaaactgatattatatgaaagttgggttgtttgattgagtcccataattgccatatgcatttgttattcttttttgttgttgtttttcccctgatggaatcatttcaaatgttttttctgtaagctcactgattctttttttctgctaataaaatcagctgctgaagcattgtattaaatttttagtttgttgtattctctatatctagaatttctatttgttttttgttatcatatctatttctacttcagaactatcattctgttaatgaattttttcccaaatttattttagtatgttatccatattttcttgtacaggcatacttcagggatattgcaggtgtggttccaggcaaccacaatgtaacaagaacttgaatttttggttttacactgcatataaaagttttttatactataccatagtctataaaatgtgcaatagccttatgtctacaattacatactttaaaaactactttattgctaaaaatgcaaatgatcatctgagccttcagtgaattttaatttttgctgataaagagtctttcctctgtgttgatggctgctgaatgattaaggtggtggttgctgcatgattaaggtggtggttgctgcagattgaggtggttgtggcaatttcttaaaataaaacaagagtaaagtttgctgcatcagttgactccttgattcctttgatgaaaggtttatctgtagtgtgccatgctgttggatagcattttacttcacagtagaacacctttcaaaatgagtc

SEQ ID NO: 464217 - DNA, 3915 bp, Homo sapiens
ccaatttaattgttgaattacagattttgcattttgtgtcatatgtaaaaatgtttgcctagcacaaggtcacaaagattgttcctgtgtttgttctagaaattttatagatttggatcttccatttaaatctgtgctccattttgagtttccttttgtctatggagtgaggtgagattgtgttcacctattgaaaattaaaaagacattttgtttatgtaaaagattaacagaacttaaagataatcactgtgagcaacttagagtaaaaattcgaaaactgaaaaataaggctagtgtactacaaaagagactatctgaaaaagaagaaataaaatcgcagttaaagcatgaaacacttgaattggaaaaagaactctgtagtttgagatttgccatacagcaagaaaaaaagaaaagaagaaatgttgaagagttgcaccaaaaagttagggaaaagttaagaatcacagaagagcaatataggatagaagctgatgtgacaaaaccaattaaaccggctctcaaatcagcagaggtggaattgaagacaggaggaaataattcaaatcaggtttctgaaactgatgaaaaagaagacctgctgcatgaaaaccgcttgatgcaagatgaaattgccaggctcaggctggaaaaagacacaataaaaaaccaaaacctggaaaagaaatacttaaaagactttgaaattgtgaaaagaaagcatgaagaccttcaaaaggctctaaaacggaatgaggaaacattagcagaaacgatagcctgttatagtggacagcttgctgctctgacggatgaaaacacaacgctccgttctaaactggagaagcaaagagagagcgggcaaagactggaaacagaaatgcaatcataccgttgtagactgaatgctgctctatgtgatcatgatcaaagtcactcatcaaaaagagaccaagagcttgctttccagggcacagtagataaatgttgtcatttacaggaaaatttgaattctcatgttctgattctttctctgcaactttctaaagctgagagtaagttcagagtcctcgaaactgagctccattacacaggagaggctctgaaagaaaaggctttggtttttgaacacgtgcaaagtgagctaaagcaaaaacagagtcaaatgaaggacattgaaaaaatgtacaaaagtggatacaatacaatggaaaaatgcatagaaaagcaggaaagattttgtcaactaaaaaaacaaaatatgttgcttcaacagcaactggatgatgctcgcaacaaagctgacaatcaagaaaaagcaatacttaatattcaagccagatgtgatgctagagtagaaaaccttcaagctgagtgcagaaagcaccgtctcttactagaagaagacaataaaatgttggtgaatgaattgaatcattcgaaagaaaaaaaatgccaatatgaaaaagagaaagcagaaagagaagtagctgtgagacagcttcaacaaaaacaagatgatgtcttaaacaaacgatcagcaacaaaagctttgctggatgcttcatcgcgtcactgcatctatttagaaaatgggatgcaggattcaaggaagaaattagaccagatgagaagtcaagtatgtatgcaactttgcacaccaacaactgttaatctgtagctagttaactaatataaagtgttttggggtactaattttagtggatggctttcttttgtatttttatgataattaatgttattaaaattttatagtggatggctttcttctgtattttccttattattaattttattaagattttattataatgcacctatatcttaatctctggctttcattctgccattttttatacatatatttttttcttaaatatttaaccttaggaaagttgagaattatgcatcatttctcacagaaattgagagagtttttttcctgttaaacgtctatttttaatgatttctctattggcatggtgaggcaagccagattaattcagaggataatgtctaatggaatgtttcagaaaattatcttctttttagtctctacttttctgaatgtataaagaacctgtgtatacttatttcatagatttcaggttaatttgttcagaaaggccattttactgaataaatttttatttcgatgaaaatcgttactccttttgtattgggctcagagagcacactctgtctctatatgaatatggacagttcgcatttgccaacatgtatctattttctcttatttgtagaaaaagctaaactaaaaagggggttatagaaggtcagcaaaggatgggtttgagatgtttgggttggttaagtgggcatttagacaacagggcttctcctttggcatgtttaatggacacctttgcagtttaagatgatgcttttaaattacttctctcctaatgatgacctgagtcctgctattcaatgggagagtcaataatatcctgtaggatcttatttggaactgactttgtcgattttaattttgttcctgcttgtttttaaattttcttgttgtttccctagaaagaaaagatgacgcttagttttaaatatttaaaaatgtgcaagttgctttgctataataaaactaaatgcatacatacaaaaaataaaattatagttgatgtggtagtgtttggaattcaaaatataaatgcttagcctgatgtaatcctttatctttccacattttaccagtttgtagaaaaatgacacagtagcccaatcgtctacttttgtgattgctaagaatttgtgtaattataccttcagaagtttgtttagaatttacatgatttaaaaacaattatgtgtgagagtaattattttaaaatgcacattttaggcttgaagtagaaaatgtcatgatgagaaaaattattaaaaaacaggatgaacaaattgagcggtttgagaaaatcctgcagcattcaagtttgattttggaatatttgcatatacctaatgaaatatcttgcggatggtacctgagtctaaacatgaaattcatttatgtttcatatataccttatgcacatagcctgaaggtaattctctacaatgttttacagtaattttttgcagaaactgatattatatgaaagttgggttgtttgattgagtcccataattgccatatgcatttgttattcttttttgttgttgtttttcccctgatggaatcatttcaaatgttttttctgtaagctcactgattctttttttctgctaataaaatcagctgctgaagcattgtattaaatttttagtttgttgtattctctatatctagaatttctatttgttttttgttatcatatctatttctacttcagaactatcattctgttaatgaattttttcccaaatttattttagtatgttatccatattttcttgtacaggcatacttcagggatattgcaggtgtggttccaggcaaccacaatgtaacaagaacttgaatttttggttttacactgcatataaaagttttttatactataccatagtctataaaatgtgcaatagccttatgtctacaattacatactttaaaaactactttattgctaaaaatgcaaatgatcatctgagccttcagtgaattttaatttttgctgataaagagtctttcctctgtgttgatggctgctgaatgattaaggtggtggttgctgcatgattaaggtggtggttgctgcagattgaggtggttgtggcaatttcttaaaataaaacaagagtaaagtttgctgcatcagttgactccttgattcctttgatgaaaggtttatctgtagtgtgccatgctgttggatagcattttacttcacagtagaacacctttcaaaatgagtc

SEQ ID NO: 464218 - DNA, 474 bp, Homo sapiens
aaatatccggcctatccccacaccagcagaacaagacttagaaatggcatcagagggagagcaaaagaggcttgaagaatatgaaaataaccagccacaggtgaaaaaccaaatacattctagggatgaccttgatgacataattcagtcatctcaaacagtctcagaggacggtgactcgctttgctgtaattgtaagaatgtcatattactcattgatcaacatgaaatgaagtgtaaagattgtgttcacctattgaaaattaaaaagacattttgtttatgtaaaagattaacagaacttaaagataatcactgtgagcaacttagagtaaaaattcgaaaactgaaaaataaggctagtgtactacaaaagagactatctgaaaaagaagaaataaaatcgcagttaaagcatgaaacacttgaattggaaaaagaactctgtagtttgaggtatgacctagttttaaa

SEQ ID NO: 464219 - DNA, 3981 bp, Homo sapiens
aaatatccggcctatccccacaccagcagaacaagacttagaaatggcatcagagggagagcaaaagaggcttgaagaatatgaaaataaccagccacaggtgaaaaaccaaatacattctagggatgaccttgatgacataattcagtcatctcaaacagtctcagaggacggtgactcgctttgctgtaattgtaagaatgtcatattactcattgatcaacatgaaatgaagtgtaaagattgtgttcacctattgaaaattaaaaagacattttgtttatgtaaaagattaacagaacttaaagataatcactgtgagcaacttagagtaaaaattcgaaaactgaaaaataaggctagtgtactacaaaagagactatctgaaaaagaagaaataaaatcgcagttaaagcatgaaacacttgaattggaaaaagaactctgtagtttgagatttgccatacagcaagaaaaaaagaaaagaagaaatgttgaagagttgcaccaaaaagttagggaaaagttaagaatcacagaagagcaatataggatagaagctgatgtgacaaaaccaattaaaccggctctcaaatcagcagaggtggaattgaagacaggaggaaataattcaaatcaggtttctgaaactgatgaaaaagaagacctgctgcatgaaaaccgcttgatgcaagatgaaattgccaggctcaggctggaaaaagacacaataaaaaaccaaaacctggaaaagaaatacttaaaagactttgaaattgtgaaaagaaagcatgaagaccttcaaaaggctctaaaacggaatgaggaaacattagcagaaacgatagcctgttatagtggacagcttgctgctctgacggatgaaaacacaacgctccgttctaaactggagaagcaaagagagagcgggcaaagactggaaacagaaatgcaatcataccgttgtagactgaatgctgctctatgtgatcatgatcaaagtcactcatcaaaaagagaccaagagcttgctttccagggcacagtagataaatgttgtcatttacaggaaaatttgaattctcatgttctgattctttctctgcaactttctaaagctgagagtaagttcagagtcctcgaaactgagctccattacacaggagaggctctgaaagaaaaggctttggtttttgaacacgtgcaaagtgagctaaagcaaaaacagagtcaaatgaaggacattgaaaaaatgtacaaaagtggatacaatacaatggaaaaatgcatagaaaagcaggaaagattttgtcaactaaaaaaacaaaatatgttgcttcaacagcaactggatgatgctcgcaacaaagctgacaatcaagaaaaagcaatacttaatattcaagccagatgtgatgctagagtagaaaaccttcaagctgagtgcagaaagcaccgtctcttactagaagaagacaataaaatgttggtgaatgaattgaatcattcgaaagaaaaaaaatgccaatatgaaaaagagaaagcagaaagagaagtagctgtgagacagcttcaacaaaaacaagatgatgtcttaaacaaacgatcagcaacaaaagctttgctggatgcttcatcgcgtcactgcatctatttagaaaatgggatgcaggattcaaggaagaaattagaccagatgagaagtcaagtatgtatgcaactttgcacaccaacaactgttaatctgtagctagttaactaatataaagtgttttggggtactaattttagtggatggctttcttttgtatttttatgataattaatgttattaaaattttatagtggatggctttcttctgtattttccttattattaattttattaagattttattataatgcacctatatcttaatctctggctttcattctgccattttttatacatatatttttttcttaaatatttaaccttaggaaagttgagaattatgcatcatttctcacagaaattgagagagtttttttcctgttaaacgtctatttttaatgatttctctattggcatggtgaggcaagccagattaattcagaggataatgtctaatggaatgtttcagaaaattatcttctttttagtctctacttttctgaatgtataaagaacctgtgtatacttatttcatagatttcaggttaatttgttcagaaaggccattttactgaataaatttttatttcgatgaaaatcgttactccttttgtattgggctcagagagcacactctgtctctatatgaatatggacagttcgcatttgccaacatgtatctattttctcttatttgtagaaaaagctaaactaaaaagggggttatagaaggtcagcaaaggatgggtttgagatgtttgggttggttaagtgggcatttagacaacagggcttctcctttggcatgtttaatggacacctttgcagtttaagatgatgcttttaaattacttctctcctaatgatgacctgagtcctgctattcaatgggagagtcaataatatcctgtaggatcttatttggaactgactttgtcgattttaattttgttcctgcttgtttttaaattttcttgttgtttccctagaaagaaaagatgacgcttagttttaaatatttaaaaatgtgcaagttgctttgctataataaaactaaatgcatacatacaaaaaataaaattatagttgatgtggtagtgtttggaattcaaaatataaatgcttagcctgatgtaatcctttatctttccacattttaccagtttgtagaaaaatgacacagtagcccaatcgtctacttttgtgattgctaagaatttgtgtaattataccttcagaagtttgtttagaatttacatgatttaaaaacaattatgtgtgagagtaattattttaaaatgcacattttaggcttgaagtagaaaatgtcatgatgagaaaaattattaaaaaacaggatgaacaaattgagcggtttgagaaaatcctgcagcattcaagtttgattttggaatatttgcatatacctaatgaaatatcttgcggatggtacctgagtctaaacatgaaattcatttatgtttcatatataccttatgcacatagcctgaaggtaattctctacaatgttttacagtaattttttgcagaaactgatattatatgaaagttgggttgtttgattgagtcccataattgccatatgcatttgttattcttttttgttgttgtttttcccctgatggaatcatttcaaatgttttttctgtaagctcactgattctttttttctgctaataaaatcagctgctgaagcattgtattaaatttttagtttgttgtattctctatatctagaatttctatttgttttttgttatcatatctatttctacttcagaactatcattctgttaatgaattttttcccaaatttattttagtatgttatccatattttcttgtacaggcatacttcagggatattgcaggtgtggttccaggcaaccacaatgtaacaagaacttgaatttttggttttacactgcatataaaagttttttatactataccatagtctataaaatgtgcaatagccttatgtctacaattacatactttaaaaactactttattgctaaaaatgcaaatgatcatctgagccttcagtgaattttaatttttgctgataaagagtctttcctctgtgttgatggctgctgaatgattaaggtggtggttgctgcatgattaaggtggtggttgctgcagattgaggtggttgtggcaatttcttaaaataaaacaagagtaaagtttgctgcatcagttgactccttgattcctttgatgaaaggtttatctgtagtgtgccatgctgttggatagcattttacttcacagtagaacacctttcaaaatgagtc

SEQ ID NO: 464220 - DNA, 962 bp, Homo sapiens
cccccccccccaaaacaatactaatacacccccaaccacccacatcacgggcatgggagtcctgaccttgttttcctgcaactaaacagtctcacgatgatgggagacagtgatacgtcatcaggcatgatcttctctcaagaagcctgcaacctggaatcttctcacaaggagtgtgcaacctagattcttctcacaaggagagtgcaagctaaattcttcgcatgtgcagttcacgataggtttcatgctcccatgagaatctaatgctgatgctaatctgactggaggcagagctcagggaaggatgagagtgaaggggagtggctgtctcacgccacttgattactaccctgatttctctatccatagctaccaaccctactttaatatgtgcaactttctgaaaataaaattttaaacaggggactgaaggaaacgagactatttcactcagaaatttggttaaagaaatagttgcaaggtctctctggcctctcccctaccctgctgttatctctgaatcacctgtctctctcgagcacaggattaatctgttctctcaagttcccttactttcctagaaaccagatatgctaaagagaaacagagttgccttctctgaaatttcattaaccagaaaagatgaaaactcatattccagaggaggagattgaaaactaaaccctacacctagagcccagactttgttccaaatcaaactctctgttcaatttaatttccaaagaaattatttattaaccattgtctgagcattaaatctattcattttccccataaaaagcatttactatccctcagacggccccatttctcctaactcttcttcccctatgaagaaggcgttatacacatctgtaccacattgagttactgggtaatcatttttctgtaatttccttatgctatgcacattaaaattaatttgtatgcattttcct

SEQ ID NO: 464221 - DNA, 924 bp, Homo sapiens
ttggaattttgtagtgttatgtagtagagtgaggaaggagcagtcctctagtctcacgatgatgggagacagtgatacgtcatcaggcatgatcttctctcaagaagcctgcaacctggaatcttctcacaaggagtgtgcaacctagattcttctcacaaggagagtgcaagctaaattcttcgcatgtgcagttcacgataggtttcatgctcccatgagaatctaatgctgatgctaatctgactggaggcagagctcagggaaggatgagagtgaaggggagtggctgtctcacgccacttgattactaccctgatttctctatccatagctaccaaccctactttaatatgtgcaactttctgaaaataaaattttaaacaggggactgaaggaaacgagactatttcactcagaaatttggttaaagaaatagttgcaaggtctctctggcctctcccctaccctgctgttatctctgaatcacctgtctctctcgagcacaggattaatctgttctctcaagttcccttactttcctagaaaccagatatgctaaagagaaacagagttgccttctctgaaatttcattaaccagaaaagatgaaaactcatattccagaggaggagattgaaaactaaaccctacacctagagcccagactttgttccaaatcaaactctctgttcaatttaatttccaaagaaattatttattaaccattgtctgagcattaaatctattcattttccccataaaaagcatttactatccctcagacggccccatttctcctaactcttcttcccctatgaagaaggcgttatacacatctgtaccacattgagttactgggtaatcatttttctgtaatttccttatgctatgcacattaaaattaatttgtatgcattttcct

SEQ ID NO: 464222 - DNA, 1253 bp, Homo sapiens
actcattaaatgtctaagtcacttccaaataagaaaaaaatgctaaaacaaaaatttctaaatgaaattgatcatcaatgcttgtgggttgtgggtaaagatcttgatcaaaaggaggaaatgtctgaaagctgtaagaatcaaaatggagtcacttgtgttaaaaccctgacaaatagagctggggaaggccatgaactggaagataaaacacgactgaaaaatagctattgcaggctgggtagtccaagatcaaagacatcagaaaatttggtgtctggcgagggtccacttcccaattcatgcacagtatcttttggctataacatcttatggttaaaaggtgggagtcctgaccttgttttcctgcaactaaacagtctcacgatgatgggagacagtgatacgtcatcaggcatgatcttctctcaagaagcctgcaacctggaatcttctcacaaggagtgtgcaacctagattcttctcacaaggagagtgcaagctaaattcttcgcatgtgcagttcacgataggtttcatgctcccatgagaatctaatgctgatgctaatctgactggaggcagagctcagggaaggatgagagtgaaggggagtggctgtctcacgccacttgattactaccctgatttctctatccatagctaccaaccctactttaatatgtgcaactttctgaaaataaaattttaaacaggggactgaaggaaacgagactatttcactcagaaatttggttaaagaaatagttgcaaggtctctctggcctctcccctaccctgctgttatctctgaatcacctgtctctctcgagcacaggattaatctgttctctcaagttcccttactttcctagaaaccagatatgctaaagagaaacagagttgccttctctgaaatttcattaaccagaaaagatgaaaactcatattccagaggaggagattgaaaactaaaccctacacctagagcccagactttgttccaaatcaaactctctgttcaatttaatttccaaagaaattatttattaaccattgtctgagcattaaatctattcattttccccataaaaagcatttactatccctcagacggccccatttctcctaactcttcttcccctatgaagaaggcgttatacacatctgtaccacattgagttactgggtaatcatttttctgtaatttccttatgctatgcacattaaaattaatttgtatgcattttcct

SEQ ID NO: 464223 - DNA, 1353 bp, Homo sapiens
gtcctcataacagccaacttcttgcaactttcaagctgacggcctcaggaatgggaggaaggactcctccactggagaactgatagcagtattctggtagaggaggcatcaagagtcctgggaggccggtggtaatcatgtaggcaccatggaaactgctatgtgcgtttgctgtccatgttgtacatggcagagatgttgtcctcagttatgctcctgtctgtgctgcaagttcatcttcacctcagagcggaactgcacctgcttcccctgcccttacaaagatgagcggaactgccagttctgccactgcacctgttctgagagccccaactgccattggtgttgctgctcttgggccaatgatcccaactgtaagtgctgctgcacagccagcagcaatctcaactgctactactatgagagccgctgctgccgcaataccatcatcactttccacaagggccgcctcaggagcatccatacctcctccaagactgccctgcgcactgggagcagcgatacccaggtggatgaagtaaagtcaataccagccaacagtcacctggtgaaccacctcaattgccccatgtgcagccggctgcgcctgcactcattcatgctgccctgcaaccacagcctgtgcgagaagtgcctgcggcagctgcagaagcacgccgaggtcaccgagaacttcttcatcctcatctgcccagtgtgcgaccgctcgcactgcatgccctacagcaacaagatgcagctgcccgagaactacctgcacgggcgtctcaccaagcgctacatgcaggagcacggctacctcaagtggcgctttgaccgctcctccgggcccatcctctgccaggtctgccgcaacaggcgcatcgcttacaagcgctgcatcacctgccgcctcaacctgtgcaacgactgcctcaaggccttccactcggatgtggccatgcaagaccacgtctttgtggacaccagcgccgaggaacaggacgagaagatctgcatccaccacccatccagccgcatcatcgagtactgccgcaatgacaacaaattgctctgcaccttctgcaagttctctttccacaatggccacgacaccattagcctcatcgacgcctgctccgagagggccgcctcactcttcagcgccatcgccaagttcaaagcaggtcctccccttttccactccttcagcctaacttctagttcaggaacacatggggaagatggcgtggggtaatctgttaagtgagtgccttaacagattccacctagtggagcaatcaaggcaccaggaaacactgtgctaccctgcaagtcactatcctggtgtcc

SEQ ID NO: 464224 - DNA, 1262 bp, Homo sapiens
tggctttctcaagttgcgcagcattcttcaggagaaagagaagatcatcatggagcagatagagaatctagaagtgtccaggcagaaggaaattgaaaaatatgtgtatgttacaaccatgaaagtgaacgagatggatggtctgatcgcctactccaaggaagccctgaaggagactggccaggtggcattcctgcagtcagccaagatcctggtggaccagatcgaggacggcatccagaccacctacaggcctgacccacagctccggctgcactcaataaactacgtgcccttggactttgttgagctttccagtgccatccatgagctcttccccacagggcccaagaaggtacgctcctcaggggactccctgccctccccctaccccgtgcactcagaaacaatgattgccaggaaggtcactttcagcacccacagcctcggcaaccagcacatataccagcgaagctcctccatgttgtccttcagcaacactgacaagaaggccaaggtgggtctggaggcctgtgggagagcccagtcagccacccccgccaaacccacagacggcctctacacctactggagtgctggagcagacagccagtctgtacagaacagcagcagcttccacaactggtactcattcaacgatggctctgtgaagaccccaggcccaattgttatctaccagactctggtgtacccaagagctgccaaggtttactggacatgtccagcagaagacgtggactcttttgagatggaattctatgaagtcattacttctcctcctaacaacgtacaaatggagctctgtggacaaattcgggacataatgcagcaaaatctggagctgcacaacctgacccccaacacagaatacgtgtttaaagttagagccatcaatgataatggtcctgggcaatggagtgatatctgcaaggtggtaacaccagatggacatgggaagaaccgagctaagtggggcctgctgaagaatatccagtctgccctccagaagcacttctgagccccttcagagcaggaaacaacctcagactcatcacaaagtagacatatacacacacatatatgtatgtatatttttctcaccacattcttcaaggaggttgtagacaaatgtttccatgacctctcagctttccaacaggaatcttgtaagagctaataaaaggaaatacctgacatggcttgctgtttgttcaatgacaactatttgttatgatgacagt

SEQ ID NO: 464225 - DNA, 1056 bp, Homo sapiens
  misc_feature (973)..(973): n is a, c, g, or t
  misc_feature (995)..(995): n is a, c, g, or t
  misc_feature (1008)..(1008): n is a, c, g, or t
  misc_feature (1017)..(1017): n is a, c, g, or t
gcgcagcaacctccaccaggcctccgcgtctggactcccgccctgcctctgggcctcctccgcccaccggcggcgtctcccgcgaagcccgctgggcctcgctctcaccctcctcctcctcctcacgccgggccttgctcttggccttggatttctggctgcgcagttcgcgtccccgcggctccccgccggccgcgcgtttccgagccatgttgcttgtctgggcaaattccacttcgcgagtgacgcacccggccgcgatgcgctagaacgccggccccgccccgaggcggtgcgcttggccacgccccttcgttggaggcctagtcacgcccctaaaggaagctccaccccatacccgtggccactaaaaaactgcgggaagcaggaaagagcacaacaggtttctctctatttccggtgtattgtatcctcacgtttccggagattgacgttgctcttgtgttctcgcgagaggcgggaaagggcgcagggtttgaaacatggcggacgacgtagaccagcaacaaactaccaacactgtagaggagcccctggatcttatcaggctcagcctagatgagcgaatttatgtgaaaatgagaaatgaccgagagcttcgaggcagattacatgcttatgatcaacatttaaatatgatcttgggagatgtggaagaaactgtgactactatagaaattgatgaagaaacatatgaagagatatataaatcaacgaaacggaatattccaatgctctttgtccggggagatggcgttgtcctggttgcccctccactgagagttggctgaaacaaagaatttgtcctgtatggaaaacgggagactttgtacagtggcctctctaaaagtacaaaacattcataagagaaacctgcatacattttgatattaagaaataattccggggattcttccactcctgaaatgagttgatttgcagataactcacnacttcttaagctaaatggtatnttcatttttctcnagctctccnataaatatgaccaccaagatgcaacaaaaaacaaaccac

SEQ ID NO: 464226 - DNA, 693 bp, Homo sapiens
gcgcagcaacctccaccaggcctccgcgtctggactcccgccctgcctctgggcctcctccgcccaccggcggcgtctcccgcgaagcccgctgggcctcgctctcaccctcctcctcctcctcacgccgggccttgctcttggccttggatttctggctgcgcagttcgcgtccccgcggctccccgccggccgcgcgtttccgagccatgttgcttgtctgggcaaattccacttcgcgagtgacgcacccggccgcgatgcgctagaacgccggccccgccccgaggcggtgcgcttggccacgccccttcgttggaggcctagtcacgcccctaaaggaagctccaccccatacccgtggccactaaaaaactgcgggaagcaggaaagagcacaacaggtttctctctatttccggtgtattgtatcctcacgtttccggagattgacgttgctcttgtgttctcgcgagaggcgggaaagggcgcagggtttgaaacatggcggacgacgtagaccagcacaatctcggcgaccagctctggaggcgagcgattgagcacactgtggacggtgcggaggagggaggaccagccctcgttgtggaaggggatgatgatgcttgtgttgggaagtgtctccaggtagcgcttgctacttgcagtttgggtgcttaagcgatcaagcaag

SEQ ID NO: 464227 - DNA, 726 bp, Homo sapiens
gcgcagcaacctccaccaggcctccgcgtctggactcccgccctgcctctgggcctcctccgcccaccggcggcgtctcccgcgaagcccgctgggcctcgctctcaccctcctcctcctcctcacgccgggccttgctcttggccttggatttctggctgcgcagttcgcgtccccgcggctccccgccggccgcgcgtttccgagccatgttgcttgtctgggcaaattccacttcgcgagtgacgcacccggccgcgatgcgctagaacgccggccccgccccgaggcggtgcgcttggccacgccccttcgttggaggcctagtcacgcccctaaaggaagctccaccccatacccgtggccactaaaaaactgcgggaagcaggaaagagcacaacaggtttctctctatttccggtgtattgtatcctcacgtttccggagattgacgttgctcttgtgttctcgcgagaggcgggaaagggcgcagggtttgaaacatggcggacgacgtagaccagcaacaaactaccaacactgtagaggagcccctggatcttatcaggctcagcctagatgagcgaatttatgtgaaaatgagaaatgaccgagagcttcgaggcagattacatgcttatgatcaacatttaaatatgatcttgggagatgtggaagaaactgtgactactatagaaattgatggagcgtcgcgctgggtaccga

SEQ ID NO: 464228 - DNA, 594 bp, Homo sapiens
  misc_feature (62)..(62): n is a, c, g, or t
  misc_feature (511)..(511): n is a, c, g, or t
  misc_feature (533)..(533): n is a, c, g, or t
  misc_feature (546)..(546): n is a, c, g, or t
  misc_feature (555)..(555): n is a, c, g, or t
tagtgcactcttctatatccacgagggtaagggtctgaaacatggcggacgacgtagaccancaacaaactaccaacactgtagaggagcccctggatcttatcaggctcagcctagatgagcgaatttatgtgaaaatgagaaatgaccgagagcttcgaggcagattacatgcttatgatcaacatttaaatatgatcttgggagatgtggaagaaactgtgactactatagaaattgatgaagaaacatatgaagagatatataaatcaacgaaacggaatattccaatgctctttgtccggggagatggcgttgtcctggttgcccctccactgagagttggctgaaacaaagaatttgtcctgtatggaaaacgggagactttgtacagtggcctctctaaaagtacaaaacattcataagagaaacctgcatacattttgatattaagaaataattccggggattcttccactcctgaaatgagttgatttgcagataactcacnacttcttaagctaaatggtatnttcatttttctcnagctctccnataaatatgaccaccaagatgcaacaaaaaacaaaccac

SEQ ID NO: 464229 - DNA, 283 bp, Homo sapiens
caacaaactaccaacactgtagaggagcccctggatcttatcaggctcagcctagatgagcgaatttatgtgaaaatgagaaatgaccgagagcttcgaggcagattacatgtaagtaaatttatcaagttaccttgaaatcagattccttcctacccccactcccttgaaatgtaaaacctgtccagagtgaaagggtattttgaaggaagagagggtggtggaaagtcacccatatcacataagccaaataaagcggcatgtattcacatttttaacattt

SEQ ID NO: 464230 - DNA, 3445 bp, Homo sapiens
gcgcagcaacctccaccaggcctccgcgtctggactcccgccctgcctctgggcctcctccgcccaccggcggcgtctcccgcgaagcccgctgggcctcgctctcaccctcctcctcctcctcacgccgggccttgctcttggccttggatttctggctgcgcagttcgcgtccccgcggctccccgccggccgcgcgtttccgagccatgttgcttgtctgggcaaattccacttcgcgagtgacgcacccggccgcgatgcgctagaacgccggccccgccccgaggcggtgcgcttggccacgccccttcgttggaggcctagtcacgcccctaaaggaagctccaccccatacccgtggccactaaaaaactgcgggaagcaggaaagagcacaacaggtttctctctatttccggtgtattgtatcctcacgtttccggagattgacgttgctcttgtgttctcgcgagaggcgggaaagggcgcagggtttgaaacatggcggacgacgtagaccagctgcacagtattccatggtgtatatgtgccacattgtcttaatccagtctatcattgatgcacatttgggttggttccaagtctttgctattgtgaatagtgccgcaataaacatacatatgtatgtgtctttatagtagcatgatttataatcctttgggtatatgcccagtaatgggattcctgggtcaaatagtatttccagttctagatccttgaggaatcaccacactgtcttccacaatggttgaaataattttcactcccaccaacagtgtaaaagcatttcagtttttccacaacctctccagcatctgttgtttcctggctttttaatgatcgccattctaactggcatgagatggtatctcattgtggctttgatttgcatttctctaatgacagtgatgatgagctttttttcatatgtcttttggctgcataaatgtcttcttttgagaagtgtctcttcatatcctttgcccattttttgatggggttgttttttttcttgtagatgtgtttaagtcctttgtagattctggatattagccttttgtcagatggatggattgtaaaaattttctcccattctgtaggttgcctgttcactcatgatagtttcttttgctgtgcagaagatctttagtttaattagatcccatttgtcaattttggcttttgttgccattgcttttggtgttttagacatgaagtctttgcccatgcctatgtcctgaatggtattgcccgggttttcttctaggatgtttatggtcctaggtcttacatttaagtctttgatccatcttgagttgatttttgtaaaaggtgtaaggaagggatccagtttcagttttctgcatatagctagccagttttcccaacaccatttattaaatagggaatcttttccccattgcttgtgtgcatcagatgtccgctatgtgccaggatctgtccacagaggcctgagcaagaccaactatgtgcacgatgctaagagctgggaaggacctgaaatgggtgaggagatgggaggtgacatggtgttgtgggggcttcaaggtagaagagaaatggatgaaaccagctccatgaacaaggtcaccccgccaatatcacgagaaaatgacatcactgtcagcttccgctcaggaaaaacctgggacttgaataaccaagggaaagggcaggcgcttaagaagacagtgctgagcaccagaggcacagccccaccaccacggagcctgctggtatcttaggcttcattcgtttttctttatttttttcctttctgctcctcatactgagtaatctcaattgacctttcttcaagattgctgattctttcttctacttgttcaaatatgctgttgaatctctctgaaaaaaaattattttaattattgtagttttcaactttagattttctccttggttccccttacaatttctatcacatcattggtaatctctatttttttgaaatataattctcattatttcctttagttttttgtacatagtttcctttagctctttgggtatattttaaatagttggtttatattctgtttagtaagttcaatgtcttgtcttcctcaagaactgtttctattatttctttatttcctgtgtatgggctacactttctcgtttcattgcatgactcataattttttgttgaaagctgaacattttgaatattatgatatggcacatctggaaatcatcttcctcccaccagggtttattgcagctgctttttgtgattgttgttgtttgattgcttagttctctttccttaattaattttgaaaagactttatttgttgttgtatatagccactgaagtctttgttttgttagcctagtggtcagctggtgatttaaatacagacatgtattctttgcctggaacaaaaaaagaaaataaaatctctcggtgtcagcaaatggactctatgtgcatgctggagtataccttcaacacctggagaagcactttaccactctgccttagtcttcacttcctccttgtggagagccttgaggttcgcccccttggttcagtccccctaggtccatgcaggctacaagtggcacttgaacaggcaacagtccgaacacagggactatgaggacatgaacgaagaaggtctgccggagcagaggaactgaaattgaaaggtgaacagggatgccgggccgggtctgccagcagcggatataagtctgtaaaatcagatggactgccaattggagaatgagagctgcccagcctggccttatgttctttcaattaattcataaacagaaagggggatatgcagggagccgaaggcccgtaggattcggcattccactggaggctatgtgatcaaacagcaaactgtttatcatgaatgcagaatgtgggcaaactcacaactgctcctgccgacagaaggtttgctggaggcaatcactccctggcactgaggttatctactgcgacatctagagcctgttgttcgaggaatgcagtcttgcaagcctactctggactgagcagctgaccccttcttccaccccccttctcactatctcttttgcctaataaatatggagggctgtgtaaagctcagggcccttgtctactagaagcaaagtgccccctgactccttcttccaaatacactcttttgtctcttgtcttttattcccgcattcactccctttgttcggtccccctaggtctgtgtgggttacacagtggcaccccgaatagtgacagaatcaggtgttccacattttatgaacacccttcccatcatttgtcatttggtgaattattactcatccttcagattttagctttcaagccatttccttggagagacttcccccaagccccctcatattgaccatttccctct

SEQ ID NO: 464231 - DNA, 264 bp, Homo sapiens
  misc_feature (62)..(62): n is a, c, g, or t
tagtgcactcttctatatccacgagggtaagggtctgaaacatggcggacgacgtagaccancaacaaactaccaacactgtagaggagcccctggatcttatcaggctcagcctagatgagcgaatttatgtgaaaatgagaaatgaccgagagcttcgaggcagattacatgcttatgatcaacatttaaatatgatcttgggagatgtggaagaaactgtgactactatagaaattgatggagcgtcgcgctgggtaccga

SEQ ID NO: 464232 - DNA, 563 bp, Homo sapiens
  misc_feature (480)..(480): n is a, c, g, or t
  misc_feature (502)..(502): n is a, c, g, or t
  misc_feature (515)..(515): n is a, c, g, or t
  misc_feature (524)..(524): n is a, c, g, or t
gtttcgataacttcaccataagacatactcgcaacaaactaccaacactgtagaggagcccctggatcttatcaggctcagcctagatgagcgaatttatgtgaaaatgagaaatgaccgagagcttcgaggcagattacatgcttatgatcaacatttaaatatgatcttgggagatgtggaagaaactgtgactactatagaaattgatgaagaaacatatgaagagatatataaatcaacgaaacggaatattccaatgctctttgtccggggagatggcgttgtcctggttgcccctccactgagagttggctgaaacaaagaatttgtcctgtatggaaaacgggagactttgtacagtggcctctctaaaagtacaaaacattcataagagaaacctgcatacattttgatattaagaaataattccggggattcttccactcctgaaatgagttgatttgcagataactcacnacttcttaagctaaatggtatnttcatttttctcnagctctccnataaatatgaccaccaagatgcaacaaaaaacaaaccac

SEQ ID NO: 464233 - DNA, 481 bp, Homo sapiens
gggactaatggtaaataatgtagacggtttctagttttgtcagtttatttgggcaaaaggattcaaaatgacatttatatttatatgttataaaaagtatttttggacttcatatatcagaaaaatataacaaatttgaaactttggatgtcagaaaagtataataaatctgtagcccacttacagaaacttatataaaaaataatgatttattcttttgttaaaaattatttagtactggctgggcatgatagctcatgcctgtaatcccagagctttaggaggctgaggcattaggatcacttgaagccaggaattcaagaccagcctgggcaacatagtgagaccctgtctctacaaaaaaaattaataaattagccagacatggtggtacacacctgtagacccagctacttgagaggctaaggtgggaggatcacttgagcctaggagttcaaggttacacacacgcacacataca

SEQ ID NO: 464234 - DNA, 451 bp, Homo sapiens
gggactaatggtaaataatgtagacggtttctagttttgtcagtttatttgggcaaaaggattcaaaatgacatttatatttatatgttataaaaagtatttttggacttcatatatcagaaaaatataacaaatttgaaactttggatgtcagaaaagtataataaatctgtagcccacttacagaaacttatataaaaaataatgatttattcttttgttaaaaattatttagtactggctgggcatgatagctcatgcctgtaatcccagagctttaggaggctgaggcattaggatcattgaactcagcaagtggaggttgctatgagctgagattgtgccagttcattccaccctgggcaacagggtgagactctgtctcaaaaaaaaaaaaaaaaaaaaaaagaattccatgattcttttgagctctcaagagctactttagcct

SEQ ID NO: 464235 - DNA, 2399 bp, Homo sapiens
tggagagagcagcaacatttgaacatgacagagataaagttaaaaggcaattcaagggagaccaaagaaaatgaaattcaggacttactgagggccaagagggagttggagagcaaacttcagaggctacaggctcagggtatccaagtatttgatcctggggagtctgattcagatgacaactgtacagatgtcactgctgctggaacccaatgtgaatattggactggcggagccttgggaagtgaaccttccataggaagcatgatccagcttcagcagtccttcagaggccctgagtttgcccatagttctatagatgtggaaggaccctttgcaaatgttaatagagatgactgggatattgctgtagctagtttattacaagttactcctctgttttcacattctctgtggagtaacactgtcagatgttacctcatttatacagatgaaacccagcctgagatggatcttttccttaaggactattcacctaaacttaagagaatgtgcgagacaatgggatattttttccatgctgtttattttccaatagatgttgaaaatcaatacctcactgtaagaaaatgggaaattgagaaaagttctttagttattttatttattcacttaacattaccaagccttttattggaagactgtgaagaagcttttctgaaaaaccctgaaggaaaacctcgattaatctttcatcgtttggaagatggaaaagtcagttctgactctgtccagcaattgattgatcaagtttctaatctaaacaagaccagcaaagccaagatcattgatcactcaggagatcctgcagaaggagtatataaaacttatatttgtgtagaaaagattattaaacaggacatactgggttttgagaacacagacttggagactaaggatttgggcagtgaggattccattccagaagaagatgattttggtgatgttctgtgggacatacatgatgaacaagagcaaatggaaacttttcagcaggcttctaattcagcccatgagttgggatttgagaaatattaccaacgccttaatgatctagtggcagcaccagccccgattccacctcttctcgtgtctggaggaccaggttctgggaagtctcttcttttatcaaagtggattcaattacaacagaagaattcccccaacacactgattctttcccattttgtgggaaggcccatgtcaaccagctcagagtcctccttgattattaaacgactaactctaaagttgatgcagcactcttggtcagtctctgctctgacactggatcctgctaagcttctggaagaatttccacgttggctggaaaaactctctgctcgtcatcaaggcagcatcatcatcgttattgattctatagatcaagttcagtgtttccagtgtcaagatactctttcattatatagacttgttctgcactctatccgggagtccatggcaaatgatgtggataaagagctaatgaagcaggaagatattgaatattgtctcctctcttttgatagtcaggacagagtgacttggagaagtgcagatgaactcccgtggctttttcagcagcagggaagtaaacagaagctgcatgattgccttcttaatctctttgtgtctcaaaacctttataaaaggggacactttgctgagttgctgagttattggcagtttgttggcaaagacaaaagtgcaatggcaacagaatacttcgattcattgaagcagtatgagaaaaactgcgaaggcgaggacaacatgagttgcttagctgatctttatgaaaccttggggcgatttctcaaggatctaggccttctcagtcaggccatagtacctttgcagaggtctttagagattcgagaaacagctttagatcccgatcacccaagagtagcccagtccctccaccaactagcaagtgtatacgtgcagtggaagaagtttggcaatgcagaacaactgtataaacaggcgttggaaatctcagaaaatgcttatggtgcggaccatccatatactgctcgtgaacttgaagcacttgcaactttgtaccagaaacaaaataaatatgaacaagctgaacattttaggaaaaaatcctttaaaattcatcagaaagctataaagaaaaaaggcaacttgtacggatttgcccttttacgtagacgggctttacagttagaagagcttacattaggtaaggacacacctgataatgctcggaccctcaatgaactgggtgttctctactatcttcaaaataacctggagtgagtaccatggggttaataatgaaaataattaaccattttctctttgatgcaatgctgttttacatttttgtcaagtctaaagctaga

SEQ ID NO: 464236 - DNA, 3667 bp, Homo sapiens
tggagagagcagcaacatttgaacatgacagagataaagttaaaaggcaattcaagggagaccaaagaaaatgaaattcaggacttactgagggccaagagggagttggagagcaaacttcagaggctacaggctcagggtatccaagtatttgatcctggggagtctgattcagatgacaactgtacagatgtcactgctgctggaacccaatgtgaatattggactggcggagccttgggaagtgaaccttccataggaagcatgatccagcttcagcagtccttcagaggccctgagtttgcccatagttctatagatgtggaaggaccctttgcaaatgttaatagagatgactgggatattgctgtagctagtttattacaagttactcctctgttttcacattctctgtggagtaacactgtcagatgttacctcatttatacagatgaaacccagcctgagatggatcttttccttaaggactattcacctaaacttaagagaatgtgcgagacaatgggatattttttccatgctgtttattttccaatagatgttgaaaatcaatacctcactgtaagaaaatgggaaattgagaaaagttctttagttattttatttattcacttaacattaccaagccttttattggaagactgtgaagaagcttttctgaaaaaccctgaaggaaaacctcgattaatctttcatcgtttggaagatggaaaagtcagttctgactctgtccagcaattgattgatcaagtttctaatctaaacaagaccagcaaagccaagatcattgatcactcaggagatcctgcagaaggagtatataaaacttatatttgtgtagaaaagattattaaacaggacatactgggttttgagaacacagacttggagactaaggatttgggcagtgaggattccattccagaagaagatgattttggtgatgttctgtgggacatacatgatgaacaagagcaaatggaaacttttcagcaggcttctaattcagcccatgagttgggatttgagaaatattaccaacgccttaatgatctagtggcagcaccagccccgattccacctcttctcgtgtctggaggaccaggttctgggaagtctcttcttttatcaaagtggattcaattacaacagaagaattcccccaacacactgattctttcccattttgtgggaaggcccatgtcaaccagctcagagtcctccttgattattaaacgactaactctaaagttgatgcagcactcttggtcagtctctgctctgacactggatcctgctaagcttctggaagaatttccacgttggctggaaaaactctctgctcgtcatcaaggcagcatcatcatcgttattgattctatagatcaagttcagtgtttccagtgtcaagatactctttcattatatagacttgttctgcactctatccgggagtccatggcaaatgatgtggataaagagctaatgaagcaggaagatattgaatattgtctcctctcttttgatagtcaggacagagtgacttggagaagtgcagatgaactcccgtggctttttcagcagcagggaagtaaacagaagctgcatgattgccttcttaatctctttgtgtctcaaaacctttataaaaggggacactttgctgagttgctgagttattggcagtttgttggcaaagacaaaagtgcaatggcaacagaatacttcgattcattgaagcagtatgagaaaaactgcgaaggcgaggacaacatgagttgcttagctgatctttatgaaaccttggggcgatttctcaaggatctaggccttctcagtcaggccatagtacctttgcagaggtctttagagattcgagaaacagctttagatcccgatcacccaagagtagcccagtccctccaccaactagcaagtgtatacgtgcagtggaagaagtttggcaatgcagaacaactgtataaacaggcgttggaaatctcagaaaatgcttatggtgcggaccatccatatactgctcgtgaacttgaagcacttgcaactttgtaccagaaacaaaataaatatgaacaagctgaacattttaggaaaaaatcctttaaaattcatcagaaagctataaagaaaaaaggcaacttgtacggatttgcccttttacgtagacgggctttacagttagaagagcttacattaggtaaggacacacctgataatgctcggaccctcaatgaactgggtgttctctactatcttcaaaataacctggaaacagctgaccagtttctgaagcgttccttagaaatgagggagcgagttctaggaccagatcaccctgactgtgctcagtctttgaataatctggcagctctatgcaatgaaaagaaacagtatgataaagcagaagaactttatgaaagagctttagatattcggagacgtgcattagctcctgatcacccttctttggcatatacggtgaagcatcttgccatcttgtataagaaaatggggaaacttgacaaagctgtacctttgtatgaattggctgttgaaattcgacagaaatcttttggcccaaagcaccctagtgtagctactgccttggtgaacttagctgttctttatagccaaatgaaaaaacacgttgaagctttgccattatatgaaagagcattaaagatttatgaagatagcctgggtcggatgcatcctcgagttggagaaacactgaaaaatttagctgtgcttagctatgaaggaggagattttgaaaaagctgctgaattatacaaaagggcaatggaaataaaagaagcagaaacatcactcttgggtggaaaagctccttcacgccattcatcaagtggagacacgtttagcttaaaaacagctcattctcctaatgttttccttcagcaaggacaaaggtaatagcagcagttagaattctttgcaaatgtaccttaagacaaaataattaaacatttggaacatttgaatttgaaactttaaaaaaatgttgtacgaaattttactacgtgtgatttaactgctatttgtatgaagttgtattggattacattaagttggaattgtgattatgtctgttttagttgtttaaaagaattttcctattatatggtatccaaggatgtagacacattagaattataagaagacatgaggagcaaatcatgaagagcggattggtctttgttcaacaagagctggcagagtagttaagacaaggagttcaaaaattccatgaatcttggccaggcatggtggctcatgcctgtaatcccaccactttgggagggtgatgcaggaggatcacttgaggccaggagttggagaccagcctggccaacatggtgaaaccctgtctctactaaaaatacaaaaaaaaattagctggacctggtggcgcatgcctgtaatcctagctactcaggaggctgaggcatgagaatcgcttgaactcagcaagtggaggttgctatgagctgagattgtgccagttcattccaccctgggcaacagggtgagactctgtctcaaaaaaaaaaaaaaaaaaaaaaagaattccatgattcttttgagctctcaagagctactttagcct

SEQ ID NO: 464237 - DNA, 2284 bp, Homo sapiens
gccccacgatcgtttccccgcgcgcaggtccgcggggaggggcggcctgccgaccggcccaccccagggcgttcctgaagggcgtcctcggccgcccccaccgcctcccagatgtactatgcggtttcccaggcgcgcgtgaacgcggtccccgggaccatgctgcggccacagcggcccggagacttgcagctcggggcctccctctacgagctggtgggctacaggcagccgccctcctcctcctcctcctccacctcctccacctcctccacttcctcctcctccacgacggcccccctcctccccaaggctgcgcgcgagaagccggaggcgccggccgagcctccaggccccgggcccgggtcaggcgcgcacccgggcggcagcgcccggccggacgccaaggaggagcagcagcagcagctgcggcgcaagatcaacagccgcgagcggaagcgcatgcaggacctgaacctggccatggacgccctgcgcgaggtcatcctgccctactcagcggcgcactgccagggcgcgcccggccgcaagctctccaagatagccacgctgctgctcgcccgcaactacatcctactgctgggcagctcgctgcaggagctgcgccgcgcgctgggcgagggcgccgggcccgccgcgccgcgcctgctgctggccgggctgcccctgctcgccgccgcgcccggctccgtgctgctggcgcccggcgccgtaggaccccccgacgcgctgcgccccgccaagtacctgtcgctggcgctggacgagccgccgtgcggccagttcgctctccccggcggcggcgcaggcggccccggcctctgcacctgcgccgtgtgcaagttcccgcacctggtcccggccagcctgggcctggccgccgtgcaggcgcaattctccaagtgagggcgggcctgggcctggggcgcgacctcggcccggcctcccttcgctcagcttctccgcgcccctgctccctgcgtctgggagagcgaggccgagcaaggaaagcatttcgaaccttccagtccagaggaagggactgtcgggcacccccttccccgcccccacccctgggacgttaaagtgaccagagcggatgttcgatggcgcctcggggcagtttggggttctgggtcggttccagcggctttaggcagaaagtgctcgctctcacccagcacatctctctccttgtccctggagttgcgcgcttcgcggggccgatgtagaacttagggcgccttgccgtggttggcgcgccccgggtgcagcgagaggccatccccgagcgctacctccccggagcggagcacgccggctcccagtactaggggctgcgctcgagcagtggcgggggcggaggggtggttcttttccttctcctccgccagaggccacgggcgcccttgttcccgccggccaggtcctatcaaaggaggctgccggaactcaagaggcagaaaaagaccagttaggcggtgcagacggtctgggacgtggcagacggacggaccctcggcggacaggtggtcggcgtcggggtgcggtgggtaggggcgaggacaacgcagggtgcgctgggttgggacgtgggtccacttttgtagaccagctgtttggagagctgtatttaagactcgcgtatccagtgttttgtcgcagagagttttcgctcttaaatcctgggggtttcttagaaagcaacttagaactcgagattcacctttcgtttccctttccccaaaagtagcgtaaccaacatttaagcttgcttaaaaacgaaaaccaaccgccttgcatccagtgttcccgatttactaaaataggtaaccaggcgtctcacagtcgccgtcctgtcaagagcgctaatgaacgttctcattaacacgcaggagtaccgggagccctgaaccgcccgctgctcggcggatcccagctgcggtggcgacggcgggaaggcgctttccgctgttcctcagcgggccgggcccttgaccagcgcggcccgcaggtcttccttctcgccgtcttgcagttgaagagctacatacgtagtcagtttcgatttgttacagacgttaacaaattcctttacccaaggttatgctatgacctttccgcagtttactttgattttctatgtttaaggttttggttgttggtagtagccgaatttaactggcactttattttacttctaaccttgtttcctgacggtgtacagaatcaacaaaataaaacatttaaagtctgatttttt

SEQ ID NO: 464238 - DNA, 1938 bp, Homo sapiens
gccccacgatcgtttccccgcgcgcaggtccgcggggaggggcggcctgccgaccggcccaccccagggcgttcctgaagggcgtcctcggccgcccccaccgcctcccagatgtactatgcggtttcccaggcgcgcgtgaacgcggtccccgggaccatgctgcggccacagcggcccggagacttgcagctcggggcctccctctacgagctggtgggctacaggcagccgccctcctcctcctcctcctccacctcctccacctcctccacttcctcctcctccacgacggcccccctcctccccaaggctgcgcgcgagaagccggaggcgccggccgagcctccaggccccgggcccgggtcaggcgcgcacccgggcggcagcgcccggccggacgccaaggaggagcagcagcagcagctgcggcgcaagatcaacagccgcgagcggaagcgcatgcaggacctgaacctggccatggacgccctgcgcgaggtcatcctgccctactcagcggcgcactgccagggcgcgcccggccgcaagctctccaagatagccacgctgctgctcgcccgcaactacatcctactgctgggcagctcgctgcaggagctgcgccgcgcgctgggcgagggcgccgggcccgccgcgccgcgcctgctgctggccgggctgcccctgctcgccgccgcgcccggctccgtgctgctggcgcccggcgccgtaggaccccccgacgcgctgcgccccgccaagtacctgtcgctggcgctggacgagccgccgtgcggccagttcgctctccccggcggcggcgcaggcggccccggcctctgcacctgcgccgtgtgcaagttcccgcacctggtcccggccagcctgggcctggccgccgtgcaggcgcaattctccaagtgagggcgggcctgggcctggggcgcgacctcggcccggcctcccttcgctcagcttctccgcgcccctgctccctgcgtctgggagagcgaggccgagcaaggaaagcatttcgaaccttccagtccagaggaagggactgtcgggcacccccttccccgcccccacccctgggacgttaaagtgaccagagcggatgttcgatggcgcctcggggcagtttggggttctgggtcggttccagcggctttaggcagaaagtgctcgctctcacccagcacatctctctccttgtccctggagttgcgcgcttcgcggggccgatgtagaacttagggcgccttgccgtggttggcgcgccccgggtgcagcgagaggccatccccgagcgctacctccccggagcggagcacgccggctcccagtactaggggctgcgctcgagcagtggcgggggcggaggggtggttcttttccttctcctccgccagaggccacgggcgcccttgttcccgccggccaggtcctatcaaaggaggctgccggaactcaagaggcagaaaaagaccagttaggcggtgcagacggtctgggacgtggcagacggacggaccctcggcggacaggtggtcggcgtcggggtgcggagtaccgggagccctgaaccgcccgctgctcggcggatcccagctgcggtggcgacggcgggaaggcgctttccgctgttcctcagcgggccgggcccttgaccagcgcggcccgcaggtcttccttctcgccgtcttgcagttgaagagctacatacgtagtcagtttcgatttgttacagacgttaacaaattcctttacccaaggttatgctatgacctttccgcagtttactttgattttctatgtttaaggttttggttgttggtagtagccgaatttaactggcactttattttacttctaaccttgtttcctgacggtgtacagaatcaacaaaataaaacatttaaagtctgatttttt

SEQ ID NO: 464239 - DNA, 1918 bp, Homo sapiens
gccccacgatcgtttccccgcgcgcaggtccgcggggaggggcggcctgccgaccggcccaccccagggcgttcctgaagggcgtcctcggccgcccccaccgcctcccagatgtactatgcggtttcccaggcgcgcgtgaacgcggtccccgggaccatgctgcggccacagcggcccggagacttgcagctcggggcctccctctacgagctggtgggctacaggcagccgccctcctcctcctcctcctccacctcctccacctcctccacttcctcctcctccacgacggcccccctcctccccaaggctgcgcgcgagaagccggaggcgccggccgagcctccaggccccgggcccgggtcaggcgcgcacccgggcggcagcgcccggccggacgccaaggaggagcagcagcagcagctgcggcgcaagatcaacagccgcgagcggaagcgcatgcaggacctgaacctggccatggacgccctgcgcgaggtcatcctgccctactcagcggcgcactgccagggcgcgcccggccgcaagctctccaagatagccacgctgctgctcgcccgcaactacatcctactgctgggcagctcgctgcaggagctgcgccgcgcgctgggcgagggcgccgggcccgccgcgccgcgcctgctgctggccgggctgcccctgctcgccgccgcgcccggctccgtgctgctggcgcccggcgccgtaggaccccccgacgcgctgcgccccgccaagtacctgtcgctggcgctggacgagccgccgtgcggccagttcgctctccccggcggcggcgcaggcggccccggcctctgcacctgcgccgtgtgcaagttcccgcacctggtcccggccagcctgggcctggccgccgtgcaggcgcaattctccaagtgagggcgggcctgggcctggggcgcgacctcggcccggcctcccttcgctcagcttctccgcgcccctgctccctgcgtctgggagagcgaggccgagcaaggaaagcatttcgaaccttccagtccagaggaagggactgtcgggcacccccttccccgcccccacccctgggacgttaaagtgaccagagcggatgttcgatggcgcctcggggcagtttggggttctgggtcggttccagcggctttaggcagaaagtgctcgctctcacccagcacatctctctccttgtccctggagttgcgcgcttcgcggggccgatgtagaacttagggcgccttgccgtggttggcgcgccccgggtgcagcgagaggccatccccgagcgctacctccccggagcggagcacgccggctcccagtactaggggctgcgctcgagcagtggcgggggcggaggggtggttcttttccttctcctccgccagaggccacgggcgcccttgttcccgccggccaggtcctatcaaaggaggctgccggaactcaagaggcagaaaaagaccagttaggcggtgcagacggtctgggacgtggcagacggacggaccctcggcggacaggagtaccgggagccctgaaccgcccgctgctcggcggatcccagctgcggtggcgacggcgggaaggcgctttccgctgttcctcagcgggccgggcccttgaccagcgcggcccgcaggtcttccttctcgccgtcttgcagttgaagagctacatacgtagtcagtttcgatttgttacagacgttaacaaattcctttacccaaggttatgctatgacctttccgcagtttactttgattttctatgtttaaggttttggttgttggtagtagccgaatttaactggcactttattttacttctaaccttgtttcctgacggtgtacagaatcaacaaaataaaacatttaaagtctgatttttt

SEQ ID NO: 464240 - DNA, 2178 bp, Homo sapiens
gccccacgatcgtttccccgcgcgcaggtccgcggggaggggcggcctgccgaccggcccaccccagggcgttcctgaagggcgtcctcggccgcccccaccgcctcccagatgtactatgcggtttcccaggcgcgcgtgaacgcggtccccgggaccatgctgcggccacagcggcccggagacttgcagctcggggcctccctctacgagctggtgggctacaggcagccgccctcctcctcctcctcctccacctcctccacctcctccacttcctcctcctccacgacggcccccctcctccccaaggctgcgcgcgagaagccggaggcgccggccgagcctccaggccccgggcccgggtcaggcgcgcacccgggcggcagcgcccggccggacgccaaggaggagcagcagcagcagctgcggcgcaagatcaacagccgcgagcggaagcgcatgcaggacctgaacctggccatggacgccctgcgcgaggtcatcctgccctactcagcggcgcactgccagggcgcgcccggccgcaagctctccaagatagccacgctgctgctcgcccgcaactacatcctactgctgggcagctcgctgcaggagctgcgccgcgcgctgggcgagggcgccgggcccgccgcgccgcgcctgctgctggccgggctgcccctgctcgccgccgcgcccggctccgtgctgctggcgcccggcgccgtaggaccccccgacgcgctgcgccccgccaagtacctgtcgctggcgctggacgagccgccgtgcggccagttcgctctccccggcggcggcgcaggcggccccggcctctgcacctgcgccgtgtgcaagttcccgcacctggtcccggccagcctgggcctggccgccgtgcaggcgcaattctccaagtgagggcgggcctgggcctggggcgcgacctcggcccggcctcccttcgctcagcttctccgcgcccctgctccctgcgtctgggagagcgaggccgagcaaggaaagcatttcgaaccttccagtccagaggaagggactgtcgggcacccccttccccgcccccacccagcacatctctctccttgtccctggagttgcgcgcttcgcggggccgatgtagaacttagggcgccttgccgtggttggcgcgccccgggtgcagcgagaggccatccccgagcgctacctccccggagcggagcacgccggctcccagtactaggggctgcgctcgagcagtggcgggggcggaggggtggttcttttccttctcctccgccagaggccacgggcgcccttgttcccgccggccaggtcctatcaaaggaggctgccggaactcaagaggcagaaaaagaccagttaggcggtgcagacggtctgggacgtggcagacggacggaccctcggcggacaggtggtcggcgtcggggtgcggtgggtaggggcgaggacaacgcagggtgcgctgggttgggacgtgggtccacttttgtagaccagctgtttggagagctgtatttaagactcgcgtatccagtgttttgtcgcagagagttttcgctcttaaatcctgggggtttcttagaaagcaacttagaactcgagattcacctttcgtttccctttccccaaaagtagcgtaaccaacatttaagcttgcttaaaaacgaaaaccaaccgccttgcatccagtgttcccgatttactaaaataggtaaccaggcgtctcacagtcgccgtcctgtcaagagcgctaatgaacgttctcattaacacgcaggagtaccgggagccctgaaccgcccgctgctcggcggatcccagctgcggtggcgacggcgggaaggcgctttccgctgttcctcagcgggccgggcccttgaccagcgcggcccgcaggtcttccttctcgccgtcttgcagttgaagagctacatacgtagtcagtttcgatttgttacagacgttaacaaattcctttacccaaggttatgctatgacctttccgcagtttactttgattttctatgtttaaggttttggttgttggtagtagccgaatttaactggcactttattttacttctaaccttgtttcctgacggtgtacagaatcaacaaaataaaacatttaaagtctgatttttt

SEQ ID NO: 464241 - DNA, 2244 bp, Homo sapiens
  misc_feature (1786)..(1786): n is a, c, g, or t
  misc_feature (1789)..(1789): n is a, c, g, or t
  misc_feature (1797)..(1797): n is a, c, g, or t
  misc_feature (1823)..(1823): n is a, c, g, or t
ctatgcacacacacctgtgtttccacccacccaagttggattggaaactacggacccacccagtgaggaagaaggtgacctggtctggggtggggaagagagtctgagagggggtggtggctggcagtctcggtggctggcgacgcctcttccgctcttccttcctgggaggaggcgggcaaggcgaagactctccgctcagtcgatggtttccttcaggacgtctcatagaggtgtgggtgagatcccaggtctgggccgcaatttctagccacgctgcccaaccttcaggcaagcagtcaggttccacagctaccccaccacactctcagagtcgaggggaacaagaagagggagtggtctgtaaatgcgtcgggacaagagtgccctcctaactccacctggagctggcgtcagggcgatctctggatgcccagcccataagcctggactgtctgtgaggaggctgcgtctggctcccgctctcacagccattgcagtacattgagctccatagagacagcgccggggcaagtgagagccggacgggcactgggcgactctgtgcctcgctgaggaaaaataactaaacatgggcaaaggagatcctaagaagccgagaggcaaaatgtcatcatatgcattttttgtgcaaacttgtcgggaggagcataagaagaagcacccagatgcttcagtcaacttctcagagttttctaagaagtgctcagagaggtggaagaccatgtctgctaaagagaaaggaaaatttgaagatatggcaaaagcggacaaggcccgttatgaaagagaaatgaaaacctatatccctcccaaaggggagacaaaaaagaagttcaaggatcccaatgcacccaagaggcttccttcggccttcttcctcttctgctctgagtatcgcccaaaaatcaaaggagaacatcctggcctgtccattggtgatgttgcgaagaaactgggagagatgtggaataacactgctgcagatgacaagcagccttatgaaaagaaggctgcgaagctgaaggaaaaatacgaaaaggatattgctgcatatcgagctaaaggaaagcctgatgcagcaaaaaagggagttgtcaaggctgaaaaaagcaagaaaaagaaggaagaggaggaagatgaggaagatgaagaggatgaggaggaggaggaagatgaagaagatgaagaagaagatgatgatgatgaataagttggttgtagcgcagttttttttcttgtctataaagcatttaacccccctgtacacaattcactctttttaaagaaaaaaattgaaatgtaaggcggtgtaagatttgtttttaaactgtacagtgtctttttttgtatagttaacacactaccgaatgtgtctttagatagccctgtcctggtggtattttcaatagccactaaccttgcctggtacagtatgggggttgtaaattggcatggaaatttaaagcaggttcttgttggtgcacagcacaaattagttatatatggggatggtagttttttcatcttcagttgtctctgatgcagcttatacgaaataattgttgttctgttaactgaataccactctgtaattgcaaaaaaaaaaaaagttgcagctgttttgttgacattctgaatgcttctaagtaaatacaatttttttattagtattgttgtccttttcataggtctgaaatttttcttcttgaggggaagctagtcttttgcttttgcccattttgaatcacatgaattatacagngtntatccttncatatagttagctaataaaaagcttngtctacacaccctgcatatcataatgggggtaaagttaagttgagatagttttcatccataagtggaactttccaaaatcttgatcagttaagaaaatttcacataggcccacttactttaccaacctggggagtaagtcagtctatcaagcagtggctttagaaatcacacttggaaaagctgggcctgaggggctacatgaacagcttgtctacccttacttgaggagccactagctttaatccctacacggtagggggaattggggcgccatttagagacggtaggtttccccagggggttagaaaagcgcataaattgggagctctcgaaaaatggttattttttctgttattttcgggcaaactctaatatatgggccaaaaaaatggttatcactagaaacatatatatacttat

SEQ ID NO: 464242 - DNA, 2196 bp, Homo sapiens
  misc_feature (1738)..(1738): n is a, c, g, or t
  misc_feature (1741)..(1741): n is a, c, g, or t
  misc_feature (1749)..(1749): n is a, c, g, or t
  misc_feature (1775)..(1775): n is a, c, g, or t
ctatgcacacacacctgtgtttccacccacccaagttggattggaaactacggacccacccagtgaggaagaaggtgacctggtctggggtggggaagagagtctgagagggggtggtggctggcagtctcggtggctggcgacgcctcttccgctcttccttcctgggaggaggcgggcaaggcgaagactctccgctcagtcgatggtttccttcaggacgtctcatagaggtgtgggtgagatcccaggtctgggccgcaatttctagccacgctgcccaaccttcaggcaagcagtcaggttccacagctaccccaccacactctcagagtcgaggggaacaagaagagggagtggtctgtaaatgcgtcgggacaagagtgccctcctaactccacctggagctggcgtcagggcgatctctggatgcccagcccataagcctggactgtctgtgaggaggctgcgtctggctcccgctctcacagccattgcagtacattgagctccatagagacagcgccggggcaagtgagagccggacgggcactgggcgactctgtgcctcgctgaggaaaaataactaaacatgggcaaaggagatcctaagaagccgagaggcaaaatgtcatcatatgcattttttgtgcaaacttcagagttttctaagaagtgctcagagaggtggaagaccatgtctgctaaagagaaaggaaaatttgaagatatggcaaaagcggacaaggcccgttatgaaagagaaatgaaaacctatatccctcccaaaggggagacaaaaaagaagttcaaggatcccaatgcacccaagaggcttccttcggccttcttcctcttctgctctgagtatcgcccaaaaatcaaaggagaacatcctggcctgtccattggtgatgttgcgaagaaactgggagagatgtggaataacactgctgcagatgacaagcagccttatgaaaagaaggctgcgaagctgaaggaaaaatacgaaaaggatattgctgcatatcgagctaaaggaaagcctgatgcagcaaaaaagggagttgtcaaggctgaaaaaagcaagaaaaagaaggaagaggaggaagatgaggaagatgaagaggatgaggaggaggaggaagatgaagaagatgaagaagaagatgatgatgatgaataagttggttgtagcgcagttttttttcttgtctataaagcatttaacccccctgtacacaattcactctttttaaagaaaaaaattgaaatgtaaggcggtgtaagatttgtttttaaactgtacagtgtctttttttgtatagttaacacactaccgaatgtgtctttagatagccctgtcctggtggtattttcaatagccactaaccttgcctggtacagtatgggggttgtaaattggcatggaaatttaaagcaggttcttgttggtgcacagcacaaattagttatatatggggatggtagttttttcatcttcagttgtctctgatgcagcttatacgaaataattgttgttctgttaactgaataccactctgtaattgcaaaaaaaaaaaaagttgcagctgttttgttgacattctgaatgcttctaagtaaatacaatttttttattagtattgttgtccttttcataggtctgaaatttttcttcttgaggggaagctagtcttttgcttttgcccattttgaatcacatgaattatacagngtntatccttncatatagttagctaataaaaagcttngtctacacaccctgcatatcataatgggggtaaagttaagttgagatagttttcatccataagtggaactttccaaaatcttgatcagttaagaaaatttcacataggcccacttactttaccaacctggggagtaagtcagtctatcaagcagtggctttagaaatcacacttggaaaagctgggcctgaggggctacatgaacagcttgtctacccttacttgaggagccactagctttaatccctacacggtagggggaattggggcgccatttagagacggtaggtttccccagggggttagaaaagcgcataaattgggagctctcgaaaaatggttattttttctgttattttcgggcaaactctaatatatgggccaaaaaaatggttatcactagaaacatatatatacttat

SEQ ID NO: 464243 - DNA, 1806 bp, Homo sapiens
  misc_feature (1348)..(1348): n is a, c, g, or t
  misc_feature (1351)..(1351): n is a, c, g, or t
  misc_feature (1359)..(1359): n is a, c, g, or t
  misc_feature (1385)..(1385): n is a, c, g, or t
gaatgacagagcggagagagcgaggaggctgcgtctggctcccgctctcacagccattgcagtacattgagctccatagagacagcgccggggcaagtgagagccggacgggcactgggcgactctgtgcctcgctgaggaaaaataactaaacatgggcaaaggagatcctaagaagccgagaggcaaaatgtcatcatatgcattttttgtgcaaacttgtcgggaggagcataagaagaagcacccagatgcttcagtcaacttctcagagttttctaagaagtgctcagagaggtggaagaccatgtctgctaaagagaaaggaaaatttgaagatatggcaaaagcggacaaggcccgttatgaaagagaaatgaaaacctatatccctcccaaaggggagacaaaaaagaagttcaaggatcccaatgcacccaagaggcttccttcggccttcttcctcttctgctctgagtatcgcccaaaaatcaaaggagaacatcctggcctgtccattggtgatgttgcgaagaaactgggagagatgtggaataacactgctgcagatgacaagcagccttatgaaaagaaggctgcgaagctgaaggaaaaatacgaaaaggatattgctgcatatcgagctaaaggaaagcctgatgcagcaaaaaagggagttgtcaaggctgaaaaaagcaagaaaaagaaggaagaggaggaagatgaggaagatgaagaggatgaggaggaggaggaagatgaagaagatgaagaagaagatgatgatgatgaataagttggttgtagcgcagttttttttcttgtctataaagcatttaacccccctgtacacaattcactctttttaaagaaaaaaattgaaatgtaaggcggtgtaagatttgtttttaaactgtacagtgtctttttttgtatagttaacacactaccgaatgtgtctttagatagccctgtcctggtggtattttcaatagccactaaccttgcctggtacagtatgggggttgtaaattggcatggaaatttaaagcaggttcttgttggtgcacagcacaaattagttatatatggggatggtagttttttcatcttcagttgtctctgatgcagcttatacgaaataattgttgttctgttaactgaataccactctgtaattgcaaaaaaaaaaaaagttgcagctgttttgttgacattctgaatgcttctaagtaaatacaatttttttattagtattgttgtccttttcataggtctgaaatttttcttcttgaggggaagctagtcttttgcttttgcccattttgaatcacatgaattatacagngtntatccttncatatagttagctaataaaaagcttngtctacacaccctgcatatcataatgggggtaaagttaagttgagatagttttcatccataagtggaactttccaaaatcttgatcagttaagaaaatttcacataggcccacttactttaccaacctggggagtaagtcagtctatcaagcagtggctttagaaatcacacttggaaaagctgggcctgaggggctacatgaacagcttgtctacccttacttgaggagccactagctttaatccctacacggtagggggaattggggcgccatttagagacggtaggtttccccagggggttagaaaagcgcataaattgggagctctcgaaaaatggttattttttctgttattttcgggcaaactctaatatatgggccaaaaaaatggttatcactagaaacatatatatacttat

SEQ ID NO: 464244 - DNA, 1685 bp, Homo sapiens
  misc_feature (1227)..(1227): n is a, c, g, or t
  misc_feature (1230)..(1230): n is a, c, g, or t
  misc_feature (1238)..(1238): n is a, c, g, or t
  misc_feature (1264)..(1264): n is a, c, g, or t
gaatgacagagcggagagagcgaggaggctgcgtctggctcccgctctcacagccattgcagtacattgagctccatagagacagcgccggggcaagtgagagccggacgggcactgggcgactctgtgcctcgctgaggaaaaataacagagttttctaagaagtgctcagagaggtggaagaccatgtctgctaaagagaaaggaaaatttgaagatatggcaaaagcggacaaggcccgttatgaaagagaaatgaaaacctatatccctcccaaaggggagacaaaaaagaagttcaaggatcccaatgcacccaagaggcttccttcggccttcttcctcttctgctctgagtatcgcccaaaaatcaaaggagaacatcctggcctgtccattggtgatgttgcgaagaaactgggagagatgtggaataacactgctgcagatgacaagcagccttatgaaaagaaggctgcgaagctgaaggaaaaatacgaaaaggatattgctgcatatcgagctaaaggaaagcctgatgcagcaaaaaagggagttgtcaaggctgaaaaaagcaagaaaaagaaggaagaggaggaagatgaggaagatgaagaggatgaggaggaggaggaagatgaagaagatgaagaagaagatgatgatgatgaataagttggttgtagcgcagttttttttcttgtctataaagcatttaacccccctgtacacaattcactctttttaaagaaaaaaattgaaatgtaaggcggtgtaagatttgtttttaaactgtacagtgtctttttttgtatagttaacacactaccgaatgtgtctttagatagccctgtcctggtggtattttcaatagccactaaccttgcctggtacagtatgggggttgtaaattggcatggaaatttaaagcaggttcttgttggtgcacagcacaaattagttatatatggggatggtagttttttcatcttcagttgtctctgatgcagcttatacgaaataattgttgttctgttaactgaataccactctgtaattgcaaaaaaaaaaaaagttgcagctgttttgttgacattctgaatgcttctaagtaaatacaatttttttattagtattgttgtccttttcataggtctgaaatttttcttcttgaggggaagctagtcttttgcttttgcccattttgaatcacatgaattatacagngtntatccttncatatagttagctaataaaaagcttngtctacacaccctgcatatcataatgggggtaaagttaagttgagatagttttcatccataagtggaactttccaaaatcttgatcagttaagaaaatttcacataggcccacttactttaccaacctggggagtaagtcagtctatcaagcagtggctttagaaatcacacttggaaaagctgggcctgaggggctacatgaacagcttgtctacccttacttgaggagccactagctttaatccctacacggtagggggaattggggcgccatttagagacggtaggtttccccagggggttagaaaagcgcataaattgggagctctcgaaaaatggttattttttctgttattttcgggcaaactctaatatatgggccaaaaaaatggttatcactagaaacatatatatacttat

SEQ ID NO: 464245 - DNA, 8075 bp, Homo sapiens
ggaaggcatatatcgtcaaggatgttcagcagtacattcttcatcgtttagatcaagaagaagctttgcgacaacacctcacaaaagaaactgcagagatgttaaatcaactgcacattaaaagcagtggatgctttctttacctagaacgagttttagatggagttgtagaaaattttattatgttaagagaaattcgtgacatcccaggaactctaaatggtttatatctctggctgtgccaaagactttttgtaagaaaacaatttgcaaaggttcagcctattttgaatgtgattcttgcagcctgccgacctttgaccataacggaattatatcacgcagtatggaccaaaaacatgtcgttaactttggaagattttcaacgcaagttagatatcctctccaaacttcttgttgatggactaggaaatacaaaaatactgtttcattatagttttgccgagtggcttctggatgtgaaacactgtactcagaagtatttatgtaatgcagcagaaggacacagaatgttggctatgagttatacctgtcaagccaagaatttaacaccattggaagcacaagaatttgcattgcacttaattaactcaaacttacaattagagacagcggagttagctctgtggatgatatggaatggtacacctgtcagagattccctttctactttgatacccaaggaacaagaagtgctacagctgttggttaaagctggggctcatgtcaacagtgaagacgatcgcacatcatgcatagttcgacaagccttagaaagagaggattccattcggacattattagataatggagcttcagtaaatcagtgtgattcaaatgggagaacattattggctaatgctgcatatagtggcagtcttgatgtagtcaatttacttgtctctaggggagcagatttagagatagaagatgctcatggacatacaccactcactctagcggctagacagggacataccaaggtggttaattgtttgattgggtgtggagcaaatattaatcatactgatcaagatggttggacagcattaagatctgctgcttggggtggccatactgaggtagtttctgcactactttatgctggcgtaaaagtggattgtgcagatgctgatagccgaacagctttgagagcagcagcatggggaggacacgaggatattgtactgaatttgctacaacatggcgctgaagtgaacaaagctgataatgaaggtagaactgctttgatagcagcagcatacatgggacatagagagattgtggaacacctactggaccatggagcagaagtaaatcatgaggatgttgatggcaggactgcactctctgtagctgcactttgtgtgcctgcaagtaaagggcacgcatcagttgttagccttttaattgatcgaggtgctgaagtagatcattgtgataaagatggcatgactccactgctggtagctgcctatgaaggacatgttgatgtggttgacttgcttctagaagggggagcagatgtagatcacacagataacaatggccgtacacccctcttagcagcagcgtctatgggtcatgcatcagttgtaaatacacttttgttttggggtgcagctgtggatagtattgatagtgaaggtaggacagtcctcagtatagcttcagcacaaggaaatgttgaggtggtacgtactctactggatagagggttagatgaaaatcacagagatgatgctggatggacacctttgcacatggcagcttttgaagggcacagattgatatgtgaagcacttattgaacaaggtgctagaacaaatgagattgacaatgatggacgaatccctttcatattagcttcacaagagggtcattatgattgtgttcaaatattactggaaaacaaatccaacattgatcaaagaggttatgatggaagaaatgcactgcgggttgctgcattagaagggcacagggacattgttgaattgctttttagccatggtgctgatgttaactgcaaagatgctgatggtcggcctacactttatatcttggccttagaaaatcagcttacaatggccgaatattttttagaaaatggtgcaaacgtagaagcaagtgatgctgaaggaaggacagcacttcatgtgtcttgttggcaaggccatatggaaatggtgcaggtcctgatagcataccatgctgacgtcaatgctgcagacaatgaaaagcgctctgctttgcagtctgcagcctggcagggccatgtaaaagtggttcagcttctgattgagcatggtgctgtagttgaccatacatgtaaccaaggtgcaactgcactctgtattgcagcccaggaagggcacattgatgttgttcaggtcttattagagcatggtgctgatccaaaccatgctgatcaatttggacgcactgctatgcgtgttgcagccaaaaatggacattctcagataattaaattattagaaaaatatggtgcatctagtttgaatggctgttccccatctcctgttcacacaatggagcaaaaacctctacagtcattgtcttcaaaagtgcagtcattaacaattaaatcaaatagctctggtagtactggtggaggggatatgcagccttcgttacgtggtttacctaatgggcctactcatgcttttagttctccttcagaatctccagattctacagttgaccggcagaagtcatcactgtcaaataattccctgaaaagctcaaaaaattcatctttgagaactacttcatctacagcaacggctcaaacagtgccaattgatagctttcataacttgtcatttacagaacaaattcagcagcattcattgccacgcagtagaagtcgacagtcaattgtttccccatcttccacaacacagtccttaggacagagtcataattcaccaagtagtgaatttgagtggagtcaagtaaagcccagtttgaagtcaactaaagcaagtaaaggggggaaatcagaaaattctgccaagtctggatcagctgggaaaaaagcgaaacaaagtaattcttcacagccaaaggttttagaatatgaaatgactcagtttgatagaagaggacctatagccaaatccgggactgctgcaccacctaaacaaatgccagcagaatctcaatgcaaaattatgataccttcagctcagcaggaaattggtcgatctcaacagcagtttcttattcaccaacaaagtggggaacagaagaagagaaatggaataatgacaaatccaaattatcatcttcagagcaaccaggtttttcttggtagggtttcagtcccacgaacaatgcaagatagagggcatcaggaagtgttggagggatacccttcctcagagacagaattaagccttaaacaagctctgaagcttcagattgaaggttctgaccctagcttcaactataaaaaggaaacaccattataaaagtttcctattctgtgaaacagaagacattgtgatggagtggttcttcagctactggatggaaacatatgcctgttgatttgctgaaaaaacaaaaaaaatgaagaatgtgatctctgcagtacagttaccttaattactgtaatgtgcctaaatagtaaggctgccttctcaatgtaaccctctgtgcttaaaaaatttcattttgtgtgctttgtattcactacacaggaataagcactttttaaaaatgcagatacatactgcagttccctgataaaagctgaaaagaaaatttgagtattttaagttaagatgtgataaaaaatgtgcatgtgccataatcaaatatatatgaaaaggcagtgttccttgtatttatttttttttctttttgtggcaaaagaaacttaaacatactgtttcagtcacattgcattgtagtgtatggcctgtttcttgtatctttaaagacgttgctcaataaaacaaatcttgcaactgttctatgttcactacaccttcagcattggataaaaatcattttctatataaatatcacattgaaatgaaaaaatgatttcttggcagtttaaaaaaaatattttatagtagtttagggagctgctttaagtagtttaaatctggattttcccagtagaattcttctcatctctggctaaacatgtcagaacaaacaaccaaccagtctgtaggcagaacaaagtcctatttcatccgctgggatacaatttcatcttccattcactttgtcattccacctctaagaagacagactatcattcctgaggcatgaaaattctcagggacaaagccatgcctcagtcacatgtgtgtgcagagagaaatgcacctgtctatctaagggtagatttttgatccctgaataattcattgactaaactgacctcttcctcctggctaaataaattaattttgctggcttctctctcagcggtttctattttgtaaattgctgcatgaccaaaatagccccactcaaaatcaattggattaattttaatggtttggttggatgaatattctggatgaatataaaatgtgctgcccttcacagatgacaccactcccctgtcaatcatagcacatgtgtactttttattgttacttaatagtgatggatttgcacttttctatcctcatactctttcctgttttcttctttgtacaattgcatgcaggagggctggatgccagggttaagagagaaattcatgacaaggaaggtaaaattggttcaaatgagcatgtgtcccacagccttagtctccttactcttaaatcagtggagctgtagcttagatgggtcgtttatatgtctggaaaagttgtcataacagtttagaagccaaggttgtggatttgatcttagaatgggcctgttaatcttatagaacccagaaattctgttcttttcatgtactgttgatgaggaatgaggaaagagaatttggagattcagcacaaaaccattgctacttctagaacaaaatctttagaatatgtcctaataacaaaggtcagtaatgtcatcttcatatatgaaggacacatgtgatacattgttcgtggaaatagaaatgtataattatgataaatgtttcacttgaatcttattgtaaggcttttcttgcttttattttttaaagtcagcaaaactcattttgtctgtcatctataagtcatagtgaggactacgagataagttgataagttcaattgatattaaggtgacatggcaatattaataactcaaatgtgaatgtttcaagtattgaattgcgttgcctatgggacatttattaaataaaattaatgggactcttgcaaagtagccttaaaagtgttaatgagtctattaataaatatgaacacatactattattagaaccaactttactcatatctcaaatacagtacatttacattactgtagaggatgaagctctaatttctattacatgtaattttctttagaaagagaaccctgaaagctgccagtttttctattaactttgaattattgaaattgtatttatttaattttattgtttttacaaaattgcaccttgtgtccaaagggcgaagatatgacattgcataagggatttatgtttttcaaagagctaactgttttcatatccatactatatacacttgaagcaattggtaggaagagaacctattggaaaaatacgattttcaaaagtaagtattcctcgggatgtttttatataaattatgttttggaatagaacataaatgactttgagttaggataaggatgataggatgggtgctggagatgccctgccttgcttatttgtttctgtgggggatttaatactataaatgaaaatggcttctgctccattaaaaagtaaaaattgtcctccaaatataaaactccttaatagatatttttgaaattaaaatctttaaattttataaatcagctgttgccactacacaactatgatggcatgtgcttataacatttttataacattccgtctgtgtctattccctaaatatcatgagtttataataaggaaagtgataaaaatacagtaatgaaataaaaatctgaatgtttctaagaaaggttttggaaggaaaaatgacctgaaatcagtgcgtactgcaaagtacagccaataatttttgttctttgttttcacccccaccctcactggaattctcaccaaaaatagtttgatacttaaaaaacagaagtaaatacttttctcaatattgttttggctatgcaaatatttgttttgcttaatgtcctccatttacacttctcagcaaatgtagttgcaaacaaatgctttctttttatttttcccttggtttgaggtatgtaaatagccaaaaatgtacattgaatttcacattgtaaaagttttattttatcccttgtatgatattactcaaaaaatccctgtgtatatgaaagtgcataataaatatatttgctttacagagaagatcttgttttaattttgtccttgaaccagtagaacatgcatgatatgcatatagcataaacaactgttagttgttttaagttattatcttaaataaatcctgagcaaatgaatttggaaacattttgcaaagaagaaagtgaaatataacactgtccaaaggaaggtagaaaaacaaagatttactgtttatgtcttcctaagcctttttaaagacttaatgttcttttcccccccgtgactgattatatactatatcacaccatgtcaggttttgtgcctctgagaattgcagtaatccaataacttttgtatatgtgtgctccttgatcatcagaatattatggccatcttatggcggatattttgggagtttattgcaaacatggtcattcattttctaaataaaatttgtgtgtttcttcactcagtaaacttgcgtcacttcttcatgacctctttccccaccagaacacagcatacacatgctgtatgtatacatacacacaaatggctttttgaatttgtgggttccacatccctggatgcaaccaatctcagataaaatattcggaaagaaaattctaaagttctgaaaaacaaatttgctatgtgccaagtactacctgagtccacctgaatgaagtgatgtgtaggcattgtattaggtattgtaagtaatctagagatgatttaaagtatacagagcatatgcgtaggttatatataaatgttgtgccatttcatataagggacaggagtgtctgaggattttggtatccaagaggagtcctggaaacaatctccctatgtttactaatgaataactatcctattactccaaagagaggtttctaaaaaggccaacaaggtatcttctgttctgtaatttcatgaaaattgtagtgttctgcagttatattttttataaatttgttgaattaatataaatcttattctaaaaaattaataatataacaatgtgtttaaacacaaatgtatggtatacatagaagaatttaaaaacagaccggtagctaaataaacttacatggagttttctagctaatggtccaaggaaatacactgtgagaacttggtgataattaatgttttcactcctttgccctagcagttggaaggattacaactacagtcgtcccactgtatcctgggtggattggttccaggaacccaggtgggtactaaaatctttgtatgctcaagtcccacagttggcctcctgtatttacagattctgcatctctccaatattgtattttccatctgtgattgggagaatctgtagatgcagaatccacagataggaagggctgaatgtagcagtgatgagatacaccctgaggattatgttgtagaatttctgtgaaaaattcatttattgtgcaaatatttgtgctaatcttattttcaagatatagcctctgcttaccagtcttgctgttatagtaaaattataattagccaattttaaaataaaattatttgaaatttaaaaaaa

SEQ ID NO: 464246 - DNA, 2674 bp, Homo sapiens
agaaagtgcagagtgagaagagaagagagtcctatagagagaggactccaagagtgatgctgaaggacgtggatgaagctggaagccatcattctcagcaaagttacactggaacagaaaaccaaacaccacatgttctcactcgcacaacgtgtttgattgctctgctatcagataaagacctcactgtggccaacgtgggtgactcgcgcggggtcctgtgtgacaaagatgggaacgctattcctttgtctcatgatcacaagccttaccagttgaaggaaagaaagaggataaagagagcaggtggtttcatcagtttcaatggctcctggagggtccagggaatcctggccatgtctcggtccctgggggattatccgctgaaaaatctcaacgtggtcatcccagacccagacatcctgacctttgacctggacaagcttcagcctgagttcatgatcttggcatcagatggtctctgggatgctttcagcaatgaagaagcagttcgattcatcaaggagcgcttggatgaacctcactttggggccaagagcatagttttacagtcattttacagaggctgccctgacaatataacagtcatggtggtgaagttcagaaatagcagcaaaacagaagagcagtgaacccttcaggggtctcagctgccttagactaaaggactttcaacacactggtctcttttaatttagtgaaaagtgtgggagttgtaattaggatcatccaccccagacatggaatcccccctccctggtggtcttaggtctataatcagtgacgaacagagggtgcccttggccaatgtagttaagaaactggaaaatggtttcttcatgttttcccaactctttcatccagtgtccaaaatatataagtaaatagctgtagagtcacatatatgaagtgaatagcatatgtgtcatttagtctccctgaagattcttttcaagatcctgttcagggtcctccaggcatcagctgttgtgtcctctctttgtaacagtggacaggacagaccacccagtgctgcaggagacaggccactgcgtcacctgtgagtggtcaggggctgatgtggcaacaccctctgccaagagacagagctgtcctgagaatgctttgtccttctgagcccatgttttctgctcagtagcagcttggaagcagatttggaatggtttattattttggctgctcttggggactgcgagaagcagagagaatgagagaccagtggcaactgcctgcacagcagagataaccctcttcccttgcttcctttaatagttaaatagactttgtataccacctggaccagcctttgtgcatttatcctaatcatgcatgaccgttaaccttttgcttagtccttaccatatgtaataggcagctgttaaattcaccaacagataccctgatttttcatcttacgtgaccaagaaaccacgttaggggaaatgaaaaaagcaagccacaataccatgattccttccattttcaacagtagatgaaggaaatgatactgaatgagtcacagtgttccctggcaagtaagctgtttgcattgagaaaggagggaagagaaggattatagaaaaggagaaaagggaggagcaagaacatctctccatggcctatttttatttttgttcccaagagactagtgtaataaccttatgcccccaaagacagcccagaactgagtatcttcagtggttcctgagtgtaaatcagtgaatctgttatatagaaagttaacatttcaggagcacaattatttcctgatttcaaatatgaacagaagactaaatgtcatttttttaaatcataaatttggtatccatagttactttacacattccagagtctaagcatggaatttaagttttgtattttgaacaaaaatagcaacatctgttttctgtatggcaaagaaaaactaaatcccagacttttatttttaaccacagaaaccatcacttctttctaaattatttgcttgcctgctcatttcccctaaacatctctgtttatgccaatggctttttaaatccaaataatactagttattgccaaattgcattagaatcctattgaattagaataattcatatacttcatatactaggcagtaaatggttagagacggtaaagatctgattgtgatcaaaagtagggtttttgttttgtttttaatcatgagcacatataaaaggaaattcaaatgaaaccaagccaatttctgatttagtaagattaaaaccatagatggagctcagttattaaggatggaaaggaggaaagcacagagtgaggagagaaaaaggggaaggaaaaaaagtagtgtttttttggggaacagtataatgtctcagaagttcttctctcttatcctgctgatgttgagacagtggctttgtataagcttttatttatacctatttcaacatcatgaaaatttttccatcagcattttcttgcaactttaaaaatcacaagggattatttgtttataaagagatacaggatctataatttattggcaatactttattttaggaatcttcaaattgtacttaataaataaatcacaggtcaaaatgactgtaaaatcaatcaggctttctcgtaagttatttcctgaaaa

SEQ ID NO: 464247 - DNA, 1224 bp, Homo sapiens
gctgacccctgtggctggactaatgtgtcatttcttaaaagcttttaatatgtttgcaggcttagccacaggagcaaagcaaattgttcttgagatcttcaaagcaggcgtgcaggtttcaccagttcttcctcttgccctgggcaggtctgcaagtctgctggaacctggaacacagcagccctcctgcccagccaccccattcctgagcttcctctccatgcaagagtccacttgtaaaacaaacaacgggctgggagttgtgtctccccttcaccaccagtttaaaaaaaatctcactcccgttcaggagcctggcaaccatgcattacccaacaatggttaccgtggctgcaaggaggaagcagacagcaagcccacagaagtgtttattgaagaaagggaagtcaatagtccctggagttaatgagtgattgttatttatggaaggaatggtatttgcagatgggaatgactgcaaaatgcatagaaggacacagccatgccctttccacggaagtcacagagcacacctcaacacactgagaagacgtccacgacagagaaagatgacgaaggtgcttctgtgtacagctcatccacttcctcatccgtaaactgatcccccacggttgtcagcagctctctcaggtaatcttcctgaatggtgcctgttgcttcttcatcaaagcaagcaaaagcatttctgatgacgtcttcaggatctgtgccatttaacttcttaccaaacatggcgagcaacatggtgaagttaatgggccctggtgcctcattcatcacggcatcaaggcatgcatcagtgggattcttccctagagaagcaagcataccatgcaaatcttccttgctgatgaaaccatctctgttctgatcaatcatgttgaaggcctctttgaactcctgaatctgtgactggtcaaacgtggcaaacaccttggacgttgcacactgagggcgcttcttggtggtcttgcctttttgctcaacatggtggttgcttaattccggcaccaaataccagaaacggaaccaccctgtgcgagatgacaagcgacagcgaggagcgcggggctgtggccagacagtggcggctatagagctatgatttaatactgcattttaaatttgcttacatgtacagtctgtatgttttcataaaatttaacttttaatagatttgtgtattttgtggtcgtgctcacc

SEQ ID NO: 464248 - DNA, 827 bp, Homo sapiens
gctgacccctgtggctggactaatgtgtcatttcttaaaagcttttaatatgtttgcaggcttagccacaggagcaaagcaaattgttcttgagatcttcaaagcaggcgtgcaggtttcaccagttcttcctcttgccctgggcaggtctgcaagtctgctggaacctggaacacagcagccctcctgcccagccaccccattcctgagcttcctctccatgcaagagtccacttgtaaaacaaacaacgggctgggagttgtgtctccccttcaccaccagtttaaaaaaaatctcactcccgttcaggagcctggcaaccatgcattacccaacaatggttaccgtggctgcaaggaggaagcagacagcaagcccacagaagtgtttattgaagaaagggaagtcaatagtccctggagttaatgagtgattgttatttatggaaggaatggtatttgcagatgggaatgactgcaaaatgcatagaaggacacagccatgccctttccacggaagtcacagagcacacctcaacacactgagaagacgtccacgacagagaaagatgacgaaggtctcctttcttccacatcgtaggagattttctgccataaactcagtttattctatagttgtttatgtcctcagcattttggagacagctgttctcatgaagtgaagactggctcagattgtttgattaattgcaagaattgtggaaacgggaggaagaattcatgaaggatgcctcccttacctgtacagagttgttttcattgataaagggttgtgatctgtaaaatggggatatcgacatttgttt

SEQ ID NO: 464249 - DNA, 1358 bp, Homo sapiens
ttttagagacagggtctcgctctgtctccaaagctggagtgcagctccatcatggttcactgcagcctccgcctcctgggtttgagcgatcctcccatttcagtgtaaccaccattcttatctctatcaccatagattagctctgcatgtctttgaacttcatataaatggaatcatgcatagataggctcttttgtgtctggattctctctgttaacactgtgtctgtgagactcactcacgctgtgtgtagtattatgcttcatccttttttgttgttgcatagtattccactgtataaatataccacaatttatttgtctgttttccaattgctgtgcatttggattgttttgtttttcactattttgaataaagctgctatgaacatccttgtatatgtcttgggtatacagatggtcctggcttacaatgattggatttaaaattgtttgactttatgatgggcttatcagggtattaaatgtgtttctgacttacagtatttttgacttaccacgtgtttattgggacgtaaccccttcctaagatgaagagcatctgtatacatccagaatcctgtggagcaactcataacccatgaggaatggaagccgacagacagactcatccccaggacagatggttctcactacatctcataaagcttcttagaagatcttacaggattgagcaaccagccagccacagcaggggccaactggataacacgtctttgcacaggctctccctctgtccctgtcaccctccccttttcctaaccttgttccttgggattatgttttgaaataaattattcagagaaatgaagccaaagctgacccattagccaatagctaggttctgtgatgacagagcttctgggctataatcgtttactgagaagccagcgttcctgaggggataatggctcgttccattcagctgcagcataggagtgagggcagggcattagcagaagataacaccagaaacgtgctctggggcctgttgatgactttctgtgccaagcgtagacatttagcctttattctgtatgtgatgggaagccagtgccagtggtgggtttgagcagggaaccagcaaccagtggtgggtttgagcagggaaccagcaatactcaagctctgcttggatggaggccagtcagggaggagttagggcaggaggaccagtcagggaggagacttagggcaggaggaccagtcagggaggagacttagggcaggaggactggtcagggaggagttagggctggaggacgggtcagggagtatgcatgggcctgtggaaccagagagaagctgggtcagagatagagctgtcggctagtcggg

SEQ ID NO: 464250 - DNA, 1336 bp, Homo sapiens
ccctgccgaggcccctcctgaatgagggccgagaactgcagggttggagcctgggaaccatggaaaccgtggccaggcattttccacaggacaccgggagcccctgaggcaacacctagcttttcagagagcggctgccggcacttctgcccagagcagaggcctgttcccttgactggccctgaggtgggaggaatgggagtccccgagggaggctacgacccctcccagcctccatgtcctcacctgagaaaacagggtcacaatacctgccttgccaacgtggtgaggaccagcggagaagatgaaagggcttatattccaaagcccacaaggttgaagatgcacacccgtgacacagcctcaggatgtcctgacgacatgtgccaaggtggtcatacgttttagggagacatgagacatcaatcaacacatgtaagatgaacattggttcagtctggaaaaggccgggcaacgccaagcaaacgtgggacaactcgcagccaggagaaagcttccaggtcacagatgaagagcatctgtatacatccagaatcctgtggagcaactcataacccatgaggaatggaagccgacagacagactcatccccaggacagatggttctcactacatctcataaagcttcttagaagatcttacaggattgagcaaccagccagccacagcaggggccaactggataacacgtctttgcacaggctctccctctgtccctgtcaccctccccttttcctaaccttgttccttgggattatgttttgaaataaattattcagagaaatgaagccaaagctgacccattagccaatagctaggttctgtgatgacagagcttctgggctataatcgtttactgagaagccagcgttcctgaggggataatggctcgttccattcagctgcagcataggagtgagggcagggcattagcagaagataacaccagaaacgtgctctggggcctgttgatgactttctgtgccaagcgtagacatttagcctttattctgtatgtgatgggaagccagtgccagtggtgggtttgagcagggaaccagcaaccagtggtgggtttgagcagggaaccagcaatactcaagctctgcttggatggaggccagtcagggaggagttagggcaggaggaccagtcagggaggagacttagggcaggaggaccagtcagggaggagacttagggcaggaggactggtcagggaggagttagggctggaggacgggtcagggagtatgcatgggcctgtggaaccagagagaagctgggtcagagatagagctgtcggctagtcggg

SEQ ID NO: 464251 - DNA, 814 bp, Homo sapiens
ccctgccgaggcccctcctgaatgagggccgagaactgcagggttggagcctgggaaccatggaaaccgtggccaggcattttccacaggacaccgggagcccctgaggcaacacctagcttttcagagagcggctgccggcacttctgcccagagcagaggcctgttcccttgactggccctgaggtgggaggaatgggagtccccgagggaggctacgacccctcccagcctccatgtcctcacctgagaaaacagggtcacaatacctgccttgccaacgtggtgaggaccagcggagaagatgaaagggcttatattccaaagcccacaaggttgaagatgcacacccgtgacacagcctcaggatgtcctgacgacatgtgccaaggtggtcatacgttttagggagacatgagacatcaatcaacacatgtaagatgaacattggttcagtctggaaaaggccgggcaacgccaagcaaacgtgggacaactcgcagccaggagaaagcttccaggtcacaggtgggtgagagacaaaggtcgcattcttttgagtttctgatgggcctttccaaagaaggcaatcagatatgcatctatctcagtgagcagggggtgattttgaatagaatggggggcaggtcggccctaagccattcccggcttgactttcccctttagcttagtgactttgggggcccaagatttattttcctttcacaaaacaataaacataacaaataagtgaattatagaaaggtgaaaactatggaaaaaaaagaaaaacagggagaaagaatcctgaaca

SEQ ID NO: 464252 - DNA, 1383 bp, Homo sapiens
ccctgccgaggcccctcctgaatgagggccgagaactgcagggttggagcctgggaaccatggaaaccgtggccaggcattttccacaggacaccgggagcccctgaggcaacacctagcttttcagagagcggctgccggcacttctgcccagagcagaggcctgttcccttgactggccctgaggtgggaggaatgggagtccccgagggaggctacgacccctcccagcctccatgtcctcacctgagaaaacagggtcacaatacctgccttgccaacgtggtgaggaccagcggagaagatgaaagggcttatattccaaagcccacaaggttgaagatgcacacccgtgacacagcctcaggatgtcctgacgacatgtgccaaggtggtcatacgttttagggagacatgagacatcaatcaacacatgtaagatgaacattggttcagtctggaaaaggccgggcaacgccaagcaaacgtgggacaactcgcagccaggagaaagcttccaggtcacagtatttttgacttaccacgtgtttattgggacgtaaccccttcctaagatgaagagcatctgtatacatccagaatcctgtggagcaactcataacccatgaggaatggaagccgacagacagactcatccccaggacagatggttctcactacatctcataaagcttcttagaagatcttacaggattgagcaaccagccagccacagcaggggccaactggataacacgtctttgcacaggctctccctctgtccctgtcaccctccccttttcctaaccttgttccttgggattatgttttgaaataaattattcagagaaatgaagccaaagctgacccattagccaatagctaggttctgtgatgacagagcttctgggctataatcgtttactgagaagccagcgttcctgaggggataatggctcgttccattcagctgcagcataggagtgagggcagggcattagcagaagataacaccagaaacgtgctctggggcctgttgatgactttctgtgccaagcgtagacatttagcctttattctgtatgtgatgggaagccagtgccagtggtgggtttgagcagggaaccagcaaccagtggtgggtttgagcagggaaccagcaatactcaagctctgcttggatggaggccagtcagggaggagttagggcaggaggaccagtcagggaggagacttagggcaggaggaccagtcagggaggagacttagggcaggaggactggtcagggaggagttagggctggaggacgggtcagggagtatgcatgggcctgtggaaccagagagaagctgggtcagagatagagctgtcggctagtcggg

SEQ ID NO: 464253 - DNA, 3656 bp, Homo sapiens
agcgtctagtagaattctgtcattcaaaaaagatttgtcggtcaacgacgacgatattaaacattgtatatgaagtctcaaaaaaacatggagcttactttgctctctcagaaagtcgatttctgcagccatttcgatacaattttacggtgcaatctgcatcctactcacgcggcatctacagccccgccacgcttctttcccccgcgccccagacgagtccctggccctggtgagagactgaagattgctggggactccacgttcaaccgaatcccacgctggtgggaagaggacgcggtcgatacaggcgtcccgcgggtcactctgggtctcgtcgggccacctaggagagtgccgcgggagcttgacggcagcctgagagcggcgttctacgcggagcggcgggggttggagaggacaacgccaagacggctgggaagccccaggccagcagcggaagtccactcggcccgccctgcgactttgaaaccggtgccccggaccactccttggagacggtggcgcctcttgcgtcatcacgcgggcgttggagcttacgccatcgcgcgtcctagagtcctagcacgctattggctggctgtcaagcaatgggaggagtcgtgagaacctggatgacagcgggctgagccaccggcttggcgcggcggccaaactggtgggacagtgtctccaggtagtgaggcccaacctctttaaaacaaacaaacaaacaaacaaaaaaccaaaatgcaaacgtgagtagagaatgaaatacacagtttaaatgccctcactatctttgggttactaatatactaagcctttctggactaagtaaaagatgcaggttcctgcggctagggatagaagccagactggcgtcttcagaatctcccaccaaggctgtacctctggaggagttctaggtttggatttggtcatctcaagaagagtcttcagatggattttaaaattgaacacacttgggatggttttccagtgaagcatgagcccgtatttatcaggctgaatccaggtgacagaggagtgatgatggacattagtgctccatttttcagggatcctccagccccacttggagaaccaggaaaacctttcaatgaactgtgggattatgaagttgtggaagcatttttcttgaatgatataactgagcaatatttagaagttgaactttgtccgtaagtataaaatgttttttcttacttattactacataatttgaacgtgttattttctagttataaatgatatagtaaaagctcattaattccagagtaagaatggtactctgaatttgcttgaatgatatgcttttatatatttcttagtttcaagtacagagcacatatttagaatgtatgtttagaatatactcatattctaaatgtttgaaaatcctatgtcaatattttcagttcattaatgtagatttttgtaataaatttcaagataatttttttcaaaacgaaaagtcattataaaacaaaaactctcattatttacgcaataaatttgcattattataatatagctgttcggaaataaaaggagagatatgggtataattaattgagctagcttataaaaatgtttcttttaggggatttttaaatgactagatgaaactttaattttatgtattacataattatgcattcatgtattcattctttattcatcatgcatttattaagtatatgctgtgtcacttttgcattcagtgccagggtttaaaaactaaaccacatatagattttcttagactcattacaaatattaaccttggactctctttgttcaggtttaactgtctcttgggaatcctgtttacctggttggcaaactatttcttttttcctgtagatgtacacctattatctaaattatagcacatttaaaattaataaagtatttaataatgaaatatttctttatattgcagttattcatttgaaatgccatttaaatgcctctcagtgtctaacattcagaagccattgctccttttgtaggctggacagagagctccaaacaattgatttaaatgagatttgtagatattcttttattttcttttattttgatattcagctaaatctaatgtagaaaagtctagctgtttgcgttctgttttttaagaagagtaatcatatacctttgtgtgttacatttcaactaacatgccaaaatttgttattgaaaaatatgattaattctcataaactgccatgagaagtaagaaaatttcaactattgtgtgcttatttttaccctacagagtgtccagaggagagacaaaatgggaaggcaaagcttatctcccttggagttattttccaccaaatgtgacaaaattcaattcatttgcaattcatggatcaaaagataaacgaagttatgaagctctttaccctgtacctcagcatgaactgcagcaaggacaaaaacctgatttgcttttggaggacagaagataatgagcataattaatctgatattgaaaaagaaagggtagcaagtggataaagcaattacaaatcacattccaaaattaatgcactgcacacaaccctctgcttttgtcaggggtagaaggggtatccagcctaaggcacctaagtccaagaggaatatgtgcctaacaaatcttctaactaaatatatatatatatatatatatatatataaaatatatatgtttatatataacatatatatatagagagagagcataaaatgtgctgtgtatgtgtgtagcatattttttgttaaatcaccattcctgggccctactcattttctgataatttcttatcttaatttgctctgaaagagcaaaacttataaaattgactattgtaactctattttttaccaactatcatttttcatggaaggaatagtaaaaagagttacctctgaagctaagatgacacatgtatgaggaatataggaagccagaaatcatgaatctatgaaaagtgaggggtgtctgtgcatattttattttatttcataataaataaccagtaattaaaatattcttttccatgtaatgggatctacgagtaaatttttgtctgatatttataaatctaatatgtaatataaaggagaaataggaaatgctgtcaaatgacatttcactttactacttatttgaattacaatgaaataatatatagctacatcactggctcctgagagagctttgggtgttctgtaaattttttactttgcactcttgaaaaattcgcagagaatgcaaggtttagtaaaaatttattttcttttggcagcctatcacctgtaatttccgttaaacagcatttctgactcaatagtacactgaaagcccatgtttgtaataatgccctaaagcactgcagtacctagagtatatattttgaagagatagctttgctgaaatagaaaaccaaactgtaaattgaagtctgagcattcagagaaataaaaattatgctaaaaacaaacgtatgtttttgaattagttttttgaaaaatggcaaaaagataatattagttagtgatattattaatatcattaatatcactaaatatcattagtatgctttggcatacacagcagaaacaccaaatgtcttata

SEQ ID NO: 464254 - DNA, 2837 bp, Homo sapiens
agcgtctagtagaattctgtcattcaaaaaagatttgtcggtcaacgacgacgatattaaacattgtatatgaagtctcaaaaaaacatggagcttactttgctctctcagaaagtcgatttctgcagccatttcgatacaattttacggtgcaatctgcatcctactcacgcggcatctacagccccgccacgcttctttcccccgcgccccagacgagtccctggccctggtgagagactgaagattgctggggactccacgttcaaccgaatcccacgctggtgggaagaggacgcggtcgatacaggcgtcccgcgggtcactctgggtctcgtcgggccacctaggagagtgccgcgggagcttgacggcagcctgagagcggcgttctacgcggagcggcgggggttggagaggacaacgccaagacggctgggaagccccaggccagcagcggaagtccactcggcccgccctgcgactttgaaaccggtgccccggaccactccttggagacggtggcgcctcttgcgtcatcacgcgggcgttggagcttacgccatcgcgcgtcctagagtcctagcacgctattggctggctgtcaagcaatgggaggagtcgtgagaacctggatgacagcgggctgagccaccggcttggcgcggcggccaaactggtgggacagtgtctccaggtagtgaggcccaacctctttaaaacaaacaaacaaacaaacaaaaaaccaaaatgcaaacgtgagtagagaatgaaatacacagtttaaatgccctcactatctttgggttactaatatactaagcctttctggactaagtaaaagatgcaggttcctgcggctagggatagaagccagactggcgtcttcagaatctcccaccaaggctgtacctctggaggagttctaggtttggatttggtcatctcaagaagagtcttcagatggattttaaaattgaacacacttgggatggttttccagtgaagcatgagcccgtatttatcaggctgaatccaggtgacagaggagtgatgatggacattagtgctccatttttcagggatcctccagccccacttggagaaccaggaaaacctttcaatgaactgtgggattatgaagttgtggaagcatttttcttgaatgatataactgagcaatatttagaagttgaactttgtccccacggacagcatttagtgcttttactttctggaagaagaaatgtgtggaaacaagaacttcctttatcgttcagagtgtccagaggagagacaaaatgggaaggcaaagcttatctcccttggagttattttccaccaaatgtgacaaaattcaattcatttgcaattcatggatcaaaagataaacgaagttatgaagctctttaccctgtacctcagcatgaactgcagcaaggacaaaaacctgatttccattgcctagaatacttcaagtctttcaattttaacacactgcttggagaagagtggaaacaaccggaatcagacctgtggctaatagagaaatgtgatatataggagtaatagataaccataccgatcattttttcctctataccttttaagataaacaaaaaataaatatcaattttttaagatgtcatgcatacatttcaacaacaaatatcttcatagaagtcactgaaaatatagtatctgtggcaaattgtatatgattaacaagaaaatatatgattctttgtagatgatttcatctgtaaagtcacaatgtttctcagagtcacttagtccaggatgttgcattcccagcacacagtacagttattcttgaaaactacaagtgaaaaagggggaacaattgaggttgtccaaggccacctagaggactgtcttgcactaccttgtgattcaaccatttcattcctagatatataccccagaaaaatgactgctcatagcagctttattcataatagcacaaaattgtaaacagtgaaatttccatccataggaaaatggatagacaaactacaatatagtcagtggaatactgttcatttaaaaaaggactgctgatacatgcaacaacctgtatgaatctcaaaaacattaagttgagcaaaacaaaccaaacataacatactatctaattacttttatattaaagccacttccaggcaaaactaatatttgatgatagataccagaacagtggctgcttagagtgagggcagggaattcaaattgaatggaaaaggggcctgaggaaattttctggggtgattgaaatgttttgtattttgatctggatgatggttatgtagctgcatatatttgtcaacattcctcatgctgtatgtttagatttgtgattttactatatgtaaattaattccttaataaaatactattataaaataagctgtaaattaaatggaattaacttcaagtttacattgagtttatatgtttccattgaacaatcactagtgatggttaaatgtggcttatcgacttactcatttcttatatatgttctctatctaaaaagagagctggtgtaagataaatgctaacttttacaaaaggtattattaagtatcctgactacacatcatggtggcagtgttaggcatcttagataaattgagaaattattcttaaaactgacaatagcaactaattaatttgatatagaaacgatctgcctgttttagatacgaatggcatattttaaataacctaggacgatttatttataaattacctgaataattttataaatgcatataaaactatcaaaataaaaacaagatatattttagagcatc

SEQ ID NO: 464255 - DNA, 2505 bp, Homo sapiens
agcgtctagtagaattctgtcattcaaaaaagatttgtcggtcaacgacgacgatattaaacattgtatatgaagtctcaaaaaaacatggagcttactttgctctctcagaaagtcgatttctgcagccatttcgatacaattttacggtgcaatctgcatcctactcacgcggcatctacagccccgccacgcttctttcccccgcgccccagacgagtccctggccctggtgagagactgaagattgctggggactccacgttcaaccgaatcccacgctggtgggaagaggacgcggtcgatacaggcgtcccgcgggtcactctgggtctcgtcgggccacctaggagagtgccgcgggagcttgacggcagcctgagagcggcgttctacgcggagcggcgggggttggagaggacaacgccaagacggctgggaagccccaggccagcagcggaagtccactcggcccgccctgcgactttgaaaccggtgccccggaccactccttggagacggtggcgcctcttgcgtcatcacgcgggcgttggagcttacgccatcgcgcgtcctagagtcctagcacgctattggctggctgtcaagcaatgggaggagtcgtgagaacctggatgacagcgggctgagccaccggcttggcgcggcggccaaactggtgggacagtgtctccaggtagtgaggcccaacctctttaaaacaaacaaacaaacaaacaaaaaaccaaaatgcaaacgtgagtagagaatgaaatacacagtttaaatgccctcactatctttgggttactaatatactaagcctttctggactaagtaaaagatgcaggttcctgcggctagggatagaagccagactggcgtcttcagaatctcccaccaaggctgtacctctggaggagttctaggtttggatttggtcatctcaagaagagtcttcagatggattttaaaattgaacacacttgggatggttttccagtgaagcatgagcccgtatttatcaggctgaatccaggtgacagaggagtgatgatggacattagtgctccatttttcagggatcctccagccccacttggagaaccaggaaaacctttcaatgaactgtgggattatgaagttgtggaagcatttttcttgaatgatataactgagcaatatttagaagttgaactttgtccccacggacagcatttagtgcttttactttctggaagaagaaatgtgtggaaacaagaacttcctttatcgttcagagtgtccagaggagagacaaaatgggaaggcaaagcttatctcccttggagttattttccaccaaatgtgacaaaattcaattcatttgcaattcatggatcaaaagataaacgaagttatgaagctctttaccctgtacctcagcatgaactgcagcaaggacaaaaacctgatttccattgcctagaatacttcaagtctttcaattttaacacactgcttggagaagagtggaaacaaccggaatcagacctgtggctaatagagaaatgtgatatataggagtaatagataaccataccgatcattttttcctctataccttttaagataaacaaaaaataaatatcaattttttaagatgtcatgcatacatttcaacaacaaatatcttcatagaagtcactgaaaatatagtatctgtggcaaattgtatatgattaacaagaaaatatatgattctttgtagatgatttcatctgtaaagtcacaatgtttctcagagtcacttagtccaggatgttgcattcccagcacacagtacagttattcttgaaaactacaagtgaaaaagggggaacaattgaggttgtccaaggccacctagaggactgtcttgcactaccttgtgattcaaccatttcattcctagatatataccccagaaaaatgactgctcatagcagctttattcataatagcacaaaattgtaaacagtgaaatttccatccataggaaaatggatagacaaactacaatatagtcagtggaatactgttcatttaaaaaaggactgctgatacatgcaacaacctgtatgaatctcaaaaacattaagttgagcaaaacaaaccaaacataacatactatctaattacttttatattaaagccacttccaggcaaaactaatatttgatgatagataccagaacagtggctgcttagagtgagggcagggaattcaaattgaatggaaaaggggcctgaggaaattttctggggtgattgaaatgttttgtattttgatctggatgatggttatgtagctgcatatatttgtcaacattcctcatgctgtatgtttagatttgtgattttactatatgtaaattaattccttaataaaatactattataaataaaacgagaaaaaaaaaaaagaggggggcaaaaaaaccccggggccaatggaccctttttgaaagggcccaagggggataa

SEQ ID NO: 464256 - DNA, 1956 bp, Homo sapiens
gtatcaacgcagagtggctattacggccggggaggctgaaaagaagaagccagtgtttgagaaaagcttcgtgagtcttcagatggattttaaaattgaacacacttgggatggttttccagtgaagcatgagcccgtatttatcaggctgaatccaggtgacagaggagtgatgatggacattagtgctccatttttcagggatcctccagccccacttggagaaccaggaaaacctttcaatgaactgtgggattatgaagttgtggaagcatttttcttgaatgatataactgagcaatatttagaagttgaactttgtccccacggacagcatttagtgcttttactttctggaagaagaaatgtgtggaaacaagaacttcctttatcgttcagagtgtccagaggagagacaaaatgggaaggcaaagcttatctcccttggagttattttccaccaaatgtgacaaaattcaattcatttgcaattcatggatcaaaagataaacgaagttatgaagctctttaccctgtacctcagcatgaactgcagcaaggacaaaaacctgatttccattgcctagaatacttcaagtctttcaattttaacacactgcttggagaagagtggaaacaaccggaatcagacctgtggctaatagagaaatgtgatatataggagtaatagataaccataccgatcattttttcctctataccttttaagataaacaaaaaataaatatcaattttttaagatgtcatgcatacatttcaacaacaaatatcttcatagaagtcactgaaaatatagtatctgtggcaaattgtatatgattaacaagaaaatatatgattctttgtagatgatttcatctgtaaagtcacaatgtttctcagagtcacttagtccaggatgttgcattcccagcacacagtacagttattcttgaaaactacaagtgaaaaagggggaacaattgaggttgtccaaggccacctagaggactgtcttgcactaccttgtgattcaaccatttcattcctagatatataccccagaaaaatgactgctcatagcagctttattcataatagcacaaaattgtaaacagtgaaatttccatccataggaaaatggatagacaaactacaatatagtcagtggaatactgttcatttaaaaaaggactgctgatacatgcaacaacctgtatgaatctcaaaaacattaagttgagcaaaacaaaccaaacataacatactatctaattacttttatattaaagccacttccaggcaaaactaatatttgatgatagataccagaacagtggctgcttagagtgagggcagggaattcaaattgaatggaaaaggggcctgaggaaattttctggggtgattgaaatgttttgtattttgatctggatgatggttatgtagctgcatatatttgtcaacattcctcatgctgtatgtttagatttgtgattttactatatgtaaattaattccttaataaaatactattataaaataagctgtaaattaaatggaattaacttcaagtttacattgagtttatatgtttccattgaacaatcactagtgatggttaaatgtggcttatcgacttactcatttcttatatatgttctctatctaaaaagagagctggtgtaagataaatgctaacttttacaaaaggtattattaagtatcctgactacacatcatggtggcagtgttaggcatcttagataaattgagaaattattcttaaaactgacaatagcaactaattaatttgatatagaaacgatctgcctgttttagatacgaatggcatattttaaataacctaggacgatttatttataaattacctgaataattttataaatgcatataaaactatcaaaataaaaacaagatatattttagagcatc

SEQ ID NO: 464257 - DNA, 2179 bp, Homo sapiens
agggtacggtccggaattcccgggacgggctgagccaccggcttggcgcggcggccaaactggtgggacagtgtctccaggtagtgaggcccaacctctttaaaacaaacaaacaaacaaacaaaaaaccaaaatgcaaacgtgagtagagaatgaaatacacagtttaaatgccctcactatctttgggttactaatatactaagcctttctggactaagtaaaagatgcaggttcctgcggctagggatagaagccagactggcgtcttcagaatctcccaccaaggctgtacctctggaggagttctaggtttggatttggtcatctcaagaagagtcttcagatggattttaaaattgaacacacttgggatggttttccagtgaagcatgagcccgtatttatcaggctgaatccaggtgacagaggagtgatgatggacattagtgctccatttttcagggatcctccagccccacttggagaaccaggaaaacctttcaatgaactgtgggattatgaagttgtggaagcatttttcttgaatgatataactgagcaatatttagaagttgaactttgtccccacggacagcatttagtgcttttactttctggaagaagaaatgtgtggaaacaagaacttcctttatcgttcagagtgtccagaggagagacaaaatgggaaggcaaagcttatctcccttggagttattttccaccaaatgtgacaaaattcaattcatttgcaattcatggatcaaaagataaacgaagttatgaagctctttaccctgtacctcagcatgaactgcagcaaggacaaaaacctgattttgcttggagaagagtggaaacaaccggaatcagacctgtggctaatagagaaatgtgatatataggagtaatagataaccataccgatcattttttcctctataccttttaagataaacaaaaaataaatatcaattttttaagatgtcatgcatacatttcaacaacaaatatcttcatagaagtcactgaaaatatagtatctgtggcaaattgtatatgattaacaagaaaatatatgattctttgtagatgatttcatctgtaaagtcacaatgtttctcagagtcacttagtccaggatgttgcattcccagcacacagtacagttattcttgaaaactacaagtgaaaaagggggaacaattgaggttgtccaaggccacctagaggactgtcttgcactaccttgtgattcaaccatttcattcctagatatataccccagaaaaatgactgctcatagcagctttattcataatagcacaaaattgtaaacagtgaaatttccatccataggaaaatggatagacaaactacaatatagtcagtggaatactgttcatttaaaaaaggactgctgatacatgcaacaacctgtatgaatctcaaaaacattaagttgagcaaaacaaaccaaacataacatactatctaattacttttatattaaagccacttccaggcaaaactaatatttgatgatagataccagaacagtggctgcttagagtgagggcagggaattcaaattgaatggaaaaggggcctgaggaaattttctggggtgattgaaatgttttgtattttgatctggatgatggttatgtagctgcatatatttgtcaacattcctcatgctgtatgtttagatttgtgattttactatatgtaaattaattccttaataaaatactattataaaataagctgtaaattaaatggaattaacttcaagtttacattgagtttatatgtttccattgaacaatcactagtgatggttaaatgtggcttatcgacttactcatttcttatatatgttctctatctaaaaagagagctggtgtaagataaatgctaacttttacaaaaggtattattaagtatcctgactacacatcatggtggcagtgttaggcatcttagataaattgagaaattattcttaaaactgacaatagcaactaattaatttgatatagaaacgatctgcctgttttagatacgaatggcatattttaaataacctaggacgatttatttataaattacctgaataattttataaatgcatataaaactatcaaaataaaaacaagatatattttagagcatc

SEQ ID NO: 464258 - DNA, 1914 bp, Homo sapiens
gcagctgggtggagcctaaagccgagccctctcctgtgacctcggctgaaaagaagaagccagtgtttgagaaaagcttcgtgagtcttcagatggattttaaaattgaacacacttgggatggttttccagtgaagcatgagcccgtatttatcaggctgaatccaggtgacagaggagtgatgatggacattagtgctccatttttcagggatcctccagccccacttggagaaccaggaaaacctttcaatgaactgtgggattatgaagttgtggaagcatttttcttgaatgatataactgagcaatatttagaagttgaactttgtcccaagaacttcctttatcgttcagagtgtccagaggagagacaaaatgggaaggcaaagcttatctcccttggagttattttccaccaaatgtgacaaaattcaattcatttgcaattcatggatcaaaagataaacgaagttatgaagctctttaccctgtacctcagcatgaactgcagcaaggacaaaaacctgatttccattgcctagaatacttcaagtctttcaattttaacacactgcttggagaagagtggaaacaaccggaatcagacctgtggctaatagagaaatgtgatatataggagtaatagataaccataccgatcattttttcctctataccttttaagataaacaaaaaataaatatcaattttttaagatgtcatgcatacatttcaacaacaaatatcttcatagaagtcactgaaaatatagtatctgtggcaaattgtatatgattaacaagaaaatatatgattctttgtagatgatttcatctgtaaagtcacaatgtttctcagagtcacttagtccaggatgttgcattcccagcacacagtacagttattcttgaaaactacaagtgaaaaagggggaacaattgaggttgtccaaggccacctagaggactgtcttgcactaccttgtgattcaaccatttcattcctagatatataccccagaaaaatgactgctcatagcagctttattcataatagcacaaaattgtaaacagtgaaatttccatccataggaaaatggatagacaaactacaatatagtcagtggaatactgttcatttaaaaaaggactgctgatacatgcaacaacctgtatgaatctcaaaaacattaagttgagcaaaacaaaccaaacataacatactatctaattacttttatattaaagccacttccaggcaaaactaatatttgatgatagataccagaacagtggctgcttagagtgagggcagggaattcaaattgaatggaaaaggggcctgaggaaattttctggggtgattgaaatgttttgtattttgatctggatgatggttatgtagctgcatatatttgtcaacattcctcatgctgtatgtttagatttgtgattttactatatgtaaattaattccttaataaaatactattataaaataagctgtaaattaaatggaattaacttcaagtttacattgagtttatatgtttccattgaacaatcactagtgatggttaaatgtggcttatcgacttactcatttcttatatatgttctctatctaaaaagagagctggtgtaagataaatgctaacttttacaaaaggtattattaagtatcctgactacacatcatggtggcagtgttaggcatcttagataaattgagaaattattcttaaaactgacaatagcaactaattaatttgatatagaaacgatctgcctgttttagatacgaatggcatattttaaataacctaggacgatttatttataaattacctgaataattttataaatgcatataaaactatcaaaataaaaacaagatatattttagagcatc

SEQ ID NO: 464259 - DNA, 1966 bp, Homo sapiens
gcagctgggtggagcctaaagccgagccctctcctgtgacctcggctgaaaagaagaagccagtgtttgagaaaagcttcgtgagtcttcagatggattttaaaattgaacacacttgggatggttttccagtgaagcatgagcccgtatttatcaggctgaatccaggtgacagaggagtgatgatggacattagtgctccatttttcagggatcctccagccccacttggagaaccaggaaaacctttcaatgaactgtgggattatgaagttgtggaagcatttttcttgaatgatataactgagcaatatttagaagttgaactttgtccccacggacagcatttagtgcttttactttctggaagaagaaatgtgtggaaacaagaacttcctttatcgttcagagtgtccagaggagagacaaaatgggaaggcaaagcttatctcccttggagttattttccaccaaatgtgacaaaattcaattcatttgcaattcatggatcaaaagataaacgaagttatgaagctctttaccctgtacctcagcatgaactgcagcaaggacaaaaacctgatttccattgcctagaatacttcaagtctttcaattttaacacactgcttggagaagagtggaaacaaccggaatcagacctgtggctaatagagaaatgtgatatataggagtaatagataaccataccgatcattttttcctctataccttttaagataaacaaaaaataaatatcaattttttaagatgtcatgcatacatttcaacaacaaatatcttcatagaagtcactgaaaatatagtatctgtggcaaattgtatatgattaacaagaaaatatatgattctttgtagatgatttcatctgtaaagtcacaatgtttctcagagtcacttagtccaggatgttgcattcccagcacacagtacagttattcttgaaaactacaagtgaaaaagggggaacaattgaggttgtccaaggccacctagaggactgtcttgcactaccttgtgattcaaccatttcattcctagatatataccccagaaaaatgactgctcatagcagctttattcataatagcacaaaattgtaaacagtgaaatttccatccataggaaaatggatagacaaactacaatatagtcagtggaatactgttcatttaaaaaaggactgctgatacatgcaacaacctgtatgaatctcaaaaacattaagttgagcaaaacaaaccaaacataacatactatctaattacttttatattaaagccacttccaggcaaaactaatatttgatgatagataccagaacagtggctgcttagagtgagggcagggaattcaaattgaatggaaaaggggcctgaggaaattttctggggtgattgaaatgttttgtattttgatctggatgatggttatgtagctgcatatatttgtcaacattcctcatgctgtatgtttagatttgtgattttactatatgtaaattaattccttaataaaatactattataaaataagctgtaaattaaatggaattaacttcaagtttacattgagtttatatgtttccattgaacaatcactagtgatggttaaatgtggcttatcgacttactcatttcttatatatgttctctatctaaaaagagagctggtgtaagataaatgctaacttttacaaaaggtattattaagtatcctgactacacatcatggtggcagtgttaggcatcttagataaattgagaaattattcttaaaactgacaatagcaactaattaatttgatatagaaacgatctgcctgttttagatacgaatggcatattttaaataacctaggacgatttatttataaattacctgaataattttataaatgcatataaaactatcaaaataaaaacaagatatattttagagcatc

SEQ ID NO: 464260 - DNA, 2220 bp, Homo sapiens
agggtacggtccggaattcccgggacgggctgagccaccggcttggcgcggcggccaaactggtgggacagtgtctccaggtagtgaggcccaacctctttaaaacaaacaaacaaacaaacaaaaaaccaaaatgcaaacgtgagtagagaatgaaatacacagtttaaatgccctcactatctttgggttactaatatactaagcctttctggactaagtaaaagatgcaggttcctgcggctagggatagaagccagactggcgtcttcagaatctcccaccaaggctgtacctctggaggagttctaggtttggatttggtcatctcaagaagagtcttcagatggattttaaaattgaacacacttgggatggttttccagtgaagcatgagcccgtatttatcaggctgaatccaggtgacagaggagtgatgatggacattagtgctccatttttcagggatcctccagccccacttggagaaccaggaaaacctttcaatgaactgtgggattatgaagttgtggaagcatttttcttgaatgatataactgagcaatatttagaagttgaactttgtccccacggacagcatttagtgcttttactttctggaagaagaaatgtgtggaaacaagaacttcctttatcgttcagagtgtccagaggagagacaaaatgggaaggcaaagcttatctcccttggagttattttccaccaaatgtgacaaaattcaattcatttgcaattcatggatcaaaagataaacgaagttatgaagctctttaccctgtacctcagcatgaactgcagcaaggacaaaaacctgatttccattgcctagaatacttcaagtctttcaattttaacacactgcttggagaagagtggaaacaaccggaatcagacctgtggctaatagagaaatgtgatatataggagtaatagataaccataccgatcattttttcctctataccttttaagataaacaaaaaataaatatcaattttttaagatgtcatgcatacatttcaacaacaaatatcttcatagaagtcactgaaaatatagtatctgtggcaaattgtatatgattaacaagaaaatatatgattctttgtagatgatttcatctgtaaagtcacaatgtttctcagagtcacttagtccaggatgttgcattcccagcacacagtacagttattcttgaaaactacaagtgaaaaagggggaacaattgaggttgtccaaggccacctagaggactgtcttgcactaccttgtgattcaaccatttcattcctagatatataccccagaaaaatgactgctcatagcagctttattcataatagcacaaaattgtaaacagtgaaatttccatccataggaaaatggatagacaaactacaatatagtcagtggaatactgttcatttaaaaaaggactgctgatacatgcaacaacctgtatgaatctcaaaaacattaagttgagcaaaacaaaccaaacataacatactatctaattacttttatattaaagccacttccaggcaaaactaatatttgatgatagataccagaacagtggctgcttagagtgagggcagggaattcaaattgaatggaaaaggggcctgaggaaattttctggggtgattgaaatgttttgtattttgatctggatgatggttatgtagctgcatatatttgtcaacattcctcatgctgtatgtttagatttgtgattttactatatgtaaattaattccttaataaaatactattataaaataagctgtaaattaaatggaattaacttcaagtttacattgagtttatatgtttccattgaacaatcactagtgatggttaaatgtggcttatcgacttactcatttcttatatatgttctctatctaaaaagagagctggtgtaagataaatgctaacttttacaaaaggtattattaagtatcctgactacacatcatggtggcagtgttaggcatcttagataaattgagaaattattcttaaaactgacaatagcaactaattaatttgatatagaaacgatctgcctgttttagatacgaatggcatattttaaataacctaggacgatttatttataaattacctgaataattttataaatgcatataaaactatcaaaataaaaacaagatatattttagagcatc

SEQ ID NO: 464261 - DNA, 2188 bp, Homo sapiens
gcagctgggtggagcctaaagccgagccctctcctgtgacctcggctgaaaagaagaagccagtgtttgagaaaagcttcgtggtctgtgttctctagttgttccctcttctctctgacattcctttcgtcgtcgccagaatttttgtggatttggtggttgtatgaagaataagtgaatctaccagaacttcctagtagctaagatcttgattcccagaggatccagtaactgagacacctgcacactttacaataaataaaagacaaaggatgacataagaacccatggtgcttatagttacaagtcttcagatggattttaaaattgaacacacttgggatggttttccagtgaagcatgagcccgtatttatcaggctgaatccaggtgacagaggagtgatgatggacattagtgctccatttttcagggatcctccagccccacttggagaaccaggaaaacctttcaatgaactgtgggattatgaagttgtggaagcatttttcttgaatgatataactgagcaatatttagaagttgaactttgtccccacggacagcatttagtgcttttactttctggaagaagaaatgtgtggaaacaagaacttcctttatcgttcagagtgtccagaggagagacaaaatgggaaggcaaagcttatctcccttggagttattttccaccaaatgtgacaaaattcaattcatttgcaattcatggatcaaaagataaacgaagttatgaagctctttaccctgtacctcagcatgaactgcagcaaggacaaaaacctgatttccattgcctagaatacttcaagtctttcaattttaacacactgcttggagaagagtggaaacaaccggaatcagacctgtggctaatagagaaatgtgatatataggagtaatagataaccataccgatcattttttcctctataccttttaagataaacaaaaaataaatatcaattttttaagatgtcatgcatacatttcaacaacaaatatcttcatagaagtcactgaaaatatagtatctgtggcaaattgtatatgattaacaagaaaatatatgattctttgtagatgatttcatctgtaaagtcacaatgtttctcagagtcacttagtccaggatgttgcattcccagcacacagtacagttattcttgaaaactacaagtgaaaaagggggaacaattgaggttgtccaaggccacctagaggactgtcttgcactaccttgtgattcaaccatttcattcctagatatataccccagaaaaatgactgctcatagcagctttattcataatagcacaaaattgtaaacagtgaaatttccatccataggaaaatggatagacaaactacaatatagtcagtggaatactgttcatttaaaaaaggactgctgatacatgcaacaacctgtatgaatctcaaaaacattaagttgagcaaaacaaaccaaacataacatactatctaattacttttatattaaagccacttccaggcaaaactaatatttgatgatagataccagaacagtggctgcttagagtgagggcagggaattcaaattgaatggaaaaggggcctgaggaaattttctggggtgattgaaatgttttgtattttgatctggatgatggttatgtagctgcatatatttgtcaacattcctcatgctgtatgtttagatttgtgattttactatatgtaaattaattccttaataaaatactattataaaataagctgtaaattaaatggaattaacttcaagtttacattgagtttatatgtttccattgaacaatcactagtgatggttaaatgtggcttatcgacttactcatttcttatatatgttctctatctaaaaagagagctggtgtaagataaatgctaacttttacaaaaggtattattaagtatcctgactacacatcatggtggcagtgttaggcatcttagataaattgagaaattattcttaaaactgacaatagcaactaattaatttgatatagaaacgatctgcctgttttagatacgaatggcatattttaaataacctaggacgatttatttataaattacctgaataattttataaatgcatataaaactatcaaaataaaaacaagatatattttagagcatc

SEQ ID NO: 464262 - DNA, 760 bp, Homo sapiens
ctcactacagacaaaacacctgatgtctaatacaaatgaaatagtcactggaatccctcaaggcaatggagatgcatccacacatgggtgtgtgcacacacacacgcagagaaaatgtgttttatataacttacaaataaagagaatcccctattgggtccgatactcacatagaccaccaggcaaccttcagccattcaaacattatgtggtgattcatgttccaataaaaaatcatctacaggtgccccaagacatagattttccttctaacagtcagacccctattctacaggtctgctggagtttgctggaggtccactctagaccatgcttgcctgggtatcagcagcagtggctgcagaacagcaaagattgctgcctgctccttcctctggaagcttcatccgagggtggcacctgccagatgccagctggagctttcctgtatgaagtgtctgtcaacccctgctggtgccaggtgaccccactgctgatgacctggggcagagcttctagaatcacagctgtagaacctttgggaatcaaggattcttgcaaaattatcacaattgttgcgaattgtaacagacaaaagtagggagtttgaaaaaaaaacacaccagtaaggactggcatttgacaatggctgaaatattacttgaacaaattagaaagaagaaagacaggctgggcgcagtggctcacacctgtaatcccaacactttgggaggccaaggtgggtggatcacttgaaccc

SEQ ID NO: 464263 - DNA, 4357 bp, Homo sapiens
aagcgccagttcatgtcatcacactcactgagccctgggttgaaggcccagctttgcctacagcaggtcaaatatctaggactaatcttagccagagggatcagggccctcagcaaggagcaaacacagcctatactggcttatccttgccctaagacattaaaacagttgtgggggttccttggaatcaccggcttttgccgactatggatacccggatacagcgagatagccaggcccttctatactctaatcaaggagacccagagggcaaatactcatctagtacaatgggaaccaggggcagaaacagccttcaaaatcttaaagcaggccctagtacaagctccagctttaagccttcccacaggacaaaacttctctttatatgtcacagagagagcagggatagctcttggagtccttactcagacttgtgggacaacctcacaaccagtggcatacctaaggaccagtgcccagttagcagaactagtggcacttacccgagccttagaactgggaaagggaaaaagtataaatgtgtatacagatagcaagtatgcttatctaatcctatatgcccatgctgcaatatggaaagaaggggagttcctaacttttgggggaaactccattaaataccacaaggaaattatggaattattgcacacagtgcaaaaactcgaggaggtggcagtcttacactgccaaagccatcagaaaggtgaaagggaaaaggcagaaggaaaccgttgggcagatgctgaggccaaaattgctgccaggtggaacctcccattagaaataactatggaaggacccttggtatggagcaaccccaaccaagaggttaagccccagtattccctgactaaaagagaatggggactttcatggggtcctagttttcttccctcagggtggttaatgacagaagaaggaaaggtacttatacccgaagccagccagtggaaaatgcttaaaactctccaccaaacttttcatatggatattgaaaacactcatcaaatggccaaatccttatttacagggccaaatctcctccggaccatccgacagggagtcaaagcctgtgaggtgtgccaaaggaataatcccttggtccatcgaggtgaagctggtgcagcctctttcttcccctggcagagaccttggtgcaattcaccaagagctccccttacaattcctatcaatgtaggtgcttccatttgtcactggagtattgaaggacaagcttggtggtccagttctgctcatctttgtccactcaaaccagggttgaacaggaaactcatggcatgagagtcttggcttcctggaatcgcctagagtcaaagtaaaggatcatacacagcatacattgcagtcacccttcaggaggaaaaatagtgtcatccaaaattcatgtaaagtgtaagctctccttttatcttctgccatgattatgagttccctgaggcctccccagaagccaagcaaaagctgctctgcttcctgtatagcctgcagaaccatgaggcaattaaaccacttttcttcataaattacccattctcaggtaattagacatccagatacaagaagttgaaagaacatctggaagatgcactgcaagatgaacctgttcaagacctatagttatatcagactatccaaagtcaacatgaagaaaaaaaattctaaaagcagcaagagagaagtgtctaatcacttataatggaaaagccatcagactaacaccagacttctctgtagaaatcttatgagccagaacagattagaggactatttttaatattaaataaacagaaacaactgccaggcagtaattttgtatcttgacaaactaagcttcctaaatgaaggagaaataaagtcttttccagataagaaaatggtaagagaatatttcaccactagactaatcctgaaagaaatactaaaaggagttctaaacatgaaaacaaatgaatgatacaatcataaagcacatgaatgtacaaaattcacgaatcatataatgcacaattatgtaaagcacaaaaaatacacaattgagactataaagcaactaggtaataattaccattataacaggaacaaaatctcatatctcaatattaacattgaatgcaaatcaaataaatattctacttaaaaggtgtagactggcagattgcattaaaaaaattagatctaatgatatgcttacaagaaaccctcctaatgataaagaccttcacagatttaaagtaaatggatgaaaaagatattccatgcaaacagaaaacaaaggcaagcaggagtaactatttttatatcagataaaataggctttaaatcaacaacagttaaaaaaaaaagatgaaaaagtcactatataatgataaaagtatcaattcaacaataagttattacatacctaaatatatacatgcctaacactggagtagccaggttcttaaaacaaacaccacctgacataagaaaagagataaaaaacaagataataatagtaggagactgtaacatcccaatgatggtaacagaaagatcatctaggcagaacatcaaaaaaagaaatgacttaaactggactctggaccaaaaggacctaattagacatttacacaagattctactcaacgaatgcaaaatacatttttctcatcttctcatggaacttatccaaaatagaccatatatttggccataaagcatatctcaataaagttaaaaaaaaactaagattatattagataccttctcagactacagtggaatgaaactagaagtcaatactaagacaaatctcaaaactgtacaaatatatggaagttacacaatttgctcctgaacattctttgggtaaaaacataaaattagccaggtgcagtggctcatgcttgtaatcccagcaatttgggaggccaaggagggtggatcacttgaagttgagggcagtagtttgagatcaacctggccaatatggtgaaaccatatctactaaaaatacaaaaattagctgggcatggtggcacacacctgtaatcccagctactcggaaggctgaagcacaagaatcactcgatgatggggggtggagtttgcagtgagctgagatgatgccactgtactctagcatgggcaacaaagcaagaccctgtctcaaaaaaaaagaagaaagaaaaaataaatgatgtgaaaaatcaaaatataatttgaaaggaatgaaaacagagaaacaacatatcaaaatatgttacagatacagcaaaagcagtaataaaagaaaagtatatagcattaaatgcctatatgaaaaagatgaaaagatttaagtttcaagtgttgcatctcagggaactagaaaaacaagaaaaaatcaaactcaaagctaacaggaaaaaaaataacagagattagaccagaattaatgataatgatacaaaaagcactaagcaaagaatcaacaaaacagaaagctgattttctgaaaagataaacaaaatcagtagactactcactagattaacaaagtaaaaagagataagatccaaataagagcaaacatgaatgataaatgcaacattacaactgataacagaaataacaaaagatcatcagaaactactgtgaatatctccttgtgcccaatgagaaaaactaaaggattgataaatttctggaaaaatataccctcccatttttgagccaggtagaaataaaaatccttaacagaccgataacaggtaatggaattgaatcagtaataaaaacaacctaccaatcaaaataagctcaataccaaatgagttcacagccaaaaagagttcataccaatcttcctgaaatgattccaaaagataaaggaggaaggactcctccctaaggaattatatgaaaccggcgtcatcctaataccaaaatcagtcaaggacaaaacaataaaataaaactacaggccaatatccctgatgaatatggatgcaataatcaacaaaatcacagtgaattgaattcaatagtacttctaaaagataattcactacaatcaagtgtattttatcacaaggatgtaaggatggctaaacatacaaaatcaataagtgtgattcaccacatgaacagaattaaaaacaaaaaccatatgatcaccttaatagatgcaagaaaacattagataaaattcaacatcccttgatgttaaaaatccagaacaaatgaggcatcaaataaacatgcctcaaaataaaaaaagccatatatggcagatccagagtgaacatcatattgaatggtggaaagttaaaatcattcacactaagcactg

SEQ ID NO: 464264 - DNA, 1746 bp, Homo sapiens
ctgactgctcaccgcgagtcaggaggggccggcgggctcacggagggagacagggtgggcgggggcaaaggctaggcgctagggcggcggcgccagcgtagagcggcggtttggaggaaagatgagacgattccagcaagattatggaagagcatagctacatacaaaaggagctagatttacaaaatggtagcttagaggaagactctgtggtgcattctgttgagaacgattcccaaaacatgatggagagcctcagcccaaagaaatactcttccagtctgagatttaaagccaatggagactattctggctcctatttaaccctctcacaacctgtgcctgcaaagagaagcccttctcctttgggaaccagtgtcagaagcagcccctccttagccaaaatccagggaagcaagcagttctcttatgatggaactgacaaaaatattcctatgaaacctccaactcctttactcaacactacatcctccctcagtggatatccacttggaagagcagactttgatcattatactggccgggacagtgaaagggccttgaggctctcagagaagcctccctattccaaatatagctcaaggcataaatcgcatgacaatgtctactctcttggagggctggaaggtcggaaggcatctggctcgctcctggccatgtggaatggaagttccctgagtgatgctggcccgcctcctatcagcagatcgggagccgcaagcatgccttcaagcccaaagcaagccaggaaaatgagcattcaggacagcctggcgcttcaacccaagttaactagacacaaggagcttgcatctgaaaacatcaatttgagaactaggaagtactccagcagcagcctgagtcacatgggagcctacagccgatcacttcccaggttgtacagagccacagagaaccagctgacacctctcagcttgcctccaagaaactctctgggcaattccaaacgaacaaaacttggggaaaaggatctacctcatagcgtaatagacaatgacaattaccttaatttttcttctttgagctcaggggctttaccctataaaacctctgcttctgaaggcaatccttatgtaagttctaccctcagtgtccctgccagtccacgagtggctcggaagatgcttctggcctccacctcctcctgtgcctctgatgactttgatcaggcttcatatgtggggacaaacccgagtcattcacttcttgctggagagtcagacagagtttttgcgaccaggaggaacttctcttgtggatctgtggaatttgatgaggcagatttggaaagcctcagacaggcctcaggaaccccccagcctgcccttcgggaacggaaaagcagtattagctccatttcaggacgtgatgacctgatggattatcaccggcggcagagggaggaaagactcagggagcaggaaatggagcgattggtaatcttcatctcaacagtgattgacctcactgtttcattaaccagcatctacagggcagccttggagatggactccaggatatgtgggaatataggatattcatgttcactagccacagctgctatctttctcttctctcctgctatccttcttcttcccatatcactattaataggcttgtttggctatcttgaaggcctccaggaattaatgttaatttagttgctctgcggacttctcacaagtataaattctttaaaaacat

SEQ ID NO: 464265 - DNA, 2707 bp, Homo sapiens
  misc_feature (286)..(286): n is a, c, g, or t
  misc_feature (422)..(422): n is a, c, g, or t
tttttccagtatagatagaaggggcctcatgcactagcccaagttctctgaattaatcttagataaattaaatactttgtaaatattttaatgattataattgtaataaaattattattttttctgttcctcagtggcgataaagtatttaacacttatctgtctttgcagacaagcatgaaactaaattgaaaggagtaatatactttcaagccattgaagaagtctattatgatcacctcaagaatgctaataaggtaaacatcagttttctaaattcctacantttgaatgcataattaagaagggaaaaatatttttggagtctaagaagtttgaaattgatgttctgatgtaacagatagatatgatcagaatggtgctggaaaagtaaacatgaagtaagtgggatggccgttctntttgaggaaaaaaaatatcatagcaaattgaggaaatattctggacataatggtttgggaaaccctgcgaaacgactctgccagggttctaaaaagaagctaccatatagttaagagggggatcgtgagcaagtcctagtagggctaagaataacagctactatttattaaactcctactctcagctaggtaccctgctagagctttacaaactagctgctgaaataatttatgagttctgtctgagatttcctgttcagaaaaatggtcaatcctgaaaaaggctctgggacaggtgtgtgagttatagtagagcaaaagtaacgcctttgtaaatttaataaattgaaaattttgaagaagtcatcacatgtctgtgttatttaatgttgtattttaagatgtttattttacattctttttccttttttgaattttagagtcctaatccgttactcacctttagcgtcaagactcatgacagaatctattatatggtagccccatcgccagaagccatgcggatctggatggatgttatagttacgggggcagaaggttacactcacttcttgttgtagtgaactgaggcaacagtccacttcagggcagacggcaataatctcttacaagaatgaagccatattcaaccccagatgagaaaacccaacagatccatcccttgagctgtaaacactcagaactcctttcatatcaagacaagttatttgtaaaaaataaagaaggggttttaatacaaaccttcataataaatagcaaaataattgaagcttccatgagaaagaaaacactattttgataaattggatcacttataggaacatttctaataaactgtttttaatcagttgtcggatttggtgaaataaactaaacaggttacagaatatctgtatgtacttggaaatacagaataactttatcacccaaatcactggcattgacattattggtaatcaactggctttttttaaaaaaggtagcattttgttgacagttattttgtaaacataagcaaataagggcttggagggaaatacattttaggaggagttttgccttaattttttaagtactgcaccaaaaccaaagagctgacctgacttctgtggaacagtagtaactgcaagtgatgaactgcatttcgtattgttctgtatatttcaaaatggtattttgatgccatcaaatgcccaggaaattgactttgcagtgtcaccactggtgtaagctactatatatgtatatatatatgtagtaaaccactttttgtaaaagaagaaagagcaaaaagctgtgtgttttagaaaaaaaagccaggttacgcaacaggcattctgtcatgttgaacaattttaaataaagagaatatctggtgttaggagcttgttttgctgaagatttctccattcctggtgctgagaataaaggcaaccagtagccaatgtcctttagattgtctgatttctttttgttgtggagcacacctgctaactgctccctcaacataactatgaaatcatagctctgttttcaccaaagaacagaccaattaacatacttatttgcagaagtggtgtagttctacaaaacggcaaatgaagttcaacttaatattctctataatgtattattttattttattttttacaattagccttttttttagttaatttttgtcaaatgaaacgacttcaggcaagtctcttttataatggtttttcaagtgccatttattctagtttatcatgttttgcatgtttgaaagtatgaatgtgctctttcctaaaacatggcaaatgaatagatgtagagaataacaatattacttacaagatgaaatgattagattagaagtgtccctttattaaactttgtcagcctgactgggtacaattcttttgttaatttgcagtgtggtttgtatacacgtatacgtgttatcaataataagattttgcaactggatgacacaagattttacttgaacagtgaaggacaaaaatcatgattgtggaagatatttttaaaatctgattttgcagcgatcacttttaaaccctgtagtgatgtaagactaaaatataattgctaagattttgttggttaatgtaaagatatgacttttctgcactgtactctcttcataggattgtaaaggtgttctaatccaattgcatgatgtagtaagcctcttaaatatgtgtgttaaatatattgagtttggattaaaatgttgacatgatttcacatttgaaaataaa

SEQ ID NO: 464266 - DNA, 881 bp, Homo sapiens
tatttattttatacaatacaataatacattatagagaatattaagtgtcaaatgaaacgacttcaggcaagtctcttttataatggtttttcaagtgccatttattctagtttatcatgttttgcatgtttgaaagtatgaatgtgctctttcctaaaacatggcaaatgaatagatgtagagaataacaatattacttacaagatgaaatgattagattagaagtgtccctttattaaactttgtcagcctgactgggtacaattcttttgttaatttgcagtgtggtttgtatacacgtatacgtgttatcaataataagattttgcaactggatgacacaagattttacttgaacagtgaaggacaaaaatcatgattgtggaagatatttttaaaatctgattttgcagcgatcacttttaaaccctgtagtgatgtaagactaaaatataattgctaagattttgttggttaatgtaaagatatgacttttctgcactgtactctcttcataggattgtaaaggtgttctaatccaattgcatgatgtagtaagcctcttaaatatgtgtgttaaatatattgagtttggattaaaatgttgacatgatttcacatttgaaaataaactcatctcttattttgaagttacctatctgtagtatgatggaggatgaattaatcgcaaatgacagttgtagaaactatgtaaagtttgttgtgtgctaacattatgatttgtagtgtataaactgaagtattccaatagaagtatctctggttacatcctattgcttacaaaatgaaatgaaccctgaaaaactctgacatcatattgttgtctgtttacacagatacatttattgctggggattgca

SEQ ID NO: 464267 - DNA, 548 bp, Homo sapiens
gactactactactaaattcgcggccgcgtcgacacaaaaatcatgattgtggaagatatttttaaaatctgattttgcagcgatcacttttaaaccctgtagtgatgtaagactaaaatataattgctaagattttgttggttaatgtaaagatatgacttttctgcactgtactctcttcataggattgtaaaggtgttctaatccaattgcatgatgtagtaagcctcttaaatatgtgtgttaaatatattgagtttggattaaaatgttgacatgatttcacatttgaaaataaactcatctcttattttgaagttacctatctgtagtatgatggaggatgaattaatcgcaaatgacagttgtagaaactatgtaaagtttgttgtgtgctaacattatgatttgtagtgtataaactgaagtattccaatagaagtatctctggttacatcctattgcttacaaaatgaaatgaaccctgaaaaactctgacatcatattgttgtctgtttacacagatacatttattgctggggattgca

SEQ ID NO: 464268 - DNA, 928 bp, Homo sapiens
ctgactgctcaccgcgagtcaggaggggccggcgggctcacggagggagacagggtgggcgggggcaaaggctaggcgctagggcggcggcgccagcgtagagcggcggtttggaggaaagatgagacggtgagtgggctccggggacacagagtttctttgcttctttacaggctgtagggacaaaagcccgggctggggtcggcagtgcccaggctgcgcagctgggtgggtgggggtggcgaaccccgttgtgcatgactctcggggggctgggtagatctccggttgaggggatcccggggagggagtgtctggtagggaagatgcttccagagtgattgtagaaaacaggcagaatgtgggggaactgggggcaactttttccagcaactctggaatgcacatggagagagggatggggatccttgggatagctccctgagaaagagaaggtccgctgctggatggtgtagggcgcgggattcagagaagactccctccccgcaaatatttggctagctgcgcttctagttccactttctttcaagagtgaacctacgagctttaaccgccaaaagcggctgatttcgatttggcctttgaccccccactgaaagtttacagtgtggccgtctcggcacccctagagatagcagctggaaggcttggggagtattttaaccctctgtttctccagctccctgcgcggcggaggcgcagctgaatcgtttgctggttcgcttaataacttagccctagcagtcatcacttattaaagcgccgaggacctggctaactcccgccaccaccaggaaattaaaaggctgacaggctgtccctcccagggttggggtttcctgtttgaaagagcttgagaagtcaaactgcttcgcggttcctcacttacctttcttatgtaaaagag

SEQ ID NO: 464269 - DNA, 770 bp, Homo sapiens
  misc_feature (522)..(522): n is a, c, g, or t
tgaaagtgaaggcaagttaaacgtaagcaaagttaagaaggcgagatcaggctcgtcctttgacacgctacctgcctgtccggaaggaagactttgatttgcggagccatgtagagactgctggccacaatattgacacctgttaccatgtatcaatcacagagaagacctgccgaggattcctcatcaaaatgggtgggaaaattaaaacgtggaaaaaacgttggtttgtttttgatcggaacaagcgaacattctcttattatgcagacaatcatcgatactggggggggagcggagctactatgctttcacagccattgaacaagtggttttttgatcacctgacgacacctaataagaattctaattcgtatctcctctttagcctatagaattactgactgaatctttcatttggtggcccccctcgtcagaaacccgcccggatctggatggatgttcaagtttccgcgggcataaagagtcactcacttgttgttggtatcgaactgtcgcgcnccgtccacttgccggcgcccaacggaattgaattgctttaccagcatacaatcccttatagtaaccgccatatgtaaaatactgcacaggactcctgctctttggccggtgcacgccttaccaccttctgtttttcatgaccactaggcctggtgtgcataattacacgacggggcgtttaatcgacccctcttcctaacgcggactaggcacgcattagcaaactctccgtggtacagaagttactg

SEQ ID NO: 464270 - DNA, 435 bp, Homo sapiens
cctgtacacttagataggagctttggaaacagggatgtggccatttcctaaaggtccattcagcctgcagcttgcctgaagtactccctcctgcttcccgcaggcccatctgcccctaggacagagtaacagctgtggaagtgtgctccctccctcactggcagccatggccaaagactcagaatctcggaggatgctcagaggatgatggtgtaagtataagccttaatcagcactgttaatagaactgacagcgtgagtcgtgcaaagaactttgagaggagagtttaaaacagagagctgagaaactcagcttctgaagttggaatggttattggcttttgaacaacttgtgaactattcctttgtcagctttagaatgaatgaaatctttgtccttttgttttttgttaaatacaggaaagtccaagaaag

SEQ ID NO: 464271 - DNA, 5602 bp, Homo sapiens
ctgactgctcaccgcgagtcaggaggggccggcgggctcacggagggagacagggtgggcgggggcaaaggctaggcgctagggcggcggcgccagcgtagagcggcggtttggaggaaagatgagacgattccagcaagattatggaagagcatagctacatacaaaaggagctagatttacaaaatggtagcttagaggaagactctgtggtgcattctgttgagaacgattcccaaaacatgatggagagcctcagcccaaagaaatactcttccagtctgagatttaaagccaatggagactattctggctcctatttaaccctctcacaacctgtgcctgcaaagagaagcccttctcctttgggaaccagtgtcagaagcagcccctccttagccaaaatccagggaagcaagcagttctcttatgatggaactgacaaaaatattcctatgaaacctccaactcctttactcaacactacatcctccctcagtggatatccacttggaagagcagactttgatcattatactggccgggacagtgaaagggccttgaggctctcagagaagcctccctattccaaatatagctcaaggcataaatcgcatgacaatgtctactctcttggagggctggaaggtcggaaggcatctggctcgctcctggccatgtggaatggaagttccctgagtgatgctggcccgcctcctatcagcagatcgggagccgcaagcatgccttcaagcccaaagcaagccaggaaaatgagcattcaggacagcctggcgcttcaacccaagttaactagacacaaggagcttgcatctgaaaacatcaatttgagaactaggaagtactccagcagcagcctgagtcacatgggagcctacagccgatcacttcccaggttgtacagagccacagagaaccagctgacacctctcagcttgcctccaagaaactctctgggcaattccaaacgaacaaaacttggggaaaaggatctacctcatagcgtaatagacaatgacaattaccttaatttttcttctttgagctcaggggctttaccctataaaacctctgcttctgaaggcaatccttatgtaagttctaccctcagtgtccctgccagtccacgagtggctcggaagatgcttctggcctccacctcctcctgtgcctctgatgactttgatcaggcttcatatgtggggacaaacccgagtcattcacttcttgctggagagtcagacagagtttttgcgaccaggaggaacttctcttgtggatctgtggaatttgatgaggcagatttggaaagcctcagacaggcctcaggaaccccccagcctgcccttcgggaacggaaaagcagtattagctccatttcaggacgtgatgacctgatggattatcaccggcggcagagggaggaaagactcagggagcaggaaatggagcgattggagagacagcgtctggagaccatcctcagtctctgtgctgaatacacaaagcctgacagtcgcttatctactgggaccaccgtggaagatgtgcagaaaatcaacaaggagcttgagaagctgcagctctctgatgaggagtctgtgtttgaggaagccctcatgagccctgacacaagatacaggtgccaccggaaagactccctccctgatgcagacttggcaagctgtgggagtctcagtcagagcagtgccagcttctttacccccaggagcaccaggaatgatgaactactcagtgacctcacccggactcctccaccaccatcctccacctttccgaaagcttccagcgagtcctcttatctaagtatcctaccaaagaccccagagggtataagtgaagaacagagatctcaggagttggctgcaatggaagaaacccggatagtcattctgaacaacctcgaggaacttaagcaaaaaatcaaagacataaatgatcagatggatgagtctttcagagagttggatatggaatgtgctcttttggatggagaacagaaatctgaaacaactgaacttatgaaggagaaggagattttggatcatctaaaccggaaaatagctgaactggaaaagaacattgttggtgaaaagaccaaggagaaggtaaagcttgatgctgaaagggaaaaactagagaggcttcaggagctttactccgagcagaagacccagctggacaattgtcctgagtccatgagggaacagttacaacaacaactgaagagggatgctgacctgttggatgttgaaagcaaacactttgaagacctggagttccagcagcttgaacatgagagccgtctagatgaagaaaaggagaacttgactcaacagctcctgcgtgaagttgctgaatatcaacggaacatcgtttctagaaaggaaaaaatttctgcattgaaaaagcaagccaatcacattgttcagcaggctcagagagagcaagatcattttgtgaaagaaaagaataatttaataatgatgttgcaaagagaaaaggagaatctttgtaatttggaaaagaaatactccagcctctctggggggaaagggtttcccgttaaccccaatactttaaaagagggctatatcagtgtaaatgagattaatgagccgtgtggcaattccacgaatctatccccttccactcagtttcctgctgatgctgatgctgttgccactgagcctgccacagctgtgctggcgagccagccacagagcactttagaagtctggaagaaaggaaaaaacagcataaagaaggcctctatctgagtgatactttgcctcgaaagaaaaccacatcttccatctccccacatttcagcagtgctactatggggagaagcatcaccccaaaggcccatctgcccctaggacagagtaacagctgtggaagtgtgctccctccctcactggcagccatggccaaagactcagaatctcggaggatgctcagaggttataatcaccaacagatgagtgaaggacacaggcagaaatctgaattttataaccgcacagcatctgaatcaaatgtctacttgaatagtttccattatccagatcacagctacaaggaccaggcctttgatactctgagcctcgatagctctgatagcatggagaccagcatctctgcttgctcaccagacaacatctctagtgccagcacttcaaatattgctagaatagaagaaatggagagacttttgaagcaggctcatgcagaaaagacgcggctgctcgaatccagggaacgggaaatggaagccaaaaaacgagccctggaagaagaaaaacgacgccgggaaatcctggaaaaacgattacaggaagaaactagccagaggcagaagttaatagaaaaggaagtaaaaataagggagagacaaagggcacaggctcgtcctttgacacgctacctgcctgtccggaaggaagactttgatttgcggagccatgtagagactgctggccacaatattgacacctgttaccatgtatcaatcacagagaagacctgccgaggattcctcatcaaaatgggtgggaaaattaaaacgtggaaaaaacgttggtttgtttttgatcggaacaagcgaacattctcttattatgcagacaagcatgaaactaaattgaaaggagtaatatactttcaagccattgaagaagtctattatgatcacctcaagaatgctaataagagtcctaatccgttactcacctttagcgtcaagactcatgacagaatctattatatggtagccccatcgccagaagccatgcggatctggatggatgttatagttacgggggcagaaggttacactcacttcttgttgtagtgaactgaggcaacagtccacttcagggcagacggcaataatctcttacaagaatgaagccatattcaaccccagatgagaaaacccaacagatccatcccttgagctgtaaacactcagaactcctttcatatcaagacaagttatttgtaaaaaataaagaaggggttttaatacaaaccttcataataaatagcaaaataattgaagcttccatgagaaagaaaacactattttgataaattggatcacttataggaacatttctaataaactgtttttaatcagttgtcggatttggtgaaataaactaaacaggttacagaatatctgtatgtacttggaaatacagaataactttatcacccaaatcactggcattgacattattggtaatcaactggctttttttaaaaaaggtagcattttgttgacagttattttgtaaacataagcaaataagggcttggagggaaatacattttaggaggagttttgccttaattttttaagtactgcaccaaaaccaaagagctgacctgacttctgtggaacagtagtaactgcaagtgatgaactgcatttcgtattgttctgtatatttcaaaatggtattttgatgccatcaaatgcccaggaaattgactttgcagtgtcaccactggtgtaagctactatatatgtatatatatatgtagtaaaccactttttgtaaaagaagaaagagcaaaaagctgtgtgttttagaaaaaaaagccaggttacgcaacaggcattctgtcatgttgaacaattttaaataaagagaatatctggtgttaggagcttgttttgctgaagatttctccattcctggtgctgagaataaaggcaaccagtagccaatgtcctttagattgtctgatttctttttgttgtggagcacacctgctaactgctccctcaacataactatgaaatcatagctctgttttcaccaaagaacagaccaattaacatacttatttgcagaagtggtgtagttctacaaaacggcaaatgaagttcaacttaatattctctataatgtattattttattttattttttacaattagccttttttttagttaatttttgtcaaatgaaacgacttcaggcaagtctcttttataatggtttttcaagtgccatttattctagtttatcatgttttgcatgtttgaaagtatgaatgtgctctttcctaaaacatggcaaatgaatagatgtagagaataacaatattacttacaagatgaaatgattagattagaagtgtccctttattaaactttgtcagcctgactgggtacaattcttttgttaatttgcagtgtggtttgtatacacgtatacgtgttatcaataataagattttgcaactggatgacacaagattttacttgaacagtgaaggacaaaaatcatgattgtggaagatatttttaaaatctgattttgcagcgatcacttttaaaccctgtagtgatgtaagactaaaatataattgctaagattttgttggttaatgtaaagatatgacttttctgcactgtactctcttcataggattgtaaaggtgttctaatccaattgcatgatgtagtaagcctcttaaatatgtgtgttaaatatattgagtttggattaaaatgttgacatgatttcacatttgaaaataaa

SEQ ID NO: 464272 - DNA, 6350 bp, Homo sapiens
ctgactgctcaccgcgagtcaggaggggccggcgggctcacggagggagacagggtgggcgggggcaaaggctaggcgctagggcggcggcgccagcgtagagcggcggtttggaggaaagatgagacgattccagcaagattatggaagagcatagctacatacaaaaggagctagatttacaaaatggtagcttagaggaagactctgtggtgcattctgttgagaacgattcccaaaacatgatggagagcctcagcccaaagaaatactcttccagtctgagatttaaagccaatggagactattctggctcctatttaaccctctcacaacctgtgcctgcaaagagaagcccttctcctttgggaaccagtgtcagaagcagcccctccttagccaaaatccagggaagcaagcagttctcttatgatggaactgacaaaaatattcctatgaaacctccaactcctttactcaacactacatcctccctcagtggatatccacttggaagagcagactttgatcattatactggccgggacagtgaaagggccttgaggctctcagagaagcctccctattccaaatatagctcaaggcataaatcgcatgacaatgtctactctcttggagggctggaaggtcggaaggcatctggctcgctcctggccatgtggaatggaagttccctgagtgatgctggcccgcctcctatcagcagatcgggagccgcaagcatgccttcaagcccaaagcaagccaggaaaatgagcattcaggacagcctggcgcttcaacccaagttaactagacacaaggagcttgcatctgaaaacatcaatttgagaactaggaagtactccagcagcagcctgagtcacatgggagcctacagccgatcacttcccaggttgtacagagccacagagaaccagctgacacctctcagcttgcctccaagaaactctctgggcaattccaaacgaacaaaacttggggaaaaggatctacctcatagcgtaatagacaatgacaattaccttaatttttcttctttgagctcaggggctttaccctataaaacctctgcttctgaaggcaatccttatgtaagttctaccctcagtgtccctgccagtccacgagtggctcggaagatgcttctggcctccacctcctcctgtgcctctgatgactttgatcaggcttcatatgtggggacaaacccgagtcattcacttcttgctggagagtcagacagagtttttgcgaccaggaggaacttctcttgtggatctgtggaatttgatgaggcagatttggaaagcctcagacaggcctcaggaaccccccagcctgcccttcgggaacggaaaagcagtattagctccatttcaggacgtgatgacctgatggattatcaccggcggcagagggaggaaagactcagggagcaggaaatggagcgattggagagacagcgtctggagaccatcctcagtctctgtgctgaatacacaaagcctgacagtcgcttatctactgggaccaccgtggaagatgtgcagaaaatcaacaaggagcttgagaagctgcagctctctgatgaggagtctgtgtttgaggaagccctcatgagccctgacacaagatacaggtgccaccggaaagactccctccctgatgcagacttggcaagctgtgggagtctcagtcagagcagtgccagcttctttacccccaggagcaccaggaatgatgaactactcagtgacctcacccggactcctccaccaccatcctccacctttccgaaagcttccagcgagtcctcttatctaagtatcctaccaaagaccccagagggtataagtgaagaacagagatctcaggagttggctgcaatggaagaaacccggatagtcattctgaacaacctcgaggaacttaagcaaaaaatcaaagacataaatgatcagatggatgagtctttcagagagttggatatggaatgtgctcttttggatggagaacagaaatctgaaacaactgaacttatgaaggagaaggagattttggatcatctaaaccggaaaatagctgaactggaaaagaacattgttggtgaaaagaccaaggatgctgacctgttggatgttgaaagcaaacactttgaagacctggagttccagcagcttgaacatgagagccgtctagatgaagaaaaggagaacttgactcaacagctcctgcgtgaagttgctgaatatcaacggaacatcgtttctagaaaggaaaaaatttctgcattgaaaaagcaagccaatcacattgttcagcaggctcagagagagcaagatcattttgtgaaagaaaagaataatttaataatgatgttgcaaagagaaaaggagaatctttgtaatttggaaaagaaatactccagcctctctggggggaaagggtttcccgttaaccccaatactttaaaagagggctatatcagtgtaaatgagattaatgagccgtgtggcaattccacgaatctatccccttccactcagtttcctgctgatgctgatgctgttgccactgagcctgccacagctgtgctggcgagccagccacagagtaaagaggtgtgtaggcatgacgtttcattcattcactgcttttcttcatgtcagaaattaacccacggccaactgaaaatgaggtccacgagaacgtgcatgacaaatgtatatctgtttggccagaggggtagggtaaggctgagtttataaagtataccaatttgggggtaatgctctgccaataaaaaattctagaaaccatgaaatttatgctacggagtggagtactaggagaagtaagtcaaagaaatatgttctatgtcttagcactcttaactcaacttagttttcttataaattaaaaagcctttctaaaattgttgatttgagttgccttttcagtttgactttgttttcgattttgttttgtaacatggatgcttttaaatattaggccttttaaaagccttctaggggaggggtcaataataataaattaaaataccttcagtgatccaagtcgcttacagtgtgggattttaataagaggctaaattgaaagatattgcccatcaattgtaacttcttaattaaaatataacaaaacagaacaaactatcaatttcatttctatgtcttattctttcatttcatgtggacacatatataccttttctttctcctataaagcaaagatcacctgtctattctggatttgtgtttccttccgctctttctcctcatcctatcactcaacatacatcagccccatggcctgaattcatggctacatctgtcgatcctttacctttaaatgacacacctcctcctttaccagctaagaaacacagaaggcagcagcagcagcaggagcaacagaactgcccggaaggggagaaagtgcttacgtgctttgtccactggctgttctgccatccacatggcgaccatcataataatttctggtatgtagtggagtggaatgtgaacctatgcgacctgatgcccgcccaagctctccctcaggttctgccgacatgcctgaggggatcattgtggcaagagaagaggcaggcccatctgcccctaggacagagtaacagctgtggaagtgtgctccctccctcactggcagccatggccaaagactcagaatctcggaggatgctcagaggttataatcaccaacagatgagtgaaggacacaggcagaaatctgaattttataaccgcacagcatctgaatcaaatgtctacttgaatagtttccattatccagatcacagctacaaggaccaggcctttgatactctgagcctcgatagctctgatagcatggagaccagcatctctgcttgctcaccagacaacatctctagtgccagcacttcaaatattgctagaatagaagaaatggagagacttttgaagcaggctcatgcagaaaagacgcggctgctcgaatccagggaacgggaaatggaagccaaaaaacgagccctggaagaagaaaaacgacgccgggaaatcctggaaaaacgattacaggaagaaactagccagaggcagaagttaatagaaaaggaagtaaaaataagggagagacaaagggcacaggctcgtcctttgacacgctacctgcctgtccggaaggaagactttgatttgcggagccatgtagagactgctggccacaatattgacacctgttaccatgtatcaatcacagagaagacctgccgaggattcctcatcaaaatgggtgggaaaattaaaacgtggaaaaaacgttggtttgtttttgatcggaacaagcgaacattctcttattatgcagacaagcatgaaactaaattgaaaggagtaatatactttcaagccattgaagaagtctattatgatcacctcaagaatgctaataagagtcctaatccgttactcacctttagcgtcaagactcatgacagaatctattatatggtagccccatcgccagaagccatgcggatctggatggatgttatagttacgggggcagaaggttacactcacttcttgttgtagtgaactgaggcaacagtccacttcagggcagacggcaataatctcttacaagaatgaagccatattcaaccccagatgagaaaacccaacagatccatcccttgagctgtaaacactcagaactcctttcatatcaagacaagttatttgtaaaaaataaagaaggggttttaatacaaaccttcataataaatagcaaaataattgaagcttccatgagaaagaaaacactattttgataaattggatcacttataggaacatttctaataaactgtttttaatcagttgtcggatttggtgaaataaactaaacaggttacagaatatctgtatgtacttggaaatacagaataactttatcacccaaatcactggcattgacattattggtaatcaactggctttttttaaaaaaggtagcattttgttgacagttattttgtaaacataagcaaataagggcttggagggaaatacattttaggaggagttttgccttaattttttaagtactgcaccaaaaccaaagagctgacctgacttctgtggaacagtagtaactgcaagtgatgaactgcatttcgtattgttctgtatatttcaaaatggtattttgatgccatcaaatgcccaggaaattgactttgcagtgtcaccactggtgtaagctactatatatgtatatatatatgtagtaaaccactttttgtaaaagaagaaagagcaaaaagctgtgtgttttagaaaaaaaagccaggttacgcaacaggcattctgtcatgttgaacaattttaaataaagagaatatctggtgttaggagcttgttttgctgaagatttctccattcctggtgctgagaataaaggcaaccagtagccaatgtcctttagattgtctgatttctttttgttgtggagcacacctgctaactgctccctcaacataactatgaaatcatagctctgttttcaccaaagaacagaccaattaacatacttatttgcagaagtggtgtagttctacaaaacggcaaatgaagttcaacttaatattctctataatgtattattttattttattttttacaattagccttttttttagttaatttttgtcaaatgaaacgacttcaggcaagtctcttttataatggtttttcaagtgccatttattctagtttatcatgttttgcatgtttgaaagtatgaatgtgctctttcctaaaacatggcaaatgaatagatgtagagaataacaatattacttacaagatgaaatgattagattagaagtgtccctttattaaactttgtcagcctgactgggtacaattcttttgttaatttgcagtgtggtttgtatacacgtatacgtgttatcaataataagattttgcaactggatgacacaagattttacttgaacagtgaaggacaaaaatcatgattgtggaagatatttttaaaatctgattttgcagcgatcacttttaaaccctgtagtgatgtaagactaaaatataattgctaagattttgttggttaatgtaaagatatgacttttctgcactgtactctcttcataggattgtaaaggtgttctaatccaattgcatgatgtagtaagcctcttaaatatgtgtgttaaatatattgagtttggattaaaatgttgacatgatttcacatttgaaaataaa

SEQ ID NO: 464273 - DNA, 5304 bp, Homo sapiens
gactactactactaaattcgcggccgcgtcgacacactctgtggtgcattctgttgagaacgattcccaaaacatgatggagagcctcagcccaaagaaatactcttccagtctgagatttaaagccaatggagactattctggctcctatttaaccctctcacaacctgtgcctgcaaagagaagcccttctcctttgggaaccagtgtcagaagcagcccctccttagccaaaatccagggaagcaagcagttctcttatgatggaactgacaaaaatattcctatgaaacctccaactcctttactcaacactacatcctccctcagtggatatccacttggaagagcagactttgatcattatactggccgggacagtgaaagggccttgaggctctcagagaagcctccctattccaaatatagctcaaggcataaatcgcatgacaatgtctactctcttggagggctggaaggtcggaaggcatctggctcgctcctggccatgtggaatggaagttccctgagtgatgctggcccgcctcctatcagcagatcgggagccgcaagcatgccttcaagcccaaagcaagccaggaaaatgagcattcaggacagcctggcgcttcaacccaagttaactagacacaaggagcttgcatctgaaaacatcaatttgagaactaggaagtactccagcagcagcctgagtcacatgggagcctacagccgatcacttcccaggttgtacagagccacagagaaccagctgacacctctcagcttgcctccaagaaactctctgggcaattccaaacgaacaaaacttggggaaaaggatctacctcatagcgtaatagacaatgacaattaccttaatttttcttctttgagctcaggggctttaccctataaaacctctgcttctgaaggcaatccttatgtaagttctaccctcagtgtccctgccagtccacgagtggctcggaagatgcttctggcctccacctcctcctgtgcctctgatgactttgatcaggcttcatatgtggggacaaacccgagtcattcacttcttgctggagagtcagacagagtttttgcgaccaggaggaacttctcttgtggatctgtggaatttgatgaggcagatttggaaagcctcagacaggcctcaggaaccccccagcctgcccttcgggaacggaaaagcagtattagctccatttcaggacgtgatgacctgatggattatcaccggcggcagagggaggaaagactcagggagcaggaaatggagcgattggagagacagcgtctggagaccatcctcagtctctgtgctgaatacacaaagcctgacagtcgcttatctactgggaccaccgtggaagatgtgcagaaaatcaacaaggagcttgagaagctgcagctctctgatgaggagtctgtgtttgaggaagccctcatgagccctgacacaagatacaggtgccaccggaaagactccctccctgatgcagacttggcaagctgtgggagtctcagtcagagcagtgccagcttctttacccccaggagcaccaggaatgatgaactactcagtgacctcacccggactcctccaccaccatcctccacctttccgaaagcttccagcgagtcctcttatctaagtatcctaccaaagaccccagagggtataagtgaagaacagagatctcaggagttggctgcaatggaagaaacccggatagtcattctgaacaacctcgaggaacttaagcaaaaaatcaaagacataaatgatcagatggatgagtctttcagagagttggatatggaatgtgctcttttggatggagaacagaaatctgaaacaactgaacttatgaaggagaaggagattttggatcatctaaaccggaaaatagctgaactggaaaagaacattgttggtgaaaagaccaaggatgctgacctgttggatgttgaaagcaaacactttgaagacctggagttccagcagcttgaacatgagagccgtctagatgaagaaaaggagaacttgactcaacagctcctgcgtgaagttgctgaatatcaacggaacatcgtttctagaaaggaaaaaatttctgcattgaaaaagcaagccaatcacattgttcagcaggctcagagagagcaagatcattttgtgaaagaaaagaataatttaataatgatgttgcaaagagaaaaggagaatctttgtaatttggaaaagaaatactccagcctctctggggggaaagggtttcccgttaaccccaatactttaaaagagggctatatcagtgtaaatgagattaatgagccgtgtggcaattccacgaatctatccccttccactcagtttcctgctgatgctgatgctgttgccactgagcctgccacagctgtgctggcgagccagccacagagcactttagaagtctggaagaaaggaaaaaacagcataaagaaggcctctatctgagtgatactttgcctcgaaagaaaaccacatcttccatctccccacatttcagcagtgctactatggggagaagcatcaccccaaaggcccatctgcccctaggacagagtaacagctgtggaagtgtgctccctccctcactggcagccatggccaaagactcagaatctcggaggatgctcagaggttataatcaccaacagatgagtgaaggacacaggcagaaatctgaattttataaccgcacagcatctgaatcaaatgtctacttgaatagtttccattatccagatcacagctacaaggaccaggcctttgatactctgagcctcgatagctctgatagcatggagaccagcatctctgcttgctcaccagacaacatctctagtgccagcacttcaaatattgctagaatagaagaaatggagagacttttgaagcaggctcatgcagaaaagacgcggctgctcgaatccagggaacgggaaatggaagccaaaaaacgagccctggaagaagaaaaacgacgccgggaaatcctggaaaaacgattacaggaagaaactagccagaggcagaagttaatagaaaaggaagtaaaaataagggagagacaaagggcacaggctcgtcctttgacacgctacctgcctgtccggaaggaagactttgatttgcggagccatgtagagactgctggccacaatattgacacctgttaccatgtatcaatcacagagaagacctgccgaggattcctcatcaaaatgggtgggaaaattaaaacgtggaaaaaacgttggtttgtttttgatcggaacaagcgaacattctcttattatgcagacaagcatgaaactaaattgaaaggagtaatatactttcaagccattgaagaagtctattatgatcacctcaagaatgctaataagagtcctaatccgttactcacctttagcgtcaagactcatgacagaatctattatatggtagccccatcgccagaagccatgcggatctggatggatgttatagttacgggggcagaaggttacactcacttcttgttgtagtgaactgaggcaacagtccacttcagggcagacggcaataatctcttacaagaatgaagccatattcaaccccagatgagaaaacccaacagatccatcccttgagctgtaaacactcagaactcctttcatatcaagacaagttatttgtaaaaaataaagaaggggttttaatacaaaccttcataataaatagcaaaataattgaagcttccatgagaaagaaaacactattttgataaattggatcacttataggaacatttctaataaactgtttttaatcagttgtcggatttggtgaaataaactaaacaggttacagaatatctgtatgtacttggaaatacagaataactttatcacccaaatcactggcattgacattattggtaatcaactggctttttttaaaaaaggtagcattttgttgacagttattttgtaaacataagcaaataagggcttggagggaaatacattttaggaggagttttgccttaattttttaagtactgcaccaaaaccaaagagctgacctgacttctgtggaacagtagtaactgcaagtgatgaactgcatttcgtattgttctgtatatttcaaaatggtattttgatgccatcaaatgcccaggaaattgactttgcagtgtcaccactggtgtaagctactatatatgtatatatatatgtagtaaaccactttttgtaaaagaagaaagagcaaaaagctgtgtgttttagaaaaaaaagccaggttacgcaacaggcattctgtcatgttgaacaattttaaataaagagaatatctggtgttaggagcttgttttgctgaagatttctccattcctggtgctgagaataaaggcaaccagtagccaatgtcctttagattgtctgatttctttttgttgtggagcacacctgctaactgctccctcaacataactatgaaatcatagctctgttttcaccaaagaacagaccaattaacatacttatttgcagaagtggtgtagttctacaaaacggcaaatgaagttcaacttaatattctctataatgtattattttattttattttttacaattagccttttttttagttaatttttgtcaaatgaaacgacttcaggcaagtctcttttataatggtttttcaagtgccatttattctagtttatcatgttttgcatgtttgaaagtatgaatgtgctctttcctaaaacatggcaaatgaatagatgtagagaataacaatattacttacaagatgaaatgattagattagaagtgtccctttattaaactttgtcagcctgactgggtacaattcttttgttaatttgcagtgtggtttgtatacacgtatacgtgttatcaataataagattttgcaactggatgacacaagattttacttgaacagtgaaggacaaaaatcatgattgtggaagatatttttaaaatctgattttgcagcgatcacttttaaaccctgtagtgatgtaagactaaaatataattgctaagattttgttggttaatgtaaagatatgacttttctgcactgtactctcttcataggattgtaaaggtgttctaatccaattgcatgatgtagtaagcctcttaaatatgtgtgttaaatatattgagtttggattaaaatgttgacatgatttcacatttgaaaataaa

SEQ ID NO: 464274 - DNA, 3740 bp, Homo sapiens
cccacgcgtccgccccacgcgtcgcagagatctcaggagttggctgcaatggaagaaacccggatagtcattctgaacaacctcgaggaacttaagcaaaaaatcaaagacataaatgatcagatggatgagtctttcagagagttggatatggaatgtgctcttttggatggagaacagaaatctgaaacaactgaacttatgaaggagaaggagattttggatcatctaaaccggaaaatagctgaactggaaaagaacattgttggtgaaaagaccaaggagaaggtaaagcttgatgctgaaagggaaaaactagagaggcttcaggagctttactccgagcagaagacccagctggacaattgtcctgagtccatgagggaacagttacaacaacaactgaagagggatgctgacctgttggatgttgaaagcaaacactttgaagacctggagttccagcagcttgaacatgagagccgtctagatgaagaaaaggagaacttgactcaacagctcctgcgtgaagttgctgaatatcaacggaacatcgtttctagaaaggaaaaaatttctgcattgaaaaagcaagccaatcacattgttcagcaggctcagagagagcaagatcattttgtgaaagaaaagaataatttaataatgatgttgcaaagagaaaaggagaatctttgtaatttggaaaagaaatactccagcctctctggggggaaagggtttcccgttaaccccaatactttaaaagagggctatatcagtgtaaatgagattaatgagccgtgtggcaattccacgaatctatccccttccactcagtttcctgctgatgctgatgctgttgccactgagcctgccacagctgtgctggcgagccagccacagagcactttagaagtctggaagaaaggaaaaaacagcataaagaaggcctctatctgagtgatactttgcctcgaaagaaaaccacatcttccatctccccacatttcagcagtgctactatggggagaagcatcaccccaaaggcccatctgcccctaggacagagtaacagctgtggaagtgtgctccctccctcactggcagccatggccaaagactcagaatctcggaggatgctcagaggttataatcaccaacagatgagtgaaggacacaggcagaaatctgaattttataaccgcacagcatctgaatcaaatgtctacttgaatagtttccattatccagatcacagctacaaggaccaggcctttgatactctgagcctcgatagctctgatagcatggagaccagcatctctgcttgctcaccagacaacatctctagtgccagcacttcaaatattgctagaatagaagaaatggagagacttttgaagcaggctcatgcagaaaagacgcggctgctcgaatccagggaacgggaaatggaagccaaaaaacgagccctggaagaagaaaaacgacgccgggaaatcctggaaaaacgattacaggaagaaactagccagaggcagaagttaatagaaaaggaagtaaaaataagggagagacaaagggcacaggctcgtcctttgacacgctacctgcctgtccggaaggaagactttgatttgcggagccatgtagagactgctggccacaatattgacacctgttaccatgtatcaatcacagagaagacctgccgaggattcctcatcaaaatgggtgggaaaattaaaacgtggaaaaaacgttggtttgtttttgatcggaacaagcgaacattctcttattatgcagacaagcatgaaactaaattgaaaggagtaatatactttcaagccattgaagaagtctattatgatcacctcaagaatgctaataagagtcctaatccgttactcacctttagcgtcaagactcatgacagaatctattatatggtagccccatcgccagaagccatgcggatctggatggatgttatagttacgggggcagaaggttacactcacttcttgttgtagtgaactgaggcaacagtccacttcagggcagacggcaataatctcttacaagaatgaagccatattcaaccccagatgagaaaacccaacagatccatcccttgagctgtaaacactcagaactcctttcatatcaagacaagttatttgtaaaaaataaagaaggggttttaatacaaaccttcataataaatagcaaaataattgaagcttccatgagaaagaaaacactattttgataaattggatcacttataggaacatttctaataaactgtttttaatcagttgtcggatttggtgaaataaactaaacaggttacagaatatctgtatgtacttggaaatacagaataactttatcacccaaatcactggcattgacattattggtaatcaactggctttttttaaaaaaggtagcattttgttgacagttattttgtaaacataagcaaataagggcttggagggaaatacattttaggaggagttttgccttaattttttaagtactgcaccaaaaccaaagagctgacctgacttctgtggaacagtagtaactgcaagtgatgaactgcatttcgtattgttctgtatatttcaaaatggtattttgatgccatcaaatgcccaggaaattgactttgcagtgtcaccactggtgtaagctactatatatgtatatatatatgtagtaaaccactttttgtaaaagaagaaagagcaaaaagctgtgtgttttagaaaaaaaagccaggttacgcaacaggcattctgtcatgttgaacaattttaaataaagagaatatctggtgttaggagcttgttttgctgaagatttctccattcctggtgctgagaataaaggcaaccagtagccaatgtcctttagattgtctgatttctttttgttgtggagcacacctgctaactgctccctcaacataactatgaaatcatagctctgttttcaccaaagaacagaccaattaacatacttatttgcagaagtggtgtagttctacaaaacggcaaatgaagttcaacttaatattctctataatgtattattttattttattttttacaattagccttttttttagttaatttttgtcaaatgaaacgacttcaggcaagtctcttttataatggtttttcaagtgccatttattctagtttatcatgttttgcatgtttgaaagtatgaatgtgctctttcctaaaacatggcaaatgaatagatgtagagaataacaatattacttacaagatgaaatgattagattagaagtgtccctttattaaactttgtcagcctgactgggtacaattcttttgttaatttgcagtgtggtttgtatacacgtatacgtgttatcaataataagattttgcaactggatgacacaagattttacttgaacagtgaaggacaaaaatcatgattgtggaagatatttttaaaatctgattttgcagcgatcacttttaaaccctgtagtgatgtaagactaaaatataattgctaagattttgttggttaatgtaaagatatgacttttctgcactgtactctcttcataggattgtaaaggtgttctaatccaattgcatgatgtagtaagcctcttaaatatgtgtgttaaatatattgagtttggattaaaatgttgacatgatttcacatttgaaaataaa

SEQ ID NO: 464275 - DNA, 5801 bp, Homo sapiens
  misc_feature (5475)..(5475): n is a, c, g, or t
  misc_feature (5478)..(5478): n is a, c, g, or t
  misc_feature (5490)..(5490): n is a, c, g, or t
ctgactgctcaccgcgagtcaggaggggccggcgggctcacggagggagacagggtgggcgggggcaaaggctaggcgctagggcggcggcgccagcgtagagcggcggtttggaggaaagatgagacgattccagcaagattatggaagagcatagctacatacaaaaggagctagatttacaaaatggtagcttagaggaagactctgtggtgcattctgttgagaacgattcccaaaacatgatggagagcctcagcccaaagaaatactcttccagtctgagatttaaagccaatggagactattctggctcctatttaaccctctcacaacctgtgcctgcaaagagaagcccttctcctttgggaaccagtgtcagaagcagcccctccttagccaaaatccagggaagcaagcagttctcttatgatggaactgacaaaaatattcctatgaaacctccaactcctttactcaacactacatcctccctcagtggatatccacttggaagagcagactttgatcattatactggccgggacagtgaaagggccttgaggctctcagagaagcctccctattccaaatatagctcaaggcataaatcgcatgacaatgtctactctcttggagggctggaaggtcggaaggcatctggctcgctcctggccatgtggaatggaagttccctgagtgatgctggcccgcctcctatcagcagatcgggagccgcaagcatgccttcaagcccaaagcaagccaggaaaatgagcattcaggacagcctggcgcttcaacccaagttaactagacacaaggagcttgcatctgaaaacatcaatttgagaactaggaagtactccagcagcagcctgagtcacatgggagcctacagccgatcacttcccaggttgtacagagccacagagaaccagctgacacctctcagcttgcctccaagaaactctctgggcaattccaaacgaacaaaacttggggaaaaggatctacctcatagcgtaatagacaatgacaattaccttaatttttcttctttgagctcaggggctttaccctataaaacctctgcttctgaaggcaatccttatgtaagttctaccctcagtgtccctgccagtccacgagtggctcggaagatgcttctggcctccacctcctcctgtgcctctgatgactttgatcaggcttcatatgtggggacaaacccgagtcattcacttcttgctggagagtcagacagagtttttgcgaccaggaggaacttctcttgtggatctgtggaatttgatgaggcagatttggaaagcctcagacaggcctcaggaaccccccagcctgcccttcgggaacggaaaagcagtattagctccatttcaggacgtgatgacctgatggattatcaccggcggcagagggaggaaagactcagggagcaggaaatggagcgattggagagacagcgtctggagaccatcctcagtctctgtgctgaatacacaaagcctgacagtcgcttatctactgggaccaccgtggaagatgtgcagaaaatcaacaaggagcttgagaagctgcagctctctgatgaggagtctgtgtttgaggaagccctcatgagccctgacacaagatacaggtgccaccggaaagactccctccctgatgcagacttggcaagctgtgggagtctcagtcagagcagtgccagcttctttacccccaggagcaccaggaatgatgaactactcagtgacctcacccggactcctccaccaccatcctccacctttccgaaagcttccagcgagtcctcttatctaagtatcctaccaaagaccccagagggtataagtgaagaacagagatctcaggagttggctgcaatggaagaaacccggatagtcattctgaacaacctcgaggaacttaagcaaaaaatcaaagacataaatgatcagatggatgagtctttcagagagttggatatggaatgtgctcttttggatggagaacagaaatctgaaacaactgaacttatgaaggagaaggagattttggatcatctaaaccggaaaatagctgaactggaaaagaacattgttggtgaaaagaccaaggatgctgacctgttggatgttgaaagcaaacactttgaagacctggagttccagcagcttgaacatgagagccgtctagatgaagaaaaggagaacttgactcaacagctcctgcgtgaagttgctgaatatcaacggaacatcgtttctagaaaggaaaaaatttctgcattgaaaaagcaagccaatcacattgttcagcaggctcagagagagcaagatcattttgtgaaagaaaagaataatttaataatgatgttgcaaagagaaaaggagaatctttgtaatttggaaaagaaatactccagcctctctggggggaaagggtttcccgttaaccccaatactttaaaagagggctatatcagtgtaaatgagattaatgagccgtgtggcaattccacgaatctatccccttccactcagtttcctgctgatgctgatgctgttgccactgagcctgccacagctgtgctggcgagccagccacagagcactttagaagtctggaagaaaggaaaaaacagcataaagaaggcctctatctgagtgatactttgcctcgaaagaaaaccacatcttccatctccccacatttcagcagtgctactatggggagaagcatcaccccaaaggcccatctgcccctaggacagagtaacagctgtggaagtgtgctccctccctcactggcagccatggccaaagactcagaatctcggaggatgctcagaggttataatcaccaacagatgagtgaaggacacaggcagaaatctgaattttataaccgcacagcatctgaatcaaatgtctacttgaatagtttccattatccagatcacagctacaaggaccaggcctttgatactctgagcctcgatagctctgatagcatggagaccagcatctctgcttgctcaccagacaacatctctagtgccagcacttcaaatattgctagaatagaagaaatggagagacttttgaagcaggctcatgcagaaaagacgcggctgctcgaatccagggaacgggaaatggaagccaaaaaacgagccctggaagaagaaaaacgacgccgggaaatcctggaaaaacgattacaggaagaaactagccagaggcagaagttaatagaaaaggaagtaaaaataagggagagacaaagggcacaggctcgtcctttgacacgctacctgcctgtccggaaggaagactttgatttgcggagccatgtagagactgctggccacaatattgacacctgttaccatgtatcaatcacagagaagacctgccgaggattcctcatcaaaatgggtgggaaaattaaaacgtggaaaaaacgttggtttgtttttgatcggaacaagcgaacattctcttattatgcagacaagcatgaaactaaattgaaaggagtaatatactttcaagccattgaagaagtctattatgatcacctcaagaatgctaataagagtcctaatccgttactcacctttagcgtcaagactcatgacagaatctattatatggtagccccatcgccagaagccatgcggatctggatggatgttatagttacgggggcagaaggttacactcacttcttgttgtagtgaactgaggcaacagtccacttcagggcagacggcaataatctcttacaagaatgaagccatattcaaccccagatgagaaaacccaacagatccatcccttgagctgtaaacactcagaactcctttcatatcaagacaagttatttgtaaaaaataaagaaggggttttaatacaaaccttcataataaatagcaaaataattgaagcttccatgagaaagaaaacactattttgataaattggatcacttataggaacatttctaataaactgtttttaatcagttgtcggatttggtgaaataaactaaacaggttacagaatatctgtatgtacttggaaatacagaataactttatcacccaaatcactggcattgacattattggtaatcaactggctttttttaaaaaaggtagcattttgttgacagttattttgtaaacataagcaaataagggcttggagggaaatacattttaggaggagttttgccttaattttttaagtactgcaccaaaaccaaagagctgacctgacttctgtggaacagtagtaactgcaagtgatgaactgcatttcgtattgttctgtatatttcaaaatggtattttgatgccatcaaatgcccaggaaattgactttgcagtgtcaccactggtgtaagctactatatatgtatatatatatgtagtaaaccactttttgtaaaagaagaaagagcaaaaagctgtgtgttttagaaaaaaaagccaggttacgcaacaggcattctgtcatgttgaacaattttaaataaagagaatatctggtgttaggagcttgttttgctgaagatttctccattcctggtgctgagaataaaggcaaccagtagccaatgtcctttagattgtctgatttctttttgttgtggagcacacctgctaactgctccctcaacataactatgaaatcatagctctgttttcaccaaagaacagaccaattaacatacttatttgcagaagtggtgtagttctacaaaacggcaaatgaagttcaacttaatattctctataatgtattattttattttattttttacaattagccttttttttagttaatttttgtcaaatgaaacgacttcaggcaagtctcttttataatggtttttcaagtgccatttattctagtttatcatgttttgcatgtttgaaagtatgaatgtgctctttcctaaaacatggcaaatgaatagatgtagagaataacaatattacttacaagatgaaatgattagattagaagtgtccctttattaaactttgtcagcctgactgggtacaattcttttgttaatttgcagtgtggtttgtatacacgtatacgtgttatcaataataagattttgcaactggatgacacaagattttacttgaacagtgaaggacaaaaatcatgattgtggaagatatttttaaaatctgattttgcagcgatcacttttaaaccctgtagtgatgtaagactaaaatataattgctaagattttgttggttaatgtaaagatatgacttttctgcactgtactctcttcataggattgtaaaggtgttctaatccaattgcatgatgtagtaagcctcttaaatatgtgtgttaaatatattgagtttggattaaaatgttgacatgatttcacatttgaaaataaaanaanaaaaaaaaaaanaaaaaaaaaaaaaaaaaaaaaaaaaaaaaaaaaaaaaaaacaaaaaaaaacaacaaaaaaaaaaaaaaagaaagaaaaaagacaagaagcgagggagcggggcgagggatgagggcgacgcggcgccagatgtaagaagtgggcgggagctgaccgaggtgagtgtaagatgacatgtgcgctgcgagaggcagatggagcacagagcacggtgggcggcatcgctcgggcggagtgccggatcggacaagcgagactaacactcgactccgggcgctgagaaagaacgccagccggcagatccgatggga

SEQ ID NO: 464276 - DNA, 3182 bp, Homo sapiens
ctgactgctcaccgcgagtcaggaggggccggcgggctcacggagggagacagggtgggcgggggcaaaggctaggcgctagggcggcggcgccagcgtagagcggcggtttggaggaaagatgagacgattccagcaagattatggaagagcatagctacatacaaaaggagctagatttacaaaatggtagcttagaggaagactctgtggtgcattctgttgagaacgattcccaaaacatgatggagagcctcagcccaaagaaatactcttccagtctgagatttaaagccaatggagactattctggctcctatttaaccctctcacaacctgtgcctgcaaagagaagcccttctcctttgggaaccagtgtcagaagcagcccctccttagccaaaatccagggaagcaagcagttctcttatgatggaactgacaaaaatattcctatgaaacctccaactcctttactcaacactacatcctccctcagtggatatccacttggaagagcagactttgatcattatactggccgggacagtgaaagggccttgaggctctcagagaagcctccctattccaaatatagctcaaggcataaatcgcatgacaatgtctactctcttggagggctggaaggtcggaaggcatctggctcgctcctggccatgtggaatggaagttccctgagtgatgctggcccgcctcctatcagcagatcgggagccgcaagcatgccttcaagcccaaagcaagccaggaaaatgagcattcaggacagcctggcgcttcaacccaagttaactagacacaaggagcttgcatctgaaaacatcaatttgagaactaggaagtactccagcagcagcctgagtcacatgggagcctacagccgatcacttcccaggttgtacagagccacagagaaccagctgacacctctcagcttgcctccaagaaactctctgggcaattccaaacgaacaaaacttggggaaaaggatctacctcatagcgtaatagacaatgacaattaccttaatttttcttctttgagctcaggggctttaccctataaaacctctgcttctgaaggcaatccttatgtaagttctaccctcagtgtccctgccagtccacgagtggctcggaagatgcttctggcctccacctcctcctgtgcctctgatgactttgatcaggcttcatatgtggggacaaacccgagtcattcacttcttgctggagagtcagacagagtttttgcgaccaggaggaacttctcttgtggatctgtggaatttgatgaggcagatttggaaagcctcagacaggcctcaggaaccccccagcctgcccttcgggaacggaaaagcagtattagctccatttcaggacgtgatgacctgatggattatcaccggcggcagagggaggaaagactcagggagcaggaaatggagcgattggagagacagcgtctggagaccatcctcagtctctgtgctgaatacacaaagcctgacagtcgcttatctactgggaccaccgtggaagatgtgcagaaaatcaacaaggagcttgagaagctgcagctctctgatgaggagtctgtgtttgaggaagccctcatgagccctgacacaagatacaggtgccaccggaaagactccctccctgatgcagacttggcaagctgtgggagtctcagtcagagcagtgccagcttctttacccccaggagcaccaggaatgatgaactactcagtgacctcacccggactcctccaccaccatcctccacctttccgaaagcttccagcgagtcctcttatctaagtatcctaccaaagaccccagagggtataagtgaagaacagagatctcaggagttggctgcaatggaagaaacccggatagtcattctgaacaacctcgaggaacttaagcaaaaaatcaaagacataaatgatcagatggatgagtctttcagagagttggatatggaatgtgctcttttggatggagaacagaaatctgaaacaactgaacttatgaaggagaaggagattttggatcatctaaaccggaaaatagctgaactggaaaagaacattgttggtgaaaagaccaaggatgctgacctgttggatgttgaaagcaaacactttgaagacctggagttccagcagcttgaacatgagagccgtctagatgaagaaaaggagaacttgactcaacagctcctgcgtgaagttgctgaatatcaacggaacatcgtttctagaaaggaaaaaatttctgcattgaaaaagcaagccaatcacattgttcagcaggctcagagagagcaagatcattttgtgaaagaaaagaataatttaataatgatgttgcaaagagaaaaggagaatctttgtaatttggaaaagaaatactccagcctctctggggggaaagggtttcccgttaaccccaatactttaaaagagggctatatcagtgtaaatgagattaatgagccgtgtggcaattccacgaatctatccccttccactcagtttcctgctgatgctgatgctgttgccactgagcctgccacagctgtgctggcgagccagccacagagcactttagaagtctggaagaaaggaaaaaacagcataaagaaggcctctatctgagtgatactttgcctcgaaagaaaaccacatcttccatctccccacatttcagcagtgctactatggggagaagcatcaccccaaaggtaggacctgggagaaaccacgggcttcccattccatgagtcttcttgtcattatattcactgatgtgtaaaggcctttaaagaaaagtgctaaataataaatcattacatttacttgttaggcagacatcaggactaaatctcattttctacctgttcagaggacatctgaaactgtatgctctggggccaaagaacatgcttcagggtattttctaccagcacaacccaggcgatgagtggcattcacttacatgatggacttccgtggctgcatcccacatctggagataagataggatgtagcctctgtgttccaggaataacagcaacaaatatttattcagacattttcatgtagctgacgctgggttgagccttttatgtggattgcttcatttga

SEQ ID NO: 464277 - DNA, 2078 bp, Homo sapiens
ctgactgctcaccgcgagtcaggaggggccggcgggctcacggagggagacagggtgggcgggggcaaaggctaggcgctagggcggcggcgccagcgtagagcggcggtttggaggaaagatgagacgattccagcaagattatggaagagcatagctacatacaaaaggagctagatttacaaaatggtagcttagaggaagactctgtggtgcattctgttgagaacgattcccaaaacatgatggagagcctcagcccaaagaaatactcttccagtctgagatttaaagccaatggagactattctggctcctatttaaccctctcacaacctgtgcctgcaaagagaagcccttctcctttgggaaccagtgtcagaagcagcccctccttagccaaaatccagggaagcaagcagttctcttatgatggaactgacaaaaatattcctatgaaacctccaactcctttactcaacactacatcctccctcagtggatatccacttggaagagcagactttgatcattatactggccgggacagtgaaagggccttgaggctctcagagaagcctccctattccaaatatagctcaaggcataaatcgcatgacaatgtctactctcttggagggctggaaggtcggaaggcatctggctcgctcctggccatgtggaatggaagttccctgagtgatgctggcccgcctcctatcagcagatcgggagccgcaagcatgccttcaagcccaaagcaagccaggaaaatgagcattcaggacagcctggcgcttcaacccaagttaactagacacaaggagcttgcatctgaaaacatcaatttgagaactaggaagtactccagcagcagcctgagtcacatgggagcctacagccgatcacttcccaggttgtacagagccacagagaaccagctgacacctctcagcttgcctccaagaaactctctgggcaattccaaacgaacaaaacttggggaaaaggatctacctcatagcgtaatagacaatgacaattaccttaatttttcttctttgagctcaggggctttaccctataaaacctctgcttctgaaggcaatccttatgtaagttctaccctcagtgtccctgccagtccacgagtggctcggaagatgcttctggcctccacctcctcctgtgcctctgatgactttgatcaggcttcatatgtggggacaaacccgagtcattcacttcttgctggagagtcagacagagtttttgcgaccaggaggaacttctcttgtggatctgtggaatttgatgaggcagatttggaaagcctcagacaggcctcaggaaccccccagcctgcccttcgggaacggaaaagcagtattagctccatttcaggacgtgatgacctgatggattatcaccggcggcagagggaggaaagactcagggagcaggaaatggagcgattggagagacagcgtctggagaccatcctcagtctctgtgctgaatacacaaagcctgacagtcgcttatctactgggaccaccgtggaagatgtgcagaaaatcaacaaggagcttgagaagctgcagctctctgatgaggagtctgtgtttgaggaagccctcatgagccctgacacaagatacaggtgccaccggaaagactccctccctgatgcagacttggcaagctgtgggagtctcagtcagagcagtgccagcttctttacccccaggagcaccaggaatgatgaactactcagtgacctcacccggactcctccaccaccatcctccacctttccgaaagcttccagcgagtcctcttatctaagtatcctaccaaagaccccagagggtataagtgaagaacagagatctcaggagttggctgcaatggaagaaacccggatagtcattctgaacaacctcgaggaacttaagcaaaaaatcaaagacataaatgatcagatggatgagtctttcagagagaattgcatagttttgtgagcgacagaaaggaatggggtcaggcttctgggggctggtggtgattccagttat

SEQ ID NO: 464278 - DNA, 692 bp, Homo sapiens
gaaagtgcttacgtgctttgtccactggctgttctgccatccacatggcgaccatcataataatttgtaagttgtcctgaggccccaaggccgcaggcactacagaagtgaaaggtggaattttttaaagatttctaggttcagcataaattcctacagtgtttagtatctaatcaaatactagctcaaatctatcagtgaacacaatatatgttgaataactttaagaaaaattctgttaaaattccagttttttttgtaagtgcataattcttcatttcttcagtcacctattacagttagtcaagttttgctattttgctttgcatttgcatttaaagcactttagaagtctggaagaaaggaaaaaacagcataaagaaggcctctatctgagtgatactttgcctcgaaagaaaaccacatcttccatctccccacatttcagcagtgctactatggggagaagcatcaccccaaaggtaggacctgggagaaaccacgggcttcccattccatgagtcttcttgtcattatattcactgatgtgtaaaggcctttaaagaaaagtgctaaataataaatcattacatttacttgttaggcagacatcaggactaaatctcattttctacctgttcagaggacatctgaaactgtatgctctggggccaaagaacatgcttcagggt

SEQ ID NO: 464279 - DNA, 411 bp, Homo sapiens
gtccaatgactcgtaagtaacattctttaaattatatatgcttggattttgttatgcacctcccttgaccccatgtgtgtgtgtgtgtgtgtgtctggggtgtgtgtgtgtgtgtgtgtgtatgtattagagagacttctcagtctaaaccaatattctcaaaaggctttggtgtttcattcagtgccagcacttcaaatattgctagaatagaagaaatggagagacttttgaagcaggctcatgcagaaaagacgcggctgctcgaatccagggtaagcttcatattttcatgccggaggtctgtgataccgtggtgcaggagccctgcgcttggcatcagacaatactcctccttaaggagccgtgtgttcctggaataaatcactcaacctttctcagtctcatttt

SEQ ID NO: 464280 - DNA, 442 bp, Homo sapiens
tcttgtaggttatgtattataagagactagtctacaaaccaagatttgtctagtaagaattgtcttttttatattgattggaaccattcaagtataaccagtatgttttaaaataatcattgttatgcataatgtttaggaacgggaaatggaagccaaaaaacgagccctggaagaagaaaaacgacgccgggaaatcctggaaaaacgattacaggaagaaactagccagaggcagaagttaatagaaaaggaagtaaaaataagggagagacaaagggcacaggttggtcggtcaatctgaatgcatatgggcaggttgccccctggtggcagttcctagaagacagctgttctgtgtctgaggatgctttcctgggcactgagcattagcacttgacatgtaagggttaagagaagagtgtgcattcctgtgcaaaaa

SEQ ID NO: 464281 - DNA, 6612 bp, Homo sapiens
gcaacagatggttccacagacatagcagatgttgcttttgaatccagattccagcaagattatggaagagcatagctacatacaaaaggagctagatttacaaaatggtagcttagaggaagactctgtggtgcattctgttgagaacgattcccaaaacatgatggagagcctcagcccaaagaaatactcttccagtctgagatttaaagccaatggagactattctggctcctatttaaccctctcacaacctgtgcctgcaaagagaagcccttctcctttgggaaccagtgtcagaagcagcccctccttagccaaaatccagggaagcaagcagttctcttatgatggaactgacaaaaatattcctatgaaacctccaactcctttactcaacactacatcctccctcagtggatatccacttggaagagcagactttgatcattatactggccgggacagtgaaagggccttgaggctctcagagaagcctccctattccaaatatagctcaaggcataaatcgcatgacaatgtctactctcttggagggctggaaggtcggaaggcatctggctcgctcctggccatgtggaatggaagttccctgagtgatgctggcccgcctcctatcagcagatcgggagccgcaagcatgccttcaagcccaaagcaagccaggaaaatgagcattcaggacagcctggcgcttcaacccaagttaactagacacaaggagcttgcatctgaaaacatcaatttgagaactaggaagtactccagcagcagcctgagtcacatgggagcctacagccgatcacttcccaggttgtacagagccacagagaaccagctgacacctctcagcttgcctccaagaaactctctgggcaattccaaacgaacaaaacttggggaaaaggatctacctcatagcgtaatagacaatgacaattaccttaatttttcttctttgagctcaggggctttaccctataaaacctctgcttctgaaggcaatccttatgtaagttctaccctcagtgtccctgccagtccacgagtggctcggaagatgcttctggcctccacctcctcctgtgcctctgatgactttgatcaggcttcatatgtggggacaaacccgagtcattcacttcttgctggagagtcagacagagtttttgcgaccaggaggaacttctcttgtggatctgtggaatttgatgaggcagatttggaaagcctcagacaggcctcaggaaccccccagcctgcccttcgggaacggaaaagcagtattagctccatttcaggacgtgatgacctgatggattatcaccggcggcagagggaggaaagactcagggagcaggaaatggagcgattggagagacagcgtctggagaccatcctcagtctctgtgctgaatacacaaagcctgacagtcgcttatctactgggaccaccgtggaagatgtgcagaaaatcaacaaggagcttgagaagctgcagctctctgatgaggagtctgtgtttgaggaagccctcatgagccctgacacaagatacaggtgccaccggaaagactccctccctgatgcagacttggcaagctgtgggagtctcagtcagagcagtgccagcttctttacccccaggagcaccaggaatgatgaactactcagtgacctcacccggactcctccaccaccatcctccacctttccgaaagcttccagcgagtcctcttatctaagtatcctaccaaagttggatatggaatgtgctcttttggatggagaacagaaatctgaaacaactgaacttatgaaggagaaggagattttggatcatctaaaccggaaaatagctgaactggaaaagaacattgttggtgaaaagaccaaggatgctgacctgttggatgttgaaagcaaacactttgaagacctggagttccagcagcttgaacatgagagccgtctagatgaagaaaaggagaacttgactcaacagctcctgcgtgaagttgctgaatatcaacggaacatcgtttctagaaagggctatatcagtgtaaatgagattaatgagccgtgtggcaattccacgaatctatccccttccactcagtttcctgctgatgctgatgctgttgccactgagcctgccacagctgtgctggcgagccagccacagagccccatggcctgaattcatggctacatctgtcgatcctttacctttaaatgacacacctcctcctttaccagctaagaaacacagaaggcagcagcagcagcaggagcaacagaactgcccggaaggggagaaagtgcttacgtgctttgtccactggctgttctgccatccacatggcgaccatcataataatttctggtatgtagtggagtggaatgtgaacctatgcgacctgatgcccgcccaagctctccctcaggttctgccgacatgcctgaggggatcattgtggcaagagaagaggcaggcccatctgcccctaggacagagtaacagctgtggaagtgtgctccctccctcactggcagccatggccaaagactcagaatctcggaggatgctcagagcgatcagagagcaagccatagcagtaacacaaggtaaagccagtaacctaaagtgccaggtgaccgagcaccagggtaaagaaaagacctcttggccgggcacggtggctcacgcctgtaatcccagcactttgggaggccgaggcaggcagatcacaaggtcaagagatcaggataatcctggccaacatggtgaaaccccgtctctactaaaaatacaaaagttagctgagtatggtggtgcactcctgtagtcccagctacttgggaggctgaggcaggagaattgcttgaacccaggaggtggaggttgcagtgagctgagattgtgccactgcactccagcctggtgacagagcatgactccgtctcaaaaaataaaaataaaaaataaagacctcttatttatggtgcttttcgtcctactgatgcctacattttcaaatggttgttatcaacagcttgtggaaggctgattgttatgatgggaaaagaagagagctagggtaattacgaggagcacagtcattggaaggaatgttgactctgaattaaataagtaattgacagacaagaacaactgaaaaagagagagagagaaaatgggaaaaatgtgtagtttggatcttaacaagattaaaagtgtcagtgatgatatgagatacgagtttctgaaatcctacacttgaaagattccacctgcttttttatgaccagactgagtgctccttaagttgaataccattgaagaagtgcctgccctaaaaccctggttttgcttgtcactaggaggcatcttattttcacttgaacacagctatttctagaggattcagggcctttgattgtgtttctgtttggtttcttttgtgtttgtgtgttgctggttgtgctgagatgtaggaatgccataggaaagtgtcaagtgatcctgctgaggggtaagagactcagcagaccacttcattcaaactgttgcttgcactgagcacggtgctctttctttgatcttcttggcttcaaaacaaattagaccaaggcccaagcttcataggcagatgtttctggttgctggcttgtgtctgtagatgtttaagattcaaagactgaaaaatgaggcaaactaacatatttatggctccttccttaggttataatcaccaacagatgagtgaaggacacaggcagaaatctgaattttataaccgcacagcatctgaatcaaatgtctacttgaatagtttccattatccagatcacagctacaaggaccaggcctttgatactctgagcctcgatagctctgatagcatggagaccagcatctctgcttgctcaccagacaacatctctagtgccagcacttcaaatattgctagaatagaagaaatggagagacttttgaagcaggctcatgcagaaaagacgcggctgctcgaatccagggaacgggaaatggaagccaaaaaacgagccctggaagaagaaaaacgacgccgggaaatcctggaaaaacgattacaggaagaaactagccagaggcagaagttaatagaaaaggaagtaaaaataagggagagacaaagggcacaggctcgtcctttgacacgctacctgcctgtccggaaggaagactttgatttgcggagccatgtagagactgctggccacaatattgacacctgttaccatgtatcaatcacagagaagacctgccgaggattcctcatcaaaatgggtgggaaaattaaaacgtggaaaaaacgttggtttgtttttgatcggaacaagcgaacattctcttattatgcagacaagcatgaaactaaattgaaaggagtaatatactttcaagccattgaagaagtctattatgatcacctcaagaatgctaataagagtcctaatccgttactcacctttagcgtcaagactcatgacagaatctattatatggtagccccatcgccagaagccatgcggatctggatggatgttatagttacgggggcagaaggttacactcacttcttgttgtagtgaactgaggcaacagtccacttcagggcagacggcaataatctcttacaagaatgaagccatattcaaccccagatgagaaaacccaacagatccatcccttgagctgtaaacactcagaactcctttcatatcaagacaagttatttgtaaaaaataaagaaggggttttaatacaaaccttcataataaatagcaaaataattgaagcttccatgagaaagaaaacactattttgataaattggatcacttataggaacatttctaataaactgtttttaatcagttgtcggatttggtgaaataaactaaacaggttacagaatatctgtatgtacttggaaatacagaataactttatcacccaaatcactggcattgacattattggtaatcaactggctttttttaaaaaaggtagcattttgttgacagttattttgtaaacataagcaaataagggcttggagggaaatacattttaggaggagttttgccttaattttttaagtactgcaccaaaaccaaagagctgacctgacttctgtggaacagtagtaactgcaagtgatgaactgcatttcgtattgttctgtatatttcaaaatggtattttgatgccatcaaatgcccaggaaattgactttgcagtgtcaccactggtgtaagctactatatatgtatatatatatgtagtaaaccactttttgtaaaagaagaaagagcaaaaagctgtgtgttttagaaaaaaaagccaggttacgcaacaggcattctgtcatgttgaacaattttaaataaagagaatatctggtgttaggagcttgttttgctgaagatttctccattcctggtgctgagaataaaggcaaccagtagccaatgtcctttagattgtctgatttctttttgttgtggagcacacctgctaactgctccctcaacataactatgaaatcatagctctgttttcaccaaagaacagaccaattaacatacttatttgcagaagtggtgtagttctacaaaacggcaaatgaagttcaacttaatattctctataatgtattattttattttattttttacaattagccttttttttagttaatttttgtcaaatgaaacgacttcaggcaagtctcttttataatggtttttcaagtgccatttattctagtttatcatgttttgcatgtttgaaagtatgaatgtgctctttcctaaaacatggcaaatgaatagatgtagagaataacaatattacttacaagatgaaatgattagattagaagtgtccctttattaaactttgtcagcctgactgggtacaattcttttgttaatttgcagtgtggtttgtatacacgtatacgtgttatcaataataagattttgcaactggatgacacaagattttacttgaacagtgaaggacaaaaatcatgattgtggaagatatttttaaaatctgattttgcagcgatcacttttaaaccctgtagtgatgtaagactaaaatataattgctaagattttgttggttaatgtaaagatatgacttttctgcactgtactctcttcataggattgtaaaggtgttctaatccaattgcatgatgtagtaagcctcttaaatatgtgtgttaaatatattgagtttggattaaaatgttgacatgatttcacatttgaaaataaactcatctcttattttgaagttacctatctgtagtatgatggaggatgaattaatcgcaaatgacagttgtagaaactatgtaaagtttgttgtgtgctaacattatgatttgtagtgtataaactgaagtattccaatagaagtatctctggttacatcctattgcttacaaaatgaaatgaaccctgaaaaactctgacatcatattgttgtctgtttacacagatacatttattgctggggattgca

SEQ ID NO: 464282 - DNA, 5473 bp, Homo sapiens
ctgactgctcaccgcgagtcaggaggggccggcgggctcacggagggagacagggtgggcgggggcaaaggctaggcgctagggcggcggcgccagcgtagagcggcggtttggaggaaagatgagacgattccagcaagattatggaagagcatagctacatacaaaaggagctagatttacaaaatggtagcttagaggaagactctgtggtgcattctgttgagaacgattcccaaaacatgatggagagcctcagcccaaagaaatactcttccagtctgagatttaaagccaatggagactattctggctcctatttaaccctctcacaacctgtgcctgcaaagagaagcccttctcctttgggaaccagtgtcagaagcagcccctccttagccaaaatccagggaagcaagcagttctcttatgatggaactgacaaaaatattcctatgaaacctccaactcctttactcaacactacatcctccctcagtggatatccacttggaagagcagactttgatcattatactggccgggacagtgaaagggccttgaggctctcagagaagcctccctattccaaatatagctcaaggcataaatcgcatgacaatgtctactctcttggagggctggaaggtcggaaggcatctggctcgctcctggccatgtggaatggaagttccctgagtgatgctggcccgcctcctatcagcagatcgggagccgcaagcatgccttcaagcccaaagcaagccaggaaaatgagcattcaggacagcctggcgcttcaacccaagttaactagacacaaggagcttgcatctgaaaacatcaatttgagaactaggaagtactccagcagcagcctgagtcacatgggagcctacagccgatcacttcccaggttgtacagagccacagagaaccagctgacacctctcagcttgcctccaagaaactctctgggcaattccaaacgaacaaaacttggggaaaaggatctacctcatagcgtaatagacaatgacaattaccttaatttttcttctttgagctcaggggctttaccctataaaacctctgcttctgaaggcaatccttatgtaagttctaccctcagtgtccctgccagtccacgagtggctcggaagatgcttctggcctccacctcctcctgtgcctctgatgactttgatcaggcttcatatgtggggacaaacccgagtcattcacttcttgctggagagtcagacagagtttttgcgaccaggaggaacttctcttgtggatctgtggaatttgatgaggcagatttggaaagcctcagacaggcctcaggaaccccccagcctgcccttcgggaacggaaaagcagtattagctccatttcaggacgtgatgacctgatggattatcaccggcggcagagggaggaaagactcagggagcaggaaatggagcgattggagagacagcgtctggagaccatcctcagtctctgtgctgaatacacaaagcctgacagtcgcttatctactgggaccaccgtggaagatgtgcagaaaatcaacaaggagcttgagaagctgcagctctctgatgaggagtctgtgtttgaggaagccctcatgagccctgacacaagatacaggtgccaccggaaagactccctccctgatgcagacttggcaagctgtgggagtctcagtcagagcagtgccagcttctttacccccaggagcaccaggaatgatgaactactcagtgacctcacccggactcctccaccaccatcctccacctttccgaaagcttccagcgagtcctcttatctaagtatcctaccaaagaccccagagggtataagtgaagaacagagatctcaggagttggctgcaatggaagaaacccggatagtcattctgaacaacctcgaggaacttaagcaaaaaatcaaagacataaatgatcagatggatgagtctttcagagagttggatatggaatgtgctcttttggatggagaacagaaatctgaaacaactgaacttatgaaggagaaggagattttggatcatctaaaccggaaaatagctgaactggaaaagaacattgttggtgaaaagaccaaggatgctgacctgttggatgttgaaagcaaacactttgaagacctggagttccagcagcttgaacatgagagccgtctagatgaagaaaaggagaacttgactcaacagctcctgcgtgaagttgctgaatatcaacggaacatcgtttctagaaaggaaaaaatttctgcattgaaaaagcaagccaatcacattgttcagcaggctcagagagagcaagatcattttgtgaaagaaaagaataatttaataatgatgttgcaaagagaaaaggagaatctttgtaatttggaaaagaaatactccagcctctctggggggaaagggtttcccgttaaccccaatactttaaaagagggctatatcagtgtaaatgagattaatgagccgtgtggcaattccacgaatctatccccttccactcagtttcctgctgatgctgatgctgttgccactgagcctgccacagctgtgctggcgagccagccacagagcactttagaagtctggaagaaaggaaaaaacagcataaagaaggcctctatctgagtgatactttgcctcgaaagaaaaccacatcttccatctccccacatttcagcagtgctactatggggagaagcatcaccccaaaggcccatctgcccctaggacagagtaacagctgtggaagtgtgctccctccctcactggcagccatggccaaagactcagaatctcggaggatgctcagaggttataatcaccaacagatgagtgaaggacacaggcagaaatctgaattttataaccgcacagcatctgaatcaaatgtctacttgaatagtttccattatccagatcacagctacaaggaccaggcctttgatactctgagcctcgatagctctgatagcatggagaccagcatctctgcttgctcaccagacaacatctctagtgccagcacttcaaatattgctagaatagaagaaatggagagacttttgaagcaggctcatgcagaaaagacgcggctgctcgaatccagggaacgggaaatggaagccaaaaaacgagccctggaagaagaaaaacgacgccgggaaatcctggaaaaacgattacaggaagaaactagccagaggcagaagttaatagaaaaggaagtaaaaataagggagagacaaagggcacaggctcgtcctttgacacgctacctgcctgtccggaaggaagactttgatttgcggagccatgtagagactgctggccacaatattgacacctgttaccatgtatcaatcacagagaagacctgccgaggattcctcatcaaaatgggtgggaaaattaaaacgtggaaaaaacgttggtttgtttttgatcggaacaagcgaacattctcttattatgcagacaagcatgaaactaaattgaaaggagtaatatactttcaagccattgaagaagtctattatgatcacctcaagaatgctaataagagtcctaatccgttactcacctttagcgtcaagactcatgacagaatctattatatggtagccccatcgccagaagccatgcggatctggatggatgttatagttacgggggcagaaggttacactcacttcttgttgtagtgaactgaggcaacagtccacttcagggcagacggcaataatctcttacaagaatgaagccatattcaaccccagatgagaaaacccaacagatccatcccttgagctgtaaacactcagaactcctttcatatcaagacaagttatttgtaaaaaataaagaaggggttttaatacaaaccttcataataaatagcaaaataattgaagcttccatgagaaagaaaacactattttgataaattggatcacttataggaacatttctaataaactgtttttaatcagttgtcggatttggtgaaataaactaaacaggttacagaatatctgtatgtacttggaaatacagaataactttatcacccaaatcactggcattgacattattggtaatcaactggctttttttaaaaaaggtagcattttgttgacagttattttgtaaacataagcaaataagggcttggagggaaatacattttaggaggagttttgccttaattttttaagtactgcaccaaaaccaaagagctgacctgacttctgtggaacagtagtaactgcaagtgatgaactgcatttcgtattgttctgtatatttcaaaatggtattttgatgccatcaaatgcccaggaaattgactttgcagtgtcaccactggtgtaagctactatatatgtatatatatatgtagtaaaccactttttgtaaaagaagaaagagcaaaaagctgtgtgttttagaaaaaaaagccaggttacgcaacaggcattctgtcatgttgaacaattttaaataaagagaatatctggtgttaggagcttgttttgctgaagatttctccattcctggtgctgagaataaaggcaaccagtagccaatgtcctttagattgtctgatttctttttgttgtggagcacacctgctaactgctccctcaacataactatgaaatcatagctctgttttcaccaaagaacagaccaattaacatacttatttgcagaagtggtgtagttctacaaaacggcaaatgaagttcaacttaatattctctataatgtattattttattttattttttacaattagccttttttttagttaatttttgtcaaatgaaacgacttcaggcaagtctcttttataatggtttttcaagtgccatttattctagtttatcatgttttgcatgtttgaaagtatgaatgtgctctttcctaaaacatggcaaatgaatagatgtagagaataacaatattacttacaagatgaaatgattagattagaagtgtccctttattaaactttgtcagcctgactgggtacaattcttttgttaatttgcagtgtggtttgtatacacgtatacgtgttatcaataataagattttgcaactggatgacacaagattttacttgaacagtgaaggacaaaaatcatgattgtggaagatatttttaaaatctgattttgcagcgatcacttttaaaccctgtagtgatgtaagactaaaatataattgctaagattttgttggttaatgtaaagatatgacttttctgcactgtactctcttcataggattgtaaaggtgttctaatccaattgcatgatgtagtaagcctcttaaatatgtgtgttaaatatattgagtttggattaaaatgttgacatgatttcacatttgaaaataaa

SEQ ID NO: 464283 - DNA, 5619 bp, Homo sapiens
taagctcggtaccccactttatgcgtgggtaaaggagaaactgtgttatgttcccaacatcccactctcttcagcaatcgctggaacagccatgggccatccctgctgagtcaggaaagaagctgagtggaagagtcgggattgaaaagcagcagacaaggctggcactgatcccagtttatcctttgagattcagcagaagatcctgatggaggaggaggataccaagagagaggtgcccaaggaagatggagttggtgatgtgcaacatttcgattccagcaagattatggaagagcatagctacatacaaaaggagctagatttacaaaatggtagcttagaggaagactctgtggtgcattctgttgagaacgattcccaaaacatgatggagagcctcagcccaaagaaatactcttccagtctgagatttaaagccaatggagactattctggctcctatttaaccctctcacaacctgtgcctgcaaagagaagcccttctcctttgggaaccagtgtcagaagcagcccctccttagccaaaatccagggaagcaagcagttctcttatgatggaactgacaaaaatattcctatgaaacctccaactcctttactcaacactacatcctccctcagtggatatccacttggaagagcagactttgatcattatactggccgggacagtgaaagggccttgaggctctcagagaagcctccctattccaaatatagctcaaggcataaatcgcatgacaatgtctactctcttggagggctggaaggtcggaaggcatctggctcgctcctggccatgtggaatggaagttccctgagtgatgctggcccgcctcctatcagcagatcgggagccgcaagcatgccttcaagcccaaagcaagccaggaaaatgagcattcaggacagcctggcgcttcaacccaagttaactagacacaaggagcttgcatctgaaaacatcaatttgagaactaggaagtactccagcagcagcctgagtcacatgggagcctacagccgatcacttcccaggttgtacagagccacagagaaccagctgacacctctcagcttgcctccaagaaactctctgggcaattccaaacgaacaaaacttggggaaaaggatctacctcatagcgtaatagacaatgacaattaccttaatttttcttctttgagctcaggggctttaccctataaaacctctgcttctgaaggcaatccttatgtaagttctaccctcagtgtccctgccagtccacgagtggctcggaagatgcttctggcctccacctcctcctgtgcctctgatgactttgatcaggcttcatatgtggggacaaacccgagtcattcacttcttgctggagagtcagacagagtttttgcgaccaggaggaacttctcttgtggatctgtggaatttgatgaggcagatttggaaagcctcagacaggcctcaggaaccccccagcctgcccttcgggaacggaaaagcagtattagctccatttcaggacgtgatgacctgatggattatcaccggcggcagagggaggaaagactcagggagcaggaaatggagcgattggagagacagcgtctggagaccatcctcagtctctgtgctgaatacacaaagcctgacagtcgcttatctactgggaccaccgtggaagatgtgcagaaaatcaacaaggagcttgagaagctgcagctctctgatgaggagtctgtgtttgaggaagccctcatgagccctgacacaagatacaggtgccaccggaaagactccctccctgatgcagacttggcaagctgtgggagtctcagtcagagcagtgccagcttctttacccccaggagcaccaggaatgatgaactactcagtgacctcacccggactcctccaccaccatcctccacctttccgaaagcttccagcgagtcctcttatctaagtatcctaccaaagaccccagagggtataagtgaagaacagagatctcaggagttggctgcaatggaagaaacccggatagtcattctgaacaacctcgaggaacttaagcaaaaaatcaaagacataaatgatcagatggatgagtctttcagagagttggatatggaatgtgctcttttggatggagaacagaaatctgaaacaactgaacttatgaaggagaaggagattttggatcatctaaaccggaaaatagctgaactggaaaagaacattgttggtgaaaagaccaaggatgctgacctgttggatgttgaaagcaaacactttgaagacctggagttccagcagcttgaacatgagagccgtctagatgaagaaaaggagaacttgactcaacagctcctgcgtgaagttgctgaatatcaacggaacatcgtttctagaaaggaaaaaatttctgcattgaaaaagcaagccaatcacattgttcagcaggctcagagagagcaagatcattttgtgaaagaaaagaataatttaataatgatgttgcaaagagaaaaggagaatctttgtaatttggaaaagaaatactccagcctctctggggggaaagggtttcccgttaaccccaatactttaaaagagggctatatcagtgtaaatgagattaatgagccgtgtggcaattccacgaatctatccccttccactcagtttcctgctgatgctgatgctgttgccactgagcctgccacagctgtgctggcgagccagccacagagcactttagaagtctggaagaaaggaaaaaacagcataaagaaggcctctatctgagtgatactttgcctcgaaagaaaaccacatcttccatctccccacatttcagcagtgctactatggggagaagcatcaccccaaaggcccatctgcccctaggacagagtaacagctgtggaagtgtgctccctccctcactggcagccatggccaaagactcagaatctcggaggatgctcagaggttataatcaccaacagatgagtgaaggacacaggcagaaatctgaattttataaccgcacagcatctgaatcaaatgtctacttgaatagtttccattatccagatcacagctacaaggaccaggcctttgatactctgagcctcgatagctctgatagcatggagaccagcatctctgcttgctcaccagacaacatctctagtgccagcacttcaaatattgctagaatagaagaaatggagagacttttgaagcaggctcatgcagaaaagacgcggctgctcgaatccagggaacgggaaatggaagccaaaaaacgagccctggaagaagaaaaacgacgccgggaaatcctggaaaaacgattacaggaagaaactagccagaggcagaagttaatagaaaaggaagtaaaaataagggagagacaaagggcacaggctcgtcctttgacacgctacctgcctgtccggaaggaagactttgatttgcggagccatgtagagactgctggccacaatattgacacctgttaccatgtatcaatcacagagaagacctgccgaggattcctcatcaaaatgggtgggaaaattaaaacgtggaaaaaacgttggtttgtttttgatcggaacaagcgaacattctcttattatgcagacaagcatgaaactaaattgaaaggagtaatatactttcaagccattgaagaagtctattatgatcacctcaagaatgctaataagagtcctaatccgttactcacctttagcgtcaagactcatgacagaatctattatatggtagccccatcgccagaagccatgcggatctggatggatgttatagttacgggggcagaaggttacactcacttcttgttgtagtgaactgaggcaacagtccacttcagggcagacggcaataatctcttacaagaatgaagccatattcaaccccagatgagaaaacccaacagatccatcccttgagctgtaaacactcagaactcctttcatatcaagacaagttatttgtaaaaaataaagaaggggttttaatacaaaccttcataataaatagcaaaataattgaagcttccatgagaaagaaaacactattttgataaattggatcacttataggaacatttctaataaactgtttttaatcagttgtcggatttggtgaaataaactaaacaggttacagaatatctgtatgtacttggaaatacagaataactttatcacccaaatcactggcattgacattattggtaatcaactggctttttttaaaaaaggtagcattttgttgacagttattttgtaaacataagcaaataagggcttggagggaaatacattttaggaggagttttgccttaattttttaagtactgcaccaaaaccaaagagctgacctgacttctgtggaacagtagtaactgcaagtgatgaactgcatttcgtattgttctgtatatttcaaaatggtattttgatgccatcaaatgcccaggaaattgactttgcagtgtcaccactggtgtaagctactatatatgtatatatatatgtagtaaaccactttttgtaaaagaagaaagagcaaaaagctgtgtgttttagaaaaaaaagccaggttacgcaacaggcattctgtcatgttgaacaattttaaataaagagaatatctggtgttaggagcttgttttgctgaagatttctccattcctggtgctgagaataaaggcaaccagtagccaatgtcctttagattgtctgatttctttttgttgtggagcacacctgctaactgctccctcaacataactatgaaatcatagctctgttttcaccaaagaacagaccaattaacatacttatttgcagaagtggtgtagttctacaaaacggcaaatgaagttcaacttaatattctctataatgtattattttattttattttttacaattagccttttttttagttaatttttgtcaaatgaaacgacttcaggcaagtctcttttataatggtttttcaagtgccatttattctagtttatcatgttttgcatgtttgaaagtatgaatgtgctctttcctaaaacatggcaaatgaatagatgtagagaataacaatattacttacaagatgaaatgattagattagaagtgtccctttattaaactttgtcagcctgactgggtacaattcttttgttaatttgcagtgtggtttgtatacacgtatacgtgttatcaataataagattttgcaactggatgacacaagattttacttgaacagtgaaggacaaaaatcatgattgtggaagatatttttaaaatctgattttgcagcgatcacttttaaaccctgtagtgatgtaagactaaaatataattgctaagattttgttggttaatgtaaagatatgacttttctgcactgtactctcttcataggattgtaaaggtgttctaatccaattgcatgatgtagtaagcctcttaaatatgtgtgttaaatatattgagtttggattaaaatgttgacatgatttcacatttgaaaataaa

SEQ ID NO: 464284 - DNA, 6327 bp, Homo sapiens
  misc_feature (3657)..(3657): n is a, c, g, or t
  misc_feature (3793)..(3793): n is a, c, g, or t
ctgactgctcaccgcgagtcaggaggggccggcgggctcacggagggagacagggtgggcgggggcaaaggctaggcgctagggcggcggcgccagcgtagagcggcggtttggaggaaagatgagacgattccagcaagattatggaagagcatagctacatacaaaaggagctagatttacaaaatggtagcttagaggaagactctgtggtgcattctgttgagaacgattcccaaaacatgatggagagcctcagcccaaagaaatactcttccagtctgagatttaaagccaatggagactattctggctcctatttaaccctctcacaacctgtgcctgcaaagagaagcccttctcctttgggaaccagtgtcagaagcagcccctccttagccaaaatccagggaagcaagcagttctcttatgatggaactgacaaaaatattcctatgaaacctccaactcctttactcaacactacatcctccctcagtggatatccacttggaagagcagactttgatcattatactggccgggacagtgaaagggccttgaggctctcagagaagcctccctattccaaatatagctcaaggcataaatcgcatgacaatgtctactctcttggagggctggaaggtcggaaggcatctggctcgctcctggccatgtggaatggaagttccctgagtgatgctggcccgcctcctatcagcagatcgggagccgcaagcatgccttcaagcccaaagcaagccaggaaaatgagcattcaggacagcctggcgcttcaacccaagttaactagacacaaggagcttgcatctgaaaacatcaatttgagaactaggaagtactccagcagcagcctgagtcacatgggagcctacagccgatcacttcccaggttgtacagagccacagagaaccagctgacacctctcagcttgcctccaagaaactctctgggcaattccaaacgaacaaaacttggggaaaaggatctacctcatagcgtaatagacaatgacaattaccttaatttttcttctttgagctcaggggctttaccctataaaacctctgcttctgaaggcaatccttatgtaagttctaccctcagtgtccctgccagtccacgagtggctcggaagatgcttctggcctccacctcctcctgtgcctctgatgactttgatcaggcttcatatgtggggacaaacccgagtcattcacttcttgctggagagtcagacagagtttttgcgaccaggaggaacttctcttgtggatctgtggaatttgatgaggcagatttggaaagcctcagacaggcctcaggaaccccccagcctgcccttcgggaacggaaaagcagtattagctccatttcaggacgtgatgacctgatggattatcaccggcggcagagggaggaaagactcagggagcaggaaatggagcgattggagagacagcgtctggagaccatcctcagtctctgtgctgaatacacaaagcctgacagtcgcttatctactgggaccaccgtggaagatgtgcagaaaatcaacaaggagcttgagaagctgcagctctctgatgaggagtctgtgtttgaggaagccctcatgagccctgacacaagatacaggtgccaccggaaagactccctccctgatgcagacttggcaagctgtgggagtctcagtcagagcagtgccagcttctttacccccaggagcaccaggaatgatgaactactcagtgacctcacccggactcctccaccaccatcctccacctttccgaaagcttccagcgagtcctcttatctaagtatcctaccaaagaccccagagggtataagtgaagaacagagatctcaggagttggctgcaatggaagaaacccggatagtcattctgaacaacctcgaggaacttaagcaaaaaatcaaagacataaatgatcagatggatgagtctttcagagagttggatatggaatgtgctcttttggatggagaacagaaatctgaaacaactgaacttatgaaggagaaggagattttggatcatctaaaccggaaaatagctgaactggaaaagaacattgttggtgaaaagaccaaggatgctgacctgttggatgttgaaagcaaacactttgaagacctggagttccagcagcttgaacatgagagccgtctagatgaagaaaaggagaacttgactcaacagctcctgcgtgaagttgctgaatatcaacggaacatcgtttctagaaaggaaaaaatttctgcattgaaaaagcaagccaatcacattgttcagcaggctcagagagagcaagatcattttgtgaaagaaaagaataatttaataatgatgttgcaaagagaaaaggagaatctttgtaatttggaaaagaaatactccagcctctctggggggaaagggtttcccgttaaccccaatactttaaaagagggctatatcagtgtaaatgagattaatgagccgtgtggcaattccacgaatctatccccttccactcagtttcctgctgatgctgatgctgttgccactgagcctgccacagctgtgctggcgagccagccacagagcactttagaagtctggaagaaaggaaaaaacagcataaagaaggcctctatctgagtgatactttgcctcgaaagaaaaccacatcttccatctccccacatttcagcagtgctactatggggagaagcatcaccccaaaggcccatctgcccctaggacagagtaacagctgtggaagtgtgctccctccctcactggcagccatggccaaagactcagaatctcggaggatgctcagaggttataatcaccaacagatgagtgaaggacacaggcagaaatctgaattttataaccgcacagcatctgaatcaaatgtctacttgaatagtttccattatccagatcacagctacaaggaccaggcctttgatactctgagcctcgatagctctgatagcatggagaccagcatctctgcttgctcaccagacaacatctctagtgccagcacttcaaatattgctagaatagaagaaatggagagacttttgaagcaggctcatgcagaaaagacgcggctgctcgaatccagggaacgggaaatggaagccaaaaaacgagccctggaagaagaaaaacgacgccgggaaatcctggaaaaacgattacaggaagaaactagccagaggcagaagttaatagaaaaggaagtaaaaataagggagagacaaagggcacaggctcgtcctttgacacgctacctgcctgtccggaaggaagactttgatttgcggagccatgtagagactgctggccacaatattgacacctgttaccatgtatcaatcacagagaagacctgccgaggattcctcatcaaaatgggtgggaaaattaaaacgtggaaaaaacgttggtttgtttttgatcggaacaagcgaacattctcttattatgcagacaagcatgaaactaaattgaaaggagtaatatactttcaagccattgaagaagtctattatgatcacctcaagaatgctaataaggtaaacatcagttttctaaattcctacantttgaatgcataattaagaagggaaaaatatttttggagtctaagaagtttgaaattgatgttctgatgtaacagatagatatgatcagaatggtgctggaaaagtaaacatgaagtaagtgggatggccgttctntttgaggaaaaaaaatatcatagcaaattgaggaaatattctggacataatggtttgggaaaccctgcgaaacgactctgccagggttctaaaaagaagctaccatatagttaagagggggatcgtgagcaagtcctagtagggctaagaataacagctactatttattaaactcctactctcagctaggtaccctgctagagctttacaaactagctgctgaaataatttatgagttctgtctgagatttcctgttcagaaaaatggtcaatcctgaaaaaggctctgggacaggtgtgtgagttatagtagagcaaaagtaacgcctttgtaaatttaataaattgaaaattttgaagaagtcatcacatgtctgtgttatttaatgttgtattttaagatgtttattttacattctttttccttttttgaattttagagtcctaatccgttactcacctttagcgtcaagactcatgacagaatctattatatggtagccccatcgccagaagccatgcggatctggatggatgttatagttacgggggcagaaggttacactcacttcttgttgtagtgaactgaggcaacagtccacttcagggcagacggcaataatctcttacaagaatgaagccatattcaaccccagatgagaaaacccaacagatccatcccttgagctgtaaacactcagaactcctttcatatcaagacaagttatttgtaaaaaataaagaaggggttttaatacaaaccttcataataaatagcaaaataattgaagcttccatgagaaagaaaacactattttgataaattggatcacttataggaacatttctaataaactgtttttaatcagttgtcggatttggtgaaataaactaaacaggttacagaatatctgtatgtacttggaaatacagaataactttatcacccaaatcactggcattgacattattggtaatcaactggctttttttaaaaaaggtagcattttgttgacagttattttgtaaacataagcaaataagggcttggagggaaatacattttaggaggagttttgccttaattttttaagtactgcaccaaaaccaaagagctgacctgacttctgtggaacagtagtaactgcaagtgatgaactgcatttcgtattgttctgtatatttcaaaatggtattttgatgccatcaaatgcccaggaaattgactttgcagtgtcaccactggtgtaagctactatatatgtatatatatatgtagtaaaccactttttgtaaaagaagaaagagcaaaaagctgtgtgttttagaaaaaaaagccaggttacgcaacaggcattctgtcatgttgaacaattttaaataaagagaatatctggtgttaggagcttgttttgctgaagatttctccattcctggtgctgagaataaaggcaaccagtagccaatgtcctttagattgtctgatttctttttgttgtggagcacacctgctaactgctccctcaacataactatgaaatcatagctctgttttcaccaaagaacagaccaattaacatacttatttgcagaagtggtgtagttctacaaaacggcaaatgaagttcaacttaatattctctataatgtattattttattttattttttacaattagccttttttttagttaatttttgtcaaatgaaacgacttcaggcaagtctcttttataatggtttttcaagtgccatttattctagtttatcatgttttgcatgtttgaaagtatgaatgtgctctttcctaaaacatggcaaatgaatagatgtagagaataacaatattacttacaagatgaaatgattagattagaagtgtccctttattaaactttgtcagcctgactgggtacaattcttttgttaatttgcagtgtggtttgtatacacgtatacgtgttatcaataataagattttgcaactggatgacacaagattttacttgaacagtgaaggacaaaaatcatgattgtggaagatatttttaaaatctgattttgcagcgatcacttttaaaccctgtagtgatgtaagactaaaatataattgctaagattttgttggttaatgtaaagatatgacttttctgcactgtactctcttcataggattgtaaaggtgttctaatccaattgcatgatgtagtaagcctcttaaatatgtgtgttaaatatattgagtttggattaaaatgttgacatgatttcacatttgaaaataaactcatctcttattttgaagttacctatctgtagtatgatggaggatgaattaatcgcaaatgacagttgtagaaactatgtaaagtttgttgtgtgctaacattatgatttgtagtgtataaactgaagtattccaatagaagtatctctggttacatcctattgcttacaaaatgaaatgaaccctgaaaaactctgacatcatattgttgtctgtttacacagatacatttattgctggggattgca

SEQ ID NO: 464285 - DNA, 3746 bp, Homo sapiens
tagctgattcttgaggaaaactgtcatccgcgattaaagaggtgtgtaggcatgacgtttcattcattcactgcttttcttcatgtcagaaattaacccacggccaactgaaaatgaggtccacgagaacgtgcatgacaaatgtatatctgtttggccagaggggtagggtaaggctgagtttataaagtataccaatttgggggtaatgctctgccaataaaaaattctagaaaccatgaaatttatgctacggagtggagtactaggagaagtaagtcaaagaaatatgttctatgtcttagcactcttaactcaacttagttttcttataaattaaaaagcctttctaaaattgttgatttgagttgccttttcagtttgactttgttttcgattttgttttgtaacatggatgcttttaaatattaggccttttaaaagccttctaggggaggggtcaataataataaattaaaataccttcagtgatccaagtcgcttacagtgtgggattttaataagaggctaaattgaaagatattgcccatcaattgtaacttcttaattaaaatataacaaaacagaacaaactatcaatttcatttctatgtcttattctttcatttcatgtggacacatatataccttttctttctcctataaagcaaagatcacctgtctattctggatttgtgtttccttccgctctttctcctcatcctatcactcaacatacatcagccccatggcctgaattcatggctacatctgtcgatcctttacctttaaatgacacacctcctcctttaccagctaagaaacacagaaggcagcagcagcagcaggagcaacagaactgcccggaaggggagaaagtgcttacgtgctttgtccactggctgttctgccatccacatggcgaccatcataataatttctggtatgtagtggagtggaatgtgaacctatgcgacctgatgcccgcccaagctctccctcaggttctgccgacatgcctgaggggatcattgtggcaagagaagaggcaggcccatctgcccctaggacagagtaacagctgtggaagtgtgctccctccctcactggcagccatggccaaagactcagaatctcggaggatgctcagaggttataatcaccaacagatgagtgaaggacacaggcagaaatctgaattttataaccgcacagcatctgaatcaaatgtctacttgaatagtttccattatccagatcacagctacaaggaccaggcctttgatactctgagcctcgatagctctgatagcatggagaccagcatctctgcttgctcaccagacaacatctctagtgccagcacttcaaatattgctagaatagaagaaatggagagacttttgaagcaggctcatgcagaaaagacgcggctgctcgaatccagggaacgggaaatggaagccaaaaaacgagccctggaagaagaaaaacgacgccgggaaatcctggaaaaacgattacaggaagaaactagccagaggcagaagttaatagaaaaggaagtaaaaataagggagagacaaagggcacaggctcgtcctttgacacgctacctgcctgtccggaaggaagactttgatttgcggagccatgtagagactgctggccacaatattgacacctgttaccatgtatcaatcacagagaagacctgccgaggattcctcatcaaaatgggtgggaaaattaaaacgtggaaaaaacgttggtttgtttttgatcggaacaagcgaacattctcttattatgcagacaagcatgaaactaaattgaaaggagtaatatactttcaagccattgaagaagtctattatgatcacctcaagaatgctaataagagtcctaatccgttactcacctttagcgtcaagactcatgacagaatctattatatggtagccccatcgccagaagccatgcggatctggatggatgttatagttacgggggcagaaggttacactcacttcttgttgtagtgaactgaggcaacagtccacttcagggcagacggcaataatctcttacaagaatgaagccatattcaaccccagatgagaaaacccaacagatccatcccttgagctgtaaacactcagaactcctttcatatcaagacaagttatttgtaaaaaataaagaaggggttttaatacaaaccttcataataaatagcaaaataattgaagcttccatgagaaagaaaacactattttgataaattggatcacttataggaacatttctaataaactgtttttaatcagttgtcggatttggtgaaataaactaaacaggttacagaatatctgtatgtacttggaaatacagaataactttatcacccaaatcactggcattgacattattggtaatcaactggctttttttaaaaaaggtagcattttgttgacagttattttgtaaacataagcaaataagggcttggagggaaatacattttaggaggagttttgccttaattttttaagtactgcaccaaaaccaaagagctgacctgacttctgtggaacagtagtaactgcaagtgatgaactgcatttcgtattgttctgtatatttcaaaatggtattttgatgccatcaaatgcccaggaaattgactttgcagtgtcaccactggtgtaagctactatatatgtatatatatatgtagtaaaccactttttgtaaaagaagaaagagcaaaaagctgtgtgttttagaaaaaaaagccaggttacgcaacaggcattctgtcatgttgaacaattttaaataaagagaatatctggtgttaggagcttgttttgctgaagatttctccattcctggtgctgagaataaaggcaaccagtagccaatgtcctttagattgtctgatttctttttgttgtggagcacacctgctaactgctccctcaacataactatgaaatcatagctctgttttcaccaaagaacagaccaattaacatacttatttgcagaagtggtgtagttctacaaaacggcaaatgaagttcaacttaatattctctataatgtattattttattttattttttacaattagccttttttttagttaatttttgtcaaatgaaacgacttcaggcaagtctcttttataatggtttttcaagtgccatttattctagtttatcatgttttgcatgtttgaaagtatgaatgtgctctttcctaaaacatggcaaatgaatagatgtagagaataacaatattacttacaagatgaaatgattagattagaagtgtccctttattaaactttgtcagcctgactgggtacaattcttttgttaatttgcagtgtggtttgtatacacgtatacgtgttatcaataataagattttgcaactggatgacacaagattttacttgaacagtgaaggacaaaaatcatgattgtggaagatatttttaaaatctgattttgcagcgatcacttttaaaccctgtagtgatgtaagactaaaatataattgctaagattttgttggttaatgtaaagatatgacttttctgcactgtactctcttcataggattgtaaaggtgttctaatccaattgcatgatgtagtaagcctcttaaatatgtgtgttaaatatattgagtttggattaaaatgttgacatgatttcacatttgaaaataaa

SEQ ID NO: 464286 - DNA, 2584 bp, Homo sapiens
ctgactgctcaccgcgagtcaggaggggccggcgggctcacggagggagacagggtgggcgggggcaaaggctaggcgctagggcggcggcgccagcgtagagcggcggtttggaggaaagatgagacgattccagcaagattatggaagagcatagctacatacaaaaggagctagatttacaaaatggtagcttagaggaagactctgtggtgcattctgttgagaacgattcccaaaacatgatggagagcctcagcccaaagaaatactcttccagtctgagatttaaagccaatggagactattctggctcctatttaaccctctcacaacctgtgcctgcaaagagaagcccttctcctttgggaaccagtgtcagaagcagcccctccttagccaaaatccagggaagcaagcagttctcttatgatggaactgacaaaaatattcctatgaaacctccaactcctttactcaacactacatcctccctcagtggatatccacttggaagagcagactttgatcattatactggccgggacagtgaaagggccttgaggctctcagagaagcctccctattccaaatatagctcaaggcataaatcgcatgacaatgtctactctcttggagggctggaaggtcggaaggcatctggctcgctcctggccatgtggaatggaagttccctgagtgatgctggcccgcctcctatcagcagatcgggagccgcaagcatgccttcaagcccaaagcaagccaggaaaatgagcattcaggacagcctggcgcttcaacccaagttaactagacacaaggagcttgcatctgaaaacatcaatttgagaactaggaagtactccagcagcagcctgagtcacatgggagcctacagccgatcacttcccaggttgtacagagccacagagaaccagctgacacctctcagcttgcctccaagaaactctctgggcaattccaaacgaacaaaacttggggaaaaggatctacctcatagcgtaatagacaatgacaattaccttaatttttcttctttgagctcaggggctttaccctataaaacctctgcttctgaaggcaatccttatgtaagttctaccctcagtgtccctgccagtccacgagtggctcggaagatgcttctggcctccacctcctcctgtgcctctgatgactttgatcaggcttcatatgtggggacaaacccgagtcattcacttcttgctggagagtcagacagagtttttgcgaccaggaggaacttctcttgtggatctgtggaatttgatgaggcagatttggaaagcctcagacaggcctcaggaaccccccagcctgcccttcgggaacggaaaagcagtattagctccatttcaggacgtgatgacctgatggattatcaccggcggcagagggaggaaagactcagggagcaggaaatggagcgattggagagacagcgtctggagaccatcctcagtctctgtgctgaatacacaaagcctgacagtcgcttatctactgggaccaccgtggaagatgtgcagaaaatcaacaaggagcttgagaagctgcagctctctgatgaggagtctgtgtttgaggaagccctcatgagccctgacacaagatacaggtgccaccggaaagactccctccctgatgcagacttggcaagctgtgggagtctcagtcagagcagtgccagcttctttacccccaggagcaccaggaatgatgaactactcagtgacctcacccggactcctccaccaccatcctccacctttccgaaagcttccagcgagtcctcttatctaagtatcctaccaaagaccccagagggtataagtgaagaacagagatctcaggagttggctgcaatggaagaaacccggatagtcattctgaacaacctcgaggaacttaagcaaaaaatcaaagacataaatgatcagatggatgagtctttcagagagttggatatggaatgtgctcttttggatggagaacagaaatctgaaacaactgaacttatgaaggagaaggagattttggatcatctaaaccggaaaatagctgaactggaaaagaacattgttggtgaaaagaccaaggatgctgacctgttggatgttgaaagcaaacactttgaagacctggagttccagcagcttgaacatgagagccgtctagatgaagaaaaggagaacttgactcaacagctcctgcgtgaagttgctgaatatcaacggaacatcgtttctagaaaggaaaaaatttctgcattgaaaaagcaagccaatcacattgttcagcaggctcagagagagcaagatcattttgtgaaagaaaagaataatttaataatgatgttgcaaagagaaaaggagaatctttgtaatttggaaaagaaatactccagcctctctggggggaaagggtttcccgttaaccccaatactttaaaagaggtaagctatgattttacatgtcgctttatgttgccttagaaatcaggagatgtatttcagctttatttgattagctgaataat

SEQ ID NO: 464287 - DNA, 1640 bp, Homo sapiens
ctgactgctcaccgcgagtcaggaggggccggcgggctcacggagggagacagggtgggcgggggcaaaggctaggcgctagggcggcggcgccagcgtagagcggcggtttggaggaaagatgagacgattccagcaagattatggaagagcatagctacatacaaaaggagctagatttacaaaatggtagcttagaggaagactctgtggtgcattctgttgagaacgattcccaaaacatgatggagagcctcagcccaaagaaatactcttccagtctgagatttaaagccaatggagactattctggctcctatttaaccctctcacaacctgtgcctgcaaagagaagcccttctcctttgggaaccagtgtcagaagcagcccctccttagccaaaatccagggaagcaagcagttctcttatgatggaactgacaaaaatattcctatgaaacctccaactcctttactcaacactacatcctccctcagtggatatccacttggaagagcagactttgatcattatactggccgggacagtgaaagggccttgaggctctcagagaagcctccctattccaaatatagctcaaggcataaatcgcatgacaatgtctactctcttggagggctggaaggtcggaaggcatctggctcgctcctggccatgtggaatggaagttccctgagtgatgctggcccgcctcctatcagcagatcgggagccgcaagcatgccttcaagcccaaagcaagccaggaaaatgagcattcaggacagcctggcgcttcaacccaagttaactagacacaaggagcttgcatctgaaaacatcaatttgagaactaggaagtactccagcagcagcctgagtcacatgggagcctacagccgatcacttcccaggttgtacagagccacagagaaccagctgacacctctcagcttgcctccaagaaactctctgggcaattccaaacgaacaaaacttggggaaaaggatctacctcatagcgtaatagacaatgacaattaccttaatttttcttctttgagctcaggggctttaccctataaaacctctgcttctgaaggcaatccttatgtaagttctaccctcagtgtccctgccagtccacgagtggctcggaagatgcttctggcctccacctcctcctgtgcctctgatgactttgatcaggcttcatatgtggggacaaacccgagtcattcacttcttgctggagagtcagacagagtttttgcgaccaggaggaacttctcttgtggatctgtggaatttgatgaggcagatttggaaagcctcagacaggcctcaggaaccccccagcctgcccttcgggaacggaaaagcagtattagctccatttcaggacgtgatgacctgatggattatcaccggcggcagagggaggaaagactcagggagcaggaaatggagcgattggagagacagcgtctggagaccatcctcagtctctgtgctgaatacacaaagcctgacagtcgcttatctactgggaccaccgtggaagatgtgcagaaaatcaacaaggactgagatcgtgccactgcactccagcctgggcgacagagcgagactccatct

SEQ ID NO: 464288 - DNA, 1662 bp, Homo sapiens
ctgcactcggagcagccggccggccctgccggacccgggcaatgaggggcttagcacccgggccagcggctgtggagggtgtactgggtcccccagcagtgccagcccaccggcgctgcgctcgatttctcgccgggcctcagctgccttcccgtggggcagggctcgggacctgcagcccgccatgcctgagcctcccactccctcagtgggctcctgtgcggcccgagcctcctcgaggagcgccatcccctgctccacggcgcccagtcccatcaaccacccaagggctgaggagtgcgggcgcacggcgcgggactggcaggcagctccatctgcagccccgctgcgggatccactgggtgaagccaactgggctcctgagtctggtggggacgtggagaacctttatgtctagcccggggattgtaaatacaccaatcggcactcagtatctagctcaaggtttctcagggattataaacgcaccaatcagcgccctgtcaaaacagaccactaggctctaccaatcagcaggatgtgggtgggggccagataagaaaataaaagcaggctgcctgagacagcagtggcaacccgctccggtgtccttccatgctgtggaggctctgttgtttcgctctttctactgcttactcttcgggtccacactgcttttatgagctgtaacactcaccctgaaggtttgcaacttgactcctgaagccagcaagaccacgagccccagggaggaacgaacaactccagacgcgctgccttaagagctgtaacactcaccgagaaggtctgcagcttcactcctgagccagcgaggccacgaacccaccagaaggaagaaactctgaacacatccgaacatcagaaggaacaaactccagacgtgccaccttaagagctgttaacactcaccgcgagggtccgcggcttcatttttgaagtcagtgagaccaagaaccaaccaattcgggacacaataccaactctttcatgccaggagaagcctccttaaaaaatttcggtgattaacagcagcacatgggtcaaaatctcctgaaagttgagcaggggagctgtagaagaattcctccttttctcgcagatgaaatcttatgatatagcaggggttacctggccaagaaggaacacagaggagaacaaagaaaattcaaggaactaaattccttctccacctcaaccaccagcattgatactccatcacttatgtactgcatcaagccgtcctcagaggtgaggaaggtgctgtcaagactagaagcatgtgtccctctctccattgcaagatgggacatagagaggagaaaagtggcagacagaagtcttaggtatgtctttatcagcagcatgaaaatggactaatacagggaccaatgattgcatctacctcatggactttttatgagaattgactgatttaataaatgtaaaagacttagaacactgcctcatctattgtaaacagtcaataaatattagtatcaattttcattgaatcctaatcagtataactataatgttacattcatgaataagacaaaggctgggacaaaataaatgagacacttcactcagacctcttcattgttttcccagttgtcatcctttgcacctagttctgtaatt

SEQ ID NO: 464289 - DNA, 1511 bp, Homo sapiens
  misc_feature (489)..(489): n is a, c, g, or t
  misc_feature (491)..(491): n is a, c, g, or t
  misc_feature (493)..(495): n is a, c, g, or t
  misc_feature (497)..(497): n is a, c, g, or t
  misc_feature (499)..(499): n is a, c, g, or t
  misc_feature (502)..(502): n is a, c, g, or t
aaaaaccatatggaagttatcacacacactctcaaggaacaattccacatttcacatcacagcacgcttcacaatgtcacttcaaaggggcacacattttatctgattattcgtagcactgagaacctgtgtctaacaggacctgccaatctgtgtcacgctggttctcttccctacctttttaacgctgccctgccctcctctcctcctgaccccaatcctctttatccacaagagattggcaccgttgtcctcacaaacggtatagctgaatccacagagtcatccctgattcctttcctcccctcgcctccacatggaaccactgcaggccaaactaacggtgactataggccctgtgtccggcataccccggctgcggcccaagcctctgagctaactcttccacctgatgttccagttaccctggacttcttcctgcaacttaggcacatctggctgtcctcaccagggcatttgttcccttgntngnnncncnctntccataaagatatcagcacataagaagaacattcatgaagagaccttaaaagcagatgcttggtgcaaaagtactcatgccaagagattctctaataatgcgcaatgcatcacctatctcaaaagaggctccccaaaccctcggatttattaggactaactggccggtctcttactctccagacaaaatttctactttttctctctcaagttgcaaaacaactatttctaatgatggattaaaaacctgaagctgctattccattatgaacctctatctagtagctactgcaaactgctcagctcctttgcttgaaacctccaggagggctctggtgagtaagaaaagcagaagaaaattgcttccgggattgctgggtaagaactgcctctggtgctctctggagcatactatctctttataagaagcagacaaaccaggagtcaggggggagttcacatcaaatcaccttcagaagctgtcaacagtcccagagaactaccttagtggacggaaagaaggatgcggaaaaaggagagatgatgcagccttgctttacgtttgcaaattggataaataaggaaaatatttaattctttaaaaaaatgttaaataaatgggagcttttcaacttgaggagtgcactgtaatagagtgattacatgaagggagctctgaaaaactgccaagactttctttgccatgtttttataatatttatgcataagtattggttgtatgtgttataaataccttaaatttgttggtagttttgaggattgagatatcatatttataccattatttagaaaggccttgagtattttaaaactatattgttaccagaaaagtataaataaaggtacatgtcatgaagtgctatattcttgagtgatgagacttagacactatcctcatcttctaagattttatagtgtaagacatcatggctaagatattctctattttgtagcaaagagaaataggatgtttctgtaatcattgcttg

SEQ ID NO: 464290 - DNA, 1414 bp, Homo sapiens
  misc_feature (489)..(489): n is a, c, g, or t
  misc_feature (491)..(491): n is a, c, g, or t
  misc_feature (493)..(495): n is a, c, g, or t
  misc_feature (497)..(497): n is a, c, g, or t
  misc_feature (499)..(499): n is a, c, g, or t
  misc_feature (502)..(502): n is a, c, g, or t
aaaaaccatatggaagttatcacacacactctcaaggaacaattccacatttcacatcacagcacgcttcacaatgtcacttcaaaggggcacacattttatctgattattcgtagcactgagaacctgtgtctaacaggacctgccaatctgtgtcacgctggttctcttccctacctttttaacgctgccctgccctcctctcctcctgaccccaatcctctttatccacaagagattggcaccgttgtcctcacaaacggtatagctgaatccacagagtcatccctgattcctttcctcccctcgcctccacatggaaccactgcaggccaaactaacggtgactataggccctgtgtccggcataccccggctgcggcccaagcctctgagctaactcttccacctgatgttccagttaccctggacttcttcctgcaacttaggcacatctggctgtcctcaccagggcatttgttcccttgntngnnncncnctntccataaagatatcagcacataagaagaacattcatgaagagaccttaaaagcagatgcttggtgcaaaagtactcatgccaagagattctctaataatgcgcaatgcatcacctatctcaaaagaggctccccaaaccctcggatttattaggactaactggccggtctcttactctccagacaaaatttctactttttctctctcaagttgcaaaacaactatttctaatgatggattaaaaacctgaagctgctattccattatgaacctctatctagtagctactgcaaactgctcagctcctttgcttgaaacctccaggagggctctgacaaaccaggagtcaggggggagttcacatcaaatcaccttcagaagctgtcaacagtcccagagaactaccttagtggacggaaagaaggatgcggaaaaaggagagatgatgcagccttgctttacgtttgcaaattggataaataaggaaaatatttaattctttaaaaaaatgttaaataaatgggagcttttcaacttgaggagtgcactgtaatagagtgattacatgaagggagctctgaaaaactgccaagactttctttgccatgtttttataatatttatgcataagtattggttgtatgtgttataaataccttaaatttgttggtagttttgaggattgagatatcatatttataccattatttagaaaggccttgagtattttaaaactatattgttaccagaaaagtataaataaaggtacatgtcatgaagtgctatattcttgagtgatgagacttagacactatcctcatcttctaagattttatagtgtaagacatcatggctaagatattctctattttgtagcaaagagaaataggatgtttctgtaatcattgcttg

SEQ ID NO: 464291 - DNA, 734 bp, Homo sapiens
tctcctcatctgctcatctgcttctggagcctggggttcagggtttatatgggtacaggatggaggggcatggcgagccaaaaggcaacttttggggcacataatgcctgttcccacttacggccacgggtctcaaggcttgagggttgggactttgctggggaaccaccctcttctacccaatatttccctgtcttctgtccatatcaaaattaccttctctcctccacaacagaaatcagggttttcccctcttccttcccagatttatctctgtggcaagtatttttgtctccagaagtcctattctcattgcccagccaaatggctaaaggaacatcaccccaccagctgacctttgaagaatcctctcaacttatggatactaatccatcagctgcaaatagccacacaaatgttcaccacatgcatatacaggactatgaagctttgtacgatatggagttgtattagggactcagacctgggagaacagccactgcccagacacgttcagcgacagataaaacagtataacattttgcaaaggcaaattcctcctcttctgctgtagaaaaacttggtttcttcttcatacacactgagtccttctgctcataatgctggtcctaaacaccttaatccaaaagcagccaataaaaagtttttaaaagtccaactccttagggaaaaactttgttttccagtttgtgtgactcaggtcatcagctcac

SEQ ID NO: 464292 - DNA, 442 bp, Homo sapiens
gtgggtgattgcagaagatagtcaggtaagcttggttgtagaacaccgctaactattttgtgacctttgaagaatcctctcaacttatggatactaatccatcagctgcaaatagccacacaaatgttcaccacatgcatatacaggactatgaagctttgtacgatatggagttgtattagggactcagacctgggagaacagccactgcccagacacgttcagcgacagataaaacagtataacattttgcaaaggcaaattcctcctcttctgctgtagaaaaacttggtttcttcttcatacacactgagtccttctgctcataatgctggtcctaaacaccttaatccaaaagcagccaataaaaagtttttaaaagtccaactccttagggaaaaactttgttttccagtttgtgtgactcaggtcatcagctcac

SEQ ID NO: 464293 - DNA, 3621 bp, Homo sapiens
  misc_feature (3)..(3): n is a, c, g, or t
  misc_feature (5)..(6): n is a, c, g, or t
  misc_feature (8)..(9): n is a, c, g, or t
  misc_feature (11)..(12): n is a, c, g, or t
  misc_feature (14)..(17): n is a, c, g, or t
ttntnnanngnntnnnngggtgtggaaacagctctgcaccccttcttgattgctgaacactatgatgtgaatatttctacatagccaccacctttatcatttttagtgacagcttaatataccatagggtggatgcctataatttccttagacttcgttttgaaacaacatagctcatgaacctcttcaaagatgaataatgagaaagcaaaaccttctgcttcgttatagaaggaattacccaatctctcccctatcttgaaaaagaagagtgttcaccacgtggccacaacgagaggagagatttccatggagctgtcatgagggccttggatgacatggaccatgaaggcagagacacattggcccgggaggagctgaggcagggcctgagtgaactcccagccatccacgaccttcatcaaggcatcctggaggagctggaggaaaggctgtcaaattgggagagccagcagaaggtagctgacgtcttcctggcccgggagcaggggtttgatcaccacgccactcacatcctgcagttcgacaggtacctaggtctgctcagtgagaattgcctccactctccccggctggcagctgctgtccgtgaatttgagcagagtgtacaaggaggcagccagactgcgaagcatcggctgctgcgggtggttcaacgcctcttccagtaccaagtgctcctcacagactatttaaacaacctttgtccggactccgccgagtacgacaacacacagggtgcactgagcctcatctccaaagtcacagaccgtgccaacgacagcatggagcaaggggaaaacctgcagaagctggtccacattgagcacagcgtccggggccaaggggatctcctccagccaggaagggagtttctgaaggaagggacgctgatgaaagtaacagggaaaaacagacggccccggcacctatttctgatgaacgatgtgctcctgtacacctatccccagaaggatgggaagtaccggctgaagaacacattggctgtggccaacatgaaggtcagccgccctgtgatggagaaagtgccctacgctctaaagattgagacttccgagtcctgcctgatgctgtctgcgaggctgcaggtcaggaagtccaaggtcaaggcactgactgattcggtgtctgcccatgcccgcagctcctgtgcagagagggacgagtggtatggctgtctgagcagagccctccctgaggactacaaggcccaggcgctggctgcattccaccatagcgtggagatacgagagaggctgggggttagccttggggagaggccccccaccctggtgcctgtcacacacgtcatgatgtgcatgaactgcggctgcgacttctccctcaccctgcggcgtcatcactgtcacgcctgtggcaagatcgtgtgccggaactgttcgcggaacaagtacccgctgaagtacctgaaggacaggatggccaaggtctgcgacggctgcttcggggagctgaagaagcggggcagggctgtcccgggcctgatgagagttacagagcggcctgtgagcatgagcttcccgctgtcttcaccccgcttctcgggcagtgccttttcatccgtcttccagagcattaacccctcgaccttcaagaagcagaagaaagtcccttcagccctgacagagtacccaagcagactgcacagatcacgggggctcttcattctaaaggagccaaattcctgtgttggtccttccatgtcatcccctcatcctaggggtcccaacccggctcaggtggctgcctctggagagggctctgccatcagtggctatctcagccggtgtaagaggggcaagcggcactggaagaagctctggtttgtcatcaaaggcaaagttctctacacctacatggccagtgaggacaaagtggccttggagagtatgcctctgctaggcttcaccattgctccagaaaaggaagagggcagcagtgaagtaggacctatttttcacctttaccacaagaaaaccctattttatagcttcaaagcagaagataccaattcagctcagaggtggatcgaggccatggaagatgcgagtgtgttatagcagttatcaagcatgtggacttgtaacaaattcttaggtcaatatgtgaatgcttttagaagctaagctgtggctcaactcatccggacacacacctggattcagcaatgaggcctgaccttttttgctataaccgccccaccactcccctgcccttgccaacatcttcatgaatggaatccttaagggatatttatggacctctccttttctgtgttttccacccctacccccacccgccacccagtaataaactatttccttaccccgcagtgagttaaaatttagtaagatgaagatgtggaaaccaatgaaaagtacatttagaaatgcaggctttttagtagaaagaagctcttacagtttttactcatgataaatcttatcacctttcaaaaattgattgtggtgcctcaggtgaaatgagaagctatcagtaacagctactctcatcgaaagcactttattattttacggagctgcaacctccaattttgtgttttctaagtgatttacttaagtcaataacagatggaatcctgtggactaatgtgccaccagttttctaacaagggtgtacataaaatggatttgtgcagacctggctgtggcttgctggtgtgcaagcacacatcactttagaggggctgcgccccaccagataggaaggggaggattttctcctccagtcgaccttgtgacctgtatactaacataacttattaaaggaggggtccctcctcccccagagcagtcctcaacactatgtcagtgctggaaatgcagccactggcagatctggccccccagacgtcaccgcagggcctctgaagagtcaaggtctgctttaatttattgtgtgcctttctgtgtttacctcactcaagctgacaacattgtttatgggaatctatccttcttttagacacacggtaatccttgggctgtattactgaaggctttttattttttgagaggtgaaaaaaagagaaaacaagttagactccaaaggtgaattcctggtcttggcagatggctctgggaacagcgagggagcacagaagtcgtggcctgaggctgttctatgggcacttggggctaaatcgcctcctgagggtgactgttgcttattctgctggacaggtttttacataaagcaaagggcatgtgaggggtgggattccttgttactcttactgcaataaaaatcaattgtttgatatcctgtccccattctgttgctgccctgtcccctacaaaaaagggaatttgctgacaaactttttgtaaaaagcaccatctctggacttacttgcattaaatattttcaggggaatttttttttccagtttgcagttcttttaaaatgtttgcattaaacatgtaactaatggttcacactaagtgattagacagtgttcttgttaatttttgagggcttaattccaactgaatcattttcatcatcagacactgaaatgggcttcctagagctgtt

SEQ ID NO: 464294 - DNA, 1800 bp, Homo sapiens
tagctgactcctgagggtaaaccagcctgcggaaaacgggcaagcggcactggaagaagctctggtttgtcatcaaaggcaaagttctctacacctacatggccagtgaggacaaagtggccttggagagtatgcctctgctaggcttcaccattgctccagaaaaggaagagggcagcagtgaagtaggacctatttttcacctttaccacaagaaaaccctattttatagcttcaaagcagaagataccaattcagctcagaggtggatcgaggccatggaagatgcgagtgtgttatagcagttatcaagcatgtggacttgtaacaaattcttaggtcaatatgtgaatgcttttagaagctaagctgtggctcaactcatccggacacacacctggattcagcaatgaggcctgaccttttttgctataaccgccccaccactcccctgcccttgccaacatcttcatgaatggaatccttaagggatatttatggacctctccttttctgtgttttccacccctacccccacccgccacccagtaataaactatttccttaccccgcagtgagttaaaatttagtaagatgaagatgtggaaaccaatgaaaagtacatttagaaatgcaggctttttagtagaaagaagctcttacagtttttactcatgataaatcttatcacctttcaaaaattgattgtggtgcctcaggtgaaatgagaagctatcagtaacagctactctcatcgaaagcactttattattttacggagctgcaacctccaattttgtgttttctaagtgatttacttaagtcaataacagatggaatcctgtggactaatgtgccaccagttttctaacaagggtgtacataaaatggatttgtgcagacctggctgtggcttgctggtgtgcaagcacacatcactttagaggggctgcgccccaccagataggaaggggaggattttctcctccagtcgaccttgtgacctgtatactaacataacttattaaaggaggggtccctcctcccccagagcagtcctcaacactatgtcagtgctggaaatgcagccactggcagatctggccccccagacgtcaccgcagggcctctgaagagtcaaggtctgctttaatttattgtgtgcctttctgtgtttacctcactcaagctgacaacattgtttatgggaatctatccttcttttagacacacggtaatccttgggctgtattactgaaggctttttattttttgagaggtgaaaaaaagagaaaacaagttagactccaaaggtgaattcctggtcttggcagatggctctgggaacagcgagggagcacagaagtcgtggcctgaggctgttctatgggcacttggggctaaatcgcctcctgagggtgactgttgcttattctgctggacaggtttttacataaagcaaagggcatgtgaggggtgggattccttgttactcttactgcaataaaaatcaattgtttgatatcctgtccccattctgttgctgccctgtcccctacaaaaaagggaatttgctgacaaactttttgtaaaaagcaccatctctggacttacttgcattaaatattttcaggggaatttttttttccagtttgcagttcttttaaaatgtttgcattaaacatgtaactaatggttcacactaagtgattagacagtgttcttgttaatttttgagggcttaattccaactgaatcattttcatcatcagacactgaaatgggcttcctagagctgtt

SEQ ID NO: 464295 - DNA, 1637 bp, Homo sapiens
tagctgactcctgagggtaaaccagcctgcggaaaacgggcaagcggcactggaagaagctctggtttgtcatcaaaggcaaagttctctacacctacatggccagtgaggacaaagtggccttggagagtatgcctctgctaggcttcaccattgctccagaaaaggaagagggcagcagtgaagtaggacctatttttcacctttaccacaagaaaaccctattttatagcttcaaagcagaagataccaattcagctcagaggtggatcgaggccatggaagatgcgagtgtgttatagcagttatcaagcatgtggacttgtaacaaattcttaggtcaatatgtgaatgcttttagaagctaagctgtggctcaactcatccggacacacacctggattcagcaatgaggcctgaccttttttgctataaccgccccaccactcccctgcccttgccaacatcttcatgaatggaatccttaagggatatttatggacctctccttttctgtgttttccacccctacccccacccgccacccagtaataaactatttccttaccccgcagtgagttaaaatttagtaagatgaagatgtggaaaccaatgaaaagtacatttagaaatgcaggctttttagtagaaagaagctcttacagtttttactcatgataaatcttatcacctttcaaaaattgattgtggtgcctcaggtgaaatgagaagctatcagtaacagctactctcatcgaaagcactttattattttacggagctgcaacctccaattttgtgttttctaagtgatttacttaagtcaataacagatggaatcctgtggactaatgtgccaccagttttctaacaagggtgtacataaaatggatttgtgcagacctggctgtggcttgctggtgtgcaagcacacatcactttagaggggctgcgccccaccagataggaaggggaggattttctcctccagtcgaccttgtgacctgtatactaacataacttattaaaggaggggtccctcctcccccagagcagtcctcaacactatgtcagtgctggaaatgcagccactggcagatctggccccccagacgtcaccgcagggcctctgaagagtcaaggtctgctttaatttattgtgtgcctttctgtgtttacctcactcaagctgacaacattgtttatgggaatctatccttcttttagacacacggtaatccttgggctgtattactgaaggctttttattttttgagaggtgaaaaaaagagaaaacaagttagactccaaaggtgaattcctggtcttggcagatggctctgggaacagcgagggagcacagaagtcgtggcctgaggctgttctatgggcacttggggctaaatcgcctcctgagggtgactgttgcttattctgctggacaggtttttacataaagcaaagggcatgtgaggggtgggattccttgttactcttactgcaataaaaatcaattgtttgatatcctgtccccattctgttgctgccctgtcccctacaaaaaagggaatttgctgacaaactttttgtaaaaagcaccatctctggacttacttgcattaaatattttcagggga

SEQ ID NO: 464296 - DNA, 3510 bp, Homo sapiens
  misc_feature (3)..(3): n is a, c, g, or t
  misc_feature (5)..(6): n is a, c, g, or t
  misc_feature (8)..(9): n is a, c, g, or t
  misc_feature (11)..(12): n is a, c, g, or t
  misc_feature (14)..(17): n is a, c, g, or t
ttntnnanngnntnnnngggtgtggaaacagctctgcaccccttcttgattgctgaacactatgatgtgaatatttctacatagccaccacctttatcatttttagtgacagcttaatataccatagggtggatgcctataatttccttagacttcgttttgaaacaacatagctcatgaacctcttcaaagatgaataatgagaaagcaaaaccttctgcttcgttatagaaggaattacccaatctctcccctatcttgaaaaagaagagtgttcaccacgtggccacaacgagaggagagatttccatggagctgtcatgagggccttggatgacatggaccatgaaggcagagacacattggcccgggaggagctgaggcagggcctgagtgaactcccagccatccacgaccttcatcaaggcatcctggaggagctggaggaaaggctgtcaaattgggagagccagcagaaggtagctgacgtcttcctggcccgggagcaggggtttgatcaccacgccactcacatcctgcagttcgacaggtacctaggtctgctcagtgagaattgcctccactctccccggctggcagctgctgtccgtgaatttgagcagagtgtacaaggaggcagccagactgcgaagcatcggctgctgcgggtggttcaacgcctcttccagtaccaagtgctcctcacagactatttaaacaacctttgtccggactccgccgagtacgacaacacacagggtgcactgagcctcatctccaaagtcacagaccgtgccaacgacagcatggagcaaggggaaaacctgcagaagctggtccacattgagcacagcgtccggggccaaggggatctcctccagccaggaagggagtttctgaaggaagggacgctgatgaaagtaacagggaaaaacagacggccccggcacctatttctgatgaacgatgtgctcctgtacacctatccccagaaggatgggaagtaccggctgaagaacacattggctgtggccaacatgaaggtcagccgccctgtgatggagaaagtgccctacgctctaaagattgagacttccgagtcctgcctgatgctgtctgcgaggctgcaggtcaggaagtccaaggtcaaggcactgactgattcggtgtctgcccatgcccgcagctcctgtgcagagagggacgagtggtatggctgtctgagcagagccctccctgaggactacaaggcccaggcgctggctgcattccaccatagcgtggagatacgagagaggctgggggttagccttggggagaggccccccaccctggtgcctgtcacacacgtcatgatgtgcatgaactgcggctgcgacttctccctcaccctgcggcgtcatcactgtcacgcctgtggcaagatcgtgtgccggaactgttcgcggaacaagtacccgctgaagtacctgaaggacaggatggccaaggtctgcgacggctgcttcggggagctgaagaagcggggcagggctgtcccgggcctgatgagagttacagagcggcctgtgagcatgagcttcccgctgtcttcaccccgcttctcgggcagtgccttttcatccgtcttccagagcattaacccctcgaccttcaagaagcagaagaaagtcccttcagccctgacagaggtggctgcctctggagagggctctgccatcagtggctatctcagccggtgtaagaggggcaagcggcactggaagaagctctggtttgtcatcaaaggcaaagttctctacacctacatggccagtgaggacaaagtggccttggagagtatgcctctgctaggcttcaccattgctccagaaaaggaagagggcagcagtgaagtaggacctatttttcacctttaccacaagaaaaccctattttatagcttcaaagcagaagataccaattcagctcagaggtggatcgaggccatggaagatgcgagtgtgttatagcagttatcaagcatgtggacttgtaacaaattcttaggtcaatatgtgaatgcttttagaagctaagctgtggctcaactcatccggacacacacctggattcagcaatgaggcctgaccttttttgctataaccgccccaccactcccctgcccttgccaacatcttcatgaatggaatccttaagggatatttatggacctctccttttctgtgttttccacccctacccccacccgccacccagtaataaactatttccttaccccgcagtgagttaaaatttagtaagatgaagatgtggaaaccaatgaaaagtacatttagaaatgcaggctttttagtagaaagaagctcttacagtttttactcatgataaatcttatcacctttcaaaaattgattgtggtgcctcaggtgaaatgagaagctatcagtaacagctactctcatcgaaagcactttattattttacggagctgcaacctccaattttgtgttttctaagtgatttacttaagtcaataacagatggaatcctgtggactaatgtgccaccagttttctaacaagggtgtacataaaatggatttgtgcagacctggctgtggcttgctggtgtgcaagcacacatcactttagaggggctgcgccccaccagataggaaggggaggattttctcctccagtcgaccttgtgacctgtatactaacataacttattaaaggaggggtccctcctcccccagagcagtcctcaacactatgtcagtgctggaaatgcagccactggcagatctggccccccagacgtcaccgcagggcctctgaagagtcaaggtctgctttaatttattgtgtgcctttctgtgtttacctcactcaagctgacaacattgtttatgggaatctatccttcttttagacacacggtaatccttgggctgtattactgaaggctttttattttttgagaggtgaaaaaaagagaaaacaagttagactccaaaggtgaattcctggtcttggcagatggctctgggaacagcgagggagcacagaagtcgtggcctgaggctgttctatgggcacttggggctaaatcgcctcctgagggtgactgttgcttattctgctggacaggtttttacataaagcaaagggcatgtgaggggtgggattccttgttactcttactgcaataaaaatcaattgtttgatatcctgtccccattctgttgctgccctgtcccctacaaaaaagggaatttgctgacaaactttttgtaaaaagcaccatctctggacttacttgcattaaatattttcaggggaatttttttttccagtttgcagttcttttaaaatgtttgcattaaacatgtaactaatggttcacactaagtgattagacagtgttcttgttaatttttgagggcttaattccaactgaatcattttcatcatcagacactgaaatgggcttcctagagctgtt

SEQ ID NO: 464297 - DNA, 1748 bp, Homo sapiens
tagctgactcctgagggtaaaccagcctgcggaaaacgggcaagcggcactggaagaagctctggtttgtcatcaaaggcaaagttctctacacctacatggccagtgaggacaaagtggccttggagagtatgcctctgctaggcttcaccattgctccagaaaaggaagagggcagcagtgaagtaggacctatttttcacctttaccacaagaaaaccctattttatagcttcaaagcagaagataccaattcagctcagaggtggatcgaggccatggaagatgcgagtgtgttatagcagttatcaagcatgtggacttgtaacaaattcttaggtcaatatgtgaatgcttttagaagctaagctgtggctcaactcatccggacacacacctggattcagcaatgaggcctgaccttttttgctataaccgccccaccactcccctgcccttgccaacatcttcatgaatggaatccttaagggatatttatggacctctccttttctgtgttttccacccctacccccacccgccacccagtaataaactatttccttaccccgcagtgagttaaaatttagtaagatgaagatgtggaaaccaatgaaaagtacatttagaaatgcaggctttttagtagaaagaagctcttacagtttttactcatgataaatcttatcacctttcatctcatcgaaagcactttattattttacggagctgcaacctccaattttgtgttttctaagtgatttacttaagtcaataacagatggaatcctgtggactaatgtgccaccagttttctaacaagggtgtacataaaatggatttgtgcagacctggctgtggcttgctggtgtgcaagcacacatcactttagaggggctgcgccccaccagataggaaggggaggattttctcctccagtcgaccttgtgacctgtatactaacataacttattaaaggaggggtccctcctcccccagagcagtcctcaacactatgtcagtgctggaaatgcagccactggcagatctggccccccagacgtcaccgcagggcctctgaagagtcaaggtctgctttaatttattgtgtgcctttctgtgtttacctcactcaagctgacaacattgtttatgggaatctatccttcttttagacacacggtaatccttgggctgtattactgaaggctttttattttttgagaggtgaaaaaaagagaaaacaagttagactccaaaggtgaattcctggtcttggcagatggctctgggaacagcgagggagcacagaagtcgtggcctgaggctgttctatgggcacttggggctaaatcgcctcctgagggtgactgttgcttattctgctggacaggtttttacataaagcaaagggcatgtgaggggtgggattccttgttactcttactgcaataaaaatcaattgtttgatatcctgtccccattctgttgctgccctgtcccctacaaaaaagggaatttgctgacaaactttttgtaaaaagcaccatctctggacttacttgcattaaatattttcaggggaatttttttttccagtttgcagttcttttaaaatgtttgcattaaacatgtaactaatggttcacactaagtgattagacagtgttcttgttaatttttgagggcttaattccaactgaatcattttcatcatcagacactgaaatgggcttcctagagctgtt

SEQ ID NO: 464298 - DNA, 3603 bp, Homo sapiens
tcttttcagcaggatgctagtctactggtaccaatttaatgtagtagttcattttcactctgttgataaagacatacctgagactggaaagaaaaagaggtttaattggacttacagttccacatggctggggaggccatgtggagaatcatggcagatggcaaaagacacttcttacatggtggcagcaagagaaaatgaggaagatgcaaaagcagaaatccctgataaaaccatcagatctcatgagacttgcccactaccacaagaatatttggagggctcagaagaagacaggaaaatgtgggaaagtttggaacttcctagagacttgttgaatggctttgacacaaatgctgatagtggtatgaacaataaattccaggttgaggtagtgtcagacgaagatgaggaactttttgggaaatggaataaagatgattcttgctatgctttagcaataagactgggggcattttgcccctgccctagagatctgtggaactttgaacttgagagagataattcagggtatctgacagaagaaatttctaagcagcaaagagttcaagaggaagcagagcataaacatttggaaaattcacagcctgacaatgtagtagaaaagaaaaatcctttttctggggagaaattcaagtctgctgcagaaatttgcggcagtatggaagagaaatgtgaagctggagcccccacacagagtccccactgggcactgcctagtggagctgtgagaagacggccaccatcctccagacccgagaatggtagatccactgacaacttgcaccatgtgcctggaaaagctacagacactcaacaccagcctgtgaaagcaactaagacggggactgtactctgcaaaaccataggggtggagctgcagaaggctgtggaagcctacctcttgcatcagcgtgacctggatattcatcagctccctaaactgtttgcctctgcttaatctcgtaggacacaaatcaataacacaggcaatttgggaattaggaaaaggactgctgaaggaggaaaaggttttaccaggatatacctgtgtaataaacttcaagtttatgaaattgtgggcatagttcacaagaaaatgtcacatatgctatgtaataaaaaaacttcccatttcaaaaaaaatatttaagatcccaaagaaaaagccattgagaggtagcatgatgtaactgctacatttgaagtactggaaaaaatagaatttggttgaattccaggtctgccttttgctgataacataaccttgaggatatctcttagcctaagctgtacttcactgtaatgaaacctgagaataacatgtgcctcatggagctgtcgtaaggaatcagttgattaattgagaattctacgctccagcaatagcagagatagatgacacaaatgacattcgcccgcccatggctgcccatggaccaattggcatgtgcttccttccctctgaggcccatagaagccctggactcaatctgactcaaggagatgatgggactacaagctgcggaaaggagctacccactccaaggtctctgctgagagctgaacactcatcaagacaccctgcctgcagggaggagttacccaatgcaggtctcctctgagctgttccattgctcaataaaactcctctttgccttgctcaccctccacttgtccgtctacctcattcttcctggacacaggacaagaactcgggacctgcaaaagggctgtaacacaaacagggctgaaacacatcccttgctcgccatattgtaggtgacaagaaggagagacaagagaaggagagaagagctgcagcccttctgggagcccaggcctaggagatccctgagccagggctatgacaccctctttggggctctatggttcctggtgtctccaagcttccggatgccactgcattcctcagtgccagccaaagttccctgttttctctattttacatactgtgtgctgacagcagccaaaagaaaaggcgatagctcacattctagtgaaaccttgggttttgtggctcagagtccagttgctaatagctactctttttttcattgttttaaaaactagtggtttttccttcagtttcccacggactgaaattattgattaaatcaacttggcatggtttcgtatgttacttctgttacagatttttcttgtaaattagatctgcagtattcgtcagatctaggactgatattttgcaagactacattgtaggccgttttttaagttctgtgagaaggcatatgatgtctgggggactttttctatggtgttagccttgctgatcaattacatcattagatgcattctttcatcagaagtagaaaaactgtgatattctaattttcttattatatttttatgtataagctagaatacatctataaagaaaatatcctcttcctgacatttggaaaatttgaggtattattcataaaggagagacagaaaaaaaatgctacattcttattaattatttttcaaaataatgagttgactacttagaaaagagatcagaaagctttttttgtgtagggaaaaagaaatttattttattcccatcttatgttcatggccgaggcctttataacacaagagattaactagagaaaagcatggaaagtatttaacagaagttttatgtgagacagatgtcttcataaggaaatgaagacccgaacaaacagctaaacctgtgtgtttctatactaagttttatgaagaagtgggtagatgcagagatgtatgattggacaaaaggggtataatctaatgattaaaaactctgagaacttaacagggcttttttgttcctatccttctgtatccctgggtcttcagagataaggatattccttacgtttgggtataaggtgggcacttctcacatggtctgaagatataactcagatgacaagggcagggaaaggtgatcttttacttctgctgttttctcaaataccaagatactatattttgaggtagtatgtcctgaatcctattacttgctaagagccaattgtaaatcttttaggctttgtaagccatacagcctctgtcacagctactcaactctactgatataaccagaatgcaaccatagaaaataatgtaaacaagttggtgtattgtgtttcagtaaagctttttttttacagaatcagaaagctagacggattagactcacaggtcatcgtttccaatctgtgacttagaatatcttgaaaatcaccaagaggttttttagtttttatattggcttttatttagtattttagcaacttgtttcatttagtgtaaaagttgttacagtgttttgggcttcttttttaagagacattttagacccagtgcaaaatagagaggaaggtacagagatttcccatgcaccccctactcccacacatgcccagcctctcccattacccacagccccaaccaagtggtgattcattacaatcgatgaacctatattgacacatacctgtcacctaaaattcacagtttgcattagcattcactcttggtgttgtaatgatttgtattcat

SEQ ID NO: 464299 - DNA, 749 bp, Homo sapiens
tcacacatatgcacaaaaaacatacagagagaaaacacacagacaggaagcacacacagaggaaatacacagaaaacacagtcacacacactcacagaaaacacacaaagacacgcacacacgtagctggagatgagcacaatatagtcctctgtttcacaaaggacggcccttgtcagcagctctgggccacattccggggtcaggtgaagtggacagtcctccacgccccaactccaagcgcagggatgctctgtaagagaagacactctgctaagcgcagtgctgcaagactcatgctaaaatctatgtgtacatatttctccaggcccctcataagatcatcacaagcaacacagagaaatgttggcctgctgaaaatagaagtgcagagactctctcccgtgacagaatgaggcgtggaggattcgcagaactgtttcctcaagggccccatagtgataccgtcttttattccttttagtagcctcatcagtgccctgaatgcagtgacttgtgtcaggacagcgttctccatgctggctgcgggtgacggcctgagccccggtacagtattcctgctggcctcagaccgccctcccaggcaaaacctggggccagcctgtctgcagtctgaaatgccctccagattatcctaaatgtgcatgttaatgaccatcagatctgagagctggtggagaaattaagataaatagagaaaatcctgactgtgtttgctttggaccaca

SEQ ID NO: 464300 - DNA, 3815 bp, Homo sapiens
ggtacatatgcgcaatgtgcaggttagttacatatgtatacatgtgccatgctggtgcgctgcacccactaactcgtcatctagcattagttttattgaatgaaaatgaactaaaggcataccttggagatattgtaggtttggttctaaatcacctcagtaaagtgaatatcacaataagaaatgttgccaatggcattaagggcccaattatgctgttgggcagtttcttatttgctgctaacttatctaaaagttcacctattttagctctaacatgcttttatcattttgtccattgtgaggtttggggaaaaacaaacgaaaacaacgaccagaatgtgtatgcgtgcctctgtgtgtgtgtgtgtctgtatgtgtgtgtgtacatctgcattcctctgtgtgtctgtgtgtgtgtgtgtgtgtacacatctgtgtgtgcttgtacaattggttctgagtagctgtatttccacttactttactgtttgtttttatccttgaaatgcattacttttgctaatataaatatcattctgtaaactgacactttcatgcaggctttttaaatgtgctgaatttataactattattagtggaagacaatacataattatccaacttcatactacaacacattctgaaagctttcggaaagattggaacatattcaaattacagtttacatcaacataagtcaaccattcatgtattttcattctagcttaaagcaagctggcagacctagcaggaaccttactccaagtcacaaacaacttaatttgcaggccaaagaaaatctctatatcagtagggaactctgttgcaatgacttggcatggttaactaaattcacaagagaaaatatgtacaaaggtttaaagattacattcaaatgaaattttttgtgccagttgaatcggatcattacactagaactgagacacaataagtattttcaaattaacctaaccgtattacagattcaaataaagtatcacattaccacagcccaatattcctccagtcactacttaatgtttaatttctaatttctcctgtgggttttcaatgttctacctaatgtactgttcttccttcactaatattaaacttggttaagagattcgctaatagtgattcagttagttccagttaaattgatttaaataaaatataaatgctgtgacatagaaaataatgtaattgatacttagaaaaataaaaatgtatacaaattgctaatacaagaaaaatgatatgatatagtttggggtctgctcatgatcaattttatggtatttgggaatcatcaaatttagctgagtttatttatgtatttggaaaattaggaagaatgggcttgctactcaagtattgtccttagatcagtaatattatcatttggaattgtgacaggaagattatcttagatcctctactccaggcctactgagtcagatctgcatttaaacaaaatatcaggtgagctgactgttcattgacttttgagaaaatcttgacctagaaggcttcaatcacttttatttttatcacttttatctgtttctctgtctcttggtcccaatcacaggtcttatctgaaaagtagaataattatcatagctggggtttcttctaataaaaacaatgataaatgtaagttctatttattgcccttttatgaagttgtctgtagaagacagaataataacaaacaattaatgtatttccattataacattaaaatggctttaaaatttggaaatttggtcagtacttatttcaactagttataatttgatatgcattatataaagatctgataactatttctaggaacatactttttctttatagcattctaattttgcagcatggaatatgtggcaaataggaagtaggatatactttattaattattatttaacaattaattttgcacaaattggttgaaaaatacataaatataaatgttaaatacacaaattaaataattaaactagaatatagtggttctatcattgcagtgattcttgtttacttttctgtaactacttacagatgaacatacactgacactcacattcctatgtatatatggtcacttaatatttagcctacaaattaaattcaaatttatattttctgtttcccaatcatatatttgaaaatggtacacatgacacaaattcttaaggacattaaaaaatctcatattaagaacaaagctttatgttaattttatatttcacatatgctaataatatttatttttcttgtttaaatatatattcagatatcacaaagaatatttttcttatataactttccaggctattcagcaattcttaattataagaactgagtattaaaatagctttacttattaaagatattttaacatctttaatgggttcaatgctgtttcttttttttaattttaaaattatctacaaagtaaacttttgcccatgtggagaattacctgggaatagataacatgatgcatatttagttttaaatgggtgttgttgacatttgtaacagaaaatatcaaatgcggtaacactatcttgaattattctgaattatcaatcatccatgccaattaggtaatgacttcctattaagattaatggaaattgaatgtaaatctccatgaataaaactcaggctatacaaatatcccaattacttagggcttaagtgtctgtgatactcctcctttaaagaaggcaaacgtgtttactagaagcccttggctaataataaagcaaattttaaagtagtgcttaatggatatggtcagaaaaaaagtcctgaattcaggaaaacaagctagttgttagactttaaagcttctggaatcagtgttgcatcctgccatccctagaaggtcacattttaactgagtgtgttttagcaaaatcatcctgtagaggaaatgattggtagtagttcagaaaaaaaaatgtattatagttctcacattcaaaataatttcttaagaaaaagatggtataaattctgatttcctattttccctttatttacttctctgtcctccaacttttcacctgaatccctggattttcttagattctctaggctgtatgcatctcttcccttcaacctgcccacccagttcttcatcaactcttccgtttcctctatttaaatcattcctagagttacataaaaactcaactattttattcttaaataaatatttctatttatttatataagttttgattgtctctcgtgtgagcttaaggaatgagtctttatgttctagtttctactcactctaaaatatgtcccacaagctagccagttttcctgccaaaactaatatttgattatattgctccccttaccagcctttagaccttttctaatacaaactcttttatatcacattcaggactttccacaatctggtagcaatctccacttccagacttcaatgaaaatgtcttctttatgttctaatctcagcaaaagctgatcgttctcttgagtaagaaatgcatttataagcttcaatttttttccttagtttccctctgcttacttctattgccaccaactttgtttgaaagcactaattaattgtactttgttggaagcttttcatttcatttcattgttcatttatttatttgatcatcaagcacctaccacaaaatagccactcaaattatgtgttttcaattaatgaaagactgcagattataatttgtagataatttcttagtctgattaaaatatatatgacatctggttccaaaattgtggcatagaag

SEQ ID NO: 464301 - DNA, 1646 bp, Homo sapiens
agcagcacctggaatacttctcacagtgctgtttgtttgtggagtttcctagcgggagaattaggaaagatatcatcaaaaggttccttctgaaaacattccagttccctttaagtatgcctttggtgttgtggattctagaatgctaatctttgtctctccatgattcccacatagcctgggtcctggataggatttagattccacagatactctcacagtgccatttggctgtagaaaagaactaaatgtgaagaaaagcaggatataaaacatttatttgctggcatgtatagaaatataactggtgtcattctgctgtcagcatgtcagaagattttagacttttctgcagtggttatgaaagctttaaccatgttacaggggcagactgatactggagtttgaaagctactcttggagacatgggctgcctactattttggccttccaacaattttataagaaactcaatagataacgataaataccttcaagcttaaaatcgcgattatgatttctgctgtgcgcaatgaaactctgagtgaaacagtcctccaggattttgaagtcctctgcatccgggcagtggaacagaagtgtggagaagattcatcatctgcttcttaaatgccctagtcagaaaggggtactcatcatttctgttcatattttatacggctacaaatagatgtgagaagagcaagaaaacatagtcctggcaaggcagttgccttctgatgacaactctgcactctggaggtagacaaattttggtcaatagctggcagttttagccatattagtccagtactcaccttcacaaatgaggaaacttaagactcggccattaacagagacggagccagaaaagggtgatgaagcagatttacaagaccggctctcagaaaatttgcttggacatgcagaaccatgctttcaagtactattgttaccaacgcgaatctgcagcgaaagtgatccttgcctctctggaggacagaatttggctgaggggcagaatgcatgcttgagcccactagcccaatccctgagatcttatcgggaagctgctgctcctccacagctccaggagtttcctatttattgggagactcctactgaaagtaaagacaagaatgaagatttttatgacgatccacctccacctaatgggaaatacattttcttttctcttcctaatgattttctcaataacattttctttcgcttattttattgtaaggatacagtatttaatacatataaggtacaaaatatgtgttaatcaactgtttatgttatcagtaaggcttccagtcaacagtaagctattaagttgtaggggaatcataagaggacactattttatgaaacaaacctagagtcagaaaggaagtgaagttggtcccaaacttcttggaggctttgttagttttttaaattcttttttcttcatctttgatggattgaattaattcagaagccttgtcttcgacctttgaagttctttcttctgcttgttttattctattgctgagattttccagtgcattttgcatttctctatgtggtccttaatttccagaatttgtgtttgtttttaatttatgctgtttatttcactgaagacttttcctttcata

SEQ ID NO: 464302 - DNA, 1209 bp, Homo sapiens
agacagccacacccctgagccctgccagagcacctgaggctcactcaatgcaattccctgatgctaatgcaagagggaggctctctgcagtatcagatgaaacttcaaagagaagtccacaggaatttgtggcaattggttctggaagctggatcaccaattcttggctgtggcctaaaaggagaaagcaggaaaatctgcagaacagatccagccctctgttacctggccagaaggccatcattcagagcggcactgccctgtccagctgggcagtgaactaccagccggccaagtacactcggatattggcagacaaggtcggctgcaacatgctggacaccacggacatggtagaatgtctgaagaacaagaactacaaggagctcatccagcagaccatcaccccggccacctaccacatagcctttgggccggtgatcgacggcgacgtcatcccagacgacccccagatcctgatggagcaaggcgagttcctcaactacgacatcatgctgggcgtcaaccaaggggaaggcctgaagttcgtggacggcatcgtggataacgaggacggtgtgacgcccaacgactttgacttctccgtgtccaacttcgtggacaacctttacggctaccctgaagggaaagacactttgcgggagactatcaagttcatgtacacagactgggccgataaggaaaacccggagacgcggcggaaaaccctggtggctctctttactgaccatcagtgggtggcccccgccgtggccaccgccgacctgcacgcgcagtacggctcccccacctacttctatgccttctatcatcactgccaaagcgaaatgaagcccagctgggcagattcggcccatggcgatgaagtcccctatgtcttcggcatccccatgatcggtcccacagagctcttcagttgtaatttctccaagaacgacgtcatgctcagtgccgtggtgatgacctactggacgaacttcgccaaaactggatttggtctgagaatggctaccaggaggagaacagaggagggaccaacagttgttggagatgctcgtctatcactgaaaggttctttcctgcatgaagaaatgatttaaatcaaattcatattttttttctaagtaaaccttgtttattagttagcttgggctgctgttaccagagtgccaaaatctgtatggctgt

SEQ ID NO: 464303 - DNA, 1233 bp, Homo sapiens
ttggatccttgcttacaaatcatgtcacctgtatattttcatgttaatattagtgatccaaaccaaccagttcctcaggataccaagttcattcatacaaaacccaatcgctttgaagaagtggcctggtccaagtataatcccaaagaccagctctatctgcatattggcttgaaacccagagtgagagatcactaccgggcaacgaaagtgtctttctggttggaattggttcctcatttgcacaacttgaacgagatattccagtatgtttcaacaaccacaaaggttcctccaccagacatgacatcatttccctatggcacccggcgatctcccgccaagatatggccaaccaccaaacgcccagcaatcactcctgccaacaatcccaaacactctaaggaccctcacaaaacagggcccgaggacacaactgtcctcattgaaaccaaacgagattattccaccgaattaagtgtcaccattgccgtcggggcgtcgctcctcttcctcaacatcttagcctttgcggcgctgtactacaaaaaggacaagaggcgccatgagactcacaggcaccccagtccccagagaaacaccacaaatgatatcactcacatccagaacgaagagatcatgtctctgcagatgaagcagctggaacacgatcacgagtgtgagtcgctgcaggcacacgacacgctgaggctcacctgccctccagactacaccctcacgctgcgccggtcgccggatgacatcccatttatgacgccaaacaccatcaccatgattccaaacacattgatggggatgcagcctttacacacttttaaaaccttcagtggaggacaaaacatctgtggctactcagtaagaaaaactcagttttccttacaaaagaataataatagtagaagtgatgatggtgatgatgatgatggtggtgatgatgaggatgaggatgaagatgaggatatagatcaatgacagcccctgacaataaaaataaaaatggaaatcagaatgaacatgtttaaagtatagatgaaggtggagacacttgacaatgtgaaattgggaagcactgaggaagttggatcaagtgaaaggcaagacaacatgatctggaagaaactatataacccagagaggaagaggaagggaaaggcagaaaaagggaagggagcattcttggcagtctgatcatgaaggattcctggttgtcct

SEQ ID NO: 464304 - DNA, 2298 bp, Homo sapiens
tcatcagttaaggcaggaacaggccattttcatttcttttgtggtggaatgtcatcagttaaggcaggaacaggccatctggatgtgtacatgcaggtcacaggggatatgatggcttagcttgggctcagaggcctgacacaattacctctgcaatcatggaagccagttattatctgccttatttctttcctgagaaaattaaatctcaaataagtgcatctggcagtagacctaaagtcattgaaggtcagcaaagccatcagtcggggaaaaaatataaaagtgaaattggggacggaaaggaacaactggaatctgtaaagaaaaaaaaacctatgagggaaactggaacccacatctgcactgcctccaacatcagcaatgcagttggccatgaaaagaagatgatgtcctttgccacaaggctaaatgctaatctggttcaagacttagagaagatgaaagaggaaatccatgtgggagataaattggagtatgctgagaataaaagcaaggagaagatttgggagcctgctgccactgtctataagaaccatagtatctctgaaatagcaaacaggaatcctgtgaagagagtggggaaggaagagcccagtgttgagaaaagtggttttggggaaaactcttctcagtggtggcttttgagcagagcctggcgtctaccttggtttactagtatgtcccgagctctaactgctacccactgaaatactaccaccctaagccattcaaaagactgcagccccagccaagagtttgatgtaacctcaggagagaccctgagccagaaccacctagactgacaacctggcaatagtgactgcatggaaagtggcctgcagctctaacccatattccatcagagccctttcctctagagttagtccataatctgtattggctgttgttttttccatatccactcatataacaaatatttcaggatgtaaagtacatctttttctggaataagagcccaaagattatgagctacttgttagtcatggaaatgtctgtggtttagtattaaatttcaagacaaacaaaaggcacttccattttggttatgatggataatggattttggaattattctttgcttgtacaaacaacagtggcatgaaaaatgggacaaataaatggaactagtttaggtcttggcaacagagatctcagaatgcatgttgtttttaaatgtcagaaacattcatcacgatagcccttatattggaaaataaaatgttacaataatctttaaaattaaagcaaacatagtgactataataaaattgcattagaagccaattaaatatttctaaaaaatacccaaaatatttagtaataagttggaaaaaagcaataatctgtaatagtattatttataattaaatcaatattaaatactaaataatgcaagataaaataataattacatataatttccaatagtataaaatgactataatatttagataaaatttgtggaattaagctgaagtattgcttggagaaaaatctataacttcaaatgacttgattaaaaaagaagaaaggtttaagattaataattatttgaatatacaagtttacaatactcagctattttcttaagagattcagccaagtttacatatcaaccagtaatagataagatatgctataaatttgtatctttctagcatctgatattgtcagacttttgaaatttcactaaccaactgactgtaaaatatagtagcacatcatggtcttaaactgcatctttctcaacactaatggagctggatataccctcatattctacaaaccatacatatttttatattttatgacaaacttattcaaactgtccatatttccctggggtttgtgtttttcttttaaacttgtataagttctttatatagtctttgttgtgtttattaaatatgctttctctcagcttctagctgatctctgaaataaatatgatgtactgtataaagactagtttggagaaaaactgtgtcataaattttagtgttaacacttattcaatgtgtgacctgtggttattcagcacctcttgacttaagttgtatgttaagtagtcaaaaattcatgctgctagtgataattaggaatcaaataacattgctgagctcttattatatgccaaacactgtgccaggccctcggttagggagaggtgacacattctctgacctcgcccatgagtatggtgtaatgagaagcggatgaacaaacaattattgtgaactgtaatagtgtgac

SEQ ID NO: 464305 - DNA, 932 bp, Homo sapiens
gagaaaaacctgaaaacgctgagaggtggagtgacaacttgcattcagctgtttcagaaacattgttgaccacctactcaatgtgaagatgacgaagatgaaagcctttatgatgatctacttccacttaataaatgtacttatccatgtgcctgaaatatattagttgatcagtaaatgttgcagtaaatgaaggaggaatggaaaggaacaaagaaagaaaaaaatgaatggcatgctatctggagggtacaaggaagatttaagccaaaagcataaccctgcaacaaaaatcaccatgtctagaattcaaccattaaagatttaatttttcacattaagcatttcagtgaaggtgtttttctctggtgggcggcaagttccactggtcccagacaggtccagagatgacatccaggagccagggcctggagtcagaaacttcaggaatctacctggtgttctattctactgtgactgagctggcactcaagccacaaaacaaagcccttcctactcttctctgtcctttccacaaacagaggagtctcttccctaggccccaggccaatggaagtcagaggcgggctgctgaagaccggctctatggtatcgctagtgacccatgctccttccactttctgctccaccattctggatatgtagcttttgtccttggcttcaagatagctcctttatcactaagcattgcttctggatttgaaaaagaaacaagggagaatgaaccaaaatccctcccttttttcctctactcttgtattctcatcaatcactcagttattttgcacatgtctagttctatgtaatttctacatttgtctgtataatgttatctttgtaaggtgacttatctctgtacaccataggcactattttccctactttacaagaggaaattgagtgtcagaaag

SEQ ID NO: 464306 - DNA, 4371 bp, Homo sapiens
cggcaggagtgtatggctcctccaggtgatgtcctgccctgctttggctcgccctccgtgggctgcactcactgtccaaccagtcccaatgagatgaaccagtgtgtgtgtcgtagctgtggagcatcgtcagatcctctaccttttacagaatttgtgcggtacatttctacaacagccttatgcaatgaggttgaaagaatgttggaaaggcatgaacgctttaaacctgaaatgtttgcagaattgctacaagcagcaaatacaacagatgactataggaaatgtcctagtaactgtggccaaaaaataaaaattcgccgtgttttaatgaattgcccagagattgttacaattggtttagtctgggactccgagcattctgacttgaccgaagctgttgttcggaatctagcaacacatctttatcttcctgggcttttttatagagttactgatgaaaatgccaaaaatagtgaacttaaccttgttggtatgatctgctacaccagccaacattattgtgcctttgcatttcacaccaaaagttccaaatgggtattttttgatgatgcaaatgtgaaagagattggaactagatggaaagatgttgtctccaaatgcattcgatgccactttcagccactacttttgttttatgcaaacccagatggcacagcagtttctactgaggatgcactcaggcaggtcatcagctggtcacattacaaatctgttgcagaaaatatgggatgtgaaaagcctgtaattcataagtcagataatttaaaagaaaatggatttggtgatcaggcaaagcagagagaaaatcagaaatttccaactgataatatttcatcatctaatcggagccacagtcacacaggtgtagggaaaggaccagctaagttaagtcacattgatcaaagggaaaagataaaagacatttccagagaatgtgctctgaaagctattgaacagaaaaacttactttcttcacaaaggaaagatttagagaagggacaaagaaaagatttaggacgacatagagatttggttgatgaagacctttcacatttccaatctggatcacctcctgccccaaatggttttaaacaacatgggaatccacatctatatcatagtcaaggaaaaggatcatataaacatgaccgagttgtacctcagagtcgagcttctgcacaaataataagttcaagtaaatcccagattcttgctccaggagagaaaataactggcaaagttaagagtgacaatggcactggatatgacacagacagcagccaagattctagggatagaggaaacagctgtgatagcagcagtaaaagccggaaccgaggttggaaacctatgagagaaacattaaatgttgatagtatttttagtgaaagtgaaaaaagacagcatagtccaagacataaaccaaatatcagtaataagcctaaatctagcaaggatccgagttttagtaattggccaaaagagaatccaaagcaaaaaggtttaatgaccatatatgaagatgaaatgaagcaggaaataggaagcagaagttcccttgaatctaatggaaaaggagcagagaaaaataaaggccttgtagagggtaaagtgcatggtgataattggcagatgcaaaggactgagtctggatatgaaagcagtgatcacatcagtaatggttctactaatttggactcacctgttatcgatggaaatggtacagtaatggatatcagtggtgttaaagaaacagtatgcttcagtgaccagattacgacaagcaacctaaataaagaacgtggggactgtacctcccttcagagccaacatcacttagaaggctttagaaaagaactcaggaatttggaagcaggctataaatctcatgaattccacccagaatcacatttacaaataaaaaatcatttgataaaaagatcacatgtacatgaagacaatggaaagttatttccttcatccagtctacaaatacccaaggaccataatgcaagagaacatatccaccagtcagatgaacagaaacttgaaaaaccgaatgaatgcaaattttctgagtggcttaatatagaaaattctgagagaacaggtttgccttttcacgttgataactctgcttctgggaagagagtgaacagtaatgaaccatcttcattatggtcttcacacctaagaactgttgggttaaagccagaaactgctcctctcatccagcaacaaaatatcatggatcaatgttactttgagaactctctatccacagaatgtataattcggtcagccagcagatctgatgggtgtcagatgccaaaacttttttgccagaatctaccaccccctttgccaccaaagaaatatgctataaccagtgtgccacagtcagagaaaagcgaatctacacctgatgtcaaacttacagaggtgtttaaagctacctctcatcttccgaagcacagtttaagtacagcttcagaaccaagtttagaagtgagtacacatatgaatgatgaaagacataaagaaacatttcaagtgagagaatgttttggcaacacaccaaactgtccatccagctcctcaactaacgattttcaggcaaactcaggtgccattgatgcattttgccaaccagaactagactctatttctacctgtccaaatgagacagtttcattaactacctatttttcagttgatagctgcatgacggatacatatagattgaaataccatcagaggcccaagctctcttttccagagagcagtggcttttgtaataattcactatcttagagtgaaaaaggactagacctgtgttacataataatcttggttcaagctgcccttctgaacaaagatataaacctagcatacattgtaatagataactggtaaaactgaccaacttttacttctcagaggccatttaaatataataggaacctactgaccaaacctagtgatacataaaattaaagcctgtggcatttttaaagttgttaatcactatacatatgtatgtgtatatgtgtatacacatatataattttatgatcaatatcttagatattttagaaattccctttgaatagtcttggcgtgccgtgaaaaatagaaaatcagggagatataataattcatttgtcatatgctacagttgaataaaaattaaatttgtccccctattttgtggccagtagactgggaagtattaaactaaccagtactcatgtatggagattataaactatgctaattgaaaagtaccaggtgatacatagcctggtacttttttgtcaaagaattgctttatgaagaagcactttctaatgggtaaccagaaaagggcttcacccatttgtttttgacttctatgatagtcactgcatatgatccctttaagtgtctttaaaaaaatgacttatgaatttgatagcatttggggaaaaaaagccttatatgattaacaatttgtaagttttcaagatcggatggaatttaattttgctcctagaatttttgtcttcagaatatctagttaagataaattaggcctttgactattataggtattcataaatgctactttagccatgtaagttaaaaagttaaaatacttaaactttagtgtatttatttatctcgttactttttttctaattttatatgaaatgtgaaaggtctttattttggtttggtttactttgggctgctaaccaccagtgttaggaattaatgtagggcaccctcttattgggaatgtcactgtaattgcctacattttctttgctgtaatattacctgcttataggttgtcaacccattttatctgaatttgaaaatctatctaggtttccagattaaatttctacctttcatatagagagtttaattttaataaaatgtttaattagagcatccttcccttttattctactttgaacaaatagtaattttaccccaactacttttcatgaagagtgctttgaaaattaaaggaatttttattattatggtaaccttatgagtaaaaataagttactttaattgctttatttcgttagttgtcattttattttgtactatgctggtaaactaattgtggtttagaatagttttatgttcactcctgataactgagaaacagaactaaagttttccttacattgctaaatggataaacctcatattcaataaactagtaaatgtagccacttgactgattgcgtaaatcgtgttaaaacattctaaaatgttgtaactaatttaatgtgaatactgttaaacagaaaataattgcttataaaagtctaacttcacccagtt

SEQ ID NO: 464307 - DNA, 3185 bp, Homo sapiens
cgtagcccacctgtcagatgaccagaaactgctcctctcatccagcaacaaaatatcatggatcaatgttactttgagaactctctatccacagaatgtataattcggtcagccagcagatctgatgggtgtcagatgccaaaacttttttgccagaatctaccaccccctttgccaccaaagaaatatgctataaccagtgtgccacagtcagagaaaagcgaatctacacctgatgtcaaacttacagaggtgtttaaagctacctctcatcttccgaagcacagtttaagtacagcttcagaaccaagtttagaagtgagtacacatatgaatgatgaaagacataaagaaacatttcaagtgagagaatgttttggcaacacaccaaactgtccatccagctcctcaactaacgattttcaggcaaactcaggtgccattgatgcattttgccaaccagaactagactctatttctacctgtccaaatgagacagtttcattaactacctatttttcagttgatagctgcatgacggatacatatagattgaaataccatcagaggcccaagctctcttttccagagagcagtggcttttgtaataattcactatcttagagtgaaaaaggactagacctgtgttacataataatcttggttcaagctgcccttctgaacaaagatataaacctagcatacattgtaatagataactggtaaaactgaccaacttttacttctcagaggccatttaaatataataggaacctactgaccaaacctagtgatacataaaattaaagcctgtggcatttttaaagttgttaatcactatacatatgtatgtgtatatgtgtatacacatatataattttatgatcaatatcttagatattttagaaattccctttgaatagtcttggcgtgccgtgaaaaatagaaaatcagggagatataataattcatttgtcatatgctacagttgaataaaaattaaatttgtccccctattttgtggccagtagactgggaagtattaaactaaccagtactcatgtatggagattataaactatgctaattgaaaagtaccaggtgatacatagcctggtacttttttgtcaaagaattgctttatgaagaagcactttctaatgggtaaccagaaaagggcttcacccatttgtttttgacttctatgatagtcactgcatatgatccctttaagtgtctttaaaaaaatgacttatgaatttgatagcatttggggaaaaaaagccttatatgattaacaatttgtaagttttcaagatcggatggaatttaattttgctcctagaatttttgtcttcagaatatctagttaagataaattaggcctttgactattataggtattcataaatgctactttagccatgtaagttaaaaagttaaaatacttaaactttagtgtatttatttatctcgttactttttttctaattttatatgaaatgtgaaaggtctttattttggtttggtttactttgggctgctaaccaccagtgttaggaattaatgtagggcaccctcttattgggaatgtcactgtaattgcctacattttctttgctgtaatattacctgcttataggttgtcaacccattttatctgaatttgaaaatctatctaggtttccagattaaatttctacctttcatatagagagtttaattttaataaaatgtttaattagagcatccttcccttttattctactttgaacaaatagtaattttaccccaactacttttcatgaagagtgctttgaaaattaaaggaatttttattattatggtaaccttatgagtaaaaataagttactttaattgctttatttcgttagttgtcattttattttgtactatgctggtaaactaattgtggtttagaatagttttatgttcactcctgataactgagaaacagaactaaagttttccttacattgctaaatggataaacctcatattcaataaactagtaaatgtagccacttgactgattgcgtaaatcgtgttaaaacattctaaaatgttgtaactaatttaatgtgaatactgttaaacagaaaataattgcttataaaagtctaacttcacccagttaccaagtcttggccaaattttatcttctgcctatagtttttactagcctttttaaactataatagtgagtgatcattactttatattctcgtaagttagaaatacttgaatgccaaattaattttgttttaagaaagcttatttttaacataattttttagtgtggagggtttgtaaataatgtaaagtttgtaaacctgtatttaaaataccaaagtttttcttcttttataacattgtaagatactagaaaaatgggcttcaagttttttaatagctttcacagtttgtgtagttttttttttctatttggttaagatgtgagttggaaatgtattatttgaaacatttaaactaatttttgtatttaacagcagtctcagacatttgtcttttcaactcagttgagttgtagatatcaaatagaaatgtccagttttgcctcttttaagtactgtccagttgaaacctcctgactcatgtactactacacaaactagaaaatgcccatttatttttatgttgattcaacactccagatacagattgatacatatatactaatcattttatttcatgtaaaagttttacatctagggtgcctatttatttttatagatgctttcatccagttataagcttattataactttgtaaatatttcagccaacagttgtaatgtttaaaatacttaccttcagaatgttatattttcatgtgaaatcaatttcttctaattcaaaaaaattttaagataaactgatttttaagtttatatgattggacttctctttgcattcatgaactgtgtgtcaccctcccaccaacgtggattattttgggacatgttaagtcgcgggtacttggaatttcactgatcataaacggttatcacaggagatcctaggagttaaactccagcaaggtctaaagcacagctccttagaaaaggagttggcaaactttctataaagatagaaaataatttaggctttgtggaccataatatttctgtaataactactcaa

SEQ ID NO: 464308 - DNA, 3071 bp, Homo sapiens
  misc_feature (2316)..(2316): n is a, c, g, or t
  misc_feature (3004)..(3004): n is a, c, g, or t
cggcaggagtgtatggctcctccaggtgatgtcctgccctgctttggctcgccctccgtgggctgcactcactgtccaaccagtcccaatgagatgaaccagtgtgtgtgtcgtagctgtggagcatcgtcagatcctctaccttttacagaatttgtgcggtacatttctacaacagccttatgcaatgaggttgaaagaatgttggaaaggcatgaacgctttaaacctgaaatgtttgcagaattgctacaagcagcaaatacaacagatgactataggaaatgtcctagtaactgtggccaaaaaataaaaattcgccgtgttttaatgaattgcccagagattgttacaattggtttagtctgggactccgagcattctgacttgaccgaagctgttgttcggaatctagcaacacatctttatcttcctgggcttttttatagagttactgatgaaaatgccaaaaatagtgaacttaaccttgttggtatgatctgctacaccagccaacattattgtgcctttgcatttcacaccaaaagttccaaatgggtattttttgatgatgcaaatgtgaaagagattggaactagatggaaagatgttgtctccaaatgcattcgatgccactttcagccactacttttgttttatgcaaacccagatggcacagcagtttctactgaggatgcactcaggcaggtcatcagctggtcacattacaaatctgttgcagaaaatatgggatgtgaaaagcctgtaattcataagtcagataatttaaaagaaaatggatttggtgatcaggcaaagcagagagaaaatcagaaatttccaactgataatatttcatcatctaatcggagccacagtcacacaggtgtagggaaaggaccagctaagttaagtcacattgatcaaagggaaaagataaaagacatttccagagaatgtgctctgaaagctattgaacagaaaaacttactttcttcacaaaggaaagatttagagaagggacaaagaaaagatttaggacgacatagagatttggttgatgaagacctttcacatttccaatctggatcacctcctgccccaaatggttttaaacaacatgggaatccacatctatatcatagtcaaggaaaaggatcatataaacatgaccgagttgtacctcagagtcgagcttctgcacaaataataagttcaagtaaatcccagattcttgctccaggagagaaaataactggcaaagttaagagtgacaatggcactggatatgacacagacagcagccaagattctagggatagaggaaacagctgtgatagcagcagtaaaagccggaaccgaggttggaaacctatgagagaaacattaaatgttgatagtatttttagtgaaagtgaaaaaagacagcatagtccaagacataaaccaaatatcagtaataagcctaaatctagcaaggatccgagttttagtaattggccaaaagagaatccaaagcaaaaaggtttaatgaccatatatgaagatgaaatgaagcaggaaataggaagcagaagttcccttgaatctaatggaaaaggagcagagaaaaataaaggccttgtagagggtaaagtgcatggtgataattggcagatgcaaaggactgagtctggatatgaaagcagtgatcacatcagtaatggttctactaatttggactcacctgttatcgatggaaatggtacagtaatggatatcagtggtgttaaagaaacagtatgcttcaggtaatgtaaaagttgagtgaatcatttttccatcactcttcttttttgttaattgcatgaagtaatttttgaagtttggggtcaattaaatagaacagaaacagcatgagctgttttaaagagctttaaaaagtttgtttcttttaaacacaagtatgtttctgtaaagaaacctaggatattgtagtttatttgatattttagatttccattttgaatagttatttcctgattccaaaaatagcagctttttatttttagaaaatttggaaagtacagaagtttattatcattgttgtgtcactgtcaacaattgattggttttaaagcacagacttcaattggtatcatctaagtcattaaggtggttgtttaattcttctttttttggtgggaggggaaggagtctcactctgttgcccaggctggagtgcagtggcgcaattacgggtcactgcaacctccgcctcccaggttcaagcgattctcctgccttaacttcccaagtagctgggactacagacangcaccaccacgcctggctaatttttgtatttttagagacggggtttccccaggctactcttgaactcccaacctcaggtgatccacctgccttggcctcccaaagtgctgggattacaggcctgagccactatgcccaggctgttgtttaattcttcaatctatataatgtttataatcccatctctaacatttgtaactcagaactgaagctagtttttactgtcacactcattctcatggaagagatattttccctttagcaaatataaaaaaaatcagccaaataactttgtgttcgattaattctaaatacatttattatattactgtttaatccttctaacaatgtgtttgtttgatattagctgatatttgaccacatttgttattaaaaggtagatttgcaaaaatcaactgctcatgttttatgaaaatgcttgtttcaataaagacttaaggaaagggccaggtgtagtgtttacacacctgtaatcacagcaccttgggaggctgaggcaggaggattgcttgagcccaggagttcaatactagcctgagcaacatggaaagatctcatcatctctaggaaacagttttaaaatattagccaggtattgtggcatatgcctgtggtcccagctacttgggaggctgaggtgggaggatttttgagcccaggaggtcgnggctgcagtgaaccatgtttgtaccactgcactccatcctgggcaaaagagcaaaaggtcctggctc

SEQ ID NO: 464309 - DNA, 1488 bp, Homo sapiens
tgtcagagcatgaatatggcaggattatccttagaatataacactaaattttctttagagttatccaagatgctgatgggagaagatggcgctcttctcccatcagcatgaagagtgctttgaaaattaaaggaatttttattattatggtaaccttatgagtaaaaataagttactttaattgctttatttcgttagttgtcattttattttgtactatgctggtaaactaattgtggtttagaatagttttatgttcactcctgataactgagaaacagaactaaagttttccttacattgctaaatggataaacctcatattcaataaactagtaaatgtagccacttgactgattgcgtaaatcgtgttaaaacattctaaaatgttgtaactaatttaatgtgaatactgttaaacagaaaataattgcttataaaagtctaacttcacccagttaccaagtcttggccaaattttatcttctgcctatagtttttactagcctttttaaactataatagtgagtgatcattactttatattctcgtaagttagaaatacttgaatgccaaattaattttgttttaagaaagcttatttttaacataattttttagtgtggagggtttgtaaataatgtaaagtttgtaaacctgtatttaaaataccaaagtttttcttcttttataacattgtaagatactagaaaaatgggcttcaagttttttaatagctttcacagtttgtgtagttttttttttctatttggttaagatgtgagttggaaatgtattatttgaaacatttaaactaatttttgtatttaacagcagtctcagacatttgtcttttcaactcagttgagttgtagatatcaaatagaaatgtccagttttgcctcttttaagtactgtccagttgaaacctcctgactcatgtactactacacaaactagaaaatgcccatttatttttatgttgattcaacactccagatacagattgatacatatatactaatcattttatttcatgtaaaagttttacatctagggtgcctatttatttttatagatgctttcatccagttataagcttattataactttgtaaatatttcagccaacagttgtaatgtttaaaatacttaccttcagaatgttatattttcatgtgaaatcaatttcttctaattcaaaaaaattttaagataaactgatttttaagtttatatgattggacttctctttgcattcatgaactgtgtgtcaccctcccaccaacgtggattattttgggacatgttaagtcgcgggtacttggaatttcactgatcataaacggttatcacaggagatcctaggagttaaactccagcaaggtctaaagcacagctccttagaaaaggagttggcaaactttctataaagatagaaaataatttaggctttgtggaccataatatttctgtaataactactcaa

SEQ ID NO: 464310 - DNA, 3441 bp, Homo sapiens
cggcaggagtgtatggctcctccaggtgatgtcctgccctgctttggctcgccctccgtgggctgcactcactgtccaaccagtcccaatgagatgaaccagtgtgtgtgtcgtagctgtggagcatcgtcagatcctctaccttttacagaatttgtgcggtacatttctacaacagccttatgcaatgaggttgaaagaatgttggaaaggcatgaacgctttaaacctgaaatgtttgcagaattgctacaagcagcaaatacaacagatgactataggaaatgtcctagtaactgtggccaaaaaataaaaattcgccgtgttttaatgaattgcccagagattgttacaattggtttagtctgggactccgagcattctgacttgaccgaagctgttgttcggaatctagcaacacatctttatcttcctgggcttttttatagagttactgatgaaaatgccaaaaatagtgaacttaaccttgttggtatgatctgctacaccagccaacattattgtgcctttgcatttcacaccaaaagttccaaatgggtattttttgatgatgcaaatgtgaaagagattggaactagatggaaagatgttgtctccaaatgcattcgatgccactttcagccactacttttgttttatgcaaacccagatggcacagcagtttctactgaggatgcactcaggcaggtcatcagctggtcacattacaaatctgttgcagaaaatatgggatgtgaaaagcctgtaattcataagtcagataatttaaaagaaaatggatttggtgatcaggcaaagcagagagaaaatcagaaatttccaactgataatatttcatcatctaatcggagccacagtcacacaggtgtagggaaaggaccagctaagttaagtcacattgatcaaagggaaaagataaaagacatttccagagaatgtgctctgaaagctattgaacagaaaaacttactttcttcacaaaggaaagatttagagaagggacaaagaaaagatttaggacgacatagagatttggttgatgaagacctttcacatttccaatctggatcacctcctgccccaaatggttttaaacaacatgggaatccacatctatatcatagtcaaggaaaaggatcatataaacatgaccgagttgtacctcagagtcgagcttctgcacaaataataagttcaagtaaatcccagattcttgctccaggagagaaaataactggcaaagttaagagtgacaatggcactggatatgacacagacagcagccaagattctagggatagaggaaacagctgtgatagcagcagtaaaagccggaaccgaggttggaaacctatgagagaaacattaaatgttgatagtatttttagtgaaagtgaaaaaagacagcatagtccaagacataaaccaaatatcagtaataagcctaaatctagcaaggatccgagttttagtaattggccaaaagagaatccaaagcaaaaaggtttaatgaccatatatgaagatgaaatgaagcaggaaataggaagcagaagttcccttgaatctaatggaaaaggagcagagaaaaataaaggccttgtagagggtaaagtgcatggtgataattggcagatgcaaaggactgagtctggatatgaaagcagtgatcacatcagtaatggttctactaatttggactcacctgttatcgatggaaatggtacagtaatggatatcagtggtgttaaagaaacagtatgcttcagtgaccagattacgacaagcaacctaaataaagaacgtggggactgtacctcccttcagagccaacatcacttagaaggctttagaaaagaactcaggaatttggaagcaggctataaatctcatgaattccacccagaatcacatttacaaataaaaaatcatttgataaaaagatcacatgtacatgaagacaatggaaagttatttccttcatccagtctacaaatacccaaggaccataatgcaagagaacatatccaccagtcagatgaacagaaacttgaaaaaccgaatgaatgcaaattttctgagtggcttaatatagaaaattctgagagaacaggtttgccttttcacgttgataactctgcttctgggaagagagtgaacagtaatgaaccatcttcattatggtcttcacacctaagaactgttgggttaaagccagaaactgctcctctcatccagcaacaaaatatcatggatcaatgttactttgagaactctctatccacagaatgtataattcggtcagccagcagatctgatgggtgtcagatgccaaaacttttttgccagaatctaccaccccctttgccaccaaagaaatatgctataaccagtgtgccacagtcagagaaaagcgaatctacacctgatgtcaaacttacagaggtgtttaaagctacctctcatcttccgaagcacagtttaagtacagcttcagaaccaagtttagaagtgagtacacatatgaatgatgaaagacataaagaaacatttcaagtgagagaatgttttggcaacacaccaaactgtccatccagctcctcaactaacgattttcaggcaaactcaggtgccattgatgcattttgccaaccagaactagactctatttctacctgtccaaatgagacagtttcattaactacctatttttcagttgatagctgcatgacggatacatatagattgaaataccatcagaggcccaagctctcttttccagagagcagtggcttttgtaataattcactatcttagagtgaaaaaggactagacctgtgttacataataatcttggttcaagctgcccttctgaacaaagatataaacctagcatacattgtaatagataactggtaaaactgaccaacttttacttctcagaggccatttaaatataataggaacctactgaccaaacctagtgatacataaaattaaagcctgtggcatttttaaagttgttaatcactatacatatgtatgtgtatatgtgtatacacatatataattttatgatcaatatcttagatattttagaaattccctttgaatagtcttggcgtgccgtgaaaaatagaaaatcagggagatataataattcatttgtcatatgctacagttgaataaaaattaaatttgtccccctattttgtggccagtagactgggaagtattaaactaaccagtactcatgtatggagattataaactatgctaattgaaaagtcccggggttcataagcgggcttcttggccacacaatgctttgacaaaccttctcttgggggccccaacgggtcccctgtttgggtctaaagcgggagtaccccggttaaactattcgcttgggacaacttc

SEQ ID NO: 464311 - DNA, 652 bp, Homo sapiens
acagaatttgtgcggtacatttctacaacagccttatggtaagaacctattaaagcttaattatcaacgatattaataacatatttaagcacattgagcacttattttataaaatcatagcatacatgaatttcccctctctgtctgaggctaccaagtatgctgctgtgagatgtattaagtgatgtctatcaaagttggatgtttgtaatttggcctaatatatgtgttacttagtgaagtgtacataatactagttaaattttatatctatttaatttataacaaattttagaactgtgaaggggagcatgaaatgataaactgaatgttaaatggaactatacatggttgcttcatttatgagatgttctgtttgtaatggccatattttcagtcagctccactatgtccctttctggtgataaaagctagggtaagcggagaagaaagaaaaatgtgagcgtaattctcaggttattgcatttgaggactcatcattcactttaaataaaaaatttgccatgcttgcctgctcagctgcccactcactctctccctttctgtccatgaaagattagctcgttaaggatctaaaagttatccctagaccttacataatgttctttgaatattttccaacaggtatttg

SEQ ID NO: 464312 - DNA, 451 bp, Homo sapiens
atgtttattttcccctagtttcatatatttgcatagggtgttctagctttgtttttattttcatatttcagatcacatgtacatgaagacaatggaaagttatttccttcatccagtctacaaatacccaaggaccataatgcaagagaacatatccaccagtcagatgaacagaaacttgaaaaaccgaatgaatgcaaattttctgagtggcttaatatagaaaattctgagagaacaggtttgccttttcacgttgataactctgcttctgggaagagagtgaacagtaatgaaccatcttcattatggtcttcacacctaagaactgttgggttaaagccagaaactgctcctctcatccagcaacaaaatatcatggatcaatgttactttgagaactctctatccacagaatgtataattcggtcagccagcagatctgatgggt

SEQ ID NO: 464313 - DNA, 5399 bp, Homo sapiens
cggcaggagtgtatggctcctccaggtgatgtcctgccctgctttggctcgccctccgtgggctgcactcactgtccaaccagtcccaatgagatgaaccagtgtgtgtgtcgtagctgtggagcatcgtcagatcctctaccttttacagaatttgtgcggtacatttctacaacagccttatgcaatgaggttgaaagaatgttggaaaggcatgaacgctttaaacctgaaatgtttgcagaattgctacaagcagcaaatacaacagatgactataggaaatgtcctagtaactgtggccaaaaaataaaaattcgccgtgttttaatgaattgcccagagattgttacaattggtttagtctgggactccgagcattctgacttgaccgaagctgttgttcggaatctagcaacacatctttatcttcctgggcttttttatagagttactgatgaaaatgccaaaaatagtgaacttaaccttgttggtatgatctgctacaccagccaacattattgtgcctttgcatttcacaccaaaagttccaaatgggtattttttgatgatgcaaatgtgaaagagattggaactagatggaaagatgttgtctccaaatgcattcgatgccactttcagccactacttttgttttatgcaaacccagatggcacagcagtttctactgaggatgcactcaggcaggtcatcagctggtcacattacaaatctgttgcagaaaatatgggatgtgaaaagcctgtaattcataagtcagataatttaaaagaaaatggatttggtgatcaggcaaagcagagagaaaatcagaaatttccaactgataatatttcatcatctaatcggagccacagtcacacaggtgtagggaaaggaccagctaagttaagtcacattgatcaaagggaaaagataaaagacatttccagagaatgtgctctgaaagctattgaacagaaaaacttactttcttcacaaaggaaagatttagagaagggacaaagaaaagatttaggacgacatagagatttggttgatgaagacctttcacatttccaatctggatcacctcctgccccaaatggttttaaacaacatgggaatccacatctatatcatagtcaaggaaaaggatcatataaacatgaccgagttgtacctcagagtcgagcttctgcacaaataataagttcaagtaaatcccagattcttgctccaggagagaaaataactggcaaagttaagagtgacaatggcactggatatgacacagacagcagccaagattctagggatagaggaaacagctgtgatagcagcagtaaaagccggaaccgaggttggaaacctatgagagaaacattaaatgttgatagtatttttagtgaaagtgaaaaaagacagcatagtccaagacataaaccaaatatcagtaataagcctaaatctagcaaggatccgagttttagtaattggccaaaagagaatccaaagcaaaaaggtttaatgaccatatatgaagatgaaatgaagcaggaaataggaagcagaagttcccttgaatctaatggaaaaggagcagagaaaaataaaggccttgtagagggtaaagtgcatggtgataattggcagatgcaaaggactgagtctggatatgaaagcagtgatcacatcagtaatggttctactaatttggactcacctgttatcgatggaaatggtacagtaatggatatcagtggtgttaaagaaacagtatgcttcagtgaccagattacgacaagcaacctaaataaagaacgtggggactgtacctcccttcagagccaacatcacttagaaggctttagaaaagaactcaggaatttggaagcaggctataaatctcatgaattccacccagaatcacatttacaaataaaaaatcatttgataaaaagatcacatgtacatgaagacaatggaaagttatttccttcatccagtctacaaatacccaaggaccataatgcaagagaacatatccaccagtcagatgaacagaaacttgaaaaaccgaatgaatgcaaattttctgagtggcttaatatagaaaattctgagagaacaggtttgccttttcacgttgataactctgcttctgggaagagagtgaacagtaatgaaccatcttcattatggtcttcacacctaagaactgttgggttaaagccagaaactgctcctctcatccagcaacaaaatatcatggatcaatgttactttgagaactctctatccacagaatgtataattcggtcagccagcagatctgatgggtgtcagatgccaaaacttttttgccagaatctaccaccccctttgccaccaaagaaatatgctataaccagtgtgccacagtcagagaaaagcgaatctacacctgatgtcaaacttacagaggtgtttaaagctacctctcatcttccgaagcacagtttaagtacagcttcagaaccaagtttagaagtgagtacacatatgaatgatgaaagacataaagaaacatttcaagtgagagaatgttttggcaacacaccaaactgtccatccagctcctcaactaacgattttcaggcaaactcaggtgccattgatgcattttgccaaccagaactagactctatttctacctgtccaaatgagacagtttcattaactacctatttttcagttgatagctgcatgacggatacatatagattgaaataccatcagaggcccaagctctcttttccagagagcagtggcttttgtaataattcactatcttagagtgaaaaaggactagacctgtgttacataataatcttggttcaagctgcccttctgaacaaagatataaacctagcatacattgtaatagataactggtaaaactgaccaacttttacttctcagaggccatttaaatataataggaacctactgaccaaacctagtgatacataaaattaaagcctgtggcatttttaaagttgttaatcactatacatatgtatgtgtatatgtgtatacacatatataattttatgatcaatatcttagatattttagaaattccctttgaatagtcttggcgtgccgtgaaaaatagaaaatcagggagatataataattcatttgtcatatgctacagttgaataaaaattaaatttgtccccctattttgtggccagtagactgggaagtattaaactaaccagtactcatgtatggagattataaactatgctaattgaaaagtaccaggtgatacatagcctggtacttttttgtcaaagaattgctttatgaagaagcactttctaatgggtaaccagaaaagggcttcacccatttgtttttgacttctatgatagtcactgcatatgatccctttaagtgtctttaaaaaaatgacttatgaatttgatagcatttggggaaaaaaagccttatatgattaacaatttgtaagttttcaagatcggatggaatttaattttgctcctagaatttttgtcttcagaatatctagttaagataaattaggcctttgactattataggtattcataaatgctactttagccatgtaagttaaaaagttaaaatacttaaactttagtgtatttatttatctcgttactttttttctaattttatatgaaatgtgaaaggtctttattttggtttggtttactttgggctgctaaccaccagtgttaggaattaatgtagggcaccctcttattgggaatgtcactgtaattgcctacattttctttgctgtaatattacctgcttataggttgtcaacccattttatctgaatttgaaaatctatctaggtttccagattaaatttctacctttcatatagagagtttaattttaataaaatgtttaattagagcatccttcccttttattctactttgaacaaatagtaattttaccccaactacttttcatgaagagtgctttgaaaattaaaggaatttttattattatggtaaccttatgagtaaaaataagttactttaattgctttatttcgttagttgtcattttattttgtactatgctggtaaactaattgtggtttagaatagttttatgttcactcctgataactgagaaacagaactaaagttttccttacattgctaaatggataaacctcatattcaataaactagtaaatgtagccacttgactgattgcgtaaatcgtgttaaaacattctaaaatgttgtaactaatttaatgtgaatactgttaaacagaaaataattgcttataaaagtctaacttcacccagttaccaagtcttggccaaattttatcttctgcctatagtttttactagcctttttaaactataatagtgagtgatcattactttatattctcgtaagttagaaatacttgaatgccaaattaattttgttttaagaaagcttatttttaacataattttttagtgtggagggtttgtaaataatgtaaagtttgtaaacctgtatttaaaataccaaagtttttcttcttttataacattgtaagatactagaaaaatgggcttcaagttttttaatagctttcacagtttgtgtagttttttttttctatttggttaagatgtgagttggaaatgtattatttgaaacatttaaactaatttttgtatttaacagcagtctcagacatttgtcttttcaactcagttgagttgtagatatcaaatagaaatgtccagttttgcctcttttaagtactgtccagttgaaacctcctgactcatgtactactacacaaactagaaaatgcccatttatttttatgttgattcaacactccagatacagattgatacatatatactaatcattttatttcatgtaaaagttttacatctagggtgcctatttatttttatagatgctttcatccagttataagcttattataactttgtaaatatttcagccaacagttgtaatgtttaaaatacttaccttcagaatgttatattttcatgtgaaatcaatttcttctaattcaaaaaaattttaagataaactgatttttaagtttatatgattggacttctctttgcattcatgaactgtgtgtcaccctcccaccaacgtggattattttgggacatgttaagtcgcgggtacttggaatttcactgatcataaacggttatcacaggagatcctaggagttaaactccagcaaggtctaaagcacagctccttagaaaaggagttggcaaactttctataaagatagaaaataatttaggctttgtggaccataatatttctgtaataactactcaa

SEQ ID NO: 464314 - DNA, 3135 bp, Homo sapiens
  misc_feature (8)..(8): n is a, c, g, or t
  misc_feature (10)..(10): n is a, c, g, or t
  misc_feature (12)..(12): n is a, c, g, or t
ccaaattngncnttggccggtggcaaagttaagagtgacaatggcactggatatgacacagacagcagccaagattctagggatagaggaaacagctgtgatagcagcagtaaaagccggaaccgaggttggaaacctatgagagaaacattaaatgttgatagtatttttagtgaaagtgaaaaaagacagcatagtccaagacataaaccaaatatcagtaataagcctaaatctagcaaggatccgagttttagtaattggccaaaagagaatccaaagcaaaaaggtttaatgaccatatatgaagatgaaatgaagcaggaaataggaagcagaagttcccttgaatctaatggaaaaggagcagagaaaaataaaggccttgtagagggtaaagtgcatggtgataattggcagatgcaaaggactgagtctggatatgaaagcagtgatcacatcagtaatggttctactaatttggactcacctgttatcgatggaaatggtacagtaatggatatcagtggtgttaaagaaacagtatgcttcagtgaccagattacgacaagcaacctaaataaagaacgtggggactgtacctcccttcagagccaacatcacttagaaggctttagaaaagaactcaggaatttggaagcaggctataaatctcatgaattccacccagaatcacatttacaaataaaaaatcatttgataaaaagatcacatgtacatgaagacaatggaaagttatttccttcatccagtctacaaatacccaaggaccataatgcaagagaacatatccaccagtcagatgaacagaaacttgaaaaaccgaatgaatgcaaattttctgagtggcttaatatagaaaattctgagagaacaggtttgccttttcacgttgataactctgcttctgggaagagagtgaacagtaatgaaccatcttcattatggtcttcacacctaagaactgttgggttaaagccagaaactgctcctctcatccagcaacaaaatatcatggatcaatgttactttgagaactctctatccacagaatgtataattcggtcagccagcagatctgatgggtgtcagatgccaaaacttttttgccagaatctaccaccccctttgccaccaaagaaatatgctataaccagtgtgccacagtcagagaaaagcgaatctacacctgatgtcaaacttacagaggtgtttaaagctacctctcatcttccgaagcacagtttaagtacagcttcagaaccaagtttagaagtgagtacacatatgaatgatgaaagacataaagaaacatttcaagtgagagaatgttttggcaacacaccaaactgtccatccagctcctcaactaacgattttcaggcaaactcaggtgccattgatgcattttgccaaccagaactagactctatttctacctgtccaaatgagacagtttcattaactacctatttttcagttgatagctgcatgacggatacatatagattgaaataccatcagaggcccaagctctcttttccagagagcagtggcttttgtaataattcactatcttagagtgaaaaaggactagacctgtgttacataataatcttggttcaagctgcccttctgaacaaagatataaacctagcatacattgtaatagataactggtaaaactgaccaacttttacttctcagaggccatttaaatataataggaacctactgaccaaacctagtgatacataaaattaaagcctgtggcatttttaaagttgttaatcactatacatatgtatgtgtatatgtgtatacacatatataattttatgatcaatatcttagatattttagaaattccctttgaatagtcttggcgtgccgtgaaaaatagaaaatcagggagatataataattcatttgtcatatgctacagttgaataaaaattaaatttgtccccctattttgtggccagtagactgggaagtattaaactaaccagtactcatgtatggagattataaactatgctaattgaaaagtaccaggtgatacatagcctggtacttttttgtcaaagaattgctttatgaagaagcactttctaatgggtaaccagaaaagggcttcacccatttgtttttgacttctatgatagtcactgcatatgatccctttaagtgtctttaaaaaaatgacttatgaatttgatagcatttggggaaaaaaagccttatatgattaacaatttgtaagttttcaagatcggatggaatttaattttgctcctagaatttttgtcttcagaatatctagttaagataaattaggcctttgactattataggtattcataaatgctactttagccatgtaagttaaaaagttaaaatacttaaactttagtgtatttatttatctcgttactttttttctaattttatatgaaatgtgaaaggtctttattttggtttggtttactttgggctgctaaccaccagtgttaggaattaatgtagggcaccctcttattgggaatgtcactgtaattgcctacattttctttgctgtaatattacctgcttataggttgtcaacccattttatctgaatttgaaaatctatctaggtttccagattaaatttctacctttcatatagagagtttaattttaataaaatgtttaattagagcatccttcccttttattctactttgaacaaatagtaattttaccccaactacttttcatgaagagtgctttgaaaattaaaggaatttttattattatggtaaccttatgagtaaaaataagttactttaattgctttatttcgttagttgtcattttattttgtactatgctggtaaactaattgtggtttagaatagttttatgttcactcctgataactgagaaacagaactaaagttttccttacattgctaaatggataaacctcatattcaataaactagtaaatgtagccacttgactgattgcgtaaatcgtgttaaaacattctaaaatgttgtaactaatttaatgtgaatactgttaaacagaaaataattgcttataaaagtctaacttcacccagtt

SEQ ID NO: 464315 - DNA, 3899 bp, Homo sapiens
cggcaggagtgtatggctcctccaggtgatgtcctgccctgctttggctcgccctccgtgggctgcactcactgtccaaccagtcccaatgagatgaaccagtgtgtgtgtcgtagctgtggagcatcgtcagatcctctaccttttacagaatttgtgcggtacatttctacaacagccttatgcaatgaggttgaaagaatgttggaaaggcatgaacgctttaaacctgaaatgtttgcagaattgctacaagcagcaaatacaacagatgactataggaaatgtcctagtaactgtggccaaaaaataaaaattcgccgtgttttaatgaattgcccagagattgttacaattggtttagtctgggactccgagcattctgacttgaccgaagctgttgttcggaatctagcaacacatctttatcttcctgggcttttttatagagttactgatgaaaatgccaaaaatagtgaacttaaccttgttggtatgatctgctacaccagccaacattattgtgcctttgcatttcacaccaaaagttccaaatgggtattttttgatgatgcaaatgtgaaagagattggaactagatggaaagatgttgtctccaaatgcattcgatgccactttcagccactacttttgttttatgcaaacccagatggcacagcagtttctactgaggatgcactcaggcaggtcatcagctggtcacattacaaatctgttgcagaaaatatgggatgtgaaaagcctgtaattcataagtcagataatttaaaagaaaatggatttggtgatcaggcaaagcagagagaaaatcagaaatttccaactgataatatttcatcatctaatcggagccacagtcacacaggtgtagggaaaggaccagctaagttaagtcacattgatcaaagggaaaagataaaagacatttccagagaatgtgctctgaaagctattgaacagaaaaacttactttcttcacaaaggaaagatttagagaagggacaaagaaaagatttaggacgacatagagatttggttgatgaagacctttcacatttccaatctggatcacctcctgccccaaatggttttaaacaacatgggaatccacatctatatcatagtcaaggaaaaggatcatataaacatgaccgagttgtacctcagagtcgagcttctgcacaaataataagttcaagtaaatcccagattcttgctccaggagagaaaataactggcaaagttaagagtgacaatggcactggatatgacacagacagcagccaagattctagggatagaggaaacagctgtgatagcagcagtaaaagccggaaccgaggttggaaacctatgagagaaacattaaatgttgatagtatttttagtgaaagtgaaaaaagacagcatagtccaagacataaaccaaatatcagtaataagcctaaatctagcaaggatccgagttttagtaattggccaaaagagaatccaaagcaaaaaggtttaatgaccatatatgaagatgaaatgaagcaggaaataggaagcagaagttcccttgaatctaatggaaaaggagcagagaaaaataaaggccttgtagagggtaaagtgcatggtgataattggcagatgcaaaggactgagtctggatatgaaagcagtgatcacatcagtaatggttctactaatttggactcacctgttatcgatggaaatggtacagtaatggatatcagtggtgttaaagaaacagtatgcttcagtgaccagattacgacaagcaacctaaataaagaacgtggggactgtacctcccttcagagccaacatcacttagaaggctttagaaaagaactcaggaatttggaagcaggctataaatctcatgaattccacccagaatcacatttacaaataaaaaatcatttgataaaaagatcacatgtacatgaagacaatggaaagttatttccttcatccagtctacaaatacccaaggaccataatgcaagagaacatatccaccagtcagatgaacagaaacttgaaaaaccgaatgaatgcaaattttctgagtggcttaatatagaaaattctgagagaacaggtttgccttttcacgttgataactctgcttctgggaagagagtgaacagtaatgaaccatcttcattatggtcttcacacctaagaactgttgggttaaagccagaaactgctcctctcatccagcaacaaaatatcatggatcaatgttactttgagaactctctatccacagaatgtataattcggtcagccagcagatctgatgggtgtcagatgccaaaacttttttgccagaatctaccaccccctttgccaccaaagaaatatgctataaccagtgtgccacagtcagagaaaagcgaatctacacctgatgtcaaacttacagaggtgtttaaagctacctctcatcttccgaagcacagtttaagtacagcttcagaaccaagtttagaagtgagtacacatatgaatgatgaaagacataaagaaacatttcaagtgagagaatgttttggcaacacaccaaactgtccatccagctcctcaactaacgattttcaggcaaactcaggtgccattgatgcattttgccaaccagaactagactctatttctacctgtccaaatgagacagtttcattaactacctatttttcagttgatagctgcatgacggatacatatagattgaaataccatcagaggcccaagctctcttttccagagagcagtggcttttgtaataattcactatcttagagtgaaaaaggactagacctgtgttacataataatcttggttcaagctgcccttctgaacaaagatataaacctagcatacattgtaatagataactggtaaaactgaccaacttttacttctcagaggccatttaaatataataggaacctactgaccaaacctagtgatacataaaattaaagcctgtggcatttttaaagttgttaatcactatacatatgtatgtgtatatgtgtatacacatatataattttatgatcaatatcttagatattttagaaattccctttgaatagtcttggcgtgccgtgaaaaatagaaaatcagggagatataataattcatttgtcatatgctacagttgaataaaaattaaatttgtccccctattttgtggccagtagactgggaagtattaaactaaccagtactcatgtatggagattataaactatgctaattgaaaagtaccaggtgatacatagcctggtacttttttgtcaaagaattgctttatgaagaagcactttctaatgggtaaccagaaaagggcttcacccatttgtttttgacttctatgatagtcactgcatatgatccctttaagtgtctttaaaaaaatgacttatgaatttgatagcatttggggaaaaaaagccttatatgattaacaatttgtaagttttcaagatcggatggaatttaattttgctcctagaatttttgtcttcagaatatctagttaagataaattaggcctttgactattataggtattcataaatgctactttagccatgtaagttaaaaagttaaaatacttaaactttagtgtatttatttatctcgttactttttttctaattttatatgaaatgtgaaaggtctttattttggtttggtttactttgggctgctaaccaccagtgttaggaattaatgtagggccaactctattaataagactggtcaaatatttttccctaacttcagtttttacatagccgtgcttttctattggtactgtagaagcacctttctttggacctatttcatag

SEQ ID NO: 464316 - DNA, 1445 bp, Homo sapiens
cggcaggagtgtatggctcctccaggtgatgtcctgccctgctttggctcgccctccgtgggctgcactcactgtccaaccagtcccaatgagatgaaccagtgtgtgtgtcgtagctgtggagcatcgtcagatcctctaccttttacagaatttgtgcggtacatttctacaacagccttatgcaatgaggttgaaagaatgttggaaaggcatgaacgctttaaacctgaaatgtttgcagaattgctacaagcagcaaatacaacagatgactataggaaatgtcctagtaactgtggccaaaaaataaaaattcgccgtgttttaatgaattgcccagagattgttacaattggtttagtctgggactccgagcattctgacttgaccgaagctgttgttcggaatctagcaacacatctttatcttcctgggcttttttatagagttactgatgaaaatgccaaaaatagtgaacttaaccttgttggtatgatctgctacaccagccaacattattgtgcctttgcatttcacaccaaaagttccaaatgggtattttttgatgatgcaaatgtgaaagagattggaactagatggaaagatgttgtctccaaatgcattcgatgccactttcagccactacttttgttttatgcaaacccagatggcacagcagtttctactgaggatgcactcaggcaggtcatcagctggtcacattacaaatctgttgcagaaaatatgggatgtgaaaagcctgtaattcataagtcagataatttaaaagaaaatggatttggtgatcaggcaaagcagagagaaaatcagaaatttccaactgataatatttcatcatctaatcggagccacagtcacacaggtgtagggaaaggaccagctaagttaagtcacattgatcaaagggaaaagataaaagacatttccagagaatgtgctctgaaagctattgaacagaaaaacttactttcttcacaaaggaaagatttagagaagggacaaagaaaagatttaggacgacatagagatttggttgatgaagacctttcacatttccaatctggatcacctcctgccccaaatggttttaaacaacatgggaatccacatctatatcatagtcaaggaaaaggatcatataaacatgaccgagttgtacctcagagtcgagcttctgcacaaataataagttcaagtaaatcccagattcttgctccaggagagaaaataactggcaaagttaagagtgacaatggcactggatatgacacagacagcagccaagattctagggatagaggaaacagctgtgatagcagcagtaaaagccggaaccgaggttggaaacctatgagagaaacattaactacattatggaaatgcaaagttgtttgatatgtacggatcaccgggatcctcta

SEQ ID NO: 464317 - DNA, 1259 bp, Homo sapiens
tacaagacagccaattcaaggttcagagtggtgccctctgagttcaaaagaggaacaggcttccactctcctaacctccacttgatgactttcagtacataatgagcgctgcgctgctgtcaaaggagcagaatctgtgcctagaagaagttaaagtgaaagaagagaaaagcgtccaaaatagcatatcattcctccctgccgaagcaatgatgatttttaaagtagaaattgccgaaatcccccttcaccctgtgaagatgcagcaagaaggaaccacctatgaggaatgtgcccttgccaaacactatgtctgccagcagcttgatcctggacttcccagcctctggaacaaagaaatgagcaaagaaactgatgaagacgtttataaatttaaacaagcactgactggcactcgtactacttatactgccactaacactattaataatactaataataaccaattgggaagaggaatacatcatatcatgttgaatgaaaaaatgttgaagtaatgtaaagtaatgttgaataaggaaagcaagatgcagaagaatacgcctggtattataccatgcctttttattttaaaatacaaaaactatacaaaatattgctttgaatgtgtacatacatgatacaattatttttaatggttgggaaggtaatttatcctgtgcattaacaagaggaagtctagagccatggaaaccaagtcaggaaacttctctcttattattaggtccactgcaaatctagttgagactgcaaatcgagagctctgttcactggctttcgtctcctttcctcaacacagtttagtcaccacctccgaggaactgtgtcccgcattggcattcctttggcagcttccacttctctgtccccttgagcaaagtttttctcaggggaagccgagctccagactattcatttgtcctgaggcagccacttgaaacacaatcattttgtatttctacgatgttttgaccttttatccaagtcagccctatagaatgggccaggaggttgctgccactgaataagccactgtgatttttagcgtcaagaattttgctgttaactatggcagaaaaatagacagaggacaataaaaataactaacatagactaattgcaaagaatcttaatatgttcttacagtcatcattcttttattacagttcctgacttcctcatataatgataattgaaaatccccttgaacttggagtctttgcttagttcctgaatcc

SEQ ID NO: 464318 - DNA, 595 bp, Homo sapiens
ccagcccaccctgcagagtgcatttgccagcctccacaatcaggtaatttatcctgtgcattaacaagaggaagtctagagccatggaaaccaagtcaggaaacttctctcttattattaggtccactgcaaatctagttgagactgcaaatcgagtttagtcaccacctccgaggaactgtgtcccgcattggcattcctttggcagcttccacttctctgtccccttgagcaaagtttttctcaggggaagccgagctccagactattcatttgtcctgaggcagccacttgaaacacaatcattttgtatttctacgatgttttgaccttttatccaagtcagccctatagaatgggccaggaggttgctgccactgaataagccactgtgatttttagcgtcaagaattttgctgttaactatggcagaaaaatagacagaggacaataaaaataactaacatagactaattgcaaagaatcttaatatgttcttacagtcatcattcttttattacagttcctgacttcctcatataatgataattgaaaatccccttgaacttggagtctttgcttagttcctgaatcc

SEQ ID NO: 464319 - DNA, 1139 bp, Homo sapiens
tacaagacagccaattcaaggttcagagtggtgccctctgagttcaaaagaggaacaggcttccactctcctaacctccacttgatgactttcagtacataatgagcgctgcgctgctgtcaaaggagcagaatctgtgcctagaagaagttaaagtgaaagaagagaaaagcgtccaaaatagcatatcattcctccctgccgaagcaatgatgatttttaaagtagaaattgccgaaatcccccttcaccctgtgaagatgcagcaagaaggaaccacctatgaggaatgtgcccttgccaaacactatgtctgccagcagcttgatcctggacttcccagcctctggaacaaagaaatgagcaaagaaactgatgaagacgtttataaatttaaacaagcactgactggcactcgtactacttatactgccactaacactattaataatactaataataaccaattgggaagaggaatacatcatatcatgttgaatgaaaaaatgttgaagtaatgtaaagtaatgttgaataaggaaagcaagatgcagaagaatacgcctggtattataccatgcctttttattttaaaatacaaaaactatacaaaatattgctttgaatgtgtacatacatgatacaattatttttaatggttgggaaggtaatttatcctgtgcattaacaagaggaagtctagagccatggaaaccaagtcaggaaacttctctcttattattaggtccactgcaaatctagttgagactgcaaatcgaggtttttctcaggggaagccgagctccagactattcatttgtcctgaggcagccacttgaaacacaatcattttgtatttctacgatgttttgaccttttatccaagtcagccctatagaatgggccaggaggttgctgccactgaataagccactgtgatttttagcgtcaagaattttgctgttaactatggcagaaaaatagacagaggacaataaaaataactaacatagactaattgcaaagaatcttaatatgttcttacagtcatcattcttttattacagttcctgacttcctcatataatgataattgaaaatccccttgaacttggagtctttgcttagttcctgaatcc

SEQ ID NO: 464320 - DNA, 419 bp, Homo sapiens
cacacttacaatttatatagtatataaaatctggattaaagtcaaaatgcattgaaattgtttgggattactctaatttgaaacttaggttttttaagactttaagcagaagctgttttttaacatttcaaaaatatatgtataatacatattttctataaaaaataaaaataaaaattgcaggtaagaaaaaaaaataccccagtcttcctgtttgagattctgtcaattggctgttttcctcccattccctagagctctgttcactggctttcgtctcctttcctcaacacagtttagtcaccacctccgaggaactgtgtcccgcattggcattcctttggcagcttccacttctctgtccccttgagcaaagtacgtaccagacatagcccagccttaaactagaacacttgaaa

SEQ ID NO: 464321 - DNA, 2097 bp, Homo sapiens
aacgagtggagacacgaggaccagcgcgagcggtcccggtgggctaccctccccctgcgacgaccccccctcgctctgaccgactggtcccctaaacggtggcggcggtttttggtcgttgggccccgggatttaggaccaacatttgaagacccgaaggggaactgcaaccatgaatgaagaaaatatagatggaacaaatggatgcagtaaagttcgaactggtattcagaatgaagcagcattacttgctttgatggaaaagactggttacaacatggttcaggaaaatggacaaaggaaatttggcggtcctcctccaggttgggaaggtccacctccacctagaggctgtgaagtttttgtaggaaaaatacctcgtgatatgtatgaagatgagttagttcctgtatttgaaagagctgggaagatatatgaatttcgacttatgatggaatttagtggtgaaaatcgaggttatgcttttgtgatgtacactacaaaagaagaagcccaattagccatcagaattcttaataattatgaaattcgaccagggaagtttattggtgtgtgtgtaagcctggataattgtagattatttattggagctattcccaaggaaaagaagaaagaagaaattttagatgaaatgaagaaagttacagaaggagttgtagatgtcattgtttatccaagtgcaactgataagaccaaaaatcgtggttttgcatttgtggaatatgaatctcacagagctgctgctatggcaaggaggaaactaattccaggaacattccaactatggggccacaccattcaggtagattgggctgacccagagaaagaggtggatgaggaaaccatgcagagagttaaagttctttatgtaagaaatttaatgatctcaactacagaggaaacaattaaagcagaattcaataaatttaagcctggtgcagttgaacgggtaaagaaacttagagattatgcttttgttcactttttcaaccgagaagatgcagtggctgccatgtctgttatgaatggaaaatgcattgatggagcaagtattgaggtaacactagctaaaccagtaaataaagaaaacacttggagacagcatcttaatggtcagattagtccaaattctgaaaatctgattgtgtttgctaacaaagaagagagccacccaaaaactctaggcaagctgccaactcttcctgctcgtctcaatggtcagcatagcccaagtccgcctgaagttgaaagatgcacttaccctttttatcctggaacaaagcttactccaattagtatgtattctttaaaatccaatcattttaattctgcagtaatgcatttggattattactgcaacaaaaataactgggcaccaccagaatattatttatattcaacaacaagtcaagatgggaaagtactcttggtgtataagatagttattcctgctattgcaaatggatcccagagttacttcatgccagacaaactctgtactacgttagaagatgcaaaggaactggcagcccagtttacattacttcatttgggtcctatttcggtggagtacgcaaagcctgaggtcttgtctatggacagtaacacagaaatccttatggtgcttgactacctatgtactgactatgggatacccatcatgaattgggtgttatttgatcacgaaattcataaagttgagcatgttcaacagcactgctacaaagtggaatatggtgacagtctagaagcttcttcctgccatactaccatcacttggcctgttatatcatggaacgcacccaagatcagttggctgagggagaaatctttggaacctagtatcctaaggataatggaagtcaccaaaaacaaatctctttacacatcctatacaaactatatagaaaaataataaaaagcaaatgaaaccacacatgatccacaccttcagcataaccacagaacactacaacttttcaaattacctgttaataaaaataaatatatatggacatcaagttccagcaattatgtttttagctcttgccacaagcctttggagaagaaggggtg

SEQ ID NO: 464322 - DNA, 876 bp, Homo sapiens
gatggagtggagagctttcctcctcatcacctgggtcaggaccatggagctccttgagccttgagattccaggcccaggagcacatcatcattgtgcttcttggggcccaggcgcatctcctaagaacttgttcttagacatgttgtgctcaaacttgtggcatcatagcagtaatagtttacaatatacctacagtttcctgggcagatcatcgtgtgcagaccggctgcagagagaagggaactgtttcactttcatcttcctgggccatttccagatatgaattgcagagacatatttcaatatatcctcacccaaatatgctttagaagtacatttcttttaatgtaataagatttatgtcctttgtgtttgtttagagggtaaatctggatttgtatttttagaagttactttcaccaaagaaattcgaaagaaatagtgtttcagaaaaatcaaaacaagccatagaaatctaatatgtttcagatactatattgggctgcatgaagactaaatccataatatgtatgaataatgtattctaaagtaaatatcatattttgtcaaattatttgtctggcaaaattaagttcttttttctttaaaatgaactttttttcttatttcgaagtgatgtgtatgtaaagaggcagtgtagactggtggttaggagcactctggagtcagaagcctgcttcagaatcttggctacctcacttaccaaggatagagctgtggggagtttacttgttctcactctctcttcttttttccatctgtaaaatggcaaaaataaaccacctaagtaaaatggcctctgcgagagagaaataaattaatatatgttgctatggtttaaatgtgtctcctct

SEQ ID NO: 464323 - DNA, 1036 bp, Homo sapiens
gttctcaaagatgagaactggatggagaggcgctattccgctaaggtggaggaacagggctcggaacagagagaaaccacacagcccaagggcagtgtcatctcctgccacgcacagccttcctccatccaatccatgcagactgacgcctaccctgagctcagccagaccccgggagggaagctgcccttcaaagtgctcatgtccagggtctcattctgtctcccaggctggagtgcaatggcacaatcatggctcactgcagcttcaacctcctgggctcaagcaatcctcccacctcagcctccagagcaactgggactacagagcagtaatagtttacaatatacctacagtttcctgggcagatcatcgtgtgcagaccggctgcagagagaagggaactgtttcactttcatcttcctgggccatttccagatatgaattgcagagacatatttcaatatatcctcacccaaatatgctttagaagtacatttcttttaatgtaataagatttatgtcctttgtgtttgtttagagggtaaatctggatttgtatttttagaagttactttcaccaaagaaattcgaaagaaatagtgtttcagaaaaatcaaaacaagccatagaaatctaatatgtttcagatactatattgggctgcatgaagactaaatccataatatgtatgaataatgtattctaaagtaaatatcatattttgtcaaattatttgtctggcaaaattaagttcttttttctttaaaatgaactttttttcttatttcgaagtgatgtgtatgtaaagaggcagtgtagactggtggttaggagcactctggagtcagaagcctgcttcagaatcttggctacctcacttaccaaggatagagctgtggggagtttacttgttctcactctctcttcttttttccatctgtaaaatggcaaaaataaaccacctaagtaaaatggcctctgcgagagagaaataaattaatatatgttgctatggtttaaatgtgtctcctct

SEQ ID NO: 464324 - DNA, 467 bp, Homo sapiens
ccgaaatttttaaaggagacttgacagcagctgagcctagctgccactgatgctcaagggagctgcgtagtaagggagagcctcccaggagtagtaagggagagcctcccaggagaagaaggaagcacagtctgagctgtgccttttgccttttttgtttgtttctgtaccacagaaactgctgctgcacaggctgtttgccgcacaggcttggtgctgagctgtgaaaagcatgttctgggatcttgtcacttcgcggaggtggcctgtgcagcatgaggcaaagacctggcctgtttagtcaggaagaactgggttggagcctggtgtcctctttaacagctatgtaaccttgggcaaaatacccattcaaatttcagtgttctcctctataaaacagaaatacgtgcgtgtatcagaattattaaaataattaaattttctaatttttaagtgcccagtttata

SEQ ID NO: 464325 - DNA, 2005 bp, Homo sapiens
tttttctgccgtggttcgttcacaaggcgcgactgtaggcagaggctccctgttctgaagctggctgtcagcactcccccaactgccgtctcaagcagagaaagcaagggagggaagcttccaggaccaagccctggtgggcaggtagcagcccacctccagtgagacggagaagttggccggggccagcaatgaaggaccagcctgtctcctccccgagaactgaaaggcaaaaggcacccaaggctgggaagagagcagcagcctcaccaagtaaggaagacaaaatgaagcaatcagtgagggtttcctgggtctacacagggattgaaggagacacttctgggtgatgcgagtgctgcgcagctcagaacccttggaagcatgagaggaggacgagcccggcggcctgccggtgcggtgatggagggctcttcggtagccacactgcgcgcctcccacacacaccttaacagtcttggggccccgggccagcgctgcagcccaaagagaccctgcagccgcattttctcccaggccgtggcaaaccctggcttcgcctcccttcaccatggcttgtgagggcaggaggctcccgggggccgacttccctgacctgaatgagtcaggcacccttctttattttaagtgggggtgtgacctgaggagataaaggaaggacgacagacctggggagtggggccctgcagcctcttgggcccggagcgcactccttctcgctccctcccctcaccggcaggatcgggggtcttgaaactggagccgctcaccggccggcggatgagagataaaggagcccggcgacgcgaatgcgtttgaccagcagacccggatccggactttcccgcgctccagagcagcacccgaaaccctacttcccaggtggcacgacggctgagcagctcctccggtgccatacggtgtctccaggcacagacagtcgtgctcgcgtgtgtactgtgcacgcacaagactgcaggatgatgtcctgtatgagccctgtattagcccctttgctctcagccagaggcttcctgggagacccactgcgccgggtgtggggtctcaattcctgtgctgataagcactatcttctggagctgggtgaccctagtgcccagggcgggaagtcgggagctggccggagtgccgctgaggcgatcccggcggttccaaggccatggctgaccacgcgcaactgggttgcaaagcctggcgggcctcggtctctaaagcagccacgccaggcaaaccttgaccacatcccgggggtgcccttgggcctctgcgccgggctcctgcagactgaggtcgctggtctctgggctccaaggccgcctctaccccgcagaatccgggagctggaagggagcccgcggtttggcgaggtcgccgttcgggctcacggcctcgaggctgccctctgctggcactgggcgacattaccaccgcctccctcggcggctcaggagctgcacccacgtgagggagtggctgccgcacctgcagccactgacgagaccctcccgtatttctcaatccgagacttctccccgcagacaccagaggctccggtgctcggacccagggacaaggcagagagccggagctctgcgctggcaatcccgccgctttggcccgccgggatccgcggccaaccagggcacggccacaggcggacgctgggggactccggggatggccccaggctgtgttcgtcccctttactctccgccaccatagcattgattggcgcccacggaagagggccttctagcccctgctgccagccatctccctctgctggagaccagtgtagctggggtggtgagagggacatcttgaaagatggcaggaaccagcaatgtgtctgaagagctgtcctagcctgcttctaggaccaaagccctgtatccccaactggcacacaagatgatgtttgtgacctgggctactgtgtacagtgtcttgtaatggttaggag

SEQ ID NO: 464326 - DNA, 565 bp, Homo sapiens
tttttctgccgtggttcgttcacaaggcgcgactgtaggcagaggctccctgttctgaagctggctgtcagcactcccccaactgccgtctcaagcagagaaagcaagggagggaagcttccaggaccaagccctggtgggcaggtagcagcccacctccagtgagacggagaagttggccggggccagcaatgaaggaccagcctgtctcctccccgagaactgaaaggcaaaaggcacccaaggctgggaagagagcagcagcctcaccaaaaactgctgctgcacaggctgtttgccgcacaggcttggtgctgagctgtgaaaagcatgttctgggatcttgtcacttcgcggaggtggcctgtgcagcatgaggcaaagacctggcctgtttagtcaggaagaactgggttggagcctggtgtcctctttaacagctatgtaaccttgggcaaaatacccattcaaatttcagtgttctcctctataaaacagaaatacgtgcgtgtatcagaattattaaaataattaaattttctaatttttaagtgcccagtttata

SEQ ID NO: 464327 - DNA, 1992 bp, Homo sapiens
atggacagagcctttgcttcatcaggcagaggctccctgttctgaagctggctgtcagcactcccccaactgccgtctcaagcagagaaagcaagggagggaagcttccaggaccaagccctggtgggcaggtagcagcccacctccagtgagacggagaagttggccggggccagcaatgaaggaccagcctgtctcctccccgagaactgaaaggcaaaaggcacccaaggctgggaagagagcagcagcctcaccaagtaaggaagacaaaatgaagcaatcagtgagggtttcctgggtctacacagggattgaaggagacacttctgggtgatgcgagtgctgcgcagctcagaacccttggaagcatgagaggaggacgagcccggcggcctgccggtgcggtgatggagggctcttcggtagccacactgcgcgcctcccacacacaccttaacagtcttggggccccgggccagcgctgcagcccaaagagaccctgcagccgcattttctcccaggccgtggcaaaccctggcttcgcctcccttcaccatggcttgtgagggcaggaggctcccgggggccgacttccctgacctgaatgagtcaggcacccttctttattttaagtgggggtgtgacctgaggagataaaggaaggacgacagacctggggagtggggccctgcagcctcttgggcccggagcgcactccttctcgctccctcccctcaccggcaggatcgggggtcttgaaactggagccgctcaccggccggcggatgagagataaaggagcccggcgacgcgaatgcgtttgaccagcagacccggatccggactttcccgcgctccagagcagcacccgaaaccctacttcccaggtggcacgacggctgagcagctcctccggtgccatacggtgtctccaggcacagacagtcgtgctcgcgtgtgtactgtgcacgcacaagactgcaggatgatgtcctgtatgagccctgtattagcccctttgctctcagccagaggcttcctgggagacccactgcgccgggtgtggggtctcaattcctgtgctgataagcactatcttctggagctgggtgaccctagtgcccagggcgggaagtcgggagctggccggagtgccgctgaggcgatcccggcggttccaaggccatggctgaccacgcgcaactgggttgcaaagcctggcgggcctcggtctctaaagcagccacgccaggcaaaccttgaccacatcccgggggtgcccttgggcctctgcgccgggctcctgcagactgaggtcgctggtctctgggctccaaggccgcctctaccccgcagaatccgggagctggaagggagcccgcggtttggcgaggtcgccgttcgggctcacggcctcgaggctgccctctgctggcactgggcgacattaccaccgcctccctcggcggctcaggagctgcacccacgtgagggagtggctgccgcacctgcagccactgacgagaccctcccgtatttctcaatccgagacttctccccgcagacaccagaggctccggtgctcggacccagggacaaggcagagagccggagctctgcgctggcaatcccgccgctttggcccgccgggatccgcggccaaccagggcacggccacaggcggacgctgggggactccggggatggccccaggctgtgttcgtcccctttactctccgccaccatagcattgattggcgcccacggaagagggccttctagcccctgctgccagccatctccctctgctggagaccagtgtagctggggtggtgagagggacatcttgaaagatggcaggaaccagcaatgtgtctgaagagctgtcctagcctgcttctaggaccaaagccctgtatccccaactggcacacaagatgatgtttgtgacctgggctactgtgtacagtgtcttgtaatggttaggag

SEQ ID NO: 464328 - DNA, 3377 bp, Homo sapiens
gctttataacaatggtgagagcgtttccagttttcccacgttttcctgcatgaggcttgggcagaccctcccttctctgagaatctgggggatggaattcaccaaaaccacctgtcgctcccaagccaaagactaccagtccactgacgccagtgaccgcgcccaaattcccttcctcagccaggcccgagagtcttcacagctgactgccccaaacgagtggagagccagtgtgtacctgaatgacagcttgaacaaatgcagcaacgggcggctgccctgtgtagacagggggcttgatgaggggccccggtccatcccaaagtgctctgagtcggagaccgacgaggattacatcgtggtccccagggttccgctgagggaggatgaacccaaggacgagggcagtgtggggaacaaagccctggtgtctcccgagtcctctgcggaagaggaagaggagcgtgaagagggaggcgaggcatgtggcctggagggtacaggagctgtgcagccacacagggagtgcagcctggaggacagtgggccttgggctggagagggggtcttccagagcgacctcctcctgcctcacatccatggagaggaccaggagccccccgacacccccggggaggcagaggaggatgatgaggaaggctgtgccagcacagacccagcaggggcagatgagggttcgggtcctgacaggcccacggaggacatgggacaggatgctgaggacaccagtgaggagccccctgagaaggaggagctggccggggtccaggaggcagagacagccacagactgccctgaagttcttgaggagggatgtgaagaggccacgggtgtcacaggtggggaacaggttgacctcagtgaaccacctgaccacgagaagaaaaccaaccaagaagtggcagccgccaccctggaggaccatgcacaggatgagtccgccgaggagagctgccagattgtcccttttgagaatgactgcatggaggacttcgtgacttccctcacaggaagcccctatgagttcttcccaactgagagcacctctttttgcagcgagagctgttctcctctttctgaatcagcgaaaggtttagaatcagagcaggcaccaaagctggggctgcgtgcggaggagaaccccatggtgggggctttgtgtggccagtgtggctccctacagggtggagcggccgagggtcccgcagcccctgatgtggtggtcgtgctggaggaggaggccttggatgatgcactggccaacccctatgtgatgggagtgggcctgcccggtcaggcggcccctggagaaggagggcaggctgcatcggacgccctgggtggttatggctcgaaagaagaattgaactgtgaggcagagggtggcctggttcccgcggacaggaagaacaccagcacgagggtccggccccactctgggaaggtggccggctatgtcccagaaaccgtccctgaagaaaccggacctgaggcgggctcgtcagcccctggcattggaggtgccgcagaggaggtgggaaagacgcttttgtcattggaggggaagcccttggaagccagcagggccttgccagcaaagcccagggcctttactttataccctcggtcgttctccgtggaaggccgagagattccagtgtccgtgtaccaggagcctgaggggtcagggttggatgaccacaggataaagaggaaagaggacaatctctctctgtcgtgtgtaattggctcctctgggagtttctcccagagaaaccaccttccgtccagcggcacctccacgccttcttccatggtcgacatcccacctcctttcgacctggcctgcatcaccaagaagcccatcacaaagagctctccctcactcctgatcgagagcgactccccggacaagtacaagaagaagaagtcatcctttaagcgcttcctggcactgacgtttaagaagaagacggagaacaaattgcatgtggatgtgaacgtgtcttcctctaggtcctcttcagagtccagctaccacgggccttccaggattctggaagttgaccggagaagcctcagcaactcccctcagcttaagtctcggactgggaagctccgggcttctgaatccccctcctccctcatcttttatagagatggcaagaggaaaggtgtccccttcagcaggacggtgtccagagtggagtcctttgaagaccgctcccggccgcccttcctgcccttgccactgaccaagccacggtccatctccttccccagcgctgacacttcagactatgagaacattccagccatgaactcggactatgagaatatccagattccaccccggagacctgccagggctggcgcgttcacgaagctgtttgaagatcagagcagagccctgtccacagcaaacgaaaatgatggctacgtggacatgagcagcttcaacgcctttgagagcaaacagcagagtgcagaccaggacgcagaaaggtacctgacattctatttcctttcttgttcggcagctgtaactgtccaggaggcagcgtgggtgtgggggacagatggacttgctttccagcctcaggctctgtttcttactagctgtgttgacttgggcgcctacacagagccctacaaagtctgtcccatctcgtcggcagcccccaaagaggaccttacgtcggatgaagagcagagaagctcggaggaggaggacagtgcttcaagagaccccagtgtcacccacaaggtagggcaccccacagtttcctcatctgtgaagtggaaatcatgagggtgagatgtgttaaaggctatcagggaattttgtgaactgaaaagttttagatgaaagctggtttccctggccctgcagcagtgctgtgaggggatggagttgctggagggaggttgctgtctagaggctgatgtcccttctctctccagtggctccttcacaccctccccacccccttcccctctcactcatctccccgctgcctcttcctctctaggtactgagccacgtatctggcactgtcctgaggttgtccatgtttgtcatctccttgactccttacaacaacttcaaagttggcaccattactcctgttttacagttgaggacacagaggttctgagaggttaagtaacttgcccaaggccacacagctagtgaatgaaggggtcaggtctcaagcacagctctggctggctccaagtccagtgttgcctatcactgcgggccttctctgacctctccactcctcctctcccaagaaggagtattgtctccttgtggagaagggaggagagccttgagttagtcgtgcccattt

SEQ ID NO: 464329 - DNA, 917 bp, Homo sapiens
gcctccttgctacttatgcaaactcctacagccagcttaaatttctcctcagaaaatgggtttttattttctactgcatcatcaggctgcaaattttctgaagttttatgccctatccattctgaactcttggaatcacactggaattcccataaaaagaatgttatgagtgaatggagggactcttcatttgacaccagaaaccaaatcattggtgaatatcgacagatatactgcaggatctatgtttctttagcatgtcctgcaaataggaccaagaaaatatacaatcatccagtaaatattgcacccttgtctacatacaaccagtacgctactgtgatttatattttctttcccatgaggaaagaagtgggagaggtggtagtgaaggaagagagcaaagaaagaagtcagagaggttcacattcagtgaagattgtttcaagtaaagctgtctgatatagagacatggttgctagggagacagagtcataatggctgatgttaccagggaaggatgaatgaatgagtttatgctcaccgatctctcaatctgtggtgaatattcttttggaaaaaccaacatggtgcaaatcttttggtttataaaactagatgtcttcatctgcagtaccctagaactctttagtgacgttccaaggccagagccaaagagcatctgcagcttagtctgagataagggagttttcagattacggcatctgaccaaagtacatgggatcaaccactgtcctttaagaaaaggttgccactgttttgcttcatatgtgaagaaggcatgagtcaagctgaagaataaattggcaccccattagattgagaagccacatcttgtagcccagaatatcttttagaaagcaaaactggattaaaaaagagaaagaaatgttctt

SEQ ID NO: 464330 - DNA, 3072 bp, Homo sapiens
gagagcaagcgagggctctgaggactgccagcatgctgtcacctctcacccccagccaccaactgaatacattgagggactgtagtccctgccacatggagcaggagaattcctctgccaattaccaacctctgtctgaattcctgacctgcaaaatctttgagcaggcctcactgacctccctgtcaggtaatcacctgtctctgtgtctggtttgtgactgcctgaggattccttgcacctggtgctccctccacataaggtccggctccatcctgatacagacgttcctaagatatattcctttagcggaagactcttgcatccatagaaatgcagctgcctcttccacggatgacaccttcacaaattctttcccaccacattgtgtgctgctgactagtgtgctgcaaagaagagaggttaagaacaccagcttcatggtcagccagaaccagttcataatcccaattctgcttacttatttttgactgtttaatacggagcccactgcttcacctctttaggtcttagtttcctggccttaaatggaggcaaaattatgcttgtttcatagggttgttggaaagattaaacaagataccataggcaaaggtctcagcacaatgtctattcttgagcaaatgcttaataaatgacactgattgttcttagaaaatatattaactaggtctttaatatcctaacatatttggttgtttttaaagcggtgtcttaaaagctaaaataagctgcctactcatttcgagtacatggtgatctacaagttcagaactattttcacaataacacttagagatgccattgcctgtttcggtgcattgacatttgtgtggatggtgtgaaagcattgatgggtaaagctttgttctgtctggctatgaaaccagtattgcaatgacaccaaaatgcactagtagtcattgttatcctttacaccagtcactgaaaaaaaagaaaaagaaaaagaaaaagaaagcaaattttgctgaagaatgtctttgataaactagtaaggttagtgtttgattaagtctttatccttgaatccttttgacattctgtgtgataaaatgataagttcaaataaaatacttttgctgcatactgtggtatcatagttgttgcaaggacaagcactcgtgtgattgagttgcaagctgaactagccaattcttttcatggaatattatttttcctgaaataacaataaacatacacaagctgtgggtattcagacttggatatttggaggatattttcttgaaaatgaaaggagtgagtttatcactccaaagcagacaactgaaagtgtttgttgcaaatgattaaatttgagttttcaagtgaaaattggagctttgggaaacttgacagcttcccactatttaagagttgatattaatgaatatgggttttcccatattcattatttcccaatgtatgatgtgaccaaatcaagccagagccaaggcattttatttgaagtttaaggtcatgtgcagtttgtttcctgttgctggcatccaaattgatataaatcattgactaaaggcaagttagaggaaatgatatagagatacattcaagacagcatgtatacatgactaatatggatggccgattgaggggatcttctaggattagattacacatgattttgctttatttgatgactttagatcctaaccttttgagttagacgtgactctcttgaaaatgtaatgaccacctacagccactgttattctgtaaaagtcaccttgatccccatgccccaaatggtaaggacataatgtacagcatagttctttaaattaaaataaacttatatgtttaaaaaatatattgcatttgtcatatttttgccatcatattgcaacactgacaagtgttgtgggcattgtcttcctggtgctcatcctcttcgtgtgggaagtttactatcattttgtacccaacaatctattctaaacattttgatattaaaaaaatcaagaaccttatttttaatgtctgcccatttggcggtctacctttgggtataatatcatttgctaaacggttcctataatgttggacatttggtttgtatctgtttttcaaaaaatgattatgcataacacttcaaagaacatattgtccttaaatctcagtctgccttttgggttaaatatttaggaaagacactcgatcataacaccggctcacatctctcaggccctcccgtgggccagcccctgtctgtgctgagagctgtgcctgtgcttgcccaggtgttcctagcagttgtcttaacagaactcataccatgatccccattttttcagatgagaacaccaaggaaggctctttcctactctctgtatctgtgcaccttcctgtcctgtgaccagaggacagggaagcaggaaacacaacagtgtttacctgggctctcttccacctgggggcttccctcacaccaccctctgttctggcccagaactcttccctgacttcctccatcttagcactgatggcccacctatcagaccacttactcacaggagaagaaagactgtccatttctgagtccaggctgtcagttaccaagttattgtactgtcagttagcctgcacaccagtgtggaacatcgggcttctttcagcagatccagagctttctgcctgcaaagcccccatagggctggtggctaccactgtgcatgaagaagctcagctcatcacccacctacgtagaatgaaaggacatctgttatgcagagtggcagtatggagagtcccctctgggcctgctcagtgaacacccccctaataaatttgttgctggattcagacctcaagcacatcacagccacattcttcctgctgcctctgctcccagaatctgtggaagggccagggtctctgctgggttcttcccatctgtgatgctcactgatgtccacttgtcctgccttcttccctctctatagagtcaggcagtctgggttctggctcccttgccccgctcctcagaggggtcctgtcccttttatctccagtgct

SEQ ID NO: 464331 - DNA, 1680 bp, Homo sapiens
agtgcctgaggcagctctggctcggagagccttttgctagccccacggggacctctgtgcacggatggacccgcccggacctggcgggaagcggcctggcaggcggcggccccggcggcatcagcagagacaggacggggccgacgccgcgggcccctgaggcgtgcgtgcccaccgggcccggcggcggcaccatgatgccgggcgagacccattcggcggcgcccgggacggcggcggacctgtcgcgatgtcagggctgcgcctctctgcagcagaatttgaatgaatatgttgaagcattaattaccttgaaacaaaaaattatcaatacagataatttgttaacagaatatcagaagaaatgtgatgatatccttttactggctttttctgttgagttttggaactaacttatgtttaattcctgaaagagatgtgagaattgttcctcataggccttctggaagatagtacttaacaggcttcagtagggagcatgtctcacaagcacagtaaacagacagtccttttattcttaatccatgtttaatgatgagttttaaaaatgagattacttttcttgttgattgtgattttcttaacgtctcataagctttttagtgggtgggtttctcttaatttgtactgaggatgtggcatgttttttaggtttacgaataatgtgaaactgaatgtgatacttgctgaatgttatttttgaatctgcaagaagtacagtatgggaaattcaaaatgttgggcaattgactttcattaattatttttgtgatttacagggaaatgtgtgtgtatatatatatctccaaaatcatagaaatagcgttgctgtatattcatgaacgctgtgggcagtcagaagacaattcttggccttacagtcaccacttttctttaaagttgtatcaggatactcatcaggaatatgctcgtgtaaaggaagaatgcttgaagagtgatgctcagaagaagaaactagaagctaaggtgaagaagctgcaagaaaaacctgccaaagcaatcaccagctccagagtgcctggggaagatggtacgctacctccaacacagggcagccctctcaggacctcaaatgtgcagacatgcctcacaaaactgtccatggagataaaggaggactttttatgtcaaaatgtggaaaaacagagctccagtggaacaaattgtagttctgaccatgtttttaatgagaatggaaatcttgaggttttagtacaaagtcatcgtgacggtggtagtactgaatttgttgatcatgatcatttttttgatgaagatcttcaagctgcaattgacttcttcaaacttccccctcctcttctgtcaccagtgccctcgccccctccgatgtcatcacctcacccgggttccttaccgtcttcatttgcacctgacctgccagcacttgagtgcagtggaagtcatgcagctctgatgtcatccagtaagagtatggaagaggagaagatggagtcccagtcaggaccctggggaaccgtccctatgagcaagttgatgtcagcagctgttcatcttcaccagtccactgttctctaacagaatagagacaaggtggttgatgctgtcagtgcacgccaagtgggccacatgctctaggcagttaactcaagaggagac

SEQ ID NO: 464332 - DNA, 2350 bp, Homo sapiens
gggctccctcctccccctcccaccccagtaatttcaatccaagatttgtggtctgcattatgtctggagccagaagtaagcttgctcttttcctctgcggctgttacgtggttgccctgggagcccacaccggggaggagagcgtggctgaccatcacgaggctgaatattatgtggctgccgtgtatgagcatccatccatcctgagtctgaaccctctggctctcatcagccgccaagaggccttggagctcatgaaccagaaccttgacatctatgaacagcaagatgtacagattatagtgtttccagaagatggcattcatggattcaactttacaagaacatccatttatccatttttggacttcatgccgtctccccaggtggtcaggtggaacccatgcctggagcctcaccgcttcaatgacacagaggtgctccagcgcctgagttgtatggccatcaggggagatatgttcttggtggccaatcttgggacaaaggagccttgtcatagcagtgacccaaggtgcccaaaagatgggagataccagttcaacacaaatgtcgtgttcagcaataatggaacccttgttgaccgctaccgtaaacacaacctctactttgaggcagcattcgatgttcctcttaaagtggatctcatcacctttgataccccctttgctggcaggtttggcatcttcacatgctttgatatattgttctttgaccctgccatcagagtcctcagagactacaaggtgaagcatgttgtgtacccaactgcctggatgaaccagctcccactcttggcagcaattgagattcagaaagcttttgctgttgcctttggcatcaacgttctggcagctaatgtccaccacccagttctggggatgacaggaagtggcatacacacccctctggagtccttttggtaccatgacatggaaaatcccaaaagtcaccttataattgcccaggtggccaaaaatccagtgggtctcattggtgcagagaatgcaacaggtgaaacggacccatcccatagtaagtttttaaaaattttgtcaggcgatccgtactgtgagaaggatgctcaggaagtccactgtgatgaggccaccaagtggaacgtgaatgctcctcccacatttcactctgagatgatgtatgacaatttcaccctggtccctgtctggggaaaggaaggctatctccacgtctgttccaatggcctctgctgttatttactttacgagaggcccaccttatccaaagagctgtatgccctgggggtctttgatgggcttcacacagtacatggcacttactacatccaagtgtgtgccctggtcaggtgtgggggtcttggcttcgacacctgtggacaggaaatcacagaggccacggggatatttgagtttcacctgtggggcaacttcagtacttcctatatctttcctttgtttctgacctcagggatgaccctagaagtccctgaccagcttggctgggagaatgaccactatttcctgaggaaaagtaggctgtcctctgggctggtgacggcggctctctatgggcgcttgtatgagagggactaggaaaagtgtgtggtctgtggggcggactctggccatcatgttgacagccttgcacttccacaggctacaagccctgggaccatctttctgccttaagggcaggagcccacttctgtggcaccagattccaccctgggaactgtggaaaaagtaggagaggcagattccctcagtgtcttcctcttaaacctcaatcatcgagacattagggggtattttctgttcacatttatctttttcaagccacatcttcctctaacaaatctctcagtatgcgattggtctcaagctaaaacaaaaataaatgtcagtttatattttacacatccacaaagcagtggcttggggtttttttttttttttttatcttgttgatcaagtgacacccaggacatgtaaatatttcataagccttaaacatttcctgaggtaagaaacaagctctcaaagcaaaagctcaattagaaatggcccttgtggggaaccttcccattctggtcgaccagaactctagccagatgaaatggcaatgctagcgccaccagcaacgtcagaaacgtagaccttaaagcggttttaaaaatagaaaagaagcgttcctcacatctgccagtaatggaattttctgtcagtaaatggaatgtgtaggcaggacctggaataactggagagagtgcaacgcttcggggtgaagggcgggtggggactggaaatgttgagacgggggcagccatgggaag

SEQ ID NO: 464333 - DNA, 2182 bp, Homo sapiens
ccaacagaatgatgtagcgaggcgtcccggtttatttcatacggggcgggcgttagtcttattactcgtggcgtcggcgccataatcaataacagcaagtgatgactgcagcccaaaaggatgtacagattatagtgtttccagaagatggcattcatggattcaactttacaagaacatccatttatccatttttggacttcatgccgtctccccaggtggtcaggtggaacccatgcctggagcctcaccgcttcaatgacacagaggtgctccagcgcctgagttgtatggccatcaggggagatatgttcttggtggccaatcttgggacaaaggagccttgtcatagcagtgacccaaggtgcccaaaagatgggagataccagttcaacacaaatgtcgtgttcagcaataatggaacccttgttgaccgctaccgtaaacacaacctctactttgaggcagcattcgatgttcctcttaaagtggatctcatcacctttgataccccctttgctggcaggtttggcatcttcacatgctttgatatattgttctttgaccctgccatcagagtcctcagagactacaaggtgaagcatgttgtgtacccaactgcctggatgaaccagctcccactcttggcagcaattgagattcagaaagcttttgctgttgcctttggcatcaacgttctggcagctaatgtccaccacccagttctggggatgacaggaagtggcatacacacccctctggagtccttttggtaccatgacatggaaaatcccaaaagtcaccttataattgcccaggtggccaaaaatccagtgggtctcattggtgcagagaatgcaacaggtgaaacggacccatcccatagtaagtttttaaaaattttgtcaggcgatccgtactgtgagaaggatgctcaggaagtccactgtgatgaggccaccaagtggaacgtgaatgctcctcccacatttcactctgagatgatgtatgacaatttcaccctggtccctgtctggggaaaggaaggctatctccacgtctgttccaatggcctctgctgttatttactttacgagaggcccaccttatccaaagagctgtatgccctgggggtctttgatgggcttcacacagtacatggcacttactacatccaagtgtgtgccctggtcaggtgtgggggtcttggcttcgacacctgtggacaggaaatcacagaggccacggggatatttgagtttcacctgtggggcaacttcagtacttcctatatctttcctttgtttctgacctcagggatgaccctagaagtccctgaccagcttggctgggagaatgaccactatttcctgaggaaaagtaggctgtcctctgggctggtgacggcggctctctatgggcgcttgtatgagagggactaggaaaagtgtgtggtctgtggggcggactctggccatcatgttgacagccttgcacttccacaggctacaagccctgggaccatctttctgccttaagggcaggagcccacttctgtggcaccagattccaccctgggaactgtggaaaaagtaggagaggcagattccctcagtgtcttcctcttaaacctcaatcatcgagacattagggggtattttctgttcacatttatctttttcaagccacatcttcctctaacaaatctctcagtatgcgattggtctcaagctaaaacaaaaataaatgtcagtttatattttacacatccacaaagcagtggcttggggtttttttttttttttttatcttgttgatcaagtgacacccaggacatgtaaatatttcataagccttaaacatttcctgaggtaagaaacaagctctcaaagcaaaagctcaattagaaatggcccttgtggggaaccttcccattctggtcgaccagaactctagccagatgaaatggcaatgctagcgccaccagcaacgtcagaaacgtagaccttaaagcggttttaaaaatagaaaagaagcgttcctcacatctgccagtaatggaattttctgtcagtaaatggaatgtgtaggcaggacctggaataactggagagagtgcaacgcttcggggtgaagggcgggtggggactggaaatgttgagacgggggcagccatgggaag

SEQ ID NO: 464334 - DNA, 2406 bp, Homo sapiens
gagctggagcgttttcggggctgtaaagggagaatggcgcatgcggcatattcagggcggaaggcgcgctaagagcagatttgtggtctgcattatgtctggagccagaagtaagcttgctcttttcctctgcggctgttacgtggttgccctgggagcccacaccggggaggagagcgtggctgaccatcacgaggctgaatattatgtggctgccgtgtatgagcatccatccatcctgagtctgaaccctctggctctcatcagccgccaagaggccttggagctcatgaaccagaaccttgacatctatgaacagcaagtgatgactgcagcccaaaaggatgtacagattatagtgtttccagaagatggcattcatggattcaactttacaagaacatccatttatccatttttggacttcatgccgtctccccaggtggtcaggtggaacccatgcctggagcctcaccgcttcaatgacacagaggtgctccagcgcctgagttgtatggccatcaggggagatatgttcttggtggccaatcttgggacaaaggagccttgtcatagcagtgacccaaggtgcccaaaagatgggagataccagttcaacacaaatgtcgtgttcagcaataatggaacccttgttgaccgctaccgtaaacacaacctctactttgaggcagcattcgatgttcctcttaaagtggatctcatcacctttgataccccctttgctggcaggtttggcatcttcacatgctttgatatattgttctttgaccctgccatcagagtcctcagagactacaaggtgaagcatgttgtgtacccaactgcctggatgaaccagctcccactcttggcagcaattgagattcagaaagcttttgctgttgcctttggcatcaacgttctggcagctaatgtccaccacccagttctggggatgacaggaagtggcatacacacccctctggagtccttttggtaccatgacatggaaaatcccaaaagtcaccttataattgcccaggtggccaaaaatccagtgggtctcattggtgcagagaatgcaacaggtgaaacggacccatcccatagtaagtttttaaaaattttgtcaggcgatccgtactgtgagaaggatgctcaggaagtccactgtgatgaggccaccaagtggaacgtgaatgctcctcccacatttcactctgagatgatgtatgacaatttcaccctggtccctgtctggggaaaggaaggctatctccacgtctgttccaatggcctctgctgttatttactttacgagaggcccaccttatccaaagagctgtatgccctgggggtctttgatgggcttcacacagtacatggcacttactacatccaagtgtgtgccctggtcaggtgtgggggtcttggcttcgacacctgtggacaggaaatcacagaggccacggggatatttgagtttcacctgtggggcaacttcagtacttcctatatctttcctttgtttctgacctcagggatgaccctagaagtccctgaccagcttggctgggagaatgaccactatttcctgaggaaaagtaggctgtcctctgggctggtgacggcggctctctatgggcgcttgtatgagagggactaggaaaagtgtgtggtctgtggggcggactctggccatcatgttgacagccttgcacttccacaggctacaagccctgggaccatctttctgccttaagggcaggagcccacttctgtggcaccagattccaccctgggaactgtggaaaaagtaggagaggcagattccctcagtgtcttcctcttaaacctcaatcatcgagacattagggggtattttctgttcacatttatctttttcaagccacatcttcctctaacaaatctctcagtatgcgattggtctcaagctaaaacaaaaataaatgtcagtttatattttacacatccacaaagcagtggcttggggtttttttttttttttttatcttgttgatcaagtgacacccaggacatgtaaatatttcataagccttaaacatttcctgaggtaagaaacaagctctcaaagcaaaagctcaattagaaatggcccttgtggggaaccttcccattctggtcgaccagaactctagccagatgaaatggcaatgctagcgccaccagcaacgtcagaaacgtagaccttaaagcggttttaaaaatagaaaagaagcgttcctcacatctgccagtaatggaattttctgtcagtaaatggaatgtgtaggcaggacctggaataactggagagagtgcaacgcttcggggtgaagggcgggtggggactggaaatgttgagacgggggcagccatgggaag

SEQ ID NO: 464335 - DNA, 773 bp, Homo sapiens
aaagttctacacttcggactctcaatgctcttccagaacccactctttatgactgtactcagcattagtgatggcacaaaagagaagctttgtgttctactgctcagcgcacattcggccaggttcctcttgcagggccttcagccttcctcttgctttgatcgggatgatgccaccaagtggaaggagttgttggatacacattttctaaacaggttcttccccgtaatccctgctaggaagatgatgggtacagtgttgagaagaagcaatcatggtaacagcagcttaaacgaagtggaagtttctctttcttacatttcaagaggagtggaatccgtcagtttggggctgatatggtgccatatgttgttagacactcattccttttccaccctggcatcccttgtttcatggcatcctgcacatcagcagcaacaagaagaaagaagaatacaagaagaaagaacaagatcatgggccaggaaatacttcagtaaaggcatgattacatgattcccaagaagttcagaagaaactgctgtgtgatttgcttgctatgttcctgctctggggacacaagacattgtttttgaaaggtgacaattctctaatcatggtacacagagataaatactttattttcctccagggagaaaaagagatgcagtaaatgcttaatgggtttttcttcaatgccacaaagtcagtagctataaatcttgaacacaagttgaattgtttttgactttttatttccttaggatgttttg

SEQ ID NO: 464336 - DNA, 1920 bp, Homo sapiens
agaatggtgaaaatgtatccttgtaacttgtgaatgtatggctgcttttcccaacatggctcaagggtctcgagtatcctcagggccattgcacgtaatgcttattgcttttatgaataattttggcaaagacgactgttcatgtatgagcaccatgcttcgagctgcattctattaatgagtggcttgaggactcaggaggaacccaaagagaagccagagatgtggcttccaatgccagcagcattgtttatttagctctggtgccaaagaaaaggctgggttctgacgcaacgccatgacaaaggttgaggaggtcgaatccagacaggaaatccttcaactcctaagcggaactctgccccttccagcccggggcctggaagcctgccagcatctcaccagtcctggatactctcaggaacaggcagatcttttccttgaagaaatcattccctagctagagtgccaggtggaattaacctgcatttctgggtcatccttaatggttaatgattaaaaagatgaagggagccttgggaagcaattgactttaggcatctgtatgtgccaaggaattaaaatccataacataatagccagagctggaaaggctccccaaggcccatgacactccttccacctcatggcccctttctgttttccagcaagatctttgcaggagtttgccactgtcctcaggaatcttgaagatgaacggatacggatgattgagaatgccagcgaggtgctcatcactcccttggagaagtttcgaaaggaacagatcggggctgccaaggaagccaaaaagaagtatgacaaagagacagaaaagtattgtggcatcttagaaaaacacttgaatttgtcttccaaaaagaaagaatctcagcttcaggaggcagacagccaagtggacctggtccggcagcatttctatgaagtatccctggaatatgtcttcaaggtgcaggaagtccaagagagaaagatgtttgagtttgtggagcctctgctggccttcctgcaaggactcttcactttctatcaccatggttacgaactggccaaggatttcggggacttcaagacacagttaaccattagcatacagaacacaagaaatcgctttgaaggcactagatcagaagtggaatcactgatgaaaaagatgaaggagaatccccttgagcacaagaccatcagtccctacaccatggagggatacctctacgtgcaggagaaacaagggagtccgggtagagaaggaaaaggcattttcatgcgctgggtagctgcatccctgggaactctgcccggaatccttttctctcaaagactcctgtactttcctttttcaccaatgtcctttagcgaggaggtgattgctgctagatgccctgctgtcctgccttccacaggttccccagctccacctgctggaccagagaggcagaggatcaaaatgcaagggccagggttggaggagatatggtgttgggtagcaacttgccctgtaatagatggagagctgttttctccatggctcctgcagtgtgagaggccaggggttatcaccatgcaagctttgtcggaagaggaccggaggctctggatggaagccatggatggccgggaacctgaacaagttgagggtgtttgccgtcaccactcttactcagcagaggactggaagtcctagtcagtgcagtagggcaagaaattaatataacaggcatacagagtggaaagaaaggaatgtgcagtataccttttactgagatatttggtgtagggccagttcctgcactgcttaaatgtcattaattcaaaggtttatcatcaatttaataatcacttttgaggagcaagagggaaacatctcattaaagataaagaaggattataaaatgcatt

SEQ ID NO: 464337 - DNA, 478 bp, Homo sapiens
tcggtaccccttctagaggttgtggcgggtattgtggcatcttagaaaaacacttgaatttgtcttccaaaaagaaagaatctcagcttcaggaggtaagagactttattagtatcctgaataaagtgttcaatttgtacatgatgctgtggatatgtgctggttgctctttgctagaaaatcttagggttagaagggacctgggaagccaggagattgctcctgatccctcatccagtgcctgatgcctggactgcctttgtgtcctcccatcccaccccatcctttgtagccttcccgcctgtcaaggtggaagacactgctggccgagatgaccacctccttgttgggctgccctgattgctagatgtcttcatttcatactgacatttcttttcctgtttctctcacccttggccttaattctgccctctgttactttaccttttgacttcctgcctcttatcagtgatttgaa

SEQ ID NO: 464338 - DNA, 1408 bp, Homo sapiens
gtcatgtatacatcacggagctcatcaaggacgggaagtcactcataagcgcgctcaagaatttgtcttcagcgaagcggaagtttgcagattccttaaatgaatttaaatttcagtgcataggagatgcagaaacagatgatgagatgtgtatagcaagatctttgcaggagtttgccactgtcctcaggaatcttgaagatgaacggatacggatgattgagaatgccagcgaggtgctcatcactcccttggagaagtttcgaaaggaacagatcggggctgccaaggaagccaaaaagaagtatgacaaagagacagaaaagtattgtggcatcttagaaaaacacttgaatttgtcttccaaaaagaaagaatctcagcttcaggaggcagacagccaagtggacctggtccggcagcatttctatgaagtatccctggaatatgtcttcaaggtgcaggaagtccaagagagaaagatgtttgagtttgtggagcctctgctggccttcctgcaaggactcttcactttctatcaccatggttacgaactggccaaggatttcggggacttcaagacacagttaaccattagcatacagaacacaagaaatcgctttgaaggcactagatcagaagtggaatcactgatgaaaaagatgaaggagaatccccttgagcacaagaccatcagtccctacaccatggagggatacctctacgtgcaggagaaacaagggagtccgggtagagaaggaaaaggcattttcatgcgctgggtagctgcatccctgggaactctgcccggaatccttttctctcaaagactcctgtactttcctttttcaccaatgtcctttagcgaggaggtgattgctgctagatgccctgctgtcctgccttccacaggttccccagctccacctgctggaccagagaggcagaggatcaaaatgcaagggccagggttggaggagatatggtgttgggtagcaacttgccctgtaatagatggagagctgttttctccatggctcctgcagtgtgagaggccaggggttatcaccatgcaagctttgtcggaagaggaccggaggctctggatggaagccatggatggccgggaacctgaacaagttgagggtgtttgccgtcaccactcttactcagcagaggactggaagtcctagtcagtgcagtagggcaagaaattaatataacaggcatacagagtggaaagaaaggaatgtgcagtataccttttactgagatatttggtgtagggccagttcctgcactgcttaaatgtcattaattcaaaggtttatcatcaatttaataatcacttttgaggagcaagagggaaacatctcattaaagataaagaaggattataaaatgcatt

SEQ ID NO: 464339 - DNA, 1108 bp, Homo sapiens
tcagagcttcaagtacatgactgatgtggtgtatcccttggggatgggggtgtacacgctggttttgggaagcagggcacttggaaatgtacaagatacaatccaaacttacttgacacataaagaaccaggaaaatgtgattattttttaaaggaaaaggcaatcgattatgttaatcctgagatggcccagatgctgaagttatcagacaaatactttacttgttataaccaagcccatgaggtaaagccagagtgcaaaacctgtggaagccatgggtacgttttaaacaagggagtgatgagatgtgatttacattctaagaacaggcgctcctgtgaagaggaagcctcaggagggagtgagagcagaagggagcccacctgtggttgtctcagcaacagcagaagaacctgggccgctgggagtggagttggagagaaacaggttgatttggaagttcttctgcaggtagaacggaaaggcgaattctgcaagatgctctggggtccactgagctcagctgctgaggctcagctctttctgtggcttcttcttgagcagcctgttgaccaagatgtggcccatgccactccctatattcggagtccattttctgatgccctctctcagctcttcgcctgcactcatctgtgactgcctggtactgctaggaagcctctgtttgtgtctcatctctccaggtggactggagctcctgggggtcctttcctttgtgggggttctcaatatcagaatggagtcgcttatgtcaaaccctaacaaaatggaggtggaggtcacgaattggagcctatatgcgtgcctgtaacaggacttgtcacaaggaatccctgcacatatgtgtatgatggggactatgccaggaactcctcacatatggaggattcgaggtaagccatttgctcaaggacacttacccagcaatggcagcctccactaatgagacatcgcgaactcctgtaatcaatggtctttgtttctaaacagcttatgtggaattctccgtttttttgtctgtaaaagttttctttagccccagtctctttggatatgcctatgattcatcatagcacatgtttccca

SEQ ID NO: 464340 - DNA, 1068 bp, Homo sapiens
tcccccacaatgggagagggcagattttcctcactcagtttactgattcaaatgctaatctcttctggaagcaccttctcagacctactcagaagtaatgcttcacagctgtccagatctgcagtgggcgtagatggtggtttgagggtggcctggaagaagccagaaaatggtagtctggacttgagagaggagagggatgaggtgtgtccagggaggtctgcagggggcagtagatcacagagcacagggaggatgagcgcggagggtgcaggtgacagctctgttgctatgtggggcactctgggcccttcggcagggaacctggaggcaagaaaggacattggttggaagggaccactggtgttgcagagcaacagtctcgaaggctctcggaggctatggctgagaccacccccagaggcctgcttcatatgtggcatgaagcccgtgaggtgtggggagactgccctgggagtcagagttgggcacgcacaaggtgaacgatgcctgctgccattggatgtcatagacctgaggcagcactgtgaacagaacatggaagggtgagagtggatgcatgggtccacacatgtgacaatgggcttttgatagcccagagttctgaacttattctgtgaaaaatgtgagtgagagtcaccctaagtcagaccttcagcaccattttaggcacccataccctaggatgcacatcgtgggattcgtactctgggatccacaccttgggatctcaccctgaccattgcttcgtgtgagagcttgagtattcatgctgtgatgtgtggattatcacccaaagaaacaaggatggagttttcctgccatcgacatcactgactcacaaaggacagcttagaaactgtgaagactcctgagagactagaaggggctggacttgcttttaatcaggtttcaatgcagagacgggtgtcctgtcagttcccttattcagagacacgtttgttgtggcattaataaacaaagtcagcattccctggagaccaacaaaagcctgatccaatgtgagtttgtgcgtttctgtaaaga

SEQ ID NO: 464341 - DNA, 1619 bp, Homo sapiens
catatcccagcattatcatgcgcaccaggaccacatttatatgcactccgagggactcatcatggtaaatttcattcacctagcaacaaaaaaagataattgctaaaagaaaggaaacaccgaggatttcatgagatgtacatataagctgtgtaatcaccacaaatagttacagactaaatcatccttgattccttcttcttcaagtattagagtcattctactaccaagtaccgcagacatctgtcaaacctgtccacctccacaccaagcagcttagtaaaccaaccagctcatgcagactgttgcaataacttgtgaaaacttttgcaaatattttgtatttaggtgatttgggcacatttgagtagctctccagaaaggaagattgtaagggttgatggttgttttcaataaacatgagtctttccttttatgtgaattatgtcttacttcatttaagtatcaaaggagctttggaaagcccaagaataggcagtcagctgaaagagcctgctcaggtcagtattttgggtctaacaggctacaacagggcagagggtatggaggagaaggaagacttaagtcttctgtctgtcttgcctaaagttgtctgcctgactccagggggaaaacctgaaattatccagttggagagtgatgaggctgctggtggatgttgccataaacagtacctagatcatcaaggccttccaggatacagtaacagcatctccacatatgtggaggcactattctaccaagatataaaatgtttccgtgaaaaggagctctatccttcacaaactgagaaattccataatgatagttcaaagaactatattcaggtcaagttatgatgtcaattcaaaagtttcactaagtacctgttgcttttattttttaaagacataaccattgagtgaatgtcagtttccgttatttcttttccccaaaagttctaattctaacatccgtgtgtttgcttttgtttttactgactactttatggaataacatgacattttttagatgggaaacttcttaccttttaaggaaaaaaatgttttaatgctttgggtttgtgattattagcaaatgaaattttaaaatcagtttaatatccaaaatatgaactctgactggcagtaaaaaacttctatgtcagcgagaatgtttctaactgcaaatcaagaaaacttagtgtcttcagcaataagtaaacatactagttcacgtaacaagagttccagaggtatggtgattcctggttaatccatcaataggtcatcaaggattcagttcttttcatctttccatatcctgccattcttggtgtacaaactttgccttcaaattagctcctttgattatttcaaaatggttacaccaattctagcatcaaagccatgtccaacagattgtgtcttcctgcattactttcttaggaacagctaaatcataactaattttgggagacagcacagtttttaattttcacattttactgctctaaacatttaatagcattttcattaacatttctcttcctcttgactaaattatatattttcttatttatggcttttgtagttcagctctactaaatcaaggaggta

SEQ ID NO: 464342 - DNA, 2887 bp, Homo sapiens
ggtctctacatgtcagaacacagaagttgtgttttgtttcgttttgttttacagagctgtgtgtcacatttgaagacgagcactgaggatgaggaaccaactgaagaatatgaaaatgttggaaatgcagcatctaagtggccaaaagtggaggatcctatgcctgaatctaaggttggtgacacatgtgtttgggatagcaaggtagagaatcaacagaaaaagcctgtggaaaacaggatgaaggaggacaaaagcagcatcagggaagcaatcagcaaagccaagagtacagcaaatataaagacagaacaggaaggtgaggcatctgagaagagcttgcatctgagcccacagcatatcacacaccagactatgcctataggacagagaggcagtgagcaaggcaaacgtgtggagaacattaatggaacctcctaccctagtctacagcagaaaaccaatgctgttaagaaattacataaatgtgatgaatgtgggaaatccttcaaatataattcccgccttgttcaacataaaattatgcacactggggaaaagcgctatgaatgtgatgactgtggagggactttccggagcagctcgagccttcgggtccacaaacggatccacactggggagaagccgtacaagtgtgaggaatgtgggaaagcctacatgtcctactccagccttataaaccacaaaagcacccattctggggagaagaactgtaaatgtgatgaatgtggaaaatccttcaattatagctctgttctggaccagcataaaaggatccacactggggagaagccctatgaatgtggtgagtgtgggaaggccttcaggaacagctctgggctcagagtccacaaaaggatccacacgggggagaagccctatgaatgcgacatctgtgggaaaaccttcagtaacagctctggccttagggtccataaaaggatccacacaggtgagaaaccttacgaatgtgatgagtgtgggaaggccttcattacttgtagaacacttctcaaccataaaagcatccactttggagataaaccctataaatgtgatgagtgtgagaaatcttttaattatagctctcttctcattcagcataaagtcatccacactggagagaaaccttatgaatgtgatgaatgtgggaaggctttcaggaacagctcaggcctcatagtgcataaaaggatccacacaggagagaaaccttacaagtgtgatgtctgtggcaaagcattcagctatagctcaggcctcgcagtccataaaagcattcaccctgggaagaaagcccatgaatgtaaggagtgtgggaaatcctttagttataactcactacttcttcaacacagaactattcataccggagagagaccttatgtatgtgatgtgtgtgggaaaacgttcagaaacaatgcaggcctcaaagtccacaggaggctccatactggggaaaaaccatataagtgtgatgtgtgtgggaaagcctatatctcacgctctagccttaaaaatcacaaaggaatccaccttggggagaagccctataaatgtagctattgtgagaaatccttcaactacagctctgcccttgaacagcataaaaggattcataccagggaaaaaccctttgggtgtgatgagtgtggtaaagctttcagaaataattctggccttaaagtacataaacgaatccacactggggaacgaccttacaaatgtgaagaatgtgggaaagcatacatctctctctcgagccttataaatcataaaagtgtacaccctggggagaagccctttaagtgtgacgagtgtgagaaggccttcatcacataccgaacccttacaaaccacaaaaaagttcatcttggggagaagccctacaaatgtgatgtgtgtgagaaatcttttaattacacatcgctcctttctcagcacagaagggtccacactagagagaaaccctatgaatgtgacaggtgtgagaaggtcttcagaaacaactcaagccttaaagttcataaaagaatccatactggggagaggccctatgaatgtgatgtgtgtggaaaagcctacatctcacactcaagccttattaaccataagagtacccaccctggcaggacaccccatacatgtgatgaatgtggaaaagcttttttctcaagcagaactcttataagccataaaagagtccatcttggggagaaacccttcaagtgtgttgagtgtgggaaatctttcagttacagctctctcctttctcagcacaagaggatccacacaggggagaaaccctatgtgtgtgataggtgtgggaaggccttcaggaacagctcaggcctcacagtgcataaaaggatccacacagtttcagatgaactcccataatgaatgatgaatttgtgatgagggataacctggaagtggtattcacacattatgctacaataaaaggttctaccgtggagaggattttgacacattcagtaactaatggaacacaccgtcaacatgaattcgcaccttacatgacagaagtgattcagggattcctatgaatagaaatgctgagaaggaacgcattttattgcagaagctaaaaagctaaagtaccagtcatctagagagaaggaaattaatgtttcttaataatcctgttaaatgtttgattgtttttggaatgtgttattgtaaagatgtcatgcaggacatgtatatgttgtctgttgtaaaatgttaacgaatactttgttcagggctcactctctctttgtcatgaaagccagctccttgtggcgaggtaaagtggaattccaataaagaaattccttaaatcaaaacgggctgtgagttt

SEQ ID NO: 464343 - DNA, 579 bp, Homo sapiens
  misc_feature (6)..(6): n is a, c, g, or t
  misc_feature (10)..(10): n is a, c, g, or t
ttgttncccnttgtttactactactatgctgcgagaagacgacagcaggggattcagataaaaatacccaggtccatagtgaaagatgtttttcagtatgttacttatggtttagctactagccagggaggtggtagcccagagaaggcaaaccacatacagatcacctggagttgattatatgagtctatgcttttgagctctttaggcaacacattctcattcctgtcattatcagttgaacctccatgccacacatttctaagaattaaatgcctagatggattaaatgtagtatgtgaatgttctatgtaaaagccaatagagtatacaagtgacttgaatgatttttcctaacttgtttgcaactgatagctcatattgaatgtttttatgtaaactttgtatcgttgggaagaattacccaatcagagatttatattttcataaatgttacatttagttaaattttgttacagagttgttacactagaaaattatttcagtcttcaaacaatatacagtcttgtgtatgtattatttgtatgaataaaagataaactacttagattggcgtgc

SEQ ID NO: 464344 - DNA, 676 bp, Homo sapiens
  misc_feature (24)..(24): n is a, c, g, or t
  misc_feature (62)..(62): n is a, c, g, or t
  misc_feature (90)..(90): n is a, c, g, or t
aaattttaagggtggaccaacctnaataagaagaagcctaatggaccgttcgggcatggcancgcggtacggtaaaagcttggatccctnctagagcgggcgccctaactaacttacttatggctgcgagaagacggacaagcaggggattcagataaaaatacccaggtccatagtgaaagatgtttttcagtatgttacttatggtttagctactagccagggaggtggtagcccagagaaggcaaaccacatacagatcacctggagttgattatatgagtctatgcttttgagctctttaggcaacacattctcattcctgtcattatcagttgaacctccatgccacacatttctaagaattaaatgcctagatggattaaatgtagtatgtgaatgttctatgtaaaagccaatagagtatacaagtgacttgaatgatttttcctaacttgtttgcaactgatagctcatattgaatgtttttatgtaaactttgtatcgttgggaagaattacccaatcagagatttatattttcataaatgttacatttagttaaattttgttacagagttgttacactagaaaattatttcagtcttcaaacaatatacagtcttgtgtatgtattatttgtatgaataaaagataaactacttagattggcgtgc

SEQ ID NO: 464345 - DNA, 7195 bp, Homo sapiens
ttcagttacccacagtcaccttcagtaaaccagttatatgagatggcttatgtgctaaggagagagagaggacatggtgaaaaatatgggaatatccgaatccctggagaagttgaagcctcagagtttgaaatgattttggatgccgccatagaggcaaagctggagaccaagttgctggaggagtggtactgtcgagatgagaactcggtgccagcagcctattacctcagacccaagtcagaaatgctgagaagcaatagaaatgcaatgcagccttctaccaatgctgaaaacgagaagacatggcaagagatatcagatgagatcaagaagatatttaaggctgctgtaaagctgttacacgaaaagggtaaaatgaaacacagccaggctaagaggtacctgttctcagctatagaggatgagtttgactttgctctgggaaaacaaactccagcatttctaaagaagtgtgtttgctacattaggaaaattgctaacattgagcgctttgtgaaaatcccagagatgggaaaatacatggatataactggaacagaaccgaggattattcgggacccagaagcccaagagaagctgataaaactcagggatgaatttattcctactattgttgcatcatctaatctgagagtgtacacatctgttactcattgtgacatgaaactaggctactcccaagaaatagaaaatcattacatcgaaggacttggtaaacaattttatgaggacatgattgatataattcaggcaacgatacaacagaattttgacactgaaactgatacactctatgatgaaatccttcaacattcatcattatgtaaaacatacgcctccttctatgagtacaaatgtgaatctctaaacatagtgcataactacattcttccaagcaaagctggacacatcaaccctcttattatatatggtgggccatgcactgggaagacccttctgctagctgaagtagcaaagaaggcttatggctggctacatgaggacacaggaccagaatctgacccagtagtcatcgtgagatttctaggaacgacagacatgagctctgaccttaggactctccttctaagtgtttgtgaacaattggcagttaactaccggtgtctggttcaaagctaccctaagaagatccatgacctctgtgacttatttataaatcttttgaatgagtcttcactgcagagacctctagtcataatattcgatgcactagagcagctctcagagaatgatgatgccaggaagctttggtggctcccagctcacctgccccgctttgtccggatagtcctttccacgctgcccaacaaacatgggatcttgcagaaactaaggtgccttatccatgaagaagacaactacatcgagctgattccccgagacaggaagatgtgcagccaggtcctcaaacaccagctgctgcgcgtcaaaaggaaggtcacatcaggccagcagatttatgtgaacaatgcattatccaagtgcacactgccaatgtttgtgaacctgaccttcagggaggtgaggcactggagatctcacaaagacgtcgatgaatcctccctctctgtcaccgttcatgaaagtatagagcagttattctggtccttggagaagaagtgtggtcagaaactggtctctagggctcttggttacatcaccatggccaaaatgggtctgagtgaaatggaactggaggatgtgttagccctagacaacagtgtaatgagtgagctcaaagaaaacaccagacccagcaatcccctgagagtaccttacttgtacattgcaaggctcaaggagggtctcagtggatacctaatagaaagacatgtgaaaaatgtcacactcctagtctgggccaacagacacctgcagctcatagcccagaagctatatctgcaggatgacaatgacctgcgtgaaatgcacaccatcttagcagattattttctgggggtttggtcagggggcaggaggaaagccttctgccttgaggacccctacttgaatggctgccttgacttggagaacagaagtttgctggaggaagaaaagcacttcatggaacaggcttcctttgacaggcaggctccagaccagccctgggttttccagtgtaatcccctggaacctgacatctttttcgttaatcatcggaaaatgtctgagctgttgtaccacttgacgaggtgtggaaaaaccgatgacctgctttacggcatcatcatgaacttcagctggctttataccatgatcaaaattggccagtttgacaaagtgctttcagacattgagctggcttacaactactcgcaagagaaggagctgaagttcctggccaacaccctccgcagcatcaaaaacaaggtcactgcatttcccggctccctttcagcagagcttcagcaaagactgctgcctgttgtaagctccctgcccaaacttagacatcttcttttagagtgtgataaagatgggcccaaatattgctccattgtaccactgcattcatccatggatgtgacatacagcccagagcgtcttcccttatcatccagtcacctgcatgtcacagagatcctgcctacctgtaaccccagcactgtcctcacagctttagaaaatggttccatcagcacctgggatgtagagactcgacagctactcaggcaaatcaccacagcccagtctgtcatcctgggcatgaaactcaccagtgatgaaaagtaccttgtggtggctacaacaaataacaccttgttgatttatgacaatgtcaattcttgcctcctgtctgaagtagaaatcaaggggaccaagcatggaagcagcgccacctacatcaatggatttacactgtccgccaaccacgcccttgcatggctcgaagccagcaaagatgtcactgtcatcgatctgctgtacggatggccgctttaccagttccactgctggtatgaagtgacgtgcgtccagtgctccctggatggtctgtatgctttctgtggccaatacctgaacacaaccaccatatttcatttagggagtggagaaaagttatgtacagtgacatcagaattttcaggtggatttgtgaagtttcttcttatcttggacacagctcaggaaatggtcatggtagacagtgaaggaagtctttctgtttggaatactgaggacatttccagcccccagctgactgatgactttgattgccgaagagaagacagtgaggtggtcagcattgagctttcagaagaccaaagtgcagttctgatctgtaaagccctcagcattgagctcttagatactggtctgtggaaggtggctgaaaagttcagagccaagcacaacgaacgctttatatctgccgtgctgtctaaaaatggagattgtatcatcgccaccatggaaaatacctcagctgtgtttttttggaggcgggacacaggacagtgtatggcaagcttgcaggaaatctcaggttccattgttaagttagtgaaatccagtcaccacaatatgctactgtctttatcaaccagtggtgttctttccatttgggacatagatataatcacagctatgtccaacatagataagactggaaaacccatccaaagtctgttgttgcctgctagaggggaaatcatttactccctggatggatccgattgtgttcataagtggaacttcagcagtggcttcatcgaagcagtattcaagcatgaaggaatagttgaacactgtgtgttaacatccaccggagatataatggtgacatcagatgacaaaagcagccagtatgtctggcacaccagcagtggtgaaaacctttttcgaattaacgggcagagaatatctcagctgctgattacacacaatgaccagtttgtggtctcgctctgtgaggaaaatgcctccagggtttggaggctcgccacaggccacagggtctgcaacattctgaccactttgcagaatgcctttattacctccgcaaataccttcgtggtgggaatgactaaaagcaaagtgttggcagtcagtctttggacaggaagtatcaccaagaaattttgctgtgaagatgggaccaccatcgtgaattttaaattaatccctgactgtcctgatatcatcgtgtttatcacatcggccgagactgtgaacatctggagtctgacagatgaagtgatctgtcggcgcgtgcaacttccaaacaacttcttgaaaaatctggaggactttgaaatttctcccaatggaaagctaggcattatagccaggggagatgaaaacatcaatgtgctagatttatacagtggtaaattgcgggtggttcacgcctctgggatcatctggcggcagaggttgtctcgggatggtcgctacctggtatacatttgtttccgaaatggggaggaggaggatgaaaatggtgcaatattcagtttaattgtaatgagactggcagatggcaaaaatatcggtgcttgttccctttacaaaacaccaactttccttgcactctcccagaggcacctgaacatcattgtgggctttgatgatgggagtatagggatctacacggtagtagaccgtgtagatgctgcactgaaaatcaaaattgccacttcaaatagcagacaaattttcaacaatgcaacacacacctccaggccaaagtgtaacagttattgttttaaaatatctgtggattgcttatggagagagtccactgaggtctttgcaagagacagccccatcacagttagtgactctactgagtccaatgaagcaacaccctccaagaaacacaactcttgttatgagcgggtatgctcggccctagaagccaggggccacagctatgcccctgataactgacaaaatgttttccagctaagcagaaatatgtgatccacgtacagaagggaaaaaaatgtgccccaaatgataaactattcatttattaaaaggcaggagcgatgctggaattccagtgttttattaagatgttcatgaaatggacaaataggttagtcttgggtgtggtctttttgtcaaagtgtatccagaatgtcagaatttctagtagtaatatttaaatggttacttcatctgaaaggcagaggctaaaagtttttaaattagctgtgtggtgaggcagcataatacatcccactggttaagatgagagaggctagagttatatacagatcatttggatgggaattagttctacaaaaatcagctgaaatcatgaagacaaagagctgcttgacttcaaatgattgtgtgataagtaaacacagccttaatctctctttacattttacagtcctgacaactgtgtacacctagtctgcagtgaacggtctaaaggtgcaaaatatgtaacaaaaatacccaagtgtattcccagtttcccgagagatatgacctgaaacatgagactgtggactggactgggacaagaactaactaccactatcatagggctactgaacatggagagtcagtctttattaaaagacagttgcaacaattgcatgcgagggtttctgtataacagaatatatgatttttaaactatttcctgggttgcaaaagaacacatttagtaagaaacaacaatcttttcgcatctttttgaaatgcatatttgtgctgggtgtaaagaagattacaggaagggcattacaaatctggtcaaaacacctgtccatttccatcattgtactaacagaagtctgtactatttggtcagtttgtatggaagcataaatattccctaaattcctgcagttagtcttcatagaaagcaagctttctcaacatgccatctctgagatactgatgacgtttgccttactcacattccttctctttcctgtgtaaaatgcagatagatgaccaaatactctgggataaactgaatatgcctgtctttgtgctaaaatattccataaatcttaagggtgtccaaaagttctttattgtccttgtttgtaatcactttcttacttctacacaccatctgtatgcttctttatctgttactcttcctgattgaggactcttctgagccttttatagtcctatccatttcaaagcagaagctgtggaatggtattaaatattttttaaaattaattcacctgtttaaaagaaaacattgcatctcaaaaggtgaagatgattgttctttcttccatatcctccttacggcatgtccttggataacttttcaaaaggtatccacacttttggttgagtttagttttcttagaaagtagagaagtaacactttactagaataatgaacaaggaattgatttgctctaggcccagctctgccataaactcattgtgtattcctagacaggtctttaacttcatcagtgtgttgtttttgtgaagtgcaaaataaagatagtgatagtttctgctgtagccctcatagggacattgggaagcagtataagaaaaacttcagcaacatcatgattattgatgctaataggaaaaataaattcatgtaacccatagagaatccaggtcaattgtatttcctcttggaaagcagtttaacatgtaagcgttcaaagaggggattcagataaaaatacccaggtccatagtgaaagatgtttttcagtatgttacttatggtttagctactagccagggaggtggtagcccagagaaggcaaaccacatacagatcacctggagttgattatatgagtctatgcttttgagctctttaggcaacacattctcattcctgtcattatcagttgaacctccatgccacacatttctaagaattaaatgcctagatggattaaatgtagtatgtgaatgttctatgtaaaagccaatagagtatacaagtgacttgaatgatttttcctaacttgtttgcaactgatagctcatattgaatgtttttatgtaaactttgtatcgttgggaagaattacccaatcagagatttatattttcataaatgttacatttagttaaattttgttacagagttgttacactagaaaattatttcagtcttcaaacaatatacagtcttgtgtatgtattatttgtatgaataaaagataaactacttagattggcgtgc

SEQ ID NO: 464346 - DNA, 1234 bp, Homo sapiens
catctgtatagcgggacaggatgtcacagatgtagagattcaacaggatgagagtgcctgagctgtgacgggtgcccagaacatgatctcaggaacacatatctccttttccagccggaagtacctgagagagaccccagaaggtggataagactgcagagagcagggagcatgaagcaccttgcccaaggtctcaccaggcaagagaagggcggagaagggcggcttcttcatggattgtaaatccccaaagcgtgcaaacatctgcccccatctccctggaggtggcctgttctccacgccaccctcacaggctgcctggcggactctcctcacagcactgtgcttcccggggcccacttgtacaggccccatgcgagaaggacctcgggcagtgtataatcctccaagggcccacaggaacagcagtgacaactgtgttatgaagcacctactatgtgctggggacaagaatggaacaagaagacatgctttgccctcacccctggagggcagcttccagccagggaggcaaatacctcctccccagactccttccacagatccccaaactctgcctctctccttcagatccctgctcagatgtcaccagctctgtgcagcctccctgccaccaagtctaaaattgccatagtcccctcagttcctcacccctctccctgctttctttgtctgtctcatccatgaggatgtgccctctgggaagggcaggcaggagctggctattctgttccttgccctgtccccagcaccgaggacagtgccaggcatggaggaaataattgctgaataaagaaataaaatcgacattctatgagacataaagcacagttcagacacatggagtgaggggtggttccattctgactgcggtgatcccggtggtctctctgagtaggtggcattgagctgagacccagtgatgtgaaggactgagcgtgtgtggaggaagagtattccaggtggaggaagcagtaaatggcaaaggccccgagacagggctgagctctgtgtggcccagcacagggcctgacactcagtagatgattaataaatatctgtggaatgagaacatgagcgtctaccccgcttattgtataaaagcagcagttgaggttcagagagggcccctgtacctagcatagcatctggcactaagtcaagctcattgagtattagtttatttattttaaatataaaggttttaaataaa

SEQ ID NO: 464347 - DNA, 961 bp, Homo sapiens
gctgctctgagataacctcaccctaaattacgagtacacaactgaaaaactcaaaagggaaggcgaggagctgagaatgtaaaccctcaactaccagaccttccacagccataaacggaccctcctaggagttggacttcagaggcaaaagcatgtttgcgatgaggtaacctgtctcggtgtctttgcatcctgctgtgccccaccgtgttttgaaagagggttgcagagtcactgaccctgtgggatggccaaactgcacatgcccagcgctctgcccgccccagggcacctctcccacctgccaaggaacctgctcccaccctgaccactcgcagataatccaagactcactatatcttaatggaaaaccacagtcacattggcaaatgtttggacaacccgaatctgacctccagaaaggagagccccgcgcaccccctgctcaggaagacttggctgtgcgagtgaaagtgtgcagctgtgaggagaaagcccttcctggcctcctacaggaatgtcttctgctaaatgaggttctctgtcagccctacagctgcctcagacataaaaaaggtgtatggggaaagctccagggtcctgagcctatcgaacaggtgatcctgagccaccccagccattccaggacgctcccattagtcactcagaagctgttcataagcttctctttcaaatcacccctcgtgtcccgggaagaaggggaaatggagacatgtgttcgccaaggaggagaaaaccaaacaggaccctgtgcctaccttaaaatgcgaaagtgctttatgaaacaatgagcttctcttgcaggtcattctccagaatgccaattacatacttattcttcctgcttgagaaacgggaaacatattccgttgtccaggagagccatctgcattgtggttgctgcaccttcatggaaggagggaaattgtgacttgcagtc

SEQ ID NO: 464348 - DNA, 998 bp, Homo sapiens
aggctttagcgtcagtgctacctgggggatggagccagtccagaaagggccaggcagtaggagcttccactgcgtgtggaagtctttccacctgagtggaattggctgtggcttctgtgttcagagtggaattggcaagcagctgctatgttcggagctgactgtgttcgtcagaccagggccagatggacgctatgtctcccatcagtcagtctcagtttattccactcggggagatcctctgcttggccatctcagcaatgaactcggcaagaaagcctgtcacccaagaagcactgatggagcacctgaccacgtgcttcccagtactcgggagagcctggcttccaacacatcaagcattgttgaaagtaaccgtcgtcagaaccccgctttgagcccggcccatggtggagctggtccagccttcaacttccgagcgagcgcggagcccccgacaaatgaagctgagaagctacagaaaccttccaactgcttgcaagcttctgttactagcgtgtgattgtccttctgcctcagatcttctgtctcattcgatacagcaaagtttacgacactgggactgatgtttacatctttggaaagacaagcatctcaaccacagtttttgtgtttacttaaactgtgctgctaagtagggctagggcaaaaaaacaaaaaatctttatttcagagtattgcttttcacatttatggctctgtagcaactgagtaacagtaggggtgatatgtatacttttgcttcactaattgtatctgagcacacataggaaagtctagacactgtaagtgtaatacgcattttcaatgtcatgcagttgccaattccattttaaaatgccacagatgcgtgttgctcccagtctgtggttaaacggtgccacagaactgatccttgacacttccaaaaaaaaaaaaacaaaacaaaacaaaaaaaatttaaaaaaaaaaaacaaaaaacaaaactaagctaccac

SEQ ID NO: 464349 - DNA, 411 bp, Homo sapiens
  misc_feature (29)..(29): n is a, c, g, or t
ctgatttttttaaccttcccggattcacnaaacagaaatataggcctttgaatctgaagtggacaaaggaaagcaatttccagtctggctggggcacagcattaggtgattgaaaaggtgatgtggacttgtctgtagcaactgagtaacagtaggggtgatatgtatacttttgcttcactaattgtatctgagcacacataggaaagtctagacactgtaagtgtaatacgcattttcaatgtcatgcagttgccaattccattttaaaatgccacagatgcgtgttgctcccagtctgtggttaaacggtgccacagaactgatccttgacacttccaaaaaaaaaaaaacaaaacaaaacaaaaaaaatttaaaaaaaaaaaacaaaaaacaaaactaagctaccac

SEQ ID NO: 464350 - DNA, 4740 bp, Homo sapiens
gcagcgtagcgggctggcggtgacttacaccgggactccagagggagagaggaagcgctgcaggccacttgcattgcgtcttccaggctgcgtggacccggcgccccggcgtgtgcggttgtgggggagctcgccgtggcctcccctccctctggctttagcttcctttggggttggcgcaggtgggccaggcagcgcaccgcagatctccccgttcccacgaaggctggctcgctgtctctctccgagcgggagggaccatcctaaaaatatgtaaatatccaagcgctggctccaggctggggcagctgccaaggtccccgcgccgccgccgggtgttttacatgaaaatgagaagcctgatgggaaccgcgttctaacttaaggcagcctggtgattagcatgagactgggcggctgtcctgcttcctgcccttcaatagccgttccgcgcgctcgcgccggagcagcgctgccgccgcgcgggggtcgatcgcaggctcggcgtccttggcagccatggctccggcgccgcctcggccagtaagtaggagcatgcatgtgtagggggcacatgcgtgtcggcgcacccacccagccatccacccgcgcgcacgcacagcgcccggagcctcggcaaggggaagattgacgaggcgctgcagtcgcggggacgacgcgggctcttcctggattccgcaggagcccgcccgccgcagctgctgtctgcagagcctgctcggatcctgtgcacacgcgccccccgctcgagcctctgtgatgaagactgtctcccggggactgcagcggaggcagagccagccagcgccggggactgcgggccgtgcggctgataggcccgcggggacacgactcggacactgtcatccccacgcctcgcgctgagctgcccggcgcggagggtctgccgccgcccctccggcctcccgcacgcccgatcccgggtcagccccggaggcctcggctgcctcatttgtttgggtcttttgtgccgtggctcccagttggccaagcactcctgcgctgaatcgggccattgtctgcgctcccattgccttcacgctgcaagtctcggcgcccccaccccgcccgccccctccccgcctcctcccggccggggagcctcctaacgtgcctttccccccaggaatctggaagctataagccgggcggattgcaaatgaagtgtaatgcattgtgggacgtgtgtaaaatcggagccttcgccgtgggggtgtgggggggcgtggggagggccggacccgccgctggcggtgtagacgccgacgaggaggggctgggaaaatgtgcgcagagtccgcccgggtcgtgcccgccgtagacggatgaaggagcgcgctgcgccccggcgctgaggccccgaggatcggggcggcaggtcgccctccccaccatgaagaagacccggagcacaaccttgcggcgagcctggcctagctcggatttctcggaccgggcctcggaccgcatgaggtcccgcagcgagaaggactaccgcctgcacaagcgtttccccgcggccttcgcgccccaggcttcgcggggctacatgacatcaggtgatgtatcacccatcagtatgtctcccatcagtcagtctcagtttattccactcggggagatcctctgcttggccatctcagcaatgaactcggcaagaaagcctgtcacccaagaagcactgatggagcacctgaccacgtgcttcccaggtgttccaacgccaagccaagaaattctgcggcacacgctgaacacgctggtacgggagaggaagatctacccaactccagatggctacttcatcgtgaccccacagacttatttcataactccttccctcataagaactaacagtaaatggtaccatttggacgagaggatacctgaccggtctcagtgcacctctccgcaacccgggaccatcacgccctctgcctcaggctgtgtcagggaaaggacattgccccgaaaccactgcgactcttgccactgctgcagagaagacgtgcacagcacgcatgcacccaccctgcaaaggaagtctgccaaggactgcaaagacccttactgtcccccttctctgtgccaggtgccacccactgaaaagagcaaaagtactgtaaatttttcctataagacagaaactctctcaaaacctaaagatagtgaaaagcagtcaaaaaaattcgggctaaagttattccggttaagttttaaaaaagacaagaccaaacagctggccaatttttctgcccagtttcctcctgaagagtggcccctgcgagacgaggacacgccagctacgatccctcgggaagtagagatggaaatcattaggcgcattaacccagacctgaccgtggaaaatgtcatgcggcacaccgcgctcatgaagaaactggaagaagaaaaggcccagaggagtaaagccgggtcctctgcccatcacagcggaaggagtaaaaagagtaggactcatcggaagtcccatggaaagtctcggtctcacagcaagacacgggtgtctaaaggagacccttccgacggttcacatctggatatcccagctgaaagagagtatgacttttgtgatcctcttaccagggtgcccagggagggctgcttcatcattgaacacaaaggagataacttcatcatgcacagcaacacaaacgtgctcgagtcccacttccccatgacaccagaatgggatgtgtctggtgaattggctaaaaggagaactgagatgccttttcctgaaccttctaggggaagctcccactcaaaagtgcaccgaagccacagccatacacaggaccggaggtccaggaatgagagatccaacaaagccaaggagagatccaggtcgatggataactccaaaggccctctgggtgcttcttctctagggacgccggaagaccttgctgaaggctgcagccaagacgaccagacccccagccaatcctacattgacgacagtactttaaggcctgcacagaccgttagtctccaaagggctcacatttcgtccacaagctataaagaggtgtgtattccagagatagtcagtggcagcaaggaaccgtccagcgcttgcagccttttggagccaggaaaaccacccgagagtttgccatcctatggcgaactcaactcttgtccaacaaaaacagccacagatgactatttccagtgcaacacctctagtgagacggtgctcacggcaccatcacctctgggaaagaataaggaggaccatgacactctgactttggcagaaggggtgaaaaagctctccccttctgataggcaggtcccccactcctccagggagcctgtggggcacaaggaggagtcaccaaaagggccgggtgggggccccgctgcttcgggaggagtggctgaagggatcgccaacggacgcctcgtccagcaccatggtgccgagcccagcagcttggacaagaggaaagagatatttagcaaagacacactgttcaaacctcttcacagcaccttgtctgtaaacagctatcacaagtcgagcctgtccctcctcaaatctcacccgaagacacctgctgacacattgccaggccgatgtgagaaactggaaccgtccctggggacctcggcggcacaagccatgcctgcttcccagcgtcagcaggagtcaggagggaaccaggaagcctcttttgactattacaacgtctctgatgatgacgactctgaggaaggggcaaacaagaacacagaggaggagaaaaatagagaggacgtaggcaccatgcagtggctcctcgagcgggagaaggaaagagacttgcagaggaaatttgaaaagaacctcacccttcttgctccaaaagaaaccgacagcagcagcaaccagagagccacccattcagcccggctcgacagcatggacagcagcagcatcacagtggacagtggattcaactccccacggaattgaaaaaaatgtttctgcacctgtagagatcaccaatctggactgtactcgggagagcctggcttccaacacatcaagcattgttgaaagtaaccgtcgtcagaaccccgctttgagcccggcccatggtggagctggtccagccttcaacttccgagcgagcgcggagcccccgacaaatgaagctgagaagctacagaaaccttccaactgcttgcaagcttctgttactagcgtgtgattgtccttctgcctcagatcttctgtctcattcgatacagcaaagtttacgacactgggactgatgtttacatctttggaaagacaagcatctcaaccacagtttttgtgtttacttaaactgtgctgctaagtagggctagggcaaaaaaacaaaaaatctttatttcagagtattgcttttcacatttatggctctgtagcaactgagtaacagtaggggtgatatgtatacttttgcttcactaattgtatctgagcacacataggaaagtctagacactgtaagtgtaatacgcattttcaatgtcatgcagttgccaattccattttaaaatgccacagatgcgtgttgctcccagtctgtggttaaacggtgccacagaactgatccttgacacttccaaaaaaaaaaaaacaaaacaaaacaaaaaaaatttaaaaaaaaaaaacaaaaaacaaaactaagctaccac

SEQ ID NO: 464351 - DNA, 858 bp, Homo sapiens
cggccgccctcgggcttccacatccgctgcctgggtgatgtatcacccatcagtatgtctcccatcagtcagtctcagtttattccactcggggagatcctctgcttggccatctcagcaatgaactcggcaagaaagcctgtcacccaagaagcactgatggagcacctgaccacgtgcttcccagtactcgggagagcctggcttccaacacatcaagcattgttgaaagtaaccgtcgtcagaaccccgctttgagcccggcccatggtggagctggtccagccttcaacttccgagcgagcgcggagcccccgacaaatgaagctgagaagctacagaaaccttccaactgcttgcaagcttctgttactagcgtgtgattgtccttctgcctcagatcttctgtctcattcgatacagcaaagtttacgacactgggactgatgtttacatctttggaaagacaagcatctcaaccacagtttttgtgtttacttaaactgtgctgctaagtagggctagggcaaaaaaacaaaaaatctttatttcagagtattgcttttcacatttatggctctgtagcaactgagtaacagtaggggtgatatgtatacttttgcttcactaattgtatctgagcacacataggaaagtctagacactgtaagtgtaatacgcattttcaatgtcatgcagttgccaattccattttaaaatgccacagatgcgtgttgctcccagtctgtggttaaacggtgccacagaactgatccttgacacttccaaaaaaaaaaaaacaaaacaaaacaaaaaaaatttaaaaaaaaaaaacaaaaaacaaaactaagctaccac

SEQ ID NO: 464352 - DNA, 4691 bp, Homo sapiens
gcagcgtagcgggctggcggtgacttacaccgggactccagagggagagaggaagcgctgcaggccacttgcattgcgtcttccaggctgcgtggacccggcgccccggcgtgtgcggttgtgggggagctcgccgtggcctcccctccctctggctttagcttcctttggggttggcgcaggtgggccaggcagcgcaccgcagatctccccgttcccacgaaggctggctcgctgtctctctccgagcgggagggaccatcctaaaaatatgtaaatatccaagcgctggctccaggctggggcagctgccaaggtccccgcgccgccgccgggtgttttacatgaaaatgagaagcctgatgggaaccgcgttctaacttaaggcagcctggtgattagcatgagactgggcggctgtcctgcttcctgcccttcaatagccgttccgcgcgctcgcgccggagcagcgctgccgccgcgcgggggtcgatcgcaggctcggcgtccttggcagccatggctccggcgccgcctcggccagtaagtaggagcatgcatgtgtagggggcacatgcgtgtcggcgcacccacccagccatccacccgcgcgcacgcacagcgcccggagcctcggcaaggggaagattgacgaggcgctgcagtcgcggggacgacgcgggctcttcctggattccgcaggagcccgcccgccgcagctgctgtctgcagagcctgctcggatcctgtgcacacgcgccccccgctcgagcctctgtgatgaagactgtctcccggggactgcagcggaggcagagccagccagcgccggggactgcgggccgtgcggctgataggcccgcggggacacgactcggacactgtcatccccacgcctcgcgctgagctgcccggcgcggagggtctgccgccgcccctccggcctcccgcacgcccgatcccgggtcagccccggaggcctcggctgcctcatttgtttgggtcttttgtgccgtggctcccagttggccaagcactcctgcgctgaatcgggccattgtctgcgctcccattgccttcacgctgcaagtctcggcgcccccaccccgcccgccccctccccgcctcctcccggccggggagcctcctaacgtgcctttccccccaggaatctggaagctataagccgggcggattgcaaatgaagtgtaatgcattgtgggacgtgtgtaaaatcggagccttcgccgtgggggtgtgggggggcgtggggagggccggacccgccgctggcggtgtagacgccgacgaggaggggctgggaaaatgtgcgcagagtccgcccgggtcgtgcccgccgtagacggatgaaggagcgcgctgcgccccggcgctgaggccccgaggatcggggcggcaggtcgccctccccaccatgaagaagacccggagcacaaccttgcggcgagcctggcctagctcggatttctcggaccgggcctcggaccgcatgaggtcccgcagcgagaaggactaccgcctgcacaagcgtttccccgcggccttcgcgccccaggcttcgcggggctacatgacatcaggtgatgtatcacccatcagtatgtctcccatcagtcagtctcagtttattccactcggggagatcctctgcttggccatctcagcaatgaactcggcaagaaagcctgtcacccaagaagcactgatggagcacctgaccacgtgcttcccaggtgttccaacgccaagccaagaaattctgcggcacacgctgaacacgctggtacgggagaggaagatctacccaactccagatggctacttcatcgtgaccccacagacttatttcataactccttccctcataagaactaacagtaaatggtaccatttggacgagaggatacctgaccggtctcagtgcacctctccgcaacccgggaccatcacgccctctgcctcaggctgtgtcagggaaaggacattgccccgaaaccactgcgactcttgccactgctgcagagaagacgtgcacagcacgcatgcacccaccctgcaaaggaagtctgccaaggactgcaaagacccttactgtcccccttctctgtgccaggtgccacccactgaaaagagcaaaagtactgtaaatttttcctataagacagaaactctctcaaaacctaaagatagtgaaaagcagtcaaaaaaattcgggctaaagttattccggttaagttttaaaaaagacaagaccaaacagctggccaatttttctgcccagtttcctcctgaagagtggcccctgcgagacgaggacacgccagctacgatccctcgggaagtagagatggaaatcattaggcgcattaacccagacctgaccgtggaaaatgtcatgcggcacaccgcgctcatgaagaaactggaagaagaaaaggcccagaggagtaaagccgggtcctctgcccatcacagcggaaggagtaaaaagagtaggactcatcggaagtcccatggaaagtctcggtctcacagcaagacacgggtgtctaaaggagacccttccgacggttcacatctggatatcccagctgaaagagagtatgacttttgtgatcctcttaccagggtgcccagggagggctgcttcatcattgaacacaaaggagataacttcatcatgcacagcaacacaaacgtgctcgagtcccacttccccatgacaccagaatgggatgtgtctggtgaattggctaaaaggagaactgagatgccttttcctgaaccttctaggggaagctcccactcaaaagtgcaccgaagccacagccatacacaggaccggaggtccaggaatgagagatccaacaaagccaaggagagatccaggtcgatggataactccaaaggccctctgggtgcttcttctctagggacgccggaagaccttgctgaaggctgcagccaagacgaccagacccccagccaatcctacattgacgacagtactttaaggcctgcacagaccgttagtctccaaagggctcacatttcgtccacaagctataaagaggtgtgtattccagagatagtcagtggcagcaaggaaccgtccagcgcttgcagccttttggagccaggaaaaccacccgagagtttgccatcctatggcgaactcaactcttgtccaacaaaaacagccacagatgactatttccagtgcaacacctctagtgagacggtgctcacggcaccatcacctctgggaaagaataaggaggaccatgacactctgactttggcagaaggggtgaaaaagctctccccttctgataggcaggtcccccactcctccagggagcctgtggggcacaaggaggagtcaccaaaagggccgggtgggggccccgctgcttcgggaggagtggctgaagggatcgccaacggacgcctcgtccagcaccatggtgccgagcccagcagcttggacaagaggaaagagatatttagcaaagacacactgttcaaacctcttcacagcaccttgtctgtaaacagctatcacaagtcgagcctgtccctcctcaaatctcacccgaagacacctgctgacacattgccaggccgatgtgagaaactggaaccgtccctggggacctcggcggcacaagccatgcctgcttcccagcgtcagcaggagtcaggagggaaccaggaagcctcttttgactattacaacgtctctgatgatgacgactctgaggaaggggcaaacaagaacacagaggaggagaaaaatagagaggacgtaggcaccatgcagtggctcctcgagcgggagaaggaaagagacttgcagaggaaatttgaaaagaacctcacccttcttgctccaaaagaaaccgacagcagcagcaaccagagagccacccattcagcccggctcgacagcatggacagcagcagcatcacagtggacagtggattcaactccccacgtactcgggagagcctggcttccaacacatcaagcattgttgaaagtaaccgtcgtcagaaccccgctttgagcccggcccatggtggagctggtccagccttcaacttccgagcgagcgcggagcccccgacaaatgaagctgagaagctacagaaaccttccaactgcttgcaagcttctgttactagcgtgtgattgtccttctgcctcagatcttctgtctcattcgatacagcaaagtttacgacactgggactgatgtttacatctttggaaagacaagcatctcaaccacagtttttgtgtttacttaaactgtgctgctaagtagggctagggcaaaaaaacaaaaaatctttatttcagagtattgcttttcacatttatggctctgtagcaactgagtaacagtaggggtgatatgtatacttttgcttcactaattgtatctgagcacacataggaaagtctagacactgtaagtgtaatacgcattttcaatgtcatgcagttgccaattccattttaaaatgccacagatgcgtgttgctcccagtctgtggttaaacggtgccacagaactgatccttgacacttccaaaaaaaaaaaaacaaaacaaaacaaaaaaaatttaaaaaaaaaaaacaaaaaacaaaactaagctaccac

SEQ ID NO: 464353 - DNA, 1461 bp, Homo sapiens
tgagcaccgaatacaaacgctgaaggatgatgacgatattcgcatgtacatgccagctaaataatttaggagcctgcctaaatgcgattggtctggatggaagatcaaaccagccacagcattcccttaagccaaagcctattccagagcaaggcctaactctcttcaattctcttaaacctgagagaggtgaagaagctgaagaaaagaagttggaagctagcagagataatgatccttctgatggatctgagcaaagcaaactgaaaaccttctggaaaggactcaccatcctagatgtcattaagaacatttatgatttctgggaggagtttaataaattaccccagcaattccaatcttcaacagccactaccctgatcagtcagcagctaacaacactgaggcaagaccctccatcagcaaaaagttcaggactcattgaaggctcagatgattgttagcatttttcagcaataaagtatttttatttaagtggaaaggcaatgctgtttttacataaaatgtttttagcagaatactgtaagttctataatactgaagaagatatacagaagacaaatcaacacatgaaaagaagttcagcataattaaccatcagggaaattcaagttaagtccacaatgagatatcctacacacctgttagcacagctagcatgaacagtgacaccaaataccggtgtggacatggggaaagtggatcactcatacagtgctggtggaattgtgaagtgatacagacactctggaaaaccgatcgtttctttaaaaattaaacatgagactactacccagaaatcacattcctgggcatttattccagagaaatgaaggcttacattgattcaaaaacctgtacacaaatgtttatagaggatttatttgttataacctcaacctggaaacaaaccagaagtccttcaacagcaaaatcaacctttcccttgccgtgagtaaaagaccaacttgcatctgcttggtatgcagtaaaaaatggagcagattgcacagtgactggagaaatgaatgagaagtccagctatgaaaaaaagtcagagacaaaaatgaagataataaaatatattttggatgagtgcaattgcctaaatatgtaactgtcaagctgattggacactttctatggatttattttcaatttcactgattctttcatttgttatctcagttatgctatttagcacatcaaagcactaacatatatgtgtaaatatatatgttattggtgctctaaaactgtagcctaatttcaatatatgtttgagtatatattgaaatttgatatatattcaactatataatcaaatatatattgaaatttgatatatacatacaattttagagcactaatataattatgctagtactttcagttcacaccaaatttaaaatggaaatacaagaagtgtacccacatata

SEQ ID NO: 464354 - DNA, 1691 bp, Homo sapiens
ttggagccgctttctccctcctcttaggcttgagatccagcatgggtgtactccaaaaatcattcctttctgtgtttccagtcaaaagccagcagagcgcactggtcaccagagaggcccagccaaagaccaggaccctgcaggtggccttgccatccacaccggcagagccacccccaccaactcgtcagagccatggcagccatggctccagcctgacccaggtgtccgcccccgctccacaccccggactgcatggaccctccagcacccctccttcctcggggcccgggatgagcacgcccccgttcagttctgaagaggactcagagggagaccgtgtgcagcgtgtgtctctacagcccccaaaagttccttccaggatggtgccccggcccgaggatgactgggactggtctgacacagagacctcggaggagaatgcccagccccctggccagggctcaggaacactggtgcagtcgatggtcaaaaacctggagaagcagctagaagctccagcaaagaagcctgctggaggggtcagtctgttttttatgcccaatgctgggccacagagggctgccacaccaggaaggaagcctcagctttctgaagatgagagtgacttggagatctcctccttggaagatcttcctctggacctggaccagagagagaaacccaagcccttgtctcgctcaaagctcccagagaagtttggcactggtccacagagctctggccaacccagggtccctgcctggtgattcaccccagaagctagctggctagagggttagcctggctggggccagctcaggtccacttcaacagaagaggctgctgggcctcttgtcttcacaaacaaccaagagatcatcctcttggagagaagcagtgcagggaatggatatgatctcatccctcctgacctgtgaggggccctgctgtagatggccacaggtgcctgactaggagcccctaggtccccaggcttgagaaagggttaaaatagaacctccaggtagttttcttcctctacctccacatccccccaagactgaaaagagtcactaactctcttttcccaagccttttataaaactgcaggaacactgtggagatggttcctatctggggtccttttggggacatatgcctcagtcagtcattcagtgattgatccaaaattatttactgagtgcctacctactctgcgccaggctctctagcctctcactactgagttagggtgcaggcagaggctggggcagaatgtttacagccagtgccagcacaaggtagtaatctagtgacagagaacagggtgttatggggagcatatgagaggccatctatcccagcctgggtgatcctggagagtttcccagggttgtgatatgtggcaggcctactcatgggtgggaagggaggatggccacttggctggaccttgtatccccaaaggaccacacgtgtaatttttgatattatttccaaaatcaggttttatacatagccattgtatatttttagtgtgaaaaacattaatatattatatgcaaacatttaaatatagtacaatgtttttaactctggtatgtatttcattatttttggagctttcagggggttgggagggaaggaagcaactgcatcttaattgtgtcagtttaggtcttttggga

SEQ ID NO: 464355 - DNA, 1449 bp, Homo sapiens
attaagtttgcacagtcacattttcagaatatgccaagcctctgttcactgggtacctgttggcctggccttctctgtctccttttttgtggttgctcagccttcttcctcctggcccttctgctcattccctctgtccacactggagcctggacatgagccacaaaactgagatgttcattttctaggcttctcccactgacacagccactttttcaccttccaggaacactggtgcagtcgatggtcaaaaacctggagaagcagctagaagctccagcaaagaagcctgctggaggggtcagtctgttttttatgcccaatgctgggccacagagggctgccacaccaggaaggaagcctcagctttctgaagatgagagtgacttggagatctcctccttggaagatcttcctctggacctggaccagagagagaaacccaagcccttgtctcgctcaaagctcccagagaagtttggcactggtccacagagctctggccaacccagggtccctgcctggtgattcaccccagaagctagctggctagagggttagcctggctggggccagctcaggtccacttcaacagaagaggctgctgggcctcttgtcttcacaaacaaccaagagatcatcctcttggagagaagcagtgcagggaatggatatgatctcatccctcctgacctgtgaggggccctgctgtagatggccacaggtgcctgactaggagcccctaggtccccaggcttgagaaagggttaaaatagaacctccaggtagttttcttcctctacctccacatccccccaagactgaaaagagtcactaactctcttttcccaagccttttataaaactgcaggaacactgtggagatggttcctatctggggtccttttggggacatatgcctcagtcagtcattcagtgattgatccaaaattatttactgagtgcctacctactctgcgccaggctctctagcctctcactactgagttagggtgcaggcagaggctggggcagaatgtttacagccagtgccagcacaaggtagtaatctagtgacagagaacagggtgttatggggagcatatgagaggccatctatcccagcctgggtgatcctggagagtttcccagggttgtgatatgtggcaggcctactcatgggtgggaagggaggatggccacttggctggaccttgtatccccaaaggaccacacgtgtaatttttgatattatttccaaaatcaggttttatacatagccattgtatatttttagtgtgaaaaacattaatatattatatgcaaacatttaaatatagtacaatgtttttaactctggtatgtatttcattatttttggagctttcagggggttgggagggaaggaagcaactgcatcttaattgtgtcagtttaggtcttttggga

SEQ ID NO: 464356 - DNA, 393 bp, Homo sapiens
tcccactgacacagccactttttcaccttccaggaacactggtgcagtcgatggtcaaaaacctggagaagcagctagaagctccagcaaagaagcctgctggaggggtcagtctgttttttatgcccaatgctgggccacagagggctgccacaccaggaaggaagcctcaggtaggatgtaggatgcttagagtttactctggaattctctacagaaccagctctgagtttggggggcctggggtgaaggttggggagggcccagcaagtgtcatcctttgccctagtgggacattgtgggtgacctccctctgcccctgtgcacatggagagatggccagtttggaatacttgtatccaagttaacattaaaaagccttttggttcatta

SEQ ID NO: 464357 - DNA, 985 bp, Homo sapiens
gtgatggtaaaactggcttgcttttgtgaggtattattcactgttagcttgttctaaagggagctgggtgatggcatgcagcagaatccatcacggagggtacatcacccaccagctttccatctgcagatgttgcccattgtagagcagcatgctgcctgttcaggcactgttgccaaacagaaggttctcttggcagaagaactggcacatgctgggctctgcaggctgtgcccccgaaccagctcttccacattggcaaatgggcatccttgaaattgccctgccccatcccccacaggcctcctaccacccaaacagatgggcacacgtgaaagaattcaaaggtgagccagtggtagaagaaaacaactttattgagatggcagtgttacggcttcgtgactgctcccgcagagcagggctaccctacaggctgtgtcaagagcagcagctcaggcacagctcacagttaaaaaaggacaccagtcatattggattagggcctcacctgctccattgtgacttcatattaactaattacatctacaacaacctaatttccaaataaggtcacattctgagcttctgggagttaagaccccaacatgtaaatctggagggatgcaattcaacacgtaatattccctaacacaatatttccataacagtctgtagcgtcttcttcaggctaagggattggggcctcatctatcagagttgtaataaggaacaaaggttgttgaaggtatccaaagggcaatgtaacccaaaaatgtgaacaactggtatatatggagcatcaggaagagtagctaatggatgtggagcttaataccaaggcgatgggttgatttgtgcagcaaaccaccatggttcacgtttacctgtgtagcatacctgtacatcctgcacatatacccgagcttaaaagttgaaggaaaataaataaatttaatataaatatttattttgaattctttat

SEQ ID NO: 464358 - DNA, 1123 bp, Homo sapiens
ttattactgcaaagggagtttctttttatcagcattcatgaaatatacgaatagtcccagtgtgtattaaaataatcccacataacaatcacttcgatgaatattgctttctttattccaggctggtttctgtttcctgtcttcttgtgctgttgtctgatagatgagaattttgtattcttatttactacttctatggcttgaatgtgtctcccaaaattcatgtgttggaaacttaatccccaatgcaatggtgttgagaagtgggatctttaataagtgactggctcatgagggctctgttctcatgaatggatttatgctgttatcacaggagtgggctcccgataagaggatgaattcagccctccttcctcttctttcacgtgttctcttgcccttccaccctccaccatgggatgacacaccaagaaggccttcaccagatgtgggcccttgaccttggacttcccagcctccagaactaaggagaaaccaactccaagttcttattggaatatttacagggtactggaggggctcacagtattaaggagaagactccggcagcctctgaaagaaagaaaactagggaagctctggaaacaccaataaacgacctctgtctaggacgctgctggtggatgactcaatgtgatggttcatttcatgtgtcagcttggatgggctatagggtgcaggtctgacctggtgcctgtttgtgtaaagttttattggaacacagtcatgcccatttctttacatattgttcattgctgctttttggctacaatggcggggttgaggagtcgtggcagacacatttggcccccaaagtacaataaattgactctagccctttgcagaaggtttgccatcccctgctctgctgcatcacttcacacaccaacaaaggcagcagctcaagtaaaggccagacttgatctaacaccagcaacagtaaacaagtgggagaaaaacaaacatctctccatgaatccaattgcacaagagaagggaaaagatgtggttggagttgcccctgatactcacattcttctagaaagaacattcctcagcctcccactgtatgcaaggctctgagcagctgatcgtccagact

SEQ ID NO: 464359 - DNA, 1082 bp, Homo sapiens
ttattactgcaaagggagtttctttttatcagcattcatgaaatatacgaatagtcccagtgtgtattaaaataatcccacataacaatcacttcgatgaatattgctttctttattccaggctggtttctgtttcctgtcttcttgtgctgttgtctgatagatgagaattttgtattcttatttactacttctatggcttgaatgtgtctcccaaaattcatgtgttggaaacttaatccccaatgcaatggtgttgagaagtgggatctttaataagtgactggctcatgagggctctgttctcatgaatggatttatgctgttatcacaggagtgggctcccgataagaggatgaattcagccctccttcctcttctttcacgtgttctcttgcccttccaccctccaccatgggatgacacaccaagaaggccttcaccagatgtgggcccttgaccttggacttcccagcctccagaactggtactggaggggctcacagtattaaggagaagactccggcagcctctgaaagaaagaaaactagggaagctctggaaacaccaataaacgacctctgtctaggacgctgctggtggatgactcaatgtgatggttcatttcatgtgtcagcttggatgggctatagggtgcaggtctgacctggtgcctgtttgtgtaaagttttattggaacacagtcatgcccatttctttacatattgttcattgctgctttttggctacaatggcggggttgaggagtcgtggcagacacatttggcccccaaagtacaataaattgactctagccctttgcagaaggtttgccatcccctgctctgctgcatcacttcacacaccaacaaaggcagcagctcaagtaaaggccagacttgatctaacaccagcaacagtaaacaagtgggagaaaaacaaacatctctccatgaatccaattgcacaagagaagggaaaagatgtggttggagttgcccctgatactcacattcttctagaaagaacattcctcagcctcccactgtatgcaaggctctgagcagctgatcgtccagact

SEQ ID NO: 464360 - DNA, 493 bp, Homo sapiens
atcagcattcatgaaatatacgaatagtcccagtgtgtattaaaataatcccacataacaatcacttcgatgaatattgctttctttattccaggctggtttctgtttcctgtcttcttgtgctgttgtctgatagatgagaattttgtattcttatttactacttctatggcttgaatgtgtctcccaaaattcatgtgttggaaacttaatccccaatgcaatggtgttgagaagtgggatctttaataagtgactggctcatgagggctctgttctcatgaatggatttatgctgttatcacaggagtgggctcccgataagaggatgaattcagccctccttcctcttctttcacgtgttctcttgcccttccaccctccaccatgggatgacacaccaagaaggccttcaccagatgtgggcccttgaccttggacttcccagcctccagaactgtgagaaataaatatttgttttttataaattaca

SEQ ID NO: 464361 - DNA, 819 bp, Homo sapiens
ccttggaaaatggagcatgctgccattccctttcacacacggaccccagagatgtgtcagggggctggggtggtgcatctgagctccttccagttcccaacgcagacactgctcaaagcagagttcccacaatgttctctgctggttgtaacccgctctattccacctctttgcagatccagtccttgtctctcaggaaggtggaagggatccacaaggtgccaaaggctgtggacacagaggaggactctccagaggaaggtgggaccttactttctttcctgggtgtccagtgcagaaacagatttgctgccctcctccttgtttagtttgtctctacttaactgtatctggacatccgaagctggagtggagggaactaaggacatgaaataatatttcttaacaccttctgtgtgccaggcatgtgacatgcaggtactaacatacaatctgctggtttagtgatggggaagcccaggcctagagagggtcattagcttgtccagagtcacaaagctagcaggtaactgagtgaggatttggagggacgtctgattcacagcctgccctactgactctcacctgcgactatgcagaacagtggaagataactcgctgagttgacttaaaatggcctttgctgtttttttctacattgtgagtgtgctgcagacaggtcccacagggcctgactaatgcataggaatccacctcggctcccttttcagagcattgggcacctgctgtttttattcaccctatccagtgattgactctgattcgcagacctctcaaccagatgtagccaagggatgc

SEQ ID NO: 464362 - DNA, 1910 bp, Homo sapiens
tgagtcggcctcgccagtgagcatgcgcgaggcccgagccgccgctgtggtcacatcggggctgagaccagtcctggccagggcagttaacaggaaggtctccggaggccgggattcgcggagggtccatcaggaggaagaaacctcagacagatctccggggagacagcgcgggatcccagcctcaggcgtgcgcggacagtgtgcgggtgagtctccccaaaagtggcgctcttgggatgtcgaggacaggtctgcctgtgtgtccgtgggctgctctcttcaccggtggcttggtagtcgcagagagcagaacccagcaggttctggggctgcctgggtgtgggcctcagtaagcttacaatcatggcagaaggtgacgggggagccagcacttcacatggctggaagcaggaagaagagtgagaagtggggaggtgctatacacttttaacaaccagactcacaataactcactcactatcgcaagaacagcaccaaggagatggtgctaaaccatttaagagaaaccgctagatgatccaattgcctcccaacacgccccacctccaacagtgggacttatagtttgacttgagatttgggtggggacacagatccaaatgatatcagtgtgttaaaaggaaaaggagataacagtgggaaatggatatttaacttcaatttgtgagtttttattttagagttctaaaattatgtcttatactacctatacaagtgctggaatattttctgtattaagtggtagatatataatatccgaatatcatacttaccttctttgaccttgcagtttaagagggcattttaagaaagtaaacaaacacattgatttttttttaaaggagaaatttttcagtaaacgatatagttaagtctagtacacaatgacaacaaccatcttgggttaagcattggcctacaaacagaaaaaaaccttcagggagatagatgctgatctaggcattgtgagaaaagctgaattcatttttaatcatgaatggcttttaaggaaagaagatttattaactaaaataaatagattagagggaattctcatctatgagagaggaagggatgggattcaacctggaaaaaatgatgaagttttagtgaactgggtaaggtagactcaacaattaatgatggataatgctaggacccagcaccggtaatgagcttgtattatgactcaatagcatcactttatcactttaacgcagatggaggcctaaataaccatagggcaatggttcttcttagatgcagaaggacacatttatataatcttagggaccccatctctgaggtcactcataatttatattaattcattattattgccattgccccaagaatagataaggataagacatcctgtagcacaggtagcagagatataaactattcttattcttgtgtcttgtctataggaagggagtgtatcctggtgtatgacagcatatagtagagaccagtgtcaattagggcctgtgaactgagacagggtgactggctaagtccacaacccattagaaacccagaaataatcaaatcatgagggatcatggaaaggaagctgaatttgctgagttttgccacgtgggcattgcatgcctatgtgattaaccaccaataaaaacctgggacatcaaaaaataaataagctgctttaattgccaagaattcacatgtggttgtatgcagcattactgggagattgaagtgtatctgcatgtgattctactgtgatggacacttgtaaatttgtgcctggagtctcctggaatttgccctgagaatctttttcctttgttgataagaatctgcatccttttgttttaataaacgataaacatgagtataaaagcttctctgagttctgagag

SEQ ID NO: 464363 - DNA, 2000 bp, Homo sapiens
tgagtcggcctcgccagtgagcatgcgcgaggcccgagccgccgctgtggtcacatcggggctgagaccagtcctggccagggcagttaacaggaaggtctccggaggccgggattcgcggagggtccatcaggaggaagaaacctcagacagatctccggggagacagcgcgggatcccagcctcaggcgtgcgcggacagtgtgcgggtgagtctccccaaaagtggcgctcttgggatgtcgaggacaggtctgcctgtgtgtccgtgggctgctctcttcaccggtggcttggtagtcgcagagagcagaacccagcaggttctggggctgcctgggtgtgggcctcagtaagcttacaatcatggcagaaggtgacgggggagccagcacttcacatggctggaagcaggaagaagagtgagaagtggggaggtgctatacacttttaacaaccagactcacaataactcactcactatcgcaagaacagcaccaaggagatggtgctaaaccatttaagagaaaccgctagatgatccaattgcctcccaacacgccccacctccaacagtgggacttatagtttgacttgagatttgggtggggacacagatccaaatgatatcagtgtgttaaaaggaaaaggagataacagtgggaaatggatatttaacttcaatttgtgagtttttattttagagttctaaaattatgtcttatactacctatacaagtgctggaatattttctgtattaagtggtagatatataatatccgaatatcatacttaccttctttgaccttgcagtttaagagggcattttaagaaagtaaacaaacacattgatttttttttaaaggagaaatttttcagtaaacgatatagttaagtctagtacacaatgacaacaaccatcttgggttaagcattggcctacaaacagaaaaaaaccttcagggagatagatgctgatctaggcattgtgagaaaagctgaattcatttttaatcatgaatggcttttaaggaaagaagatttattaactaaaataaatagattagagggaattctcatctatgagagaggaagggatgggattcaacctggaaaaaatgatgaagttttagtgaactgggtaaggtagactcaacaattaatgatggataatgctaggacccagcaccggtaatgagcttgtattatgactcaatagcatcactttatcactttaacgcagatggaggcctaaataaccatagggcaatggttcttcttagatgcagaaggacacatttatataatcttagggaccccatctctgaggtcactcataatttatattaattcattattattgccattgccccaagaatagataaggataagacatcctgtagcacaggtagcagagatataaactattcttattcttgtgtcttgtctataggaagggagtgtatcctggtgtatgacagcatatagtagagaccagtgtcaattagggcctgtgaactgagacagggtgactggctaagtccacaacccattagaaacccagaaataatcaaatcatggagagattagtccagggccaataaatatggattagggaagaatgtgttaactcagcaggccagggtttcttcaaccctgcacattcaaagagggatcatggaaaggaagctgaatttgctgagttttgccacgtgggcattgcatgcctatgtgattaaccaccaataaaaacctgggacatcaaaaaataaataagctgctttaattgccaagaattcacatgtggttgtatgcagcattactgggagattgaagtgtatctgcatgtgattctactgtgatggacacttgtaaatttgtgcctggagtctcctggaatttgccctgagaatctttttcctttgttgataagaatctgcatccttttgttttaataaacgataaacatgagtataaaagcttctctgagttctgagag

SEQ ID NO: 464364 - DNA, 2224 bp, Homo sapiens
tgagtcggcctcgccagtgagcatgcgcgaggcccgagccgccgctgtggtcacatcggggctgagaccagtcctggccagggcagttaacaggaaggtctccggaggccgggattcgcggagggtccatcaggaggaagaaacctcagacagatctccggggagacagcgcgggatcccagcctcaggcgtgcgcggacagtgtgcgggtgagtctccccaaaagtggcgctcttgggatgtcgaggacaggtctgcctgtgtgtccgtgggctgctctcttcaccggtggcttggtagtcgcagagagcagaacccagcaggttctggggctgcctgggtgtgggcctcagtaagcttacaatcatggcagaaggtgacgggggagccagcacttcacatggctggaagcaggaagaagagtgagaagtggggaggtgctatacacttttaacaaccagactcacaataactcactcactatcgcaagaacagcaccaaggagatggtgctaaaccatttaagagaaaccgctagatgatccaattgcctcccaacacgccccacctccaacagtgggacttatagtttgacttgagatttgggtggggacacagatccaaatgatatcagtgtgttaaaaggaaaaggagataacagtgggaaatggatatttaacttcaatttgtgagtttttattttagagttctaaaattatgtcttatactacctatacaagtgctggaatattttctgtattaagtggtagatatataatatccgaatatcatacttaccttctttgaccttgcagtttaagagggcattttaagaaagtaaacaaacacattgatttttttttaaaggagaaatttttcagtaaacgatatagttaagtctagtacacaatgacaacaaccatcttgggttaagcattggcctacaaacagaaaaaaaccttcagggagatagatgctgatctaggcattgtgagaaaagctgaattcatttttaatcatgaatggcttttaaggaaagaagatttattaactaaaataaatagattagagggaattctcatctatgagagaggaagggatgggattcaacctggaaaaaatgatgaagttttagtgaactgggtaaggtagactcaacaattaatgatggataatgctaggacccagcaccggtaatgagcttgtattatgactcaatagcatcactttatcactttaacgcagatggaggcctaaataaccatagggcaatggttcttcttagatgcagaaggacacatttatataatcttagggaccccatctctgaggtcactcataatttatattaattcattattattgccattgccccaagaatagataaggataagacatcctgtagcacaggtagcagagatataaactattcttattcttgtgtcttgtctataggaagggagtgtatcctggtgtatgacagcatatagtagagaccagtgtcaattagggcctgtgaactgagacagggtgactggctaagtccacaacccattagaaacccagaaataatcaaatcatggagagattagtccagggccaataaatatggattagggaagaatgtgttaactcagcaggccagggtttcttcaaccctgcacattcaaaggtaaggtttgtttttaggactagctagcttctgcagttctggaaacagtcttaccgtgaagagtgtttttgtatatctgaggccttgggtttatggtgaatgactgactttatatgcctgaggccctgagtcatgctgtatttatctgaaccatgtggtatcaatttaaccagatacgtttattctaagatatgatttatgctgaaagcctgcttttgttctagagggatcatggaaaggaagctgaatttgctgagttttgccacgtgggcattgcatgcctatgtgattaaccaccaataaaaacctgggacatcaaaaaataaataagctgctttaattgccaagaattcacatgtggttgtatgcagcattactgggagattgaagtgtatctgcatgtgattctactgtgatggacacttgtaaatttgtgcctggagtctcctggaatttgccctgagaatctttttcctttgttgataagaatctgcatccttttgttttaataaacgataaacatgagtataaaagcttctctgagttctgagag

SEQ ID NO: 464365 - DNA, 952 bp, Homo sapiens
tttgtttacctactcaagcctcagcaatggcggacacccctcccccagccagactgcctcgcagagcaatctcagactgctgtgctagcactagtctgttacagcttcccttcactaggaaagggaaatccccagaccccttgcacttccagggccagtcacttgccatttctcataacagcgtcagagagaaagaactgactgaaacgtttgagatgaagaaagttctcctcctgatcacagccatcttggcagtggctgttggtttcccagtctctcaagaccaggaacgagaaaaaagaagtatcagtgacagcgatgaattagcttcagggttttttgtgttcccttacccatatccatttcgcccacttccaccaattccatttccaagatttccatggtttagacgtaattttcctattccaatacctgaatctgcccctacaactccccttcctagcgaaaagtaaacaagaaggaaaagtcacgataaacctggtcacctgaaattgaaattgagccacttccttgaagaatcaaaattcctgttaataaaagaaaaacaaatgtaattgaaatagcacacagcattctctagtcaatatctttagtgatcttctttaataaacatgaaagcaaagattttggtttcttaatttccacaaattccatgattagtactcaatttgttttcaatcttcagcaatcccctgaagaaggaagaggtggcaggtggtgataaaaataaactgtcctacagcatgtgacaaaagtcatccaacaagattctacttgcacaataagcctttcagtgggtcagaatgactgcctttgtctccataagttgattatcaggaaattagaaaaattctctttgaataaagattatgtttcttcaccttaagtttaaattgttcatagctgagccccttagcatcaataatggaaa

SEQ ID NO: 464366 - DNA, 488 bp, Homo sapiens
  misc_feature (26)..(26): n is a, c, g, or t
  misc_feature (58)..(58): n is a, c, g, or t
gtaatgggtgatcgttacgtcgtgcntaggcagttgatatcgcccgcgccacgctttngtatgaagaaagttctcctcctgatcacagccatcttggcagtggctgttggtttcccagtctctcaagaccaggaacgagaaaaaagaagtatcagtgacagcgatgaattagcttcagggttttttgtgttcccttacccatatccatttcgcccacttccaccaattccatttccaagatttccatggtttagacgtaattttcctattccaatacctgaatctgcccctacaactccccttcctagcgaaaagtaaacaagaaggaaaagtcacgataaacctggtcacctgaaattgaaattgagccacttccttgaagaatcaaaattcctgttaataaaagaaaaacaaatgtaattgaaatagcacacagcattctctagtcaatatctttagtgatcttctttaataaacatgaaagcaaa

SEQ ID NO: 464367 - DNA, 382 bp, Homo sapiens
  misc_feature (12)..(12): n is a, c, g, or t
  misc_feature (34)..(34): n is a, c, g, or t
  misc_feature (43)..(43): n is a, c, g, or t
ttttccggagtnctctccagaaccagggaacganaaaaagaantatcagtgacagcgatgaattagcttcagggttttttgtgttcccttacccatatccatttcgcccacttccaccaattccatttccaagatttccatggtttagacgtaattttcctattccaatacctgaatctgcccctacaactccccttcctagcgaaaagtaaacaagaaggaaaagtcacgataaacctggtcacctgaaattgaaattgagccacttccttgaagaatcaaaattcctgttaataaaagaaaaacaaatgtaattgaaatagcacacagcattctctagtcaatatctttagtgatcttctttaataaacatgaaagcaaa

SEQ ID NO: 464368 - DNA, 488 bp, Homo sapiens
aagccatcacagtaaacacttaatattcccagtcattagacaaaatacgacaaacttcaaagaaacaagttctcctctctgcacacagccatcttggcagtggcagttggtttcccagtctctcatgaccaggaacgagaaaaaagaagtatcagtgacagcgatgaattagcttcagggttttttgtgttcccttacccatatccatttcgcccacttccaccaattccatttccaagatttccatggtttagacgtaattttcctattccaatacctgaatctgcccctacaactccccttcctagcgaaaagtaaacaagaaggaaaagtcacgataaacctggtcacctgaaattgaaattgagccacttccttgaagaatcaaaattcctgttaataaaagaaaaacaaatgtaattgaaatagcacacagcattctctagtcaatatctttagtgatcttctttaataaacatgaaagcaaa

SEQ ID NO: 464369 - DNA, 643 bp, Homo sapiens
tttgtttacctactcaagcctcagcaatggcggacacccctcccccagccagactgcctcgcagagcaatctcagactgctgtgctagcactagtctgttacagcttcccttcactaggaaagggaaatccccagaccccttgcacttccagggccagtcacttgccatttctcataacagcgtcagagagaaagaactgactgaaacgtttgagatgaagaaagttctcctcctgatcacagccatcttggcagtggctgttggtttcccagtctctcaagaccaggaacgagaaaaaagaagtatcagtgacagcgatgaattagcttcagggttttttgtgttcccttacccatatccatttcgcccacttccaccaattccatttccaagatttccatggtttagacgtaattttcctattccaatacctgaatctgcccctacaactccccttcctagcgaaaagtaaacaagaaggaaaagtcacgataaacctggtcacctgaaattgaaattgagccacttccttgaagaatcaaaattcctgttaataaaagaaaaacaaatgtaattgaaatagcacacagcattctctagtcaatatctttagtgatcttctttaataaacatgaaagcaaa

SEQ ID NO: 464370 - DNA, 299 bp, Homo sapiens
gcggccgcctactactactactgctcgaattcaagcttctaacgatgtacggggacatggtttagacgtaattttcctattccaatacctgaatctgcccctacaactccccttcctagcgaaaagtaaacaagaaggaaaagtcacgataaacctggtcacctgaaattgaaattgagccacttccttgaagaatcaaaattcctgttaataaaagaaaaacaaatgtaattgaaatagcacacagcattctctagtcaatatctttagtgatcttctttaataaacatgaaagcaaa

SEQ ID NO: 464371 - DNA, 519 bp, Homo sapiens
  misc_feature (26)..(26): n is a, c, g, or t
  misc_feature (58)..(58): n is a, c, g, or t
gtaatgggtgatcgttacgtcgtgcntaggcagttgatatcgcccgcgccacgctttngtatgaagaaagttctcctcctgatcacagccatcttggcagtggctgttggtttcccagtctctcaagaccaggaacgagaaaaaagaagtatcagtgacagcgatgaattagcttcagggttttttgtgttcccttacccatatccatttcgcccacttccaccaattccatttccaagatttccatggtttagacgtaattttcctattccaatacctgaatctgcccctacaactccccttcctagcgaaaagtaaacaagaaggaaaagtcacgataaacctggtcacctgaaattgaaattgagccacttccttgaagaatcaaaattcctgttaataaaagaaaaacaaatgtaattgaaatagcacacagcattctctagtcaatatctttagtgatcttctttaataaacatgaaagcaaaaaacaaaaaaaaatggtctcgttggactcac

SEQ ID NO: 464372 - DNA, 1678 bp, Homo sapiens
ctgtccttatgtggtaccctcactgggtggagaccatgtacatcatgtcggtctccctcctgggaaatctgatagaaaattcctgccagacgtgtttggagttttttccttctggtgggttcgtggtcttgctggcttcaagagtgaagctgcaaaccttcccgctgagtgttacagctcttaaggggtcacgtctggagttgttcgttcctcctggcgggttcgtggtctcgctggctttaagagtgaagctccagaccttcgcgggccagcaggagtgcagggcctgccaagcccgcacccacccggaattcacgctggcctgcgagccccaaggaccacccaggacccagggccagtcagtgctgaccattcttccacctaaccagaccccaccgcttctcctcaccaccaccttcttccttcctcatagtgcaaatcagaggccctgcgagcactgggaagcagtgaagatggagtgaggcctgcagtgataaaatactttcaaaagccaggtctcatgaatcctcagcatagctgtaagggattgggagtgattatctccttgtacagatgaggagaccaaagtttcaggtcacacagcaggtaaataagtgatagtattaggacacctttctttctggtgtcaaatccatacctgctgcctttgctctggtttagattaggatttctcaaccttgacactattgaatccttgggttggagaattctttgctgtgggtggcgggggaaggtggggggctgtcctgtgcattggaggatgttcagcagcatccctggcctctccccactagattccagtagcacccacctcaccccactcccttgtaacaaaagaaaatatctccagacattgccatatgtcctgtggaaaggcaaaagaggagacgtatatatttgaatgtgggcagtggggattgagagcaactctatccaacttggattgctgtcatcagtgtgccccgtgggaaatctttagggagttcaccgctagggcagaaaaaaggtgaaatcgttgttttagatcatgtgcttagcaccatcatgttcctgtaagttccaggcggtttaactttgcctccttgtgccaaaaacgtctttgttttcatcaactgtgcttctgtttcttcattaggctgcattccggtcccagtttcaccttccctccgattttccctcgccggttgcatgttcatcatagctcctacacgcaggggtgctcccactaactatggaagcgggcgggagcatttcccctcatactaaagtctactttgggtctgctttgcaatttccttttggtctccctcctggagattcctgtgccacctgttaacacccttttgtgtttggctcatttctttcttcaaattttgctgcttttaatctttctttctaagcttagtggagtgtgtgtaaattaggagtgagcagacgatgaacaagggtccaaatgtctcttccttggggtaaagtgtattttgtaaaacagcccaagtctatttttcaagattagtctccccatgattcaggcctttccatgaacactggggtccttggttctccatggtgggctccttgggagtcagggctctgaggaggcagacactttgactgtgaacagtggagttttacacacctaaagttggcatgtcag

SEQ ID NO: 464373 - DNA, 2401 bp, Homo sapiens
  misc_feature (43)..(43): n is a, c, g, or t
  misc_feature (66)..(66): n is a, c, g, or t
  misc_feature (135)..(135): n is a, c, g, or t
  misc_feature (151)..(151): n is a, c, g, or t
  misc_feature (413)..(413): n is a, c, g, or t
ggtgggatgtggggctgcagatgctttctccttccaaggctcntgatccaaaactataaggtcccnagagtgttgagatgcacaagatgcaggtgtaaacccactcttgtgtctgactcctgaggaccggagctnccagtggggcctgggnctgcatgccaattccccgaactcagggccatgtcaagtacatggtgggtatcgctagaggtgtggtgaatgagcaaatacatgagcaaaaggaagaatgatgaatgatgctcatcacaccctcgggtgaggtggtgcctgcaatgctagacagaggtgcctggacgaggatgctggcagggccggtgtttgaagctgataatgttaaacctctctgcccaggtgccagcttggtgacctcaggcaaactgaaagaaagtctngaagagtttaactaagggacgaatatctacaccatgaggtgtggtaagcaccactcggagggtgtctttcaatccaggggaggatgtaaccaaccattctctacagcctgcttgggtgaatgtgccccagggcgagtcacttgtggaagggctgctgtatgtgctaagaaatacaacaatacagaatatccacagcaatacagaatatccacagcaaaacagaatatccacagcaaaacaacaatacagaatatccacagcaatacagaatatccacagcaatacagaatatccacagcaaaacaacaatacagaatacccacagcaatacagaatatccacagcaaaacaacaatacagaatatccacaacaatacagaatatccacagcaatatagaatacccacagcaatacagaatatccacagcaaaacaacaatacagaatacccacagcaatacagaatatccacaacaatacagaatatccacagcaatacagaatatccacagcaatacagaatatccacagcaaaacaacaatacagaatatccacagcaatacagaatatccacagcaatacagaatatccacagcaatacagaatacccacagcaatacagaatatccacagcaatacagaatacccacagcaatacgacaatgcagaatatccacagcaatgcagaatatgcacagcaaaacaacaatacagaatatccacaacaatacagaatatccacagcaatacagaatacccacagcaatacagaatatccacagcaaaacaacaatacagaatatccacagcaatacagaatacccacagcaatacagaatacccacagcaacacgacaacgcagaatatccacagcaatgcagaatatgcacagcaaaacaacaatacagaatatccacagcaatacaggaacaagtctaacttggctcatcctcttcggagtatttatcttattaccatgacaacttacttcataattttgttgccaaacacatgactaaaaaaataggacagggactttacttagtaaaattgaaaataaatcctcaaaagtacaaagtaaataataatccagtatccaaaagcattaaaaatgtaacttaaaaagttaatttagtggtgaatagatttttaaattcctaatattgttaaagcctttacaaatatcgaagatataagttctcaaaaaatacaaaatcaaaggttaacattaaacaatatttgcttgctcaaacgatattttctgggctttggaatacacccatgctttattttactttcaaaggattttttgaagtcttgctctttgtaaaacaatagaaccatccagaactgaagtaaaaacagaaattgctccttcactctctccacctcacacagctagtgttttgccttctcttcccccagagcaaccactcttaacagcaggcatatattcatacgaatagatagtctatatatatatatacaaaaaaataaatgtcatatatcttattttataacaataaaatcactttacagtcatagtaatgcataagactgcattcagctatatctcattccctttaatgtctgtgtggtacaacataatgtggatatacttaaattcttaaccatcctcttattgaccaatatgcaggttgttttcaatttatcattaatacaaagaaggttgcaaaggacgttttgtacatatgcctttagggcacatggcgtgatggataacaaaagtaaaagtgctgttcacatgatatgcacactcgatatttgataggcattactgcattgttctttaaatggtccatgaaatgctattcacaaatagttgctactctctgctgcacatcaacttctgacaagtctgtaaatgaatagcacaaaaatgaggttcctgttattgtctgttaggttcaacagtccctgaactcttcagaaaataaagaaattttaaaatctccctcaaacacc

SEQ ID NO: 464374 - DNA, 1472 bp, Homo sapiens
agcagcaagaatgagagcagagggggaagcaaaggtggcacattgattataacacacagctgaggtctcgatcacactagatgtctccagtcagtcgtgtggaaatcgatgtgcttcagaacagtctattggatgacctggctccaggatcagggaagtcagagcccagacctcggttcacggtgcttcctcagattctgggaatgctgcaggaagctgaacttcaggggcccagtgggttcaggccccagacaccagggtctttgcagtcccatcatgagtcttgttctgtcgcccaggctggagtacagtggtgtgatctcggctcactgcaacgtctgcctcccaggttcaagcgattctcccacctcagcctcctgaatagatgggattacaggcacccaccaccacgcccagataatatttgtatttttagtagagatggggtttcaacatattcaccaggctggccttgaactcctgacctaaggtgatccacctacctcggcctcccaaagttctgggactacaggagtgagccaccatgcccagcctatacttattccctgacttctcccaactagtatgtaaacttcaagctgacaaggaatttgtcttaaaacagtatctggcatgtaagaagcactcaattaatattcattcactgaatgaaagaagaaaggaaagagcatatgacaagaaaaacaacaacaacaacaacaaaaaggataagcaagacaatctacgtttataacagaagaattgaatctaggggtgctcgttaagaattgtgatcaagcttaaatttttcccagaaaaaaaaaagatgtttaaatagtacaagaaaatgaatacgacagattgcatcttgtaataagtaagttctaaagagagagagtgttccatgtctgaaaatgtctagctgatagcatcatgggcataatagtggatcttcatctaagtttattcagtctttacccaacttgtcctggatggccaagagactagcaaaggttggatgcaggtggaacatactctgactcagggatacttatttcatgattagacagcagtttcctaatcattgtccatcccttctccccatgcacacgattcagcccttagggttatctctggatacccatcacttgggttgctgggcactcttgtgtaaagagaaccagccctgagaaaagagaaatttccttcagcagtctacaccttcatagatgagggtagtagcaacaggagaaatctattttacagattaaaatcagaagaaaggagaaatttctgctaagacagaggagaacagtagactggctatcaacaagataaactatagaaaagcgatcactagcgtatgaaccatcccccaaggcactgtaggtcaaaacagatgatctaggaacctgcagatgaatccctctagaacaagaaaacaacattaataaaagtttatatttattgaa

SEQ ID NO: 464375 - DNA, 1527 bp, Homo sapiens
cacagtggtttgaagcgctgcaggcattgatgccgtttcttcataatgtcaatggtctttacaatttgtcaggcccctctgctgcaggtcttctggagtttgctggaggtccactccagaccctgtttgcctgggtatcaccagtggaggctgcagaacgcaaagattgctgcctattccttcctctggaagcttcatcccagaggggcacccaccagattccagctggagctctcctgtatgaggcagctggctgccaggaacgtttaagtctgctgaagctgcacccacagccgccccttcccagaggtgctctgtctcggggagatgggagttttatctataggcccctgactggggctgctgcctttctttcagagatgccctgctctaaagcaggacaagaaccaaaggagttgcaaactcagccaagatcaagccattggaaaattgtggttacaatggttcccataggatgcttgatattcttgccaatggatgcaagactccagggccattaagaataatgctgctgtcaacattcttgtataggcctttgtatggacatatgtatatattttttctcttaggtaatatacagaagttgaattgctgtacaatgttgagattttcaaagcttattgccattactaatactgtattaactggtctttcatctttggacttcagtttctgcatcttaaaaatgtggaaaatagaagtctctattacataaagttgtgaaatgtcatgccacgttattgctctattttttgtttctgctccaattatgcataggtgtctgagggcaagggttgaatgaggagaaaaagaaagaaacaagaagataatgaacttagctttaaagatgttggaccctttgattaagttggattgtttttccaagaagcgtactggaagaaacaacctttcttcctactgagtgtgattagaagcatggctctcctgctaacgactggcctccgtcttgtgaccagaaacagagctttagatgaaagctaaagccagttttggattgaagcaaaatactgtagaagacagagatggaagaaatctgtcttcagtaatattgcgccacttgatcaaggctttgcagacatcttccaagccagtgatatgtcttcattatttaagacagtttgagttttatttatcattatatgcaacagattcctgaacaatgcactcatgtggaatgacagcttctattcacttgctatctgaaaacatttcttaacacataattcccatttcctttttcccattattttgaagaaaaaagaactataatttcaaatcatagctcattgtctattcaagttcaagatcaaccattttctcaccagatactgtaatctcagttctttcaaagagatctcacatgtctgttactaaattttaattatttaccttgtttttcatatttttatatcaaaaaattcaataattgaatattttttgttaacactggtcatttcttgtctccccatctcattattcatggaa

SEQ ID NO: 464376 - DNA, 1699 bp, Homo sapiens
ccacctgctgtggtggattcgggcaggaccgaggccaggggcagtccgggctttgccccatcatcactcaggaggccaggtgtggtctcctctctgtgcggagcctcctcaccttgctctgggctcgtggccgtggctcttctctccatctggagccgcctcgcctccctgcgcactcgtggccatggctctcctctttgtgcggagccgcctcaccttgctgtgcgctcgtggccgtggctcttctctccatatggagtcgcctcacctccctgcgcactcgtggccgtggctctcctctctgtgtggagttgcttcaccttgctgtgtgctcgtggcctcctgtgacttatcagaagctccactgtgaaggagcagagaggcagtcatgccccctcctgggtatgatgctcctgaagcacgaggggctgctgccgatggccccagagccttgggcacatgggaggtggaccttcaggttgaagcccctcaagcccagaggcccgggaatggtgcaaggtgctcagccgagaactgttccccctgggaggactgtgcaggtgtccaccaggtgggcgtcaaaggcgaggggcggctggtgtgggagtgtggagggggccatgcaggagttgctcctggacggaatgaagagagcagcagaggagaggaagggggctgccaacaccgtgagaagctctcctttttcatgtgcgtgccttccagtgggaatgcaaaccgccacagcctcactggaagtccactgggcagcttcctatggaactgggcacactcttaccacacactccaacattcctgctctttggtattctccaaattaactgaaaacttctgtccacaccaaaacctgcacacggatgtttatagcagctttattcataattaccgaaactcagaagcagccaagatgcccctcagtcagcgaggggacgatggtgctagtcgtgtggcctctgagaagtcattaggtcatgagactggcgccctcaggacaggaacacaatgcaaagacgccctcaccagggacaggaacagcaatgcctcgaccgtgtcctgccagcctccagagctgccacagacaaacttctggggtttaagccaccagcctgtgaacaatggaaatggaaaagagatctttggctgccaggggttcagcggggaggcagtgagcaggccaagcaccgagggtttcgagggtggtgaaactgttccaagcgacagtagtcaccctggtgatgctgctgtaaacaaacctaccatgctgccagtcatagaaaagtctagcacctacggacatgagcatagaagtacacagtgcttgatgatgctctgcagtgagagtggagtcagcgtttcttcttgctattgagcttcgggataggcatctatcacttgcgctcacacagttccttccgttgaacatctgcaaggtgacacagatttgagggaccgtcacacttgattagagcccacttgggtgctcctggaacctggaacagacaaactccaagaggagattgaagattttccgcatcctgggactccaggccgaatcactttgtgtggcctcggagggaacacctatccaatgctgccaagaaataaacctttcagggaaaagggagtttgattgtaattcagtcgcaatttattctgttgtattttggccatttcatttgct

SEQ ID NO: 464377 - DNA, 1847 bp, Homo sapiens
ccacctgctgtggtggattcgggcaggaccgaggccaggggcagtccgggctttgccccatcatcactcaggaggccaggtgtggtctcctctctgtgcggagcctcctcaccttgctctgggctcgtggccgtggctcttctctccatctggagccgcctcgcctccctgcgcactcgtggccatggctctcctctttgtgcggagccgcctcaccttgctgtgcgctcgtggccgtggctcttctctccatatggagtcgcctcacctccctgcgcactcgtggccgtggctctcctctctgtgtggagttgcttcaccttgctgtgtgctcgtggcctcctgtgacttatcagaagctccactgtgaaggagcagagaggcagtcatgccccctcctgggtatgatgctcctgaagcacgaggggctgctgccgatggccccagagccttgggcacatgggaggtggaccttcaggttgaagcccctcaagcccagaggcccgggaatggtgcaaggtgctcagccgagaactgttccccctgggaggactgtgcaggtgtccaccaggtgggcgtcaaaggcgaggggcggctggtgtgggagtgtggagggggccatgcaggagttgctcctggacggaatgaagagagcagcagaggagaggaagggggctgccaacaccgtgagaagctctcctttttcatgtgcgtgccttccagtgggaatgcaaaccgccacagcctcactggaagtccactgggcagcttcctatggaactgggcacactcttaccacacactccaacattcctgctctttggtattctccaaattaactgaaaacttctgtccacaccaaaacctgcacacggatgtttatagcagctttattcataattaccgaaactcagaagcagccaagatgcccctcagtcagcgaggggacgatggtgctagtcgtgtggcctctgagaagtcattaggtcatgagactggcgccctcaggacaggaacacaatgcaaagacgccctcaccagggacaggaacagcaatgcctcgaccgtgtcctgccagcctccagagctgccacagacaaacttctggggtttaagccaccagcctgtgaacaatggaaatggaaaagagatctttggctgccaggggttcagcggggaggcagtgagcaggccaagcaccgagggtttcgagggtggtgaaactgttccaagcgacagtagtcaccctggtgatgctgctgtaaacaaacctaccatgctgccagtcatagaaaagtctagcacctacggacatgagcatagaagtacacagtgcttgatgatgccaaaggcgggttcttcaggaggtgtcctcctaggagctggcagctccatgcctgtcgttgacccttgacggccttccagagggacaagaggaggaggcgaaagacagtgacgtgtgtgatcctgactctgtgtaggctgaggctaagctctgcagtgagagtggagtcagcgtttcttcttgctattgagcttcgggataggcatctatcacttgcgctcacacagttccttccgttgaacatctgcaaggtgacacagatttgagggaccgtcacacttgattagagcccacttgggtgctcctggaacctggaacagacaaactccaagaggagattgaagattttccgcatcctgggactccaggccgaatcactttgtgtggcctcggagggaacacctatccaatgctgccaagaaataaacctttcagggaaaagggagtttgattgtaattcagtcgcaatttattctgttgtattttggccatttcatttgct

SEQ ID NO: 464378 - DNA, 1262 bp, Homo sapiens
gtcccgggccggcggcccccgccagccgccgccgccgccggccccgcctccgggcaccatgctgccctcgcaggaggcctccaagctctaccacgagcactacatgcggaactcgcgggccatcggcgtgctgtgggccatcttcaccatctgcttcgccatcatcaacgtggtggtcttcatccagccctactgggtgggcgacagcgtgagcacccccaagcctggctacttcggcctcttccactactgcgtgggcagcgggctggcgggccgcgagctcacctgccggggctccttcaccgacttcagcaccatcccgtccagcgccttcaaggcggccgccttcttcgtgctgctctccatggtgctgatcctcggctgcatcacctgcttttcgcttttcttcttctgcaacacggctacggtctacaagatctgcgcctggatgcagctcttggcaggtaggggagggggtggacggaactcccagaacaagcgccagggacggggctccttcctgccaggtccccttcctgaaggagtcggatagattctgcttctctgtgttaagacactcacctctttggctgacggaccctcagtgggtattggggagggggtacgctgcagagagacaccttagggcaggggacagagccttgggactgggtgggtgggtctgtatgcttgggtatgggtacgctgcatttattgctcggttagcattaagttagtgtctctaagggtctctgttggctgtcttgggggaaatatttatctgagtgaggggttactgtaggtatgatcaatttctgttatgttgaaaaaaagcatgaaatggtgaatcaagagatctggcttggacttttaatttgttgacactatcaacttgggtgtttcactttacttctctgaggctcggtttcctcatctgtaaaacaggggagaagattccaaaaggacaaatgaaagagtgttttgtaacctttaaaatgctgtgataagggggagaggctgtctattgtgcttatccagtgtttgagatcaacgtgatgaacatcctcacagttaaatcttagaggacatctgtgaacattttcttcgataaattcctgtaaattggcaagctcagtcaaaagaggtttaaacgtttcatttttctgtttttgagattaatccatgatttctataagttacatttgacctctgcattgcctttctttgctgctttaattatttcattccaagtgaatgaaaat

SEQ ID NO: 464379 - DNA, 1622 bp, Homo sapiens
tccctgacttccgggtcgcggtgcttgaagggagtgttccgtcgtttccgttgccggctgtttgcagtggggaaaccgaggcagctcctgctccccctagttcttccgctcctgtgaggaaaaaaaaatgtttatttctttgtgggagttcttctatgggcacttttttcgattttggatgaaatggctattacgacagatgactgggaagtgtgaattgcagcgaatatttgatacctatgtaggtgcacaaaggacacacaggatagaaaattccttgacatactccaagaataaggttttacagaaggcgacacatgttgttcagagtgaagtggacaaatatgtagatgatattatgaaggaaaagaatattaaccctgagaaggatgccagttttaaaatatgcatgaagatgtgcttactgcagataactggttataaacagctgtatttggatgtagaaagtgtgaggaaaaggccatatgattctgataacctacagcatgaagagctactcatgaagctttggaatcttctaatgcccacgaagaagttaaacgctagaatctccaagcagtgggctgaaattggttttcagggtgatgatcccaagacagacttcagaggcatgggcatacttgggttaatcaatcttgtgtatttcagtgaaaattacactagtgaagctcatcagattctttcccgttcaaatcatccaaaattagggtattcttatgcaatagttggaatcaatcttacagagatggcttatagcttactgaagagtgaagctttgaagtttcatctctataaccttgttcctggtataccaacaatggaacactttcatcagttttactgttatcttgtctatgaatttgacaagttttggtttgaagaagaaccagaaagcattatgtatttcaatttgtatagagagaagtttcatgaaaagattaaaggacttttactggattgtaatgtagcacttactttaaaagtataaatcatccactgtatcttctatttctaccacattttgcacattcaacagaatttatatgttgtaataggaattatctgatcaattacactcttatatataatttcctacaaaaatatttcagaaattctatttaagaaagctagtggacaatcagtgtatgtttacaattgtttatacactgttctccaaaggtaccttatccttccaaagatcccctctgtagagtcatgcgaactacagtttggaacttgggacttagcccgttggtgtaaaagtataaatcaggtatttgtattaaattgattaaaatgtgaattggccaacttgcttccctccatttgcaactgcccgttgcctgaccagggtcccatgcaaagaaataaagttatatgttttcttccttattcttgaaagaaacatgctatttgaaggttgtgatttgtcctagtttgaattctttgctggtatgtagaaatctaggtatctagtcttttaaatattgattttattagccactttgccaaactcttattatgtatgccaattcttttggattttctgtgtacacattcatatcacttgtgagctataagatgccaaattataaacagga

SEQ ID NO: 464380 - DNA, 1102 bp, Homo sapiens
tccctgacttccgggtcgcggtgcttgaagggagtgttccgtcgtttccgttgccggctgtttgcagtggggaaaccgaggcagctcctgctccccctagttcttccgctcctgtgaggaaaaaaaaatgtttatttctttgtgggagttcttctatgggcacttttttcgattttggatgaaatggctattacgacagatgactgggaagtgtgaattgcagcgaatatttgatacctatgtaggtgcacaaaggacacacaggatagaaaattccttgacatactccaagaataaggttttacagaaggcgacacatgttgttcagagtgaagtggacaaatatgtagatgatattatgaaggaaaagaatattaaccctgagaaggatgccagttttaaaatatgcatgaagatgtgcttactgcagataactggttataaacagctgtatttggatgtagaaagtgtgaggaaaaggccatatgattctgataacctacagcatgaagagctactcatgaagctttggaatcttctaatgcccacgaagaagttaaacgctagaatctccaagcagtgggctgaaattggttttcagggtgatgatcccaagacagacttcagaggcatgggcatacttgggttaatcaatcttgtgtaagtgaaagtaaactttcttttcttccctaaatgaaattacatttaatctctgatctagttacttctaataagaagtgatctagttgattcatactatctctgaattttaataactgcagtgctggaagtatttgctaatgtgttggcaacaatatgaagatattggaggccaggcacagtggctcacgcctgtaatcccagcactttgggaggctgaggccagaggatcacttgaagccagaagtttgagaccaatctgagcaatatagtgagaccctgtctctacaaaaataattagccaggcatggtggcatttgcctgtagtccagccacttgggaggctgaggcagaaggattgcctgagcccaggaattcaagtttacagtgagtcatgattgtgccacctccagcctgggtgacagagcaagaccctgtcttt

SEQ ID NO: 464381 - DNA, 766 bp, Homo sapiens
caggtcatgcatgactatgactggagcagacttggacctggactagaatcactacgactcattatgtatttcaatttgtatagagagaagtttcatgaaaagattaaaggacttttactggattgtaatgtagcacttactttaaaagtataaatcatccactgtatcttctatttctaccacattttgcacattcaacagaatttatatgttgtaataggaattatctgatcaattacactcttatatataatttcctacaaaaatatttcagaaattctatttaagaaagctagtggacaatcagtgtatgtttacaattgtttatacactgttctccaaaggtaccttatccttccaaagatcccctctgtagagtcatgcgaactacagtttggaacttgggacttagcccgttggtgtaaaagtataaatcaggtatttgtattaaattgattaaaatgtgaattggccaacttgcttccctccatttgcaactgcccgttgcctgaccagggtcccatgcaaagaaataaagttatatgttttcttccttattcttgaaagaaacatgctatttgaaggttgtgatttgtcctagtttgaattctttgctggtatgtagaaatctaggtatctagtcttttaaatattgattttattagccactttgccaaactcttattatgtatgccaattcttttggattttctgtgtacacattcatatcacttgtgagctataagatgccaaattataaacagga

SEQ ID NO: 464382 - DNA, 616 bp, Homo sapiens
tccctgacttccgggtcgcggtgcttgaagggagtgttccgtcgtttccgttgccggctgtttgcagtggggaaaccgaggcagctcctgctccccctagttcttccgctcctgtgaggaaaaaaaaatgtttatttctttgtgggagttcttctatgggcacttttttcgattttggatgaaatggctattacgacagatgactgggaagtgtgaattgcagcgaatatttgatacctatgtaggtgcacaaaggacacacaggataggtaatgttattcaaaaagaaaaagtactaataaaagtttaacggagtgtttttctcaggactcacagtgacagatgtatttcttttgtatcctgacaagtcacttaaactgaatttcataagctctgaagtcccgctttgactccttcagctctaaaattgtatgaatttatagaaaaagtggttatttaattgcttatgtgtggaaagaattctctggctcctgaagtttatcggttattccttagattatagttgcaacctattttctggtgaaaaatttctatacttacataatccctttgaaattttcactcacatggccactcaatacctggccactcaata

SEQ ID NO: 464383 - DNA, 360 bp, Homo sapiens
attggccatttgatcatcaattaatagcggtatatattacacctgccattgtttttaaatgcctaattaaactgtcaaaacagacacaatgaaatgatagatacataatttgagatttgatcagttgtataaactttttaaattttaaaattcagtttaaggtcattaagcttgtcttgtatgtttccctcctccaggaaaaaaaaatgtttatttctttgtgggagttcttctatgggcacttttttcgattttggatgaaatggctattacgacagatgactgggaagtgtgaattgcagcgaatatttgatacctatgtaggtgcacaaaggacacacaggataggtaatgttattc

SEQ ID NO: 464384 - DNA, 1701 bp, Homo sapiens
agagccctggggtgctcaggcgccgctacgcgtgcatcccctctgctcggcagttctgcgcttttgtcctaatgagcgcggactagatggcttgattttcaagataatgatcaacccagctgtgctatgcgctctttctgcactgacctgcgggtacttcgaacttcgacagtccctcctcaggccctagtccagaggaaaaaaaaatgtttatttctttgtgggagttcttctatgggcacttttttcgattttggatgaaatggctattacgacagatgactgggaagtgtgaattgcagcgaatatttgatacctatgtaggtgcacaaaggacacacaggatagaaaattccttgacatactccaagaataaggttttacagaaggcgacacatgttgttcagagtgaagtggacaaatatgtagatgatattatgaaggaaaagaatattaaccctgagaaggatgccagttttaaaatatgcatgaagatgtgcttactgcagataactggttataaacagctgtatttggatgtagaaagtgtgaggaaaaggccatatgattctgataacctacagcatgaagagctactcatgaagctttggaatcttctaatgcccacgaagaagttaaacgctagaatctccaagcagtgggctgaaattggttttcagggtgatgatcccaagacagacttcagaggcatgggcatacttgggttaatcaatcttgtgtatttcagtgaaaattacactagtgaagctcatcagattctttcccgttcaaatcatccaaaattagggtattcttatgcaatagttggaatcaatcttacagagatggcttatagcttactgaagagtgaagctttgaagtttcatctctataaccttgttcctggtataccaacaatggaacactttcatcagttttactgttatcttgtctatgaatttgacaagttttggtttgaagaagaaccagaaagcattatgtatttcaatttgtatagagagaagtttcatgaaaagattaaaggacttttactggattgtaatgtagcacttactttaaaagtataaatcatccactgtatcttctatttctaccacattttgcacattcaacagaatttatatgttgtaataggaattatctgatcaattacactcttatatataatttcctacaaaaatatttcagaaattctatttaagaaagctagtggacaatcagtgtatgtttacaattgtttatacactgttctccaaaggtaccttatccttccaaagatcccctctgtagagtcatgcgaactacagtttggaacttgggacttagcccgttggtgtaaaagtataaatcaggtatttgtattaaattgattaaaatgtgaattggccaacttgcttccctccatttgcaactgcccgttgcctgaccagggtcccatgcaaagaaataaagttatatgttttcttccttattcttgaaagaaacatgctatttgaaggttgtgatttgtcctagtttgaattctttgctggtatgtagaaatctaggtatctagtcttttaaatattgattttattagccactttgccaaactcttattatgtatgccaattcttttggattttctgtgtacacattcatatcacttgtgagctataagatgccaaattataaacagga

SEQ ID NO: 464385 - DNA, 410 bp, Homo sapiens
gttccgtcgtttccgttgccggctgtttgcagtggggaaaccgaggcagctcctgctccccctagttcttccgctcctgtgaggtggctgctgtttcttttcctcttgccccggatgcctcggtgcggctgcactgagagcgcgcgggctcgcgagccccgcggggttctgcgggaacccgggggcgcctgggccggcgggtctttgtgcgagccctgccctcccattcgcgggcggcgcgcgaggggggtcggcgcagagacgcccagagccctggggtgctcaggcgccgctacgcgtgcatcccctctgctcggcagttctgcgcttttgtcctaatgagcgcggactagatggcttgattttcaagataatgatcaacccagctgtgctatgcgctctttctgcac

SEQ ID NO: 464386 - DNA, 1575 bp, Homo sapiens
gattcctcacaatcccatgaggcaaaagcaaaagtctcttcctgtgttattaagtgaaaatggctgattataaaaaggccctgggtcaggaggttgccgattccaggaagaatcagaccttatccctgcccttgagtctcaagaagaggaaaggaaaacaaataagcatagtacagtgtgaaaagtgggactgtggtcaaatttcagtctgcaaactcagatcatgaaagatagtgtggcttccactttggtctcttatatcacctactgggggaagccagctgccatgttgtgaggacactcaagaagctctgtggagaggctcttttgaaggagaaccaatgcctcccaccaacagccagcatcaacttgggacatgtgagtgaaccaattggaagtggatcctccagccaagtcaagccttcagatgactgaagccccagcctcatgagagatagcaggctaaaactgcccagctaagctgctcctgaaatcctgaccccccaaattataaaagacaataaattattattgttgttttaagccactacatgttggggtgattcattatgcagcaacagataataaatacatcacccttgtattcattactgacgtttattgggagcatagtgtgtgatttttcatttaacccttccagtaatgctggcttggcactttgcacttacaaagccttatacatccctaattccatggaatcacacctggcagatggtagtggtgagaagtgggtggctactggatacaggaatgaggcagatcaatatgaactgatgtggaaggatctgagtcatactgttaaaccgacaaatcaagatgtaaaggacaatgtgttaggccacattttcccagaagcagaccttgagaggaaaggaatgaaaacagtttatcccaggaagcactgggaagagagagggacagaagacagggagagaaggaggccagcaaaggtgtgttattgagcaggttactgctttttaaaacttgggctcaatccctgcggggagcgctgggaggtggtgtaggatgtgtctccaagttgtcccaataggaaaggcaggagaacggtgcaattataccaactcccacgaatcgctggttgagattggctcttaaaggggagcaccaacttcctggcacttcagactgccttggtgcaatgaatctcaggcactggggtttgaagcagggttggtgttcatggaaatggtgactgggagggggaccttgctggtgtctgttatgcagtgcttatggtgcactgccatttccatcttcaccaaggaattgatctttatatggatatagagaataactctgaagggacaaataacattctggtgttgcctctggggagaggaagtagaatatttagggtcaagatggttgagacactcttcactgtataactttctgtatacttttattttttttactgtgtgttttaatttatgaaattaaaaaataatgttgggaattttactttcattcatggaggagtgacctttgaaagaagagaggcacctgagggcatgagggaagccccaggtcccc

SEQ ID NO: 464387 - DNA, 3539 bp, Homo sapiens
gcggtaaagatggggcggcgcggccggggctcgccagcaccagccctggaaccccatgggggacctcgacaacagcgcctttgcggcgtgggcccctttctgcagctcctccacccgcgcgctgtcggctccgggacactggggctttgaagggcgccagttcccagccgcacctgcacgcctaggagggcgcaggccgcgtgtccctgtgggaggaaggccccggcaacctgcaaagacctcacgtcacagaaacttgcggcgtttgcccccgatgcgcgcgtcaggtgctccgtcccttccaggtggcagaggagagggaagggtcgcgcctggtgggggcctgagagccaccgggctgcggtgcgcgagtgtggacaccgccccgccttctgcgtctacagccctgggttctgggacctttggaaaccgctttggacgaagctgagcatctctttccccacgctgacctcccccatagactccggatgggagtaaatgaggctcctgggaaatccagaaactctagagaagcttgtttgccaaaccttgctttgggcggtggagacagaatatcatgtcccagatcagcgtgtggtgactgtggaggcatttacacacagcacactccagctctgccactgggccggctgaggtggctgcggtacacggcgcccatcctgagccccaggttcctcacatgtcaacagcatgaaaagtgcctctaagacatccacaggtgtgcagtgttaaagcaggcagcgcctcagcttggttagctcccttaaggactgcggctcccttaggacaaggctctgtccctcagagcactgagtgcgatctcatgctggcatcttagagacattgtattcaccagccggtgaaagagtacaggcaaaaaacgtggtctcggactttccggtgatgcttaagaacatagttgcagtttttgttctgattctttgtgcatctcgcgctaatgaaggattctgccatgattgccacctctggagacgtcacagccagcacagccatgaccagggatgaacttggccattgtccagcagcaccatgggaggaccagctgctatgtcagcacagcagtgtcagcagcttcgtcaaacacaaacaccaccacctctctggatcagaagcacatggaaagcccaccttgcaagaagacccagctattccaaaagtacccatatccctcacagagcttggtgtgccaaagggcacaaggggttttagaccctggaccccggacatgttccaagactcttttactttatgtcagacatgcaagccctgcctcggcttcttcccaacactcagctttttcccaacacacgtattcactaactcaggcctcagcacaccttactgggtaggtgctaccatctgcccattttatagatgaggaaataaaggcccagagatgataagaaacttgcccagggtcacatagtcaagaagtaagtgactgtatcagtcatctatgggtttgtaacaaattaccccaggatgtagtggcttgaaacaatatttaatatctcacaacttctgtaggtcacaaatgctggcagggcttaactgggtcttctgcttccaagtctctgtaaactcagataaacttctaagccccctgctgactgaatggactccttgtgatcaagaggaccccagaaaaaccttaaaactaaactcccagccatagtgggatgtgaggtcagacacacctcattctaccccctcccttttgtggtttagacacaactgaccgacattaatgttaacacagagatcttaagactggcaaatagactctctgtagcagtaagataccagattgtaaacaggacccaaggccatgccaggcaagggttacatcacacatccctaacctttcttctaacggccaagggtatttttctctagcaactaaacaagcactggcctcgagatacgttaaacaattccagctcatccagctcagagacgttaaccaaccgaccccattccaccagccataactgcagctttgacttgaacttactgaaatctctttgtatactacaaagagcctgtagtacaaagcgattgattccagtaactttctcctgaccatgaactggtcctggctggctgtacacttggacaccttcatgtcctgaaaagaccttttgacatatagggtctaactgtagtacatttaaatgttaagtctccatcccaaagtgaacatgggtggtatgttacacgaacatttgtcccatacacatgtgccaggaccatcctgaatattcatagctcctcctgtcacctgttgaatatgcatgtttagccaaccagttcggcataaagctcctgtcccagcttctcttcctccatggtgtttctctctggtcttggctggaggctgtgcttcccaggctgcaggatggccaccttgcaggctgaaacctttacaagaaataaagtctcctctgttttctaaatgtattaattgtggttgatatgatacctgatcttgaattgtagctcccatcattcccatgtattgtgggcgggactttgtgggaggtaattgaatcatgggggtggtgatttctcacactggtctcatggtagtgaataagtcttacaagatctgatggttttataagtcggagttcccctgaacaagctgtcttgcctgccaccatgtaagacgtgactttgctccccattcaccttccgtcatgattgtgaggcctctccagtcatgtggaactgtgggtcaattaaacctctttcctttataaattagccagtctcaggtatgtctgtattagcagcatgagaacagactaatacagtgcttttgtatttttaaagttaacatctctcaagaagtgggttgactcaagcctcaactagggcaggatctgtttccaagctcatgtatggggttgttggctggattagggtccaaggcagttgctggactaagggcctcagttccttgcttttccaatgctgcacttaattcattgcagtaaggcaggtgtgaggactttacccagcaggcccaaggccactctccctaaaaaggcctgaatgcaagactggcccttagttggcctctgggaacctggattttgggagtgttcccaacatcccaacgggtaagagtggttcaatgtgcctaaactgtttatgcaaacaatacactgagtgcctgctttccctgcgggagtctggaatgttggaggtgccagacaggtgcccacatgacccctgtaagctccctgagcactgagtctttaatgagcttccctgaaagacaacactttgcatgtgtaatcacaactcactgggtcaatcaagtctgtcctgtttgattcctctgggagaggactctcggaagcctgcacctgtttttttctagatgttaccccatgtgcctttccctttgctgcagtcacaagccttttgtgtaatacatcatagcagagtaggactaggtgctgagtcctgggagtcttcaccaaacccac

SEQ ID NO: 464388 - DNA, 1232 bp, Homo sapiens
gtacccctcggctctaccttgtctaggatacagtaggaagactgtatagttcaaagcaatatttcaaagacctctaacaggagtgaaaattgcataattcacttgtatgtccttatccatcccttttctaaataaaaatgctctactacctggtccagggtctttgattccatagcatagtgggaagcaggcactaaactgctaaattctaacaccatctgtatgacctaaatcctaagagatatattgtttctgctgccaatgccagaatcaacctcagctgccaacgccagaatcaacctcagctgccaaatgctagactgaaaaaagaatgtaaacagcttgatggaggggaggatcctggtgcacctgtggttttgacagcttttgctgctgcttgaggaggaaacaggttgcctgtttgttcttcaagagcacttctggcatccaggtattatgcaggcatgcactgccagctgtgaaagatgccgcttccttgtcacttcagagaatgatgcttctacagaagatccctcttgctatttcattcagggagctcgggagaggaagacaaaaagaatcaaatgcaaagcacagatcattgaaagggccagggtctgaagtgagacaactcgtgtcacagtgttttcaaacttgagaatgaagagaagaaaggaaatttggtttgatgttatcagttttgatttgctaacccaaaaggtccagaataaagaacaaatcattataaattcctggcattgcaatcattgtggaaaatgctgatttggttctattaactcactaattcaattaaaaggagactagcaaaaatcatcttaggagagattctgaactctttacttaaaaactactgtataacctcagggttttgctgaagtgggtattttccattttaaattatcttaattctgacaagtaaatgtctttaggatttatatacttacaagctttcaaaggaaaaatctgaaatgttgattaattgcaaagatgatatcagaaactttttgttaaagtagccaactatttttgtggatttattgctttttacttatataacaatactattcatacataccatgcaaattacatatacgtattctgtcactcacagacatagaatacagtgctagaaggaatttcaagataaatccagacatctaggataccctaatattgcccaagttgcctaattattaactcaggtcccgtaa

SEQ ID NO: 464389 - DNA, 1816 bp, Homo sapiens
ttgtttattataattgtttatcataattttaaacaatttattatgatgcttgtctcttccaaccttggggaacaggaaagcacaaggagctttctggttctgacctcctggaagcaggatcccctgaacacgggcatgcccacgcatatgccccccattgacaggcatagcggcttgagtcagtcaaatatttcattcagaaccgacaggttacaatctacctattggcatcctgctggtatcacatgtgacacacttgtgatagctgctgcaagctggacatgttcaagatgtgcatctttggaaaggcatttaccaaagactgttaaacaactttacacttatgaaacagggcttgctttaagcccagaacaaaaaagtttgagcaatgtcagcagcactgacagcacctttggacatgaagaacaaggcagtaacaaagaataagcacacaacccaccaaataaaactcatttatttaatcaaaaatatactattagtactttacacaataaaaaaattttaatattaatatgacttaaagatacgttaattcaatccaatcattcaaatttgtttcctggtttttaaacgccatagccaccaagcattagttataggaagactgtatagttcaaagcaatatttcaaagacctctaacaggagtgaaaattgcataattcacttgtatgtccttatccatcccttttctaaataaaaatgctctactacctggtccagggtctttgattccatagcatagtgggaagcaggcactaaactgctaaattctaacaccatctgtatgacctaaatcctaagagatatattgtttctgctgccaatgccagaatcaacctcagctgccaacgccagaatcaacctcagctgccaaatgctagactgaaaaaagaatgtaaacagcttgatggaggggaggatcctggtgcacctgtggttttgacagcttttgctgctgcttgaggaggaaacaggttgcctgtttgttcttcaagagcacttctggcatccaggtattatgcaggcatgcactgccagctgtgaaagatgccgcttccttgtcacttcagagaatgatgcttctacagaagatccctcttgctatttcattcagggagctcgggagaggaagacaaaaagaatcaaatgcaaagcacagatcattgaaagggccagggtctgaagtgagacaactcgtgtcacagtgttttcaaacttgagaatgaagagaagaaaggaaatttggtttgatgttatcagttttgatttgctaacccaaaaggtccagaataaagaacaaatcattataaattcctggcattgcaatcattgtggaaaatgctgatttggttctattaactcactaattcaattaaaaggagactagcaaaaatcatcttaggagagattctgaactctttacttaaaaactactgtataacctcagggttttgctgaagtgggtattttccattttaaattatcttaattctgacaagtaaatgtctttaggatttatatacttacaagctttcaaaggaaaaatctgaaatgttgattaattgcaaagatgatatcagaaactttttgttaaagtagccaactatttttgtggatttattgctttttacttatataacaatactattcatacataccatgcaaattacatatacgtattctgtcactcacagacatagaatacagtgctagaaggaatttcaagataaatccagacatctaggataccctaatattgcccaagttgcctaattattaactcaggtcccgtaa

SEQ ID NO: 464390 - DNA, 785 bp, Homo sapiens
attctggtcacagaggccagagtagactatcagtgtaatggcccttcccctttgatgatagcagcttttttcgggggagcaggggtggccaaacttcctagccttattttatcttcctttctagttctccccagaggctgctgggtccacctctccctctgccagacagacaggctcagacatgcaagaacggaagggggtgtgggggttggtgggaggattaagttggggaaagccagtcttgtctttgtagattaccagaactgacacacgtacacacacgtacactcactcactcactcactcatctattcatctatttttggcctaagtgcctttggacacttcttcggaaaagcacatgaactcttcggagtctcctgttccacttggtaaatttcctatagccacgcactgaaagtccctgctgccctccttcctctgagcttgtggggcccacagatcccctgctccacttcctgcttcatttcagctgatggtgagtccagggcaggcttgtaggaagggcgggctaggcgtggggaactgcagcacccaccccaccccccgccccagtgcttgttgccccagcctctgtctccctcgctgtgcccttcccttaagccccactcttggcctccccaaagacagagtttgttctgtttttattgataggatgacactccctcgttctaataccatctgaatgcctgagcaattacatcttacaacctcatgaaaaacacagcagcttgtcacgatgaatgatgttaccgtgaataatg

SEQ ID NO: 464391 - DNA, 1959 bp, Homo sapiens
tccatctggttcacactgatgtccatgatcattgagttcattttttatatcaactatgtgacacttcctatagtttccagttcctgtgaactgccatgtgtttgtctcctgtcatggtaacatttgcattcagggagaggcctctgctctctgcagaacagtgtgaaatcacctcatttttgccttcaatgaaggttgtctcttgctggtcaccaccacttcctcaaatgactaatgccactcttgctcacagtgctaaggcgctaaggagttttcagagggctagagtgattctgcatcctctggggttctcaggaaacgaggccacagggccatctgtgcatgaattctccggctacattccacaagaacaaattctggtcacagaggccagagtagactatcagtgtaatggcccttcccctttgatgatagcagcttttttcgggggagcaggggtggccaaacttcctagccttattttatcttcctttctagttctccccagaggctgctgggtccacctctccctctgccagacagacaggctcagacatgcaagaacggaagggggtgtgggggttggtgggaggattaagttggggaaagccagtcttgtctttgtagattaccagaactgacacacgtacacacacgtacactcactcactcactcactcatctattcatctatttttggcctaagtgcctttggacacttcttcggaaaagcacatgaactcttcggagtctcctgttccacttggtaaatttcctatagccacgcactgaaagtccctgctgccctccttcctctgagcttgtggggcccacagatcccctgctccacttcctgcttcatttcagctgatggatgacactccctcgttctaataccatctgaatgcctgagcaattacatcttacaacctcatgaaaaacacagcagcttgtcacgatgaatgatgttaccgtgaataatgcagttttgagttcaaactccttcttattccaagaatgagtaaatatccctattccctcccctccccattgcatttgggtttgacatgacatgaatcattgtggttttactcctgggtagaattgtttttctgtattgcattgccaattgatggaaggacaaaaaaaggaaacttaccaatgagcagtttcagatgaacttaaattctcagaaatcttgaagaatgaatgaactataactttctgaagttgcaaaaatgttcaagtcggaagtgacccatgggaagcaacctggtccttaattaggactggaaagaaaacggaggcccagcgagggaacagtggcttccccaaggtcacactgcaagtgagtggtggcactagtcacccaggagtcctcctgactccatggtatcctgaccccagaccagcagccttatttgtggttaaagaacgtggaaaaacagcttatgtttgaattttaaaatcatgccagtactaaagatctgcattccatgaatattgagctttgctgtgtgcgggttgctacgaattttgtaactattttctctaagagctctcagtattttacatatacaattccattctttattgtccagggaaaaagttgcatttactgagcagtaagagggtgatttgaagtccctggggtcccccacccttgtctttctatgtgagattgtattgcagggctcacatttattctctcagcagctcattgcacagacagtgtatttattgagcacctactgtgtgccaggagctatgtggtaagctaagcagacaaaaactcctgctctcacaagaagaaagaataaacaagcagacaattgcacctataatgtcagcctgaataccattttgtggcacacgaaaattatatgaaattcaagtttcaatgtccacaaataaagttttataggaacatagcatgctcactcatttaggtattgttac

SEQ ID NO: 464392 - DNA, 1173 bp, Homo sapiens
ggaatcatggctcctggtcctgctcaatccgtccccagggtcacacaccaaattatggttcctggtcctgctcaatccttccccagggtcacacaccggaattatcactcctggtcctgctcactcctggtcctgctcaatcccttcccagcgtcacacactggaattgtggctcctggtcctgctcaatcccttcccagtgtcacatacgggaatcatggctcctggtcctgctcaatccctccccagggtcacacaccaaattatggctcctggtcctgctcagtccttccccagggtcacacactggaatcatggctcctggtcctggctcaatccctccccaggaccacacagcagaattcttacaggggccgtctttgttggggtgtataacagagtaccatagaccggatagttataaagaacagaaacatatttctcacagttctggatggtggaagtctgagagcaggatgccagcgttgctgggggctggccagggagagttcttgtcctcctaccctgcaatccctggagatgcgctccccccaaccgcagcccaaagtgccttttcatggggctgtaaggcagctgtcacgaggaaaatccacctggatggacagcagcagagggaggaggaggcaggacagaccagaagagagacaatgaggttctgaacctagatgttggccaagggagcagaggagggcaggtcaggaggccctcgccctgcaatcacccttcctgggagccttcacttcacctgtgatctcaagacctctccctactgcctgactcgcgccgagcttatggaacatcttcccttgagggtcgcagtccattcgatgagcccttgtcacaggtcctgcttctgtggggagctcaagcgcggacacccttggaacactccccaagtctcttccttcccatccagcaccacttccctaagtcacagctgcaccacctctcatctggactgctcacagcaggtggagtcaggatcaaaatagccaaagaaaaagtaagaatccgtatacaggaaacaaatatgtgatgatgaccggagcagctcagaatcagaacttgagcaagacctgggctgctttgattttctgaaggtctcaaaatattaggggcaaaaaagaaaataaaaaaagaaaaaaaagaagg

SEQ ID NO: 464393 - DNA, 1064 bp, Homo sapiens
gaatggggcatcttccatcacccaggtgcccagacacatggacaatgggtagaggcacccctccgagcccttggacaaggcctgagtatcctttcccgtccgcatcctgcactcagtatggttccctgcaccaagttgcgtccatgtcccataggctgaccctgggatgtgcttgtctaatccagcaggaaaagcccacagggctaaagggaatgcagaagcctaaatacaaagcaagtgcccctgccactcataactgccacatccccatagaaacattcactttcattagctggagaggagtttctcttacttcattccttgaaccactgtttatggagcacttccaattaccagacacaggtgacaaaaagaaaaaggaacactcaacatttaatttgactcacagttcatggtcttgaatgcatggcttcggatggcaaggcaatgcgttccgtgcctaagcaaagcacctagctctcaggaactgagaccactagctgagtgctctgtgactgttgggacttgagacccttcttatctcccccaagactcagtgggatggggctgctgttccggagctgactccaacatgccagccttttggaaatttgcctggaggctgaactgaaggtaggtccctcttccctccccccatcatttatttctttaacttaaaaacacttttttgggggatctcatatgttacaatctattaaatacttccttcctctcttcttccctgggtggagtaaatgtatgtgggaaagagaattctagagcaggagtaaggaaccctggatttgctaagacgtctggatctacagcaggcctgaggaaccctcgatgtacccaggactaaaggtccctggatgtgcatttgaattaaggaaacttgtctttgcacggttctcgtggtttacatggcctcttttgaacactccatttcttcttgtgtaaatggcacagcatgcccatcctgcccaactcactgggttacttggcacaagagaaccataaaagtgcttcgaaaaatatgaggcctaatgcaatagaggatggga

SEQ ID NO: 464394 - DNA, 2663 bp, Homo sapiens
acacatctacaaccatctgatctttgacaaagctgacaaaaacaagcaattgggaaatgatctcctattcagacatggtcatgggcaaaggcttcatgactaaaacacttaaagcaatggcaacaaaagccaaaattgacaaatgggatctaattaaactaaagagcttctgcacagcaaaagaaactatcagcaaagtgaacaggcaacccacagaatgggagaaaagttttgcaatctattcatttgacaaagggctaataatcagaatctacaaggaacttaaagaaatttacaagaagaaaacaaacaaccccatcaaaaaggacaaggatgtagttggaaaccatcattctcagcaaactaacacaagaacagagaaccaaacaccactgcaagttctcactcttaagtgggagttgaacaatgagaacacatggacacagggaggggaacatcacaccctggggcctgtgggggttggtgggctaggggagggatggtattaggagaaatacctaatatattttcatactgtttcctgatttataatcaattttattaaaaatatattttatggatctaggctttatgattgtattaactgaagagttcagatacaccaataagaaaagacaataaaataaacgaaaagaatataaaaagataactcacaaaagaggaattacaaaggaaaaggaatcaagttttaaaaaatatgagacttttttttacttaatagaggagaatatttattataattgacaatactttttactggaagaattcatagatgctggtatactcagatattggttttgacaataacaattagaacaactgttttataaacaacttggtactctgcatcaaaatttatgaaaaatgtcatacttttgtcagtgattcattccacttctgggactctatgctacaaatataaggtgggagatatattgaaagactatttgaattatatactttatttatattagtgaaaatgctaaaagtaccagaatatccaacagtaagggaatgattacataaattatgaagcatccactgaaaggaatagtataaaaggtgtcaaaatgaatgtcaatgaagactataaacatgggaaaatgttaatttaaaatatattttaagagctcaatatgacaggtttagtgctaccacaaaaatctaagaagaaaaatgtgcttataaaacaaaattttgaaacaaatgataaaaaatgttaaagcaattttgcaggtttggggatgatggtttttgatgttttttttctttatgttctaattttccttattcatgcttatttgtaatacgaaaattttaagtgtgtgaatacttacagggcattcactgtgtgtcgggcactatgctaggccttggaaacatagaggtaagaaagacagctatggcggctaccctcacagaacacaggatcaccaggatttggttacttggaatcagccttgactcatctctcttccacactcaaatctaatccattaggaaataccactggctttgctttcaaaataatatctaaaacccgatcattctccactatcttcattgtaacatcctagtataaatcaccatcatctccttcctggttactagaacagccttgtggtagaataatgcccccctcacccccccgaaagatgtctgtgtcctaatactcagaacctgtgactatgttacctgataggactttgcaggccttttattaagagtgtttgcaacatgtctcctatgccgtgggtgtcagtcagtgtcacaatgcaagctttgttctgaaaaagaatctcatagattttataggctctagaaggagagtgacattccaattttctcccaattctattggaaggtcaatcttaaatgctgtataggaggatctcattgagaagatatcatttgagcaaagatgtaaagcaagggagggaatgagtcagtggctacatagcgagagtgtcctaggcagaggaaacagcttctacaaaagccctgaagcaagagaatgtttgaagtgttcaagaataaacaggagatgcagaatgaatggaattgagagtgagtgaggcagtcggatacaagagagactaatatggggcagcactgaagactgctgacagcagccacatgagtgagctcagagtggacacaacagccccttcagaggctgcagggatggcagacagcctgactgcaatgtcgtgaaagatgctgaggcagaaccatgcagcaaagtcattcccagattcctgactctcagaaaatgtgtgagataataaatgctattattttaagctgctaaattttggggcaatttactacttagcagtagatgcctaacacaagattaataatatttatcataaaatgatatatacaccttttaaagaagttaagcacagttcagataagaattttaagatttacacttaatgtatcatccagtaactatcatttttaacattagtgttactttagagaagtctgaacttgccctttttttcatctttatgcctgaggaaatttttctttatcatcaaagaactctgagaattgatgggcactgtgttagagcaagtgggaagtatagacacagcttcccatgttaagcacgagcaagaagaaaataattt

SEQ ID NO: 464395 - DNA, 1259 bp, Homo sapiens
  misc_feature (1)..(2): n is a, c, g, or t
  misc_feature (5)..(5): n is a, c, g, or t
  misc_feature (7)..(7): n is a, c, g, or t
  misc_feature (10)..(10): n is a, c, g, or t
  misc_feature (12)..(13): n is a, c, g, or t
  misc_feature (15)..(15): n is a, c, g, or t
nnttntnttnannanagtggtgccggggaggacagtgtgtgaaatatggtgatgaaggccccaagcccacccatggccactggtcggactggtcttcttggtccccatgctccaggacctgcggagggggagtatctcataggagtcgcctctgcaccaaccccaattccacattctctcaaatgtgctatcctgggaaagtgtggtcctcctcaatcagcccctccctgtgcagggccatcgcatggagggaagttctgtgagggctccactcgcactctgaagctctgcaacagtcagaaatgtccccgggacagtgttgacttccgtgctgctcagtgtgccgagcacaacagcagacgattcagagggcggcactacaagtggaagccttacactcaagtagaagatcaggacttatgcaaactctactgtatcgcagaaggatttgatttcttcttttctttgtcaaataaagtcaaagatgggactccatgctcggaggatagccgtaatgtttgtatagatgggatatgtgagagagttggatgtgacaatgtccttggatctgatgctgttgaagacgtctgtggggtgtgtaacgggaataactcagcctgcacgattcacaggggtctctacaccaagcaccaccacaccaaccagtattatcacatggtcaccattccttctggagcccggagtatccgcatctatgaaatgaacgtctctacctcctacatttctgtgcgcaatgccctcagaaggtactacctgaatgggcactggaccgtggactggcccggccggtacaaattttcgggcactactttcgactacagacggtcctataatgagcccgagaacttaatcgctactggaccaaccaacgagacactgattgtggagctgctgtttcagggaaggaacccgggtgttgcctgggaatactccatgcctcgcttggggaccgagaagcagccccctgcccagcccagctacacttgggccatcgtgcgctctgagtgctccgtgtcctgcggaggggaatttaagggtctacgaggggcagttatggaattcatgaatgggaagaagacagctggaaaatttcccccacctcttgcttcattccagaaacattactttgcatcaaaagaggacggataaatctttttgatttaaagagatctcatttccttatctcttacaatgggcccatctctctgtaggaaataaggttttcacacagccaggta

SEQ ID NO: 464396 - DNA, 1198 bp, Homo sapiens
gttgagtcatacatcaacctctagtaaaaagtggcatgctctcagtcaaagggcacctgagatgatatgcctctgtgcactctagccttagaaatatgcttatctcctgcaggcagagcatgctggaagtgccagggagttaaggttaccaggaacagccctcaactaataatgaggaaaagcttgtggataaatatccaagccccctgccttcagaccttgaccattatgcgcttcccaagctgtggctgctgcatttcacattttctttcaaaattgggcaaggaattactaaaagatgctccagtagatcatctgggtaccaaacatatttctttctgtacccagtgtagaatagcaaccctacttttttatgatgctctggtgactcccatagacttgattatggtcagagtgtcatacaaatctaggctatacacagacatgtttccaagctaaagtgataagatgtctaaaagaaatatttcttagtctgtgttgaattaatgctgcagaaggtcatgggtgagtgaattactttcagaagggaggaagcaatagcaatagtgagcaaactgtgtatgaggagaccctatgaagcaagggcattctgtattgaatattgcaactcaaggaccaattcaaggttccttcttgggaacttttatagagagacacagaccataaaagaagggtacagaaattaagatgttgagagaaacaatactaccatgccagtttacatgcaaagagctacttctgtcttttggttcagatgggaactatgggaatgaaagctgctagtgttttgtggaatcttttccagaatatttttattgtttttctcctatgctgattatgaaatcaatataggcttatctcagaaaaatcagaatatgtagaaaagcaaaaacaactccaacaaaatcacaaaaaattttctccattcagagatagccattattagcaacttgtctatccaatcatatcctttttttaattaaaaaagttctatataataggattttgtaatctgtttttttcactaaatactgtcatctcaatagagcttatttttacatgattttgaaatatgcctgcatggtattcttctataggaatgtattgtaatttatttaattagtcctctaagggatgggcatttatatcatttgaaacttccattattataactttg

SEQ ID NO: 464397 - DNA, 730 bp, Homo sapiens
ttatgtacataaggtatttggcatggtgcaaggaacattaccactctcgcattttactcagtccctggagctccctgtgtccgtctcagtcatagcatttggcatttggtttctcaaccgttggtttcctttcctgcttctctcacttgatggtgaattaattggggattgtaaattcttcagcactgattattatgctgggaacgtagaaggcatttcttatactggttttacaaatgagaagctgaagctgagagtgaagatacggtttgcccaagttattacatacaggaagatagcagaccagaaattcagatcaggtcgagtcaactacaaaacccatgttctggaaccactaagatcatcgtataaggaatcccagttacactcgagtatgaatgaccacaagatgggactgccccagctaacagtaaaaacaaaacttcagtgatgtgaatgaggctacctgggacctttcaacccattcaatctgccagatcactgcacttacatgtacaatctcaggccaggctagcaggagggctgcccagatgatcctagcctaaataactaaatcacagaattgtgagcaaataaatgttttaaaacactaagattgggaggtgaggttgttatgcaatagatgactgatacagttgttcaactgtcttatgcttccataagttcattttgttcataaatccccctcaaattatctgatttcatgtct

SEQ ID NO: 464398 - DNA, 2954 bp, Homo sapiens
tcgcttctgtctgaccaaggtctgttttcctgatcgagatagggcctttaagaagtgatgggggcatgggaactctgccctcatgaatggattaatctattcatggattaatggattaatgcattaatggattggtggtttatcatcgcaaggaaactggcagttttgtaagaagaggaagggagacagtggcagggaaactggcggctttgtagcaagaggaagtgagacttgagtcctctcaccacaggttgccctgcaccaaccaccacaggactctgtagagagtcctggctagcaagaggatcttcaccagatgtggcctcttgacctgagacttctcagcctccataactgttaagtttcctggagaattctgaaggatatgcccccttcctctcctacagctcagagttgttctgtgcacttggatcagcctccacaacttccccccgggacagggcacccatcaccatctcctacctggacagcagcaaacactgcccccgtgacttcctggtgccatccttggctccattacgtccattctccagtggctggcagagtgagcttgaagaacgtgtgacatgcccttcagaatgttctacttcctgttccagaaggacagcccctcatgccttcccgcgggccacacgccacctcttcctcagtgccccagcctggcatcctcttcctgcattcagccttcttttccgagggtcaacatcttgtgagtatggggaccaggcaacgtgagctccagctctaactctgtcccaatcagctgtgtgaccttgggcaagatgcttaacttctctgggcctcagttttctcatctgtgaaatgaagtgtcatcttgctggagggcagaaggattccctggaacctgggggccagcaggacagaggaaacagaaagtacatgaccgatgatgtctttcgaccacagaaagggctggaagaagcaggggacctactgtttgaataaacccagtggaaaaacagaagccccatttcatacttgactcagctcttcaagtttaaatcttgaatctcctcaactacacggaacagtgtctctcccaagtcatctgacacccactctgttctctggatcattccttcctagagaacgttgctcttggagggctgtgatctgctctcacccacttgcctttctgacccactgagtgcatctcaacagtcacttggggtgatccgatctgaccaggaagggttgggtggctcgtggagcttgggaagcactctcactgtggcggtccccattggtggtcatggggttgccacagtgagctacgtttctaccctcatctctctatatgttaccgtggaatctctgactgaggacccatgggctcacccaatgtgataaagtcctgaagctcagccgggacgtccgaccccagctgcaggactttccaatagacagatgcatagaacttgagaagaaatcgacttagaaacctgaagttggaaaactggttgcctgacattctgtgcaagactgaatctctgagaaatgaaggctgtgtaactttgggaccatgtcttttccagcctacatagacccccaggaaactttgcagttgttccccaagtatggatggagtcaaacttgatgtcctttcatccccccatcccatccactaatccatatcctttggaaattttagagtgccgggcctcatgtaaatacaccaaaaacaatttaagtcatttatgttctactaagccaagagttctttagcggtggaagaagatggggtcttacacgaatggaagggtcttggctatttgcgtcggtatcaacagaaggactagacgcttgcactaaaagaaaaagctgagggatgggggcaggaagcgggaagctgggacccaagccccaccttcctgagttggaaggtgacaggtagactcctgcttgtttgccagagaggcctggcagaggaggtgcatcccagcacagaagggcagcacagaggcagcctgagaagattctgtcgctgccaggtcaccaggacctctggaccacagctgggttgcgctgttttccagtttgtgaaactaggactttggggaacatcctgtgaattggtgtcattttgattttcctggaggatttttgaggtcagcgtgactgctgtcactgtaagtgtgggtgtgctttcccacaagaagcatcctgagtctgcgggaagagcccatgtcagctgaacaggatgtgtactggccgctgggttcagtgtgtgttgaccaggggccagcccccttcccgcttcagtccagctcaggtgtcagttgacggcttgtggaaatatgtgagtggagttctttctttgtgggtgtggacgaggcagctctcactcctgcgaggacgcgtccagctccttgaggagtacggtggcagggaaggggacagcactgtcatggagtcagatctgaatcacgtccacggagcggtttactttgggaattacctcctatacatttcaaattccatagacacgagaccgacagcacagactccttatggcaataagacaccaaattataagcagcacctcaggccacgccagcagctaaacacgcaccggccccgagattcaaacgactgcagctcatccacctgcagacgctggctgaccccgttccacagctgtgactatagctttgattggacaagaggttgatttcagtctcctgctcctcctggaacctgaatatgtatgtttggccagctcaattcagcatgaggctcctgctgcaacaccgcctccttccaggtgcctgccagctgtttctgccagaggctgcgtctcccggcctgtcagaatggccaccctgcaggctgtaatcctttagaagaaataaagatcccctttccagatgtatagatcttgtgatttttttccattcacatccttgcatctt

SEQ ID NO: 464399 - DNA, 2201 bp, Homo sapiens
tcgcttctgtctgaccaaggtctgttttcctgatcgagatagggcctttaagaagtgatgggggcatgggaactctgccctcatgaatggattaatctattcatggattaatggattaatgcattaatggattggtggtttatcatcgcaaggaaactggcagttttgtaagaagaggaagggagacagtggcagggaaactggcggctttgtagcaagaggaagtgagacttgagtcctctcaccacaggttgccctgcaccaaccaccacaggactctgtagagagtcctggctagcaagaggatcttcaccagatgtggcctcttgacctgagacttctcagcctccataactgttaagtttcctggagaattctgaaggatatgcccccttcctctcctacagctcagagttgttctgtgcacttggatcagcctccacaacttccccccgggacagggcacccatcaccatctcctacctggacagcagcaaacactgcccccgtgacttcctggtgccatccttggctccattacgtccattctccagtggctggcagagtgagcttgaagaacgtgtgacatgcccttcagaatgttctacttcctgttccagaaggacagcccctcatgccttcccgcgggccacacgccacctcttcctcagtgccccagcctggcatcctcttcctgcattcagccttcttttccgagggtcaacatcttgtgagtatggggaccaggcaacgtgagctccagctctaactctgtcccaatcagctgtgtgaccttgggcaagatgcttaacttctctgggcctcagttttctcatctgtgaaatgaagtgtcatcttgctggagggcagaaggattccctggaacctgggggccagcaggacagaggaaacagaaagtacatgaccgatgatgtctttcgaccacagaaagggctggaagaagcaggggacctactgtttgaataaacccagtggaaaaacagaagccccatttcatacttgactcagctcttcaagtttaaatcttgaatctcctcaactacacggaacagtgtctctcccaagtcatctgacacccactctgttctctggatcattccttcctagagaacgttgctcttggagggctgtgatctgctctcacccacttgcctttctgacccactgagtgcatctcaacagtcacttggggtgatccgatctgaccaggaagggttgggtggctcgtggagcttgggaagcactctcactgtggcggtccccattggtggtcatggggttgccacagtgagctacgtttctaccctcatctctctatatgttaccgtggaatctctgactgaggacccatgggctcacccaatgtgataaagtcctgaagctcagccgggacgtccgaccccagctgcaggactttccaatagacagatgcatagaacttgagaagaaatcgacttagaaacctgaagttggaaaactggttgcctgacattctgtgcaagactgaatctctgagaaatgaaggctgtgtaactttgggaccatgtcttttccagcctacatagacccccaggaaactttgcagttgttccccaagtatggatggagtcaaacttgatgtcctttcatccccccatcccatccactaatccatatcctttggaaattttagagtgccgggcctcatgtaaatacaccaaaaacaatttaagtcatttatgttctactaagccaagagttctttagcggtggaagaagatggggtcttacacgaatggaagggtcttggctatttgcgtcggtatcaacagaaggactagacgcttgcactaaaagaaaaagctgagggatgggggcaggaagcgggaagctgggacccaagccccaccttcctgagttggaaggtgacaggtagactcctgcttgtttgccagagaggcctggcagaggaggtgcatcccagcacagaagggcagcacagaggcagcctgagaagattctgtcgctgccaggtcaccaggacctctggaccacagctgggttgcgctgttttccagtttgtgaaactaggactttggggaacatcctgtgaattggtgtcattttgattttcctggaggatttttgaggtcagcgtgactgctgtcactaactaaaataaaatccgaagtccccaagtg

SEQ ID NO: 464400 - DNA, 1658 bp, Homo sapiens
gcccagtcttccagtcgctgccaaattaatgagcccacgtcaggttgggtttacagctcggccgggaagcagccgagtggaaaatgagctcggggcctctccagaggctcccgcacaactgcagaggctgcccgcgtccctggccgccgcaaaggccgggcgcagcccaggagaccgggagtcgcggcccgcgcggttccgccctcggcttcgactttagctgcctccagagggaacaggcctggtgtagcgaaacctggtaaggagggtcacaagagagattcttgtgtgagatctggtggtgggagagaagcagcaaccttcattgttcaccttccaattcaccctattggtgtgatacggcagccaggccagcaactgctccatcttctcctatactctccttcaactgctctgactcttgggccaggagcggtgaaaaagaagaggcaagaccggcccccagaccgaccaaagcccacgtgccgccacaccccacgcccagcgcgccgacgtcccgccactgtcgctgccaccatcatgcccaagagctgaaggggatgctagagataaagccaaggtgaaggacgaaccacagagaagatccgcgaggttgtctgctaaacctgctcctccaaagccagagcccacgcctaaaaggcccctgcaaagaagggagagaaggtacccaaagggaaaaagggaaaagccgatgctggcaaggagggaaataaccctgcaggaaatggagatgccaaaacagaccaggcacagaaagctgaaggtgctggagatggcaagttgagtgtatgcattttggataacagtgtacttctggtgactgtacagtttgaaatactattttttatcaagttttataaaaatgcagaattttgttttactttttttttaagctgtgttgttagcacacggaacacttcattgctgtttttggggtaaggggcatatgtcactaatagaatgtctctgaagctggattgatgtgaggaaaacaactttcccttctagttttgagagacttcctcttggctcccaggaggagggattccctgactttgacacacatggccaccttggcacaaaagccttgtggtatggaaatacaaatccatttttatttgttgtatactgttaacaattgtctgcccatatcctgcctgaaatgccatgattgtttatggaaagtatctttaataaagctggatacagtttggcttggaaaaaaagaattaaaatatagattcataggctccatcccagatccaccaagttcgagacccacaaacgctggtggtgtaaattccagtctgagtccaaaggcccaatttatccaggggcaccaatggcataaatcctactccaacagcaggagaagactgatgcccagctcgcaggcaggcaggaagaaaaagggacgaattcctccttcttcagccttctattctattcaggccctcaatggattggatgatgccctcctccactggaaaggaaagataaaccagaatggccagtaacaccacaccttggggttatctttactaaatatgggccctactgaacagaaattagagcttatcacaggacaacaaattttgtttgaaaataacctttttactacttttttatctgactct

SEQ ID NO: 464401 - DNA, 1699 bp, Homo sapiens
caggccatctgggcatacacgtgcaagtcacaggggatgcgatggcttggcttgggctcagaggcctgacaaccccaagctcaaacaaggtttctggtgcagccctagatgccatccttccacagttgcatcagtgccttctcggcagactcttcagctgaagccatagcccaggcaaaggacctcctcagccaggaggacttaaaagctgctatgagtgctgtgtccatgggatcaagggagtgtgggctggtggtctcgctggcttcaggagtgaagccgcagaccttcgcggtgagtgttacagttcttaaggcggcgcgtctggagttgttcattcctccccgtgggctcgtggtctctctggcttcaggagtgaagctgcagaccttcgcgagccaagtggtctgttttgacagggtgctgattgactcaggagcccagctggcttcacctagtggatcccgcaccagggcagcaggtggagctgcctgccagtgccacgctgtgcgctcgcactcctcagcccttgggtggtcgatgggactgggtgccgtggagcagggggtggtgctcgtcggggaggctcgggccgcacaggagcccatggagtgggtgggaggctcaggcatggcgggctgcatgtcccgagccctgccccatggaaaggcagctaaggcctggcgagaaatcgagcacagcgccggtgggccggcactgctgggggacctagtacaccctctgcagccgctggcccgggtgccaagtccctcactgccttgtgcgagcagggctggccggctgctccgagtgcaggcccgccaaacccacgcccacccggaactccagctggcccccaagcgtgcacgcagccccggttcccgctcgcgcctctccctccacacatccctgcaagctgagggagccagctgtggccttggccagcacagaaaggggctcccacagtgcagcggtgggctgaagggctcctcaagtgccgccaaagtgggagcccaggcagaggaggcactgagagcgagcgagggctgtgaggactgccagcacgctgtcacctctcaactcagtctcccacatggcgtggccacccttgtgtctgttaaactctttctctacaaaaatgccatggtctttctttgtgcagtggtcaggaaaaaccccttgggcagatacaaaagttctttcaggcatctgtttccagaatagcgaggtttcctccatattgaagatttgctgtggcaagtaaatctcctccataatcaagcttccaaaactcttcagctgccttcacatcagcacccacagactcagcattcatgttaacattatgtaatgcataacgatcctcaaatcatgtaaaccacccggaactggcagtaaatctgataccaaagtcaggtccagcctttcctttcaacatcaaaaacatactttttgctctggccatgaccgccgtggtgctgaaaccgcctctgcaaaaattataacagaaaattatgaccgtgaaaggacaactaacctaaccgactccatcttgcttctaatctccaagctgtccttgttcatccccgggcgtaggctcaacctactttgggaggaacttagtttacagtgtgaaaggaaaataaatcttggggccccaaaatcactaagccaaacttgactcttccccgtggcttgg

SEQ ID NO: 464402 - DNA, 2634 bp, Homo sapiens
caggccatctgggcatacacgtgcaagtcacaggggatgcgatggcttggcttgggctcagaggcctgacaaccccaagctcaaacaaggtttctggtgcagccctagatgccatccttccacagttgcatcagtgccttctcggcagactcttcagctgaagccatagcccaggcaaaggacctcctcagccaggaggacttaaaagctgctatgagtgctgtgtccatgggatcaagggagtgtgggctggtggtctcgctggcttcaggagtgaagccgcagaccttcgcggtgagtgttacagttcttaaggcggcgcgtctggagttgttcattcctccccgtgggctcgtggtctctctggcttcaggagtgaagctgcagaccttcgcgagccaagtggtctgttttgacagggtgctgattgactcaggagcccagctggcttcacctagtggatcccgcaccagggcagcaggtggagctgcctgccagtgccacgctgtgcgctcgcactcctcagcccttgggtggtcgatgggactgggtgccgtggagcagggggtggtgctcgtcggggaggctcgggccgcacaggagcccatggagtgggtgggaggctcaggcatggcgggctgcatgtcccgagccctgccccatggaaaggcagctaaggcctggcgagaaatcgagcacagcgccggtgggccggcactgctgggggacctagtacaccctctgcagccgctggcccgggtgccaagtccctcactgccttgtgcgagcagggctggccggctgctccgagtgcaggcccgccaaacccacgcccacccggaactccagctggcccccaagcgtgcacgcagccccggttcccgctcgcgcctctccctccacacatccctgcaagctgagggagccagctgtggccttggccagcacagaaaggggctcccacagtgcagcggtgggctgaagggctcctcaagtgccgccaaagtgggagcccaggcagaggaggcactgagagcgagcgagggctgtgaggactgccagcacgctgtcacctctcaactcagtctcccacatggcgtggccacccttgtgtctgttaaactctttctctacaaaaatgccatggtctttctttgtgcagtggtcaggaaaaaccccttgggcagatacaaaagttctttcaggcatctgtttccagaatagcgaggtttcctccatattgaagatttgctgtggcaagtaaatctcctccataatcaagcttccaaaactcttcagctgccttcacatcagcacccacagactcagcattcatgttaacattatgtaatgcataacgatcctcaaatcatgtaaaccacccggaactggcagtaaatctgataccaaagtcaggtccagcctttcctttcaacatcaaaaacatactttttgctctggccatgaccgccgtggtgctgaaaccgcctctgcaaaaattataacagaaaattatgaccgtgaaaggacaactaacctaaccgactccatcttgcttctaatctccaagctgtccttgttcatccccgggcgtaggctcaacctactttgggaggaacttagtttacagtgtgaaaggaaaataaatcttggggccccaaaatcactaagccaaagcagaaagtcaagctgggaactgcttagggcaaacctgcctcccattctattcctaaaaaagatagctactacgattaaaaagctacatacctccctcacaaggaaattccttgtggacaaatgacagaactcaaagccacctctgctcactgagatagatgcgtctctgcctgcctcctttggaaaggccaatcagaaactcaaaagaatgcaaccgtttgcctcttatctacctatgacccagaagtcccctccctgcttcgagttgtcccacctttctggatggaaccaatgtataccttacatatactgattgatgtcccatgtctccctaaaatgtataaaaccaagctgtgcccgaccaccttgggcacatgtcgtcaggacttcctgaggctgtgtcacgggcacacatccttaactttggcaaaataaacttcctaaatcgactgagacctgtctcagatatttggggttcacaatggtttaactttgaaacaaagacaataacaactcttttccaaaacaaagtccctgcctgcctgaggatcagactgcctttgtaggactaacaaatttgccatgagattagaaattatggtgtaggagtaatgcagctggaggtggcgggattctgaacctccttaaattgctcctgtgataacctaagatgagtgcttaacatcttttacagaccctgtattcagtggatcagctggcaccacccaaatagataaattggcccatctggtcttgtggcccccacccaggaatggactcagctcaagaggacagcttcagctccctaagattttatcttggacccgaacaatcagcactcccgacttactggccctctactcaccaagttatccttaaaaacctcaatccctgagttttcagagagactgatttgaataataataaaactccggtcttccacacggccgactctgc

SEQ ID NO: 464403 - DNA, 646 bp, Homo sapiens
tttctttttttttttttagtctagccgttctcagcatcaggtgactctgctccttgaaaatacatttaagtgatgccattcctgtccaaaaccaccactgactccttcttcagagggcaagccttgaaatcatgtgcatttgcctgtgagacgtttctccgattatctgaaaatcttctgccagggataaggcgatttgtctccattctgtctgaggttgcggatcttggtgcggcctcttgctgccctctggtggagaaaacgggtattgaacaagccataacgactgatctctgaggcaaatgctgtgaagtgtcagcgcaaaggtccacggggaataattacacttcaagctattatctaaatgaacggagttcatctaaatgaatggagttggaacggttgttctatgagaatctgatttctcagcaagagaagttttaattccatcccctttttatttctgtttgctgcgaactggtttctcatttctccacacttgctcttccttttcgtgaacaatcattttgtgtattttgagatcattataaaattcttgtacgctcattttaaaacatttccagaaagtgaaagtcagcatgtgacccaggaaaattctaattcttaaaacactcaagactctaaa

SEQ ID NO: 464404 - DNA, 1527 bp, Homo sapiens
tctgctcaagaatttcctgaatatttgacaatatgttcccacaaggacctgccaactccactcataatcgtgaaacactgaatccttaccaaaaaaggaatgcttccaggaaaatgtcatatggtgtgtttgataatttgggactcaggcttagatactgtcagggacgcagatccagagccagagaaagaacgaggaactgttccagactgaaggagaacaatgagacaataaatattcctggaacaaggaaaaacatggtattgggactgttggagaaacttgaatgggattaccggattggaagacatgatcactgccttcaaggcccagaccagagcagagcccacaggtcatgcagcccttggactgttctgaagatggtgattccatggtgggagagtttccgagtacccctccttggttgtcatattattgataaatgaaaaaaatctatgaccctatactattcatttttatatggatggcttaaggatccttcaagatcacagtagcattcattcgcatatcaagtaattattgagcacctgctatctgctaggcctttttcagatggagtctcactcttcgtcaccgaggctggagtgcagtggcatgatctcactgcaacctctgcctcccgggttcaagtgattcttctgcctcagcctcctgattagctgggactacagatggagtctagctctgtcccccaggctggaatgcagtggtgtgatctcggttcactgcaacctctgcctccaaggttcaagtgattctcctgcctcagcctcccaagtagctgggattacagtctagccgttctcagcatcaggtgactctgctccttgaaaatacatttaagtgatgccattcctgtccaaaaccaccactgactccttcttcagagggcaagccttgaaatcatgtgcatttgcctgtgagacgtttctccgattatctgaaaatcttctgccagggataaggcgatttgtctccattctgtctgaggttgcggatcttggtttgcagaggagggctgcaacgtagtaggttcctccacgtggcttctcactgaagccagaatgactcatttagagagtaatcttggtgcggcctcttgctgccctctggtggagaaaacgggtattgaacaagccataacgactgatctctgaggcaaatgctgtgaagtgtcagcgcaaaggtccacggggaataattacacttcaagctattatctaaatgaacggagttcatctaaatgaatggagttggaacggttgttctatgagaatctgatttctcagcaagagaagttttaattccatcccctttttatttctgtttgctgcgaactggtttctcatttctccacacttgctcttccttttcgtgaacaatcattttgtgtattttgagatcattataaaattcttgtacgctcattttaaaacatttccagaaagtgaaagtcagcatgtgacccaggaaaattctaattcttaaaacactcaagactctaaa

SEQ ID NO: 464405 - DNA, 2840 bp, Homo sapiens
agtaggcttcagaagatgggtaacaaaaaaatatgcaagggatgtgtagacctcctcaaggagaactacaaatcactcttcaaggaaataagtggaaaacaaatggaaaaacattccatcttcatcaataggaaaaatcaatattgtgaaaatgctaagacaatcctaagcaaaaagaacaaagctggaggcatcaaattacctgacttcaaactatactacaaggttacaataaccatatcagcatggtactggtaccaaaacaggcatatagaccaattgaacagaccagagagctcagaaacaacaccacacctctccaacaatcggatcttcgacaaacttgacaaaaacaaccaatgggggaaaggtctcctatccagtaagtggtgctggggaaacaggctagccatatgcagaaaactgaaagtggaccccttccttacaccttacacaaaaaataactcaagatgggttaaagacttaaatttaaaacccaaaaccataaaaaccctagaagaaaaatgaattttataattatgttttagaaaacatattcttttatacattttgaaaaggttatgtcatagccatagattcatttgattaaaaaaataaagatttcacattttcatttgtgtcagatgtttttaaaaatcctaatgtacagagcaacagaatactgtgctgaggccccaaaacagaaaggaaagctcaccaccagaatgtgccttttccttatcaaaaagaattgctgccccttacaggacaggaggactccaattgtgaccaagttggagcagccttgagccacaactcagacttattttcattctctgctcattggccattaggaacccgatccttatgacctgcagtgacctgctgctaccagaactgactcgcttcaaagtgacggatgaaacccatatggagatattcctggggtgggtaggccagttggaagacagagtgtttacacctgagagaggacttgagcatatctgaaccttttgcaccattcagtaaagagaaaaggggagctcagaattttactcagtcacgttgctcactgctgcgcactcctgcagacgcatcccagtggactctgcgctgcatccccagagtacagcgagtttcccgcctcccgttagagatccaacacatattttttttgaaagaagaaactgatggaagacaggaagcaaaaaggagaggaaggaaagggataggaaggaggggaaggaaagggaaaggaaggaaaagaaaggaaagtgaacttgaaatcctacaaggtctcaaagtcaaaaaacatgattgctgttttagagaattgaagatccttcatcttcaagaatctgaaatctaccatgatcttcacatgtagccaaacacaatgggatgtagtcatttaagagtgctgtgaaggcagtgaaaagcagttgaaataccattagttaacagattgcccaatgaagtcgatgacaactgtgataacaagttactcactatcacagcgtctccaagagatgaacagtggatgatgcttccaaagcacagatgtccctctcctcctcaaccttctctccccagaaagatgtcaacactgtggagattgtgctatgaagatacctggtgtggcattgcaatagatgaaatattaagggcaattcaacaattttctgaacaaatacatggatttaacttgaagttgaatttaatttgacttcaagaaaaattatatttctggtcctcctatgatcatgcactaagaattatttaactgcagatacaattgttacctttagagctagaaggcctcattttagaattaaaatgaatggcaacccagacagataaagtcgagtcgtgatcatcccactgcggaggcagagccagtgctggccatcccccgaccaccccaacacactccaggtctcacacatttaatctctctctctgccaagggaattttttctttccatttattcttagaaacaactaagggagttttaagttaaatacatgctgccaaattgaatccaaggaaactaaagtcaaatatattagcaaacacttaatgtcctctccattttgacatttctccctcaattcctatttctgagtaaaggctgttcagatgaataaaaacatattttcagaaatctgagctcataagacctataggtctgtgaagtcacagaccgtgcactgtcagcagtcagcaattctgctgggttgaattggcatgtttcaaactatgtatttttgttaaaaaaaaaaaaaaaggtgtgtaaatgcatttacaaaatagtttgtactctttcccagtaattcatagttgccttcacagcacccagttccggatttcacaccaagcctttgctgaggatatgagagtaataaaaaggggagccctggttcttcctctcctttagtgtctttcctggaagtggactgcgagaagagcttcttcagccaccttctgcctgcagacaacctccatgagtttgctttagaagaaggcttcaatttgaagaaagtcaaataaaacaaggtagactatcattcccatagatgcaaaagaaggtgaacccagattcagatcctaagtcagccattctgcagggaactcttaggtgtccaggtcagaggctctactcaaactgcctcatcaatattgattcctcagttgttgcaaatataccacactcatgcacgttgttaataataaaaggggaactgtagaggacggggtggtgtatatgagaactctgtactttctgtgtaatttttctataaacctaaaatagctctaaaaataaagtttattcagaaac

SEQ ID NO: 464406 - DNA, 1764 bp, Homo sapiens
gggtgcaggtctacccatgttgtagcacaccaaagcagctgcaaactttcctaggccttctatgactctagtttacatcggaattgcccggagggcttgttaacctggattgcttggcactgtccctagggcttttgattcagtaggtctggtatggggcccaagaatgtgcatttctaacaggttctcggatgatgatgatgatgatgatgatgatgataatgctggtccagggccagtctttgagaaccactactctaagtattttatgcaaaaagagcagcccattgaagtaatgggtcctcaaacggatgagcaggaagcttccggtcaggattctcagggcagcttagggctggggaaccacgttctgacaagcatcgaggcaaacaaggaccacgtctgcatgtctgccctctgccaagagggttcctgtggaagccaccagcacattgagagaagggaaaatgtggttattctgcatccattttactgcaaggagatcggggctgacgtggctggccaattcacaacctgtctctaatgtattcccatttgagaaactgatcatggacagctaagtgaaatgtctgacttctctcctggaggctccctcactctcttctgccagaaatgagacccggggaaaaacagcggtatcatctatatccctgctaacttcctgtactgcacatattggaggactcagacaccgacttgcctgtggttgctatgagtcgcctacagaactgaaaatgggaagcagaactaggctggttgtactcctaaccacaaggacactctcctcctcaaatgaaaaggctctaattaaaaggcaggaaagatctcgtgtctctggagttcacttttaaaattgtcaaaaaaaacctcaaagtcgctttgcttctgactatccatacattggaagactaattaactatgacaagctgaccagtggagaccattttcataaggatgacacgatgatggatgggtgcatgctgttacaatgtcattgctaaaaaagacgtgatgagtccaagttccaattactaagattcatatacaatacagaggtctttttcaagccacagaaccccattgcaacaggctgacgtgtcgtcttttctgtatttaagagacacattcatgggccggtgacatactgagctatgcatgctaggccttctctgcatctggcagctggaacgagacacaactaagtcttgttgcttcagggctttgggtaccaaatgaggcattagcacaatagaaacacccaacccagagcaatgttttcccatcttcagacttggaggccaagaggcaatagcaaggacattatgtagatatttatacaaccatttaaaacataaccactcaaaaatgtcaaaaccattcttagcttactggctgtaaaaagtaggcagctggctggattgggcccacgggctatagtttgccaacccttgccttaaataaacaaacttgttagatttctcactagtgttatatttctgcagctaaagttctcttagttacacaaaatttctcttaggtacagaaaatctggtcacaagaagtttgaaaaataaattaacataaaattatatacagtcacatattactaagatatgtaacgtattatattagtatatgttattataatatacaattttatattataataacatatgatatatattaatatattacttgtattaaattaatatatggatataataatatattaatatataaata

SEQ ID NO: 464407 - DNA, 1219 bp, Homo sapiens
tgagaatttagcttcctctgcacgatgcctgtcagggtccttggttgtcatctccatcttagcgatgcagtcttttaggtgctttaaataaagggggagagaggaaatcttctgaagcagatgacaattatttcccccaagcacagccaccaagccatgctcttattttgaatgatctgcgtcattttccaacatgaagcctcagaaggacatgattacaggctggactcaccgactgtagcctgtgcagctattgtaatgttttaatcagtgattaagtcaagaggtttaatttagtaccgggctccgttaagcttgtgaaaatggttttctgcctcctcaaactaaaaatgtgtctctcccccatgtgtccagcccgaagcatcttaacctttgttctatcttcaacaccgctggctctaacaaattactcagcagtgaatgaattagctgagtccaatgtgtgaaaaaagattaggctggacctaggaaaattagcttctaagcacagcacaggatgaggcataaagatacctggactcgtgccctgcatgacaaagaagctaagcttcattagcgtcagtcatgacatccgtcattggcattatctcattgaatccctgcgacaacctcaggggcagatgctattattattcgcattttgtagatgaagaaaactgagacccagagaagcccctgatagtgagtggcagtccttggctttccttggcttctagatgtgtccctccagccctgtcttcacgtggccttctccctgtgcctgtcttcacatggccgtcttcttacaaggacaccggttatatgaggccacttatagggacttggcgtttactctgtgtgaagtgggagccgtggaggacactgagcagaagagagggaaggcagacaccacccctaccacacccccacaaggaagcagggcacattacatcacggtcattgctgtgaaaggatcatggcaatgtggtgcgataatagagaatcaagaggtgggaatgaatctaatacagactgtgacgagtgaaggtgtctcagaggagccaggtctggaagcaattgtgtacactattgccatccacattccactggccagaactcagtgtcatggccccagcctgtctgcaaggctcctggatccaggaggagcagatgacttgggtggcataaagacttgcctctgcacaatgaactaagcatt

SEQ ID NO: 464408 - DNA, 778 bp, Homo sapiens
ctgcgtcggtatttgtgaaatgttttgagcctctggatttaaataagctcccgcccccacccaggcctgctcagaagaacccaagccactcagaagcaggaggcagccttcaccccaaccagaccaatatccgttccagactcaggattacaacaatctgggagagggtcaaccaagtcagagtcccacatggcagaagagctgctttagcttaagactcttaactctttttcttcggggcaggaaaggtttgagccaatgaaggatgaggctttccaggcccaggacacaaccttgatccaaggcctagttgtggctttaatttttgtaaatcaagcctcaagtttttcttcactcttttagccaaagatatgtttcccaggatgcatgaaataaataaataaaatgtaccaaattagagattgtgagacatgtatgtcacttaaatcctttgtaggcaagcaggaatcactgattcactaaattctgtcctaagtttttttttctcctaaccattgtcttcataagatcatcccatacttggaaaacatttatctaattatcatcacacacaatgggcccgctgccagctgttttttattttaacttcagattctttccagggtgtttgtttgtttttttcttgggggtggggagtaggagagaggagtgtgtgtgtctgtttttgctattacacagaactgatcagatttccttttataatcacaattaaacttccagacccaatcatctgaatatttcatgtttagaagatctc

SEQ ID NO: 464409 - DNA, 1501 bp, Homo sapiens
gtgctatatgagggttagctgtaaggatttggagaaatacattatacgtcaaaagtcatgtccagttagaacaaagccatatacaagaatgcacaggaagaatactttggaattagacaaaaaagagaaatccatgggattgaaattgaccacccatgaatatggggctgccacccctaaggaggacctcaggcatcttttccctagcaaatgttctggatctgcccactctgtggctccctccccagctggccttttggcttcatctttgattcctggctcttacccatgtgctattggatcaggtgagagatttcagttcaggttaacatactttaggatgggtctatgctgagtgaggaactggggctaaaaagaagaacgtgtttgcttccccttccaccatgattgtaagtttcctgaggcctccccagtcctgcagaactgttcttttaaacatttatcttcagaagtctttatttgtgctaagtcacttagatcaaaacaaaaacacttatttttgtgtttgcttaaacaacgtagatcgtttcttcagttatctcctggctatatatgtggacacatcttagatctagagactaagaaaagtattttcttgctgtcctgtactttctacacatttgtaacctgtgttcataacaaagtatatgtcctctgcgcccccataccatggtgtaagccccaggagagcagaaacttcctttgtctacccgacagggctgaagcctcagagtctggatcagtgtcagctcccgcccccacccaggcctgctcagaagaacccaagccactcagaagcaggaggcagccttcaccccaaccagaccaatatccgttccagactcaggattacaacaatctgggagagggtcaaccaagtcagagtcccacatggcagaagagctgctttagcttaagactcttaactctttttcttcggggcaggaaaggtttgagccaatgaaggatgaggctttccaggcccaggacacaaccttgatccaaggcctagttgtggctttaatttttgtaaatcaagcctcaagtttttcttcactcttttagccaaagatatgtttcccaggatgcatgaaataaataaataaaatgtaccaaattagagattgtgagacatgtatgtcacttaaatcctttgtaggcaagcaggaatcactgattcactaaattctgtcctaagtttttttttctcctaaccattgtcttcataagatcatcccatacttggaaaacatttatctaattatcatcacacacaatgggcccgctgccagctgttttttattttaacttcagattctttccagggtgtttgtttgtttttttcttgggggtggggagtaggagagaggagtgtgtgtgtctgtttttgctattacacagaactgatcagatttccttttataatcacaattaaacttccagacccaatcatctgaatatttcatgtttagaagatctc

SEQ ID NO: 464410 - DNA, 3538 bp, Homo sapiens
cggctttatctgagaaagcttttaaaggacttgcaatacgaaggaaataattctgaggcaatagctatgaagcttccaatcatggcagaaagcaaaggaggagccagatgtcccacatggtgggagcagaagcgagagagaaggataccacaagagctcgcgcactatcatgagaacagtagcagggatggtgctaacccattcatgagaaattgcccccatgacccaacccccaacaaggcctcacctccaacacaggggattacaattccacatgagatttggtggggacacagatccaaaccaccttactatgattgctttcaccaacgaattcttaagaggaaggtgaaagcagttacaattcactgtctaatagccaacaagatctttttaaaactcaactccaattatgtatatcctctgattaaaagcttcctctacctttccatttcacttggagcagaatccaaactccgcaccaagggctgagatggtccggctcccttctgcctctgtgtctctgcccacttgcttactaggatccagccatactaattttctttctattcctccaacagttgtcatcggaatcacaagaatcctaattgaaacatctggaaaaaccacaatgataaaaagtatttcagaaaaaaatttttagtaactgaaaatcaaccagaaaaccaaaacaaacaaacaacaacaacaacaaaacgtgctttaatttaaaccccggcttaaaaaagttatttccaaacggtgtgagccttcttctcgtactgggaagcctgaaaaataaattccattcccctcacctttcaatgtgtctgtatgcctaacttttcctggtcatgtgacaagaacccagttttggctgaattaagaagcaaagttctatatgagtgatcaatatgagtgatcacagctcagggaaaatacaaagccaagaaaccttgagagatgggggtctccctattttaatcgttcatgtcctggaatatcataaaacaagttatatttattgggaaaaaagtaaaaagtacaccttaatcatatttttctgtttaaattgctttgacagttttactaaggcttttacactaaccttaatgtagaagattcattcttaccatagattttagcaacttcagcataccattttttctcaccttattaaatgtagaactttcactttttcactgaaaggaagcattttacagcttctctttggtatatccaaattgtcagcatcactactctcgtgctttgaggccatgatgaagtaaaagaagggttacttgaacataagcactgcaataccacagcagtccacctggtaattgagccggctatgaagttactaacagatgggtgggtagaaagtgtggatatgctggacaaaagaaggatttgtatccaaggcgaggtggagcaggagcgcaggagatttccccaggccactcagaacggcccacttcaaatgcggagagatacacctgcagtttctgaatggatttcttcaacaatgccgcctaattgactcacattaaaaatactttgatcgacccatctctttgtcacatgaagctggaaacactaacagaggctgttggaaagaaaggtctggttccgtggccaaataccttgacttttccaaaaacagactttttctgtctcttcagaagaagaattacatgcaatgggaagattgatgttcctctgtcagaaagctaccttggaacaggtgctcccaattaatttccatgagccacatttatcctgtggtcagataattaaaaaaaaaataacctggataaaccttcttttgccagtctaataaccacatttgatgtaataaaacagcaagcacttaggaatattccaataaaaaagatttatttttattctagtatatattataatgaataatattattgatattatagaatttaaaattacattaaatcagagctatttatgtttattatgcaaaatgtacacaatatagaaaaatataaagaaaaatttcaatacacaaagtatggatatgctttattttcactccattttcacatatatattgacacagatgcagtcaaacattatttagagttttatgaattaataacacagtcattaaaaagtaattaaccaagtaatattcatagtcattgcaaactaattggaaaatataaataaataaaatataagcatcactttctttttagtagcacaatactttttctgatacatgttatttctatttttttgctttaaaattcaaaagattatatttatgcagtaatggatttttgtggttgttatagagcccatgtgccctggggaaggattttaaatatcatgaaactgagttctttccagttttctttctcattaaggggactgaagagatcagccccttagcaaagatttgactgagatataatagagacaattatgtactctattaccaattcggatggactttatggtatttaaatgaacaaagctctctttgtcatttcattaacatgattccttttcagagaatgagcagttctcatctccttcctccattttgggaaaacagcccaatttttctcaagctcatttgaaaggcaaaatggttgttgatctctccataattgattgaggatgtgtctggccgctgagagtacctgaatccatggcttatatcagaccacactagatttttctgtatacaaccaaaggcttatgaccatattaagtatggggaagagaattgtccttgtgtatctacagttcctaagactattttgcatacaataaactgatcaaaatcagctaattgaactgagtttggaaaatgcatgtgaattcagttggcagacagaaatcacgctgtcagatcagctatagcatataagaggggaatgagaagacaatgaaatcaaggatggattaatctcaaaagggagagaatatgcactaacaaatcctgaagtggaattggaagaacagagataatagccatggatcaagaagaacaaaacaagctgataattgaggagtcctgttgatcgattcacattttagaccctaattttgacactgtcaactgataaacatagtcttccagcatttctttcagaggaatagctcatatgtctattaaatatgagttaaaaatgacctgaatgtctatgcttctttgtagtaataataataatttgaaaatcttggcatttctagaaacttctgtaggttaagtcatatctcatcccccaaaatcttgtctttcatgatgccaacaaatacttgacattatgtaggtaaatcaagtgttgcaagaaatgtttatgtagtctctatacatttaaagccaacagctttactccctttcttttgaagcataaactccattttggatgatgtggtggtgaggtgttctggttcttatgcagcaaatcgacggcattaacatgtttcaactatacattatctgagaaactatcagtttttaaaattttttattcataaaatatcaaggact

SEQ ID NO: 464411 - DNA, 2112 bp, Homo sapiens
agctgtcatttatccacttttccattatcacatctgaatcccacaggcccacttcaaatgcggagagatacacctgcagtttctgaatggatttcttcaacaatgccgcctaattgactcacattaaaaatactttgatcgacccatctctttgtcacatgaagctggaaacactaacagaggctgttggaaagaaaggtctggttccgtggccaaataccttgacttttccaaaaacagactttttctgtctcttcagaagaagaattacatgcaatgggaagattgatgttcctctgtcagaaagctaccttggaacaggtgctcccaattaatttccatgagccacatttatcctgtggtcagataattaaaaaaaaaataacctggataaaccttcttttgccagtctaataaccacatttgatgtaataaaacagcaagcacttaggaatattccaataaaaaagatttatttttattctagtatatattataatgaataatattattgatattatagaatttaaaattacattaaatcagagctatttatgtttattatgcaaaatgtacacaatatagaaaaatataaagaaaaatttcaatacacaaagtatggatatgctttattttcactccattttcacatatatattgacacagatgcagtcaaacattatttagagttttatgaattaataacacagtcattaaaaagtaattaaccaagtaatattcatagtcattgcaaactaattggaaaatataaataaataaaatataagcatcactttctttttagtagcacaatactttttctgatacatgttatttctatttttttgctttaaaattcaaaagattatatttatgcagtaatggatttttgtggttgttatagagcccatgtgccctggggaaggattttaaatatcatgaaactgagttctttccagttttctttctcattaaggggactgaagagatcagccccttagcaaagatttgactgagatataatagagacaattatgtactctattaccaattcggatggactttatggtatttaaatgaacaaagctctctttgtcatttcattaacatgattccttttcagagaatgagcagttctcatctccttcctccattttgggaaaacagcccaatttttctcaagctcatttgaaaggcaaaatggttgttgatctctccataattgattgaggatgtgtctggccgctgagagtacctgaatccatggcttatatcagaccacactagatttttctgtatacaaccaaaggcttatgaccatattaagtatggggaagagaattgtccttgtgtatctacagttcctaagactattttgcatacaataaactgatcaaaatcagctaattgaactgagtttggaaaatgcatgtgaattcagttggcagacagaaatcacgctgtcagatcagctatagcatataagaggggaatgagaagacaatgaaatcaaggatggattaatctcaaaagggagagaatatgcactaacaaatcctgaagtggaattggaagaacagagataatagccatggatcaagaagaacaaaacaagctgataattgaggagtcctgttgatcgattcacattttagaccctaattttgacactgtcaactgataaacatagtcttccagcatttctttcagaggaatagctcatatgtctattaaatatgagttaaaaatgacctgaatgtctatgcttctttgtagtaataataataatttgaaaatcttggcatttctagaaacttctgtaggttaagtcatatctcatcccccaaaatcttgtctttcatgatgccaacaaatacttgacattatgtaggtaaatcaagtgttgcaagaaatgtttatgtagtctctatacatttaaagccaacagctttactccctttcttttgaagcataaactccattttggatgatgtggtggtgaggtgttctggttcttatgcagcaaatcgacggcattaacatgtttcaactatacattatctgagaaactatcagtttttaaaattttttattcataaaatatcaaggact

SEQ ID NO: 464412 - DNA, 1294 bp, Homo sapiens
cccttgtttggtgacctgcagggtgtcctttctgggactgagaggtgacgtctagagcatggctcagccccactgcctcttggtctctcagggatggtggctggccttgggagaaaatgggactgagaggagggcaggagaaggtcagagagaaacgttcgcttctgaggctgctgctgagatcttccttttggggtactgttttctgagcccctacagagccatgccctatgcagcagtggttggtcgatacaaggaattaacactaatgctatgtgcaaatgggataggaagaaatggcagcatgcattatgcacacctctcctctgctcagcttaggaggggaagcaccaaagacccatcctacacatgggcacagcacaagccagaggaacagcagctggctgcccttggttgtgatgggccctaccttaaaagtggcttggaggggaccaacagggctttcagcattcagaaagaggcccacacataagcagggacattgacatcccagtttgaataggctgcctggaggggatgttataaaacttcaatcatcaaccccccatctttaagcctcatatttttgtatgattctcatgcccatatgcacgtcaataaatgtgtatgccttttttctttcaactattatcaatttgttttatagactcaaattatcgaaacttcagaggaaaaatttaaactttcctacaccagaatcagcttgagagaagaacctagttgccaccccagccagacactcccttgcaccatatttgcttgtctaatgatgtacttgcttagaagttccaggggctaatcttgaaataaaccaggcatagagatccagttgtggaagtctcccccacctagaaattgcctcaaggtggttaatctacaacccaaccattgtcaaaatggccccagttcatactacaggtggacaacaactcaagatagccattggagcaagatatgccgacctccatcctgcaccactcccacatgcttcccataccaagtttcccttcccaacccccttcgcttagcctgaaaatttgagatggttctttgagacctaagtccagccattcttctcaatggctagcctttgaataaaactgctttcctccattccatcttgcttctcttgttttggcttctgagcggcaagcagccagacctcagtttggttaaacctggtcattgtgtgtcaagctaaactctttaatttctctcatagaactatggatttgttttgaatatctattgtctgtcttcaaaaaaataagct

SEQ ID NO: 464413 - DNA, 886 bp, Homo sapiens
ccggtacaatgtgagataactcgtgtgaaaagtggctgaagcaaatagaggggaccgaggccgccctgacccagaagatgctggacctggagaaggagaaggacctgttcagcaggcagaagggctacctggaagaggagctcgactaccggaagcaagcccttgaccaggcttacctggtaggaccagaaaaaatccaagacctggaggccacactgtacacagcgctgcagcaggagccggggcggagggccggtgaggcgctgagcgagggccagcgggaggacctgcaggctgctgtggaaaaggtgcgcaggcagatcctcaggcagagccgcgagttcgacagccagatcctgcgggagcgcatggagctgctgcagcaggcccagcagagtacaaagtctgggttgcttagtctgaccttcgaagccctctagagccccttccaactgccacagctgcattgtccacctctctcagagttgcccctgctggccgtcatggagctgtgttttgctttgttttgttttgttttgttttgttttgttttgttttgtgttgtgttgttctaacattcgtgtaccaagcactgttctaggtgctgtggcaatattccagcccagggaggcagactggggctgacccacagaaggggctcagtggacattggttgaatgaaactcacacgagtcctttgaggacaggtcattgatgccatttttcacaggggagcagagtgaggctcagagaagggcagacaagggccagcagcccgctgggcagagttgccccaggggtacccaccttggtggggcccttgatggggcggaagccctgtgagcacatgaagatctggaaacgggggagttcaccagattccctc

SEQ ID NO: 464414 - DNA, 1211 bp, Homo sapiens
gttttaggggctcctcgtagaggcacatccacgtatgacacctgcctccgtgctcacccccagcccagaccccagagggaacgtggacagagctcccactcccttacctgccgctcaggtgcacgccccgcctgttcaccccgtactctccgtgcctgcgccctcatgtcctggcatgaaccctgctttcatgctcctacaccccctaccctgtgtgtgattccacctcctctcatggtggcaccaggcactctgggctgctccaactcacgttgctggagggatgagggcagtggctttggcatcctgcaggctgggttccaaatctccattctgcacccgtgtgaccttggacaatggctgaagcaaatagaggggaccgaggccgccctgacccagaagatgctggacctggagaaggagaaggacctgttcagcaggcagaagggctacctggaagaggagctcgactaccggaagcaagcccttgaccaggcttacctggtaggaccagaaaaaatccaagacctggaggccacactgtacacagcgctgcagcaggagccggggcggagggccggtgaggcgctgagcgagggccagcgggaggacctgcaggctgctgtggaaaaggtgcgcaggcagatcctcaggcagagccgcgagttcgacagccagatcctgcgggagcgcatggagctgctgcagcaggcccagcagagtacaaagtctgggttgcttagtctgaccttcgaagccctctagagccccttccaactgccacagctgcattgtccacctctctcagagttgcccctgctggccgtcatggagctgtgttttgctttgttttgttttgttttgttttgttttgttttgttttgtgttgtgttgttctaacattcgtgtaccaagcactgttctaggtgctgtggcaatattccagcccagggaggcagactggggctgacccacagaaggggctcagtggacattggttgaatgaaactcacacgagtcctttgaggacaggtcattgatgccatttttcacaggggagcagagtgaggctcagagaagggcagacaagggccagcagcccgctgggcagagttgccccaggggtacccaccttggtggggcccttgatggggcggaagccctgtgagcacatgaagatctggaaacgggggagttcaccagattccctc

SEQ ID NO: 464415 - DNA, 871 bp, Homo sapiens
ttctcctggcttcagagtctgtgctgtcatcaagcatcccctgatggatgctcctgtcttccccagggaccctgctcaggttctcagagttttgtgtcctattttactcaagggtttttcttggccatggctgtggaggacacgctggctattgacagctagggtcatcatgctcaagagaggactatcttcatcacactgttttggccaggacttaaaaatttaccgctttcacgatgattcgccacccgctctgttctactctacacaagaaaactttctaggatcgcaccctcccaaacggcatgctaacagttgtttcttgatcgaagatatctgtgatcaaacaagttccagaaatgcaggattggaccgagcaaggcagcaaaccctgcaatttgcttttgaatcctacaacggagtacttggatggatggggtggttgcaggatgcctttgaaggatacttgtgaaggtggaaccaccgtggcttggaagcttcgcagatgtcgctgtctccaaggatcaattgcaaacacaatgacctgatgagcagagaaatcccatcttagaaaaaaagagagagctgagtctacagagccgctacttaggagtctgacttcataatcaattgtgaaatgtggaatataatagaaatttaaattctatctacattatgttagggttaataaaaaaaaagggcatatatgagtagtctttaaaaattccttctcgtgactccagttaaataggctgaaatgaattcgtttaatatgcctttccacattctatgttagccattttattctttgaattatcacatacacaacattcaatactatttttaaaataaatcctagaatcccacctca

SEQ ID NO: 464416 - DNA, 1094 bp, Homo sapiens
gaatgggaagccgtgtttctgcttgaggcagtaggaagcaggagaccaaaaaagttgtaggcaagtagttggacaaaaagcaagaagctgatcgatgttgctggctttggattctttgtgaacaaatgagacaaggctgcaaattcagaggatcctcccagaagataagatggagcaggtcaccaccttcttccctgcttcacaccctcaggccccgactcttgtctgctgagatcactctccaaaccaatcttcccttacaaagcccttgttgcaggctatgctttctgaggggaacccaggccaagacactaaaatgacacaccaacatgaagacatgaacacaattgcaaagggattggttggattgcatatctctgtgaatgggactcaagagaagtttgggaaatgctggaccagatgacccttgcaatcatggtgcacagaattaaaaccgtcaagttccccatccatctctgagatggatgagaatctgagtcttccacaagatgcccaagacttgttaaacccgtggaatgtctttgggtatgtgtgacatcaacaagaagcagcagacaaaacaaaatattttcacaaacattcagaaatccctaaatcttgtgagttgtcgtatcatttgtagatataattataaaatggcacatgatgctgacctattccaaggcaattgttcatctcatgtactcagtgctgcctctgactccattgtgatggttgattttatgtgtcaacttgactgggcccaggggtacccagatatttggtcaaacattattctgggtgtttctgtgagggcgttttggatcttcaacctgccaggcttcagattgaagtttataccatcagctctcttggttcttgggcctttggacccagactgtaagtgcaccatccgttctcttgggtcttgcttgctgactcaccctgcagatttggggacttatcagcctctaattctgtgagccaattccttctaatatatctctctatacgcatcctgtctcactggaagaaccctgatacggttaggctttgtgtcctcattcaaatctcatcttgaattgtaaatccca

SEQ ID NO: 464417 - DNA, 481 bp, Homo sapiens
gaatgggaagccgtgtttctgcttgaggcagtaggaagcaggagaccaaaaaagttgtaggcaagtagttggacaaaaagcaagaagctgatcgatgttgctggctttggattctttgtgaacaaatgagacaagctgccagagggatgctaacaccgcccacgtgctgcagcaggactttggaaggggaaccagcactgtaatgaagtgttgggttggctcaagtcttgtctggaccacaaaccatttttcaaccactagtgtgcctttaaaacccaaaccaactgtgagagtggttttctactttgattctagatgggaaaatattttgcttttttggtggatgacagtgtcaggtcccaaatggatttggtttcatcctccagcacgcatgcatataacgtgaaacatgcccacactctgcaagggccacagccaccccaccattatgttccaaggcaaatatgcgtccgcgggtccc

SEQ ID NO: 464418 - DNA, 1255 bp, Homo sapiens
  misc_feature (2)..(4): n is a, c, g, or t
  misc_feature (9)..(9): n is a, c, g, or t
  misc_feature (11)..(11): n is a, c, g, or t
  misc_feature (15)..(15): n is a, c, g, or t
tnnntgtangntganccagccttgcatcccagggatgaagcttacttgattgtcatgggtgagttttttgatgtgctgctggagggtcttacccagttgggtgaaacgggaaacaggacatgtttaacaaagtaccttgactgtcccttggtggagggggtgtgctttgctggggggaaacccactcaactaggctgcccatattcctcagaactaccaggaggaaaggataagtctcctggtccacagagtctgtggccacccatccccctaggggatcaggcccagagagattcaggttctgtccctgagcctctggctggagttacgggagttcttgcatggaagccccgcccagaagttgtgagtcccagtgctgaatgctgccccttccccaagaagctcagatggctgagacagcaggcagctgcagctgtggtgctggtcgcccctccccctgggagattggtaggcttaagcctattccagctgagaggctgttgataatctgcatggctccgtggcatgggtttcaaaatataaactataataatgtctggcaaacccatgttgcattattgctgccaggatcatattgctgtggggttgaggtacaacgtacatctcctcctctttggtgatttcactgataatgtggatttaaacatctttaacaaactgggaaaggtagtaaagctttatatagatggtacttctccccgtacctcctaaaatgttttcttgatactttttggagagagaaattgggcctgatgctgaaggagaactcttctgtccactgcaagtccacttacatgagcagctaaataaatgaatgggattctgaaggactgtatgtggagagcaaggttaaccatttgtgcttgctgcatgagtgaataagcaacgatgagtgttaggctgtttattcagataccctcacgccactgcagaagcgagtagaggaagaatacaaggaaaaaagtgtctcccagcctgtggaaagaggatggctatttcatccactaaaggtgtacactttaagtgaattggtatgtctacatcatcccaggaggagtgaatgtctgtgtgtgtgtacctgagataagatgatgtcttgtccaatgctggtttccaccttgtgccctgagctgttgggagaggctcctgcgacctgtgaccctgaagcagaataagtggactgaataaaggaatgatgcgtataaatgattgtaaaataaaaatttgtaaagta

SEQ ID NO: 464419 - DNA, 401 bp, Homo sapiens
tttttttgagacagagtttcgctctgtcacccaggctggagtgcagtggcgtgatctcggctcactgcaagctccgcctcccgggttcatgccattctcctgcctcagcctcccgagtaactgggaaaggtagtaaagctttatatagatggtacttctccccgtacctcctaaaatgttttcttgatactttttggagagagaaattgggcctgatgctgaaggagaactcttctgtccactgcaagtccacttacatgagcagctaaataaatgaatgggattctgaaggactgtatgtggagagcaaggttaaccatttgtgcttgctgcatgaggtgagaaaatgcgaaaagagaatgaggaaatttcagctgggtccctccctttaatttagggtt

SEQ ID NO: 464420 - DNA, 905 bp, Homo sapiens
cagatgggagttctaaccccagccctgccacttattcccaggtgacactgagtggaaattaggccaaaataaatactactttctgcttaaaaaaatgcagtgatgtccaaagagaagggaggaggaaggatgaaaggaaagacagaggaggaaggaagagaagaaagaagagtggccggcacaagggcttggagatccctgaagctgttttcctttctcctcacccccacagggagggatccacatcgttgtggggtttttgttgttgttgtttttgtttttgtttttttgcctcccttcatcaaagcattcattgtagtgtatggtaattgtctctgaatgtaacagcctctcttccctgaggcctgggtctgcttgtttcataccatcttctccttaacacacagtgcttggtaaacaatacctattaataaacatttgttgaatgaatgaatgagtgaatgaacgaatactgcactctttcgacttggttagagacatgtcttgtaggctggcatgtacttcacacagcactcttaggtagagtttgtatatgttattccattgaagggaaaaggaagccagactgtggggagaaaaaaaaaaaaaaaagacattctgaagaagtaaaaactacccttgtgggtttcaaaaatgtctgggctattatgcctgaagctgaaacatcagagtccactctgacaacagtacctagggggacgcagcaaatttcctgtagccctggcatgagcaacagaagcaaagacaatgacaactcaaagaggacaggacccaggggatctccagggacttcagtggaccaagaaatggaggaaggaagaagggaggaagagaaagaagctcttcagggaggagatttcggtgctgactagaagagcggccac

SEQ ID NO: 464421 - DNA, 1180 bp, Homo sapiens
  misc_feature (1)..(3): n is a, c, g, or t
  misc_feature (6)..(6): n is a, c, g, or t
  misc_feature (8)..(8): n is a, c, g, or t
  misc_feature (10)..(10): n is a, c, g, or t
  misc_feature (13)..(13): n is a, c, g, or t
nnncangncnttngtagggacatggatgaagctggaaaccatcattctgagcaagctatcacaaggacagaaaaccaaacaccgcatgttctcactcataggtgggaactgaacaatgaggacacttggacacaggatggggaacatcatacaccagggcctgttgtggggtggggggagggggtagggataacattaggagatatacctaatattccaaggattaggatggggacatgtctttggagccaccattcagcccgctacaggaaagatgtgtcaaaatctctccaggattgtcaatttctccttgtaattcaaaggaatggctgtatttcaaaggtttcctttcctcatatcttccctaaatctgaccagcggaagccacggcctggggtgttttctggttcagtcacaatttccagggtaggactgtattgtaagaagaatgcggtcactctccccaagcgcacattatcacacttcttttaagcaggagatcttaggactgtgtgagtggccagtcacatttccattttgccagaactaccattattcccacagcctctggaacaaaacctcttgctcgagaaggtgcttcagatgaactcactatttgaaaatgcatcttgttacgctgtttttttgttttttgttttgttataaataattaagttttgagggattctgcagatgcgccaaaaaacacgtgtccggggtaaaagctgtggaaggtgctcggttctaaggagagggaaggaaagccaagtggaccctgtcatctgaaattgttttgtcatccactgacttttacaaataaaacagccgggcgcagtggcttacgcctgtaatctcagcactttgggaggccaaggcgggcggatcacgaggtcaggagatcgagaccatcctggccaacacggtgaaaccccatctctacttaaaaaatacaaaaaattagccgggcgtggtggcgggcgcctgtagtaccagctactcgggaggctgaggcaggagaatggcgtgaacctgggaggcgcagcttgcagtgaaccgagattgcgccactgcactccagcctgggcgacagagcgagactccatctcaaaaaaataaataaataaaaataaaaaaataaaacaagctgtggcagagtaggttctgaaagggtcagagggga

SEQ ID NO: 464422 - DNA, 537 bp, Homo sapiens
gtggcacgactcaccaacacccctagagatccactggcaaaatttttgcttcctgttcccatgacattatattttgctggcctaaaggtcttagttccagagggagaaacactgccgccaggagacacaacaacgattccattcaattagaagttaagattgccacttggacactttgggcttctcctaccttgaagtcaacaggctaagaagagagttacttggctggggcgattgacccagattatcaagatgaaatcagtctactactccacaactgaggaagccaagcccactgctaactgatgagagaccagcttgaaagagggaggacctgccaattgccatcagcacaactccagatatatgggagtcaggtgatcataaaccatccattttctgctgagtcacagtagactgcaactccatgaatgagacaaggaggtgtcggtaaaaacaaaacaaaacaaaacaaagcaaaaactgcctggtgtaaccacagaatcttaagaaataataaatgattttaatccaatg

SEQ ID NO: 464423 - DNA, 1562 bp, Homo sapiens
agccggaagacgtgtatccctgaagattgagaaagaggccatccagaacctctgctagagcagtgaagaagggaaatatggggttggagtccccgacttgggcattgcctagtggatctgtgagaagagggccaccgttctgcagaccccagaatggtagatccactgatagcttgcatcatgcacctggaaaggctgcagacactcaacgccagcctgtgaaggcagctaggagggaggctgtaccctgcaaacccacaggggcagagctgcccaagaccatgggaacccacctcttgtatcagcatgacctgcatgttcgacttacagtgggtccagtcagtccccagactcatcctgtggtcatttccccagtgccagaatgcataattgacatagacatacttaacagctggcagaacccccacattgactccctgactggtagggtgaaagctattatggtgggaaaggccaaatggaagccatttgagccgcttcttcctataaaaatagtaaatcaaaaacaatatcgcatccctggagggattgcagagattagtgccaccatcaaggatttgaaagacgcaggggtggtgattctcaccacatcccaacaggagaaggctctgcaacaggtccaggctgctgtgcaagctgctctgccacttgggccatatgacccagaagatccaatggtgtttatggtgtttgaggtttcagttgcaggttcttcacaatattcaggcattacccaaaagtggacagctgcagcactacaatctttttctaggacatccctgaaggacagctatgaagggaaatcttcccagtgggcagaacttcgagcagtgcaccttgttgtgcactgtgcaaggaaggagaaatggccagatatgcgattatgtactgattcatgggcttcaaccaatggtttggctggatggtcaggaacttggaggaagcatgattggagaattggtgataaagaaatttggggaagaggaatgaaggtttgggtcactccaccaggaaaaaaacacacgacctgctgaggtgcctgttaaaggcaaagggaatacagaatgggtagtagaagaagcttgcttctgtttttcatttgtgtgaaatatcttttctcacccctttacctgcaataagcattgcaggagttttaatactttatatctttcaataaattggtaaatatcatctaacatcaaatttgtgggaatagccctgttcaatgaacacctggactatcctttaatgatgtctacatcaatggaagccaagcccactgctaactgatgagagaccagcttgaaagagggaggacctgccaattgccatcagcacaactccagatatatgggagtcaggctttagggcaaaaaccggggatcacagaatgcttgctcaatcaactttgctcatccaaaatcacaaaaatcgcctcaaaaaatgttgatgataatttaattttcttcactctccatgaagatgttagataatgctcactctgggtgagaataaaagccagactcatcaattgtgttacc

SEQ ID NO: 464424 - DNA, 2314 bp, Homo sapiens
ggcagaggaacgtggtgacatttcattatgatgtctaaacttagaacttctggagaatttggaaggatacattattcgagaatcatcctttggattcttcaaagccacaggatacattcaatgtcagtaaccatattcttgatccctgtaacatttattggcgtttcgcttaggtctctgataaatgtttgacgtctttgtgtgtcttcacactttgttatcctgaaactgtgtcatgtagacataaatggtcacagtttgtcttaaaagtctttaggaaaaggtgatactagcacttgggctagaaggtcgtgcagagcagaggaagaaaaaggcccactgctgtctacaaatgaatgggaagatttaagatctttcaaagcaagttgagtctagacccttgcccaagttttgtaacatgattttgtctctttccccccttttcatgcagattatccatggagttagcatgcagatagcatggagtttgtctgatagaagttgggctctggtggaagtacggaaattgaatggtcagggaaagatagaatgcaggtttcttagggagtctctattaggtttccagcctgccttcctgggagtggaagagagatgaggttgtgcccttcaaggaggagctttacagagataaagaaactaagccctagaagaggaactctgccagtctatttacaaagcctgcactgaaagctagaccatatactctttggagagggatgatgtgaccagctcatagactagggcctataccatgtaataggtactcaaacttttttaaaataaatgaatcaataaatgaatgtctttattgcctgagaagaaaacagaactgccagcagactatgggacaaacgactaaatgccctccagacgttccagagtcctctgcctctcaggcttcagttcttcctgaaggaatctggagctggaaagcaggaagcaatttgctgtggaattttttccatcacaggttcttggtcacaacaaccaaatctactctagctaattgggcaggaagatatttactaaaaggtgccagtttgcctacagggtctctggaagggctggagaacatggatgttgcccagccgggaataagcccccagagaaaaccccctgacatcccacgtgcctcttctgctggaatcaatgttgtcattcttgcccatcattcgatacctatcccactatggtctgatctcgtgagactcgttcactatcacgagaacagcacaggaaagacccgcccccagaattcaatcacctcgcactgggttcctctcacaacgtgtgggaattgtgggagttccaattcaaattgagatttgagtggggacacagcaaaaccttctctcaaacccagtatctctcagaccaggagctgaccttaaaattaaggcctttttatttattcatttttaaatattgcctctctcaagccttgcctggattctccacctcctcaaccccaggaagcaacaagctatcaaagacagaatttgcacaacaggacaaaggaaggctataagcttcttgaaggcagagattatatctcattcaatcttctatctcaagtatctactgcaaaaccaagcaaacggggctgataggggatgaaaggcaccctatctatttggtgcactgtccacagtgcctgaaacagagtggatgctcaaacccatttggtgagtggacggacgcattcaacaaagaggtatgaggagaccttgtgtcgccaggaccttcgtaaatgaatgaatgaaggaaggaaggaaaagaaggaaagaaggaaggaaggaaggaaggaggaaagagagggaaggaaggaactctcctgacttatctggctgctctttttttgtgtcctatcctggctctttctactttgcttgatgtctaattgtatttagagtattttagatgtgaaagttaggagtagaaatggcagattatcacatgtgattctaggtctggagaactgtcttattgcttgattacatgaccattctagagtctgcacatttttaatcaagtttacccttaagctgcctccttgcatagcttaagttcagcctaaaggtttgtctttatattgtgagctataacctaaatggaattgtaaagaaactgtagtctactgttgtaccaatcactgaattttggccaatcaaaggtgaccaagagttcaaactgtgtttaaataagggaaatgcagagctgtaaccaatatggctatttctgtgccttgcttccattttctgtatatcactttcccttttctgtccataaatca

SEQ ID NO: 464425 - DNA, 1869 bp, Homo sapiens
cctttttattgtatccaggcgctcagctgattggatgatacctgctcccattgggatctcactatgttacttgggctggtctcgaactcctggcttcaagtgatcctcccatctcaatctcccaaagtgctgtgactacaggtgtgagtcactgtgccaggcccaacctgaaaccttgactgcaactcacctcagagactgcgacacactggctatgccccaagtcatatgtggagagggcagcttttctcatccggcttgccaggctcttctaaattgaacatagacagaaggaaaagaaaggcatgttctgggagctcagagtcttttgttacacgtgtctcgaagggtactaatacatctccagtagctgtgattatgccatgaaatgtctctaataaaaattactttttgaaataactgtttttcacttgctcttttggaaacattattccaaaagattgtgtctctaattttatgatggaattcatttggaaacttaatttactttacaaaaattcttgttaaatatattttgatggaatccaataaagagaaatcaatactgtatgtatttatacatatatatgtatttcaataccattcaatctcctctagtctatgaaatagggatcatgtgaaaatcaatttaagcatttccaagtaagatttaataacctaacatgtcaaaaatgttttattaaattcagctataattcatctctaacaaaattacgcatgaagattgaagtctcttaacttgcagaagatttgtacaatcatttgcagaatgatttaagaagaaacaatgagtctctgttgatagtgacatttaggccataaatatttactcaagcaaggatatgtaaataatttaatgaataatttaatttttgagaaataaactttgggaatatttctaatgcaaaacaataattagagtaggcaggaagagttggtgaccataaaaatgtctctgaatcaggagtcagagtttctaacacaacgacctcaagcatctgactccaggttcttcagcttttggactcatggacctacaccaatggtttgccaggggttctcgggcccttggccacagactgaagcccgcactgttgacttccttacttttgaggttttggaacttggactggcttccttgctcctcctcagcttgcagattgcctattttggaacttcaccttgtgatcctaagcctacacttttcatctcccctgctggaacaccaaatcttaactgtctgcacacagaaaagcactgtcacaggaaccaaaaatcagtgacaagcagtgttaagatgttttgggtacttcagtcaacaagctgccatcttcaacatggggcatacagagcagttttcaagcctctatagaagtcatcttacagcgagtctgagccagtgaaatgcagttatagtgatatgtgtactcccaaggtagctgtcaatgctcctactcggaaatactcatatgttgcttctgacttgaagcagaggaactcacaacctaagaagccacaggcttgaagatggcagagcacaagatggcagaagtttggaatgaattactacttgaaagagaagctcttatttaccaagaaatatattttggaatttgcatgagtaagaaataaatccaattatgctaacattatcattgaaattagagacgtttctgttagagtagctgttgttaccatagctaatatagatgaagattatattgatttaccagcagccagattgaataggaaatttaggccagtgtaaatcttcacctttccaccctttttcaggtatccctgatctccctattttgctctaaacaacctttaatcaacagtaccttc

SEQ ID NO: 464426 - DNA, 649 bp, Homo sapiens
cgccataattatgcgcctacgaataacgtcatcccgtcaccaccgaaatttatctcttctgtgtgccaaattttccgactgcagaggaagaattaacaatggccaaggccaaggggaacaggcagaaagaagagtgtggcctcaaatgatttacaagcattaatcaggaaacatatggctgtcttgccaaacttgctggacatttacaaggttcatagcatagctcacagctgaagacctttcattctgttcctgttggagaatttttgtggaaaaaccttcaattgcagttactacgcagtgcgccatgggaagagacacttctttaaatgcacttctccagccaaaatctagtaaggtagcctgaaatatcaatgtatatgaagtcatgttaatcttaactcagcaacaaatgtttctattgttatagatataaaattattactttcattcaacatgttgaatatattctttgatatactgtaaaagccattcttacaacctaaaaaatattacctagtgaataaagcaatatacaaaaacatgtgcattctttacacacagtaatatactgacatttcattttaattcatcagtagatttaataaaaaactttttaatacaaaaaaaatccgccttcctggcccca

SEQ ID NO: 464427 - DNA, 1203 bp, Homo sapiens
aggccatttacattcaaggttaatattgacataatgttttttttttctttccctttcccttttcccctgtttctggggggtgtgactgtagggtcttttggctttgcttctatagacatatgcacttcttttggcaggttttatattgggctgtggaattcaacatacaagcccatagatggcacttacaggcaaaaactgtctgtggtcaatgtggctgggtatatagttgatccttgtttactagcagaggctctctgttacctcaggcaatgggttgattcaagtgtcactcggcttggagctgggaaaccacctcgggtccaagttctctacacagaatctctgtacagaaagagtagacagttcagcctgctgatccaggtgatctggtgctctgaatgtatgaaggcaatttggcacggcatgtttaccattttatttgcagtctaaaacactgcctgatctcttctgtgtgccaaattttccgactgcagaggaagaattaacaatggccaaggccaaggggaacaggcagaaagaagagtgtggcctcaaatgatttacaagcattaatcaggaaacatatggctgtcttgccaaacttgctggacatttacaaggttcatagcatagctcacagctgaagacctttcattctgttcctgttggagaatttttgtggaaaaaccttcaattgcagttactacgcagtgcgccatgggaagagacacttctttaaatgcacttctccagccaaaatctagtaaggtagcctgaaatatcaatgtatatgaagtcatgttaatcttaactcagcaacaaatgtttctattgttatagatataaaattattactttcattcaacatgttgaatatattctttgatatactgtaaaagccattcttacaacctaaaaaatattacctagtgaataaagcaatatacaaaaacatgtgcattctttacacacagtaatatactgacatttcattttaattcatcagtagatttaataaaaaactttttaaaaaatttaatctcttaaatatagttcaataaagccatctttacaagaacagaaagctacagttactatttatcacataaaacaacctttaaattcaacatatttaataaagtctaaattagatttttatagtcttttttatagtttattgttaacaagtattgcaacata

SEQ ID NO: 464428 - DNA, 1403 bp, Homo sapiens
acgtgaatgggccacaacatctaaaggaactggggcacctgggagttttcatttccattatttcacttggagccagtggttttcagagcggggggccagtggcaccacagagctgcctttgaatgaccttggatgagcgactattcacccccattatattctccatctgtcagatggagactgtgatgtaaaccccatgtggctgggaggactaaccaaggtccacatctccagggccgctcttagctcagagtctttctgagggaaactgcctggcaccagtccgtgatgaaggtgtcagcctattggaacctgccctctcagataggtaagatccaaagatgtcagccgcaagcttccagtccctggatgagaacttagagtagggccaagagagctctctcagggataaaaatagagttgctgtgaagatgaagtaaatgaagacatgctgagaactcagaacaacgcttggcaacagtaattgtttaatacgtgctattattaacaagtaatagtctttcccatcctggtattcggctccttgattttccagactcctcggactcagatcctcctcacccaacttcaaggaggaagacagaatggggcttagcaggtccattacacggatgcagcaactgggatctggggatggtcactagctgaggtcagaggtggaggctggcacccccaccccctcccgcagagcccagtggggtgaggtggagggtagggcttctcagggaatcactgtcctgccccttctgcgtgcccaggggacctgcgaacactctagacctggggggcccaagaagttcaaacctccctgaccttcgcggtacagggaaaaccaaagtctgagacgtttgcaggccccagggccaacccacctcatgcagaggctagaaggcctacaaccagagcccccctccagcccgtggtatacgggaaaccacgcaatggcacctatgggttccagtcctggtggtccctatgcacagctgcgctgccaggacctcgccacttcaactcccggggtgtccactttctcatctgaaaagtggggtggtcacctctggactgtcatgagaattaactttggcggtgcatggcgaggaaagtcaggcccaaagatacagggcgtaggcctgctgctgcctatcctgggccggctgaggtctgggcgccctgaagacagggagccagcagccaaaagagaacgtgctggggtccagcctgggtgccctgagctgtgccagctgcccctccagaaaacagacgctgcctgctgcctccagcggtgggctgcctgcgggttcccggtgaccctttccccctcctggagatgctctgcattgccccgctcgcacactccagttcccatcctcgtgttctaggac

SEQ ID NO: 464429 - DNA, 1810 bp, Homo sapiens
caaccgacatgtcgcgctccttctatgtcgactcgctcatcatcaacgacacctcacggcctgcgccctcgctgcctgaaccgcaccccgggccggatttcttcatcccgcttggcatgccgcccccattggtgatgtccgtgtccggccccggctgcccgtctcgcaagagcggcgcgttctgcgtgtgccctctctgcgtcacttcgcacctgcactcctctcgggggtctgtgggcgccggcagcgggggcgcaggggccggggttaccggggccggaggcagtggggtggcaggggccgcaggggcactgcctctgcttaagagccagttctcttcggctcctggggacgcgcagttttgcccgcgggtgaaccatgcgcatcatcaccaccacccgccgcagcaccaccatcaccatcatcagccccagcagcctggctcggccgcggcggcggcagcagcagcagcggcggcggcggccgcggcggccttggggcacccgcagcaccacgcacctgtctgcaccgccaccacctacaacgtggcggacccgcggagattccactgcctcaccatgggaggctctgacgccagccaggtacccaatggcaagaggatgaggacggcgttcactagcacgcaactcctggagctggagagagaattctcttccaacatgtacctgtctcgactccggaggattgaaatcgccacttacctgaacctgtcggagaagcaggtgaaaatctggtttcagaaccgccgagtgaagcacaagaaggaggggaagggcacgcagaggaacagtcacgcgggctgcaagtgcgtcgggagccaggtgcactacgcgcgctccgaggatgaggactccctgtcgccggcctcagccaacgatgacaaggagatttcccccttatgagggagggcctcctccctcacatcccccgctcctggcagaccaggcaacgccaaggcgtggggcacccaggggccagaatccttgctcattgcagtggtcccatctggagaagaaacgaacctggaagttctggaatggacaagccgggacctgacccttcgcgtctccttcttgacctgtttatctaggactccaacttgaagttacagatttttttaaaaaatgtaaataacctataattcaactcattcttgtcgtataacagaggaaaaacagggttggtttaagtttaacactgtatggggtttttgaaagcacatgtcagttccccatccctactctctttcagaactcgataagaacacaggatttattgattattttctgttgtcgttttcaaacaaaaacacccaagttgaaaataatttagaaaattagaccttgtaggtcttgctttctgaaatttcgcctggggagaatttaaaatctaagtcgctggaagtccctttgtatgtgaataggtttatataaaatttatatttatatttatttaaataaatgaaacaaaaaccagaattttaaatctgtggtgtttgctctccctatcttctcctgccccctcctccaatgtctagagaaaggcatatgcaggaaaaagctgtctgaggaattcgaggaaaatgttgagtaagaacttggtaatgtgggtctcttgactgagggagtttgtggctcaatgggttttctatgtaacagaactttcgccaaggagacacctttagtcatgatggcatctaccaggcagtgcctctccatccttaaaataggcaacctcctcacagttgataggacaaatcactccatttggaatgacactgaccattaac

SEQ ID NO: 464430 - DNA, 1021 bp, Homo sapiens
caaccgacatgtcgcgctccttctatgtcgactcgctcatcatcaacgacacctcacggcctgcgccctcgctgcctgaaccgcaccccgggccggatttcttcatcccgcttggcatgccgcccccattggtgatgtccgtgtccggccccggctgcccgtctcgcaagagcggcgcgttctgcgtgtgccctctctgcgtcacttcgcacctgcactcctctcgggggtctgtgggcgccggcagcgggggcgcaggggccggggttaccggggccggaggcagtggggtggcaggggccgcaggggcactgcctctgcttaagagccagttctcttcggctcctggggacgcgcagttttgcccgcgggtgaaccatgcgcatcatcaccaccacccgccgcagcaccaccatcaccatcatcagccccagcagcctggctcggccgcggcggcggcagcagcagcagcggcggcggcggccgcggcggccttggggcacccgcagcaccacgcacctgtctgcaccgccaccacctacaacgtggcggacccgcggagattccactgcctcaccatgggtagggcggggtcttggggcacctgcgctccgcgcctttcgcgctcctggagcaaactttccacctccagtggaggaagtgggagcccggggacagggtgaagagagaggacgggcttttagtgtaactgtagagtcagccacagaagttccacgaaagtggaagttagtttgccagcttctccactcagcctggtgcgttttactcctagtagtaggtgctcgagtattgccttattaatactggggccttagggacctcgaacgtcacggcggagaaaccagaggttaactgcttgggatttggggtgggtgtgtttgaacctgtgtggcatccccgcgtcggggcggctaaagcgtcttgacgtttttggctaagcctgcgcgcttctccgcttggctcaaagggaggcgatcagatagtgcaagcccccatccct

SEQ ID NO: 464431 - DNA, 892 bp, Homo sapiens
cactagggccaagatcaagatgcatgcatatctcgtatctagtgaaagcctgcttatcatttactgacggctgcctcctctttgtaccttcaaatggtgaactactaaaactgaacagtctgagaggaagtgatataaatcaggatgtaaattacatgagagaaaacaaaacaaaacagaagacttggcaaacaggggtgtgttacagctctggctgtggaagtcctgaggtctgggcccaaagaagggtcacagctcttcactactgtagtcttgtgaatggagatgtgtggctccaggcagctttttctctcctgttgctcatcttcgttgtgattgtcaatgaacaaaggactgtaccgatgcttaatcagttgcatattcttatcctctgtttctttaaccatattcttcagggcagctggacctcttggtggttacaacctgaagaggggttgtttcaaaatgaaccacttcagagcaaagcagggctgaaagctggagagagtaaagggaaagcgttctgatttcatcctacatctggatccattcatatccaatgttggaacgcaccttttcagccaaggatgatggcaagtgctcagggggctgaagcaggagaaaacttgagctcaagaatttgaggctgcagtaagccaaatggaaccactgcactccagtctaggtgacagtctaaaatgaaaagaataacccgtatcttgagattgtgagttattataaaattaaatattttggttaaaacttcacttggtagcaagtgatcaggcaagctgaattatttaaagaaagatgaaaattagagaaaataaaattctgaaaaatgttggcataatttttgtgaaaatgtaataaatcctttgcaatttttgta

SEQ ID NO: 464432 - DNA, 644 bp, Homo sapiens
atgatccccggcttcagaattcgcacgaggaaacctgaggaatggtctggaacacggacctggtggagaccctggagctgcagaacctgatgctgtgtgcgctgcagaccatctacggagcagaggcgcggaaggagtcacggggcacgcacgccagggaaggctacaaggtgcagattgatgagtacgattactccaagcccatccaggggcaacagaagaagccctttgaggagcactggaggaagcacaccctgtcctatgtggacgttggcactgggaagactcttcttttcatggtcaccctgggatatagacccgtaatcgacaaaactttgaacgaggctgactgtgccaccgtccccccagccattcgctcctactgatgagacaagatgcggtgatgacagaatcagcttttgtaattatgtataatagctcatgcatgtgtccatgtcataactgtcttcatacgcttctgcactccggggaagaaggagtacattgaagggagattggcacccaggctgggagcttgccaggaacccagtggccagggagcgtggcacttacctttgtcccttgcttcattcttgtgagatgataaaactgggcacagctcttaaataaaatataaatgaaca

SEQ ID NO: 464433 - DNA, 1742 bp, Homo sapiens
  misc_feature (869)..(869): n is a, c, g, or t
cctcccgggctccagcaatcctcccacctcagcctcccaaggagctgagactacaggtgtgagccaccatgcctggctaatttttatattttttacagagacagggtttcaccatcttgcccaggctggtctcaaactcctgggctcaagcagtcctcctgcctcagcctcccagagtattgggattataggtgtgagccactgccagattttggcagtgcacagccagagaacaacacatcacacacaggaaacagttgtgctcatgtgatgggggcctcagcactaggaaggagtggactattggcacacgcagcagcttgaataaatctgaaagtcactatgctgtgtaagagaagccaaatttaaaaagtgcatgctgtgtacagagggtgtcaagaatgcctcctacgtgacggaaagcagatccgtggttgcctgcagactggcaggagcagattccaaaggcacaggaagaagcttgtgggtagaatgtgttcattaccttctgtgcattataccataaaaaagctggtcacaaaaatgcaaaccaaaaacaaaggtgaaactaggataagatttctcacctgtgtgattggtaaacgtgcagatgtgccgtcatgctttgtttatgaagctgtgggatacaaggactctcatacgtcactgtggaatgcagaatattgcagcctcatggaagaggatttggcagcgtctaacaaaactacatggcatttgccctttgactcagcaattctagaatctgcctcaaaaaaactccagcaaagaaatgaaaggactttaggcacagagttcttttcacagcctgcatgtgtttgcaacaaagttcttcactgtggcgtttgtanatgtggggaaaagagagatcaggctggtactgtgtctgtgtagaaaaggaggacgtaagaaactccattttgatctgtaccccgagcgattgttttgccctgagatgctgttaatctgtaactttagccccagccttgagctcacagaaacctgtgttgtatggaatcaaggtttcagggatctagggctgtgcaggacgtgccttgttaagaaaatgcttacaggcagtacgcttggtaaaagttatcgccattctccattctcgataaaccaggggcacaatgcactgcggaaagccgcagggacctctgcccaggaaagccgggtaccatccaaggtttctccccactgagatatggccttgtgggatgggaaagacctgaccatccaccagcccgacacccgtgaaggatctgtgctgagtaggattagtaaaagaggaaggcctctgtctcctgccttcccctgggaacggaatgtctcagtataaaactgatcgtacatttgttcaattctgagataggagaaaaaccaccctgtggtgggaggcgagacatgttggccgcaatgctgctgttactctttactccactgaaatgtttgggtggagagaagcataaatctggcctacgtgcacatctagacatagtaccttcccttgaacttacttgtgacacagattcctttgctcacatgttttcttgctgaccttctccccactgtcaccctgttctcctgccacattcctcttgctgagatagtgaaaatagtaatcaataaatactgagggaactcagagaccggtgccagtgcgggtcctctgtatgctgagcgccagtcccctgggcccacttttctttctctataaaaaa

SEQ ID NO: 464434 - DNA, 1301 bp, Homo sapiens
tcatgctgccgtgttccgtgtgggaagcgtgttgcaagaaggttgtgggaaaatcagcaagctctacggagacctaaagcacctgaagacgttcgaccggggtcagcagacagtgggctctgtgcacactgttgggccctgccttctgcagggtgggctggtgtctgtcccgtcagtgctgacttagttccgtgcttgctgtctggatgggtcctggcccacagctataaagccacaaccagtgactccatggactagcaggcccaggctgacagctcggagggcccatgtgactgggtcccgcctgcccctgatggaactttttgtgtccccaggaatggtctggaacacggacctggtggagaccctggagctgcagaacctgatgctgtgtgcgctgcagaccatctacggagcagaggcgcggaaggagtcacggggcacgcacgccagggaaggctacaaggtgcagattgatgagtacgattactccaagcccatccaggggcaacagaagaagccctttgaggagcactggaggaagcacaccctgtcctatgtggacgttggcactgggaagcagtgtggagctcgttctcaccacagcccagcacccacacggccccgcccaggcctgcgggctggccttgctgatggtgaacagggaggagcaggccagatttaaatcaactcccgacagatttgaggcaccgctgaaaaaggcactctgacagcagttgggctttgggctggaaacagaatccagttcctgcaggtggttcagaggagccttaaggaagggttgctccgtggtgtgggtcagatggacgtcactaggcaggagcaagtgtccaaggcctggtggcaggggaggagatgattgtagacctagtgagaaagtcagcatctgtggggtggggacacagccactaccagaaaccagtcccacgtcaagggagcccagaagagacgcctcccctctcctcccacgggctgggccaactggaagcatctgcaggggagctgaggggatgtggtgcagtctttagcatcccctgggcactgagcaagcagagaagggcagaaatggaggtggggttgggatggtttactaggtgagtgtgtcctcgattattcaaatcaggggtccccaatccccaggccacagattgttaccagtccatggcctgttaggagccaggccgcacagtaggaggtgagcagtgggccggtgagctactgtgtgaactccaccccctgccagagcattactctgtgagctctgccccctgcagagcatt

SEQ ID NO: 464435 - DNA, 694 bp, Homo sapiens
acaacgcatttgtctcatcagtaggaggaatggtctggaacacggacctggtggagaccctggagctgcagaacctgatgctgtgtgcgctgcagaccatctacggagcagaggcgcggaaggagtcacggggcacgcacgccagggaaggctacaaggtgcagattgatgagtacgattactccaagcccatccaggggcaacagaagaagccctttgaggagcactggaggaagcacaccctgtcctatgtggacgttggcactgggaagtatagacccgtaatcgacaaaactttgaacgaggctgactgtgccaccgtccccccagccattcgctcctactgatgagacaagatgcggtgatgacagaatcagcttttgtaattatgtataatagctcatgcatgtgtccatgtcataactgtcttcatacgcttctgcactccggggaagaaggagtacattgaagggagattggcacccaggctgggagcttgccaggaacccagtggccagggagcgtggcacttacctttgtcccttgcttcattcttgtgagatgataaaactgggcacagctcttaaataaaatataaatgaacaaactttcttttatttccaaatccatttaaaatattttactgttatgactttagtcatatttgttgacctaaaaatcaaatgtagtaatc

SEQ ID NO: 464436 - DNA, 559 bp, Homo sapiens
gctctgttccactctacgaatctgccatcatttacagtcccctgttgcgcatgtagatcatttttgaatttgttattggaaaatactgcagcaaatacctttaagttcacatgctgtaaatctacttttatagttaaaatttttcaaaaggaacacaagagatggttttttgtacatttttgtgcttaacttaccactgactcttcttttcatggtcaccctgggatatagacccgtaatcgacaaaactttgaacgaggctgactgtgccaccgtccccccagccattcgctcctactgatgagacaagatgcggtgatgacagaatcagcttttgtaattatgtataatagctcatgcatgtgtccatgtcataactgtcttcatacgcttctgcactccggggaagaaggagtacattgaagggagattggcacccaggctgggagcttgccaggaacccagtggccagggagcgtggcacttacctttgtcccttgcttcattcttgtgagatgataaaactgggcacagctcttaaataaaatataaatgaaca

SEQ ID NO: 464437 - DNA, 648 bp, Homo sapiens
gctctgttccactctacgaatctgccatcatttacagtcccctgttgcgcatgtagatcatttttgaatttgttattggaaaatactgcagcaaatacctttaagttcacatgctgtaaatctacttttatagttaaaatttttcaaaaggaacacaagagatggttttttgtacatttttgtgcttaacttaccactgactcttcttttcatggtcaccctgggatatagacccgtaatcgacaaaactttgaacgaggctgactgtgccaccgtccccccagccattcgctcctactgatgagacaagatgcggtgatgacagaatcagcttttgtaattatgtataatagctcatgcatgtgtccatgtcataactgtcttcatacgcttctgcactccggggaagaaggagtacattgaagggagattggcacccaggctgggagcttgccaggaacccagtggccagggagcgtggcacttacctttgtcccttgcttcattcttgtgagatgataaaactgggcacagctcttaaataaaatataaatgaacaaactttcttttatttccaaatccatttaaaatattttactgttatgactttagtcatatttgttgacctaaaaatcaaatgtagtaatc

SEQ ID NO: 464438 - DNA, 989 bp, Homo sapiens
  misc_feature (360)..(360): n is a, c, g, or t
aagcaattgaatcgcattattaactttaaattttttgagcctgcctaaaggccggatcttatcagcagctgaacagcatctacagaaaccagctgcaaagacagaagcagaacaactggtttggtggagagacctgataacagaaagttgggaaataggtaaaataataacttggggtagaggttatgcttatgtttctccaggactgaaccatcaagacacctgaaaccttatcatgagcgaatgctgaggaagagattccgggaggatcccgaggacccccccagttgcagccatgtcaagactgatgctgaggaggaccccaactgtcacgagcaacacccgtcaaacacagccatncacctgaggtcagatcaagaagctgtcacagatggcagaagaaaacctgaggaatggtctggaacacggacctggtggagaccctggagctgcagaacctgatgctgtgtgcgctgcagaccatctacggagcagaggcgcggaaggagtcacggggcacgcacgccagggaaggctacaaggtgcagattgatgagtacgattactccaagcccatccaggggcaacagaagaagccctttgaggagcactggaggaagcacaccctgtcctatgtggacgttggcactgggaagtatagacccgtaatcgacaaaactttgaacgaggctgactgtgccaccgtccccccagccattcgctcctactgatgagacaagatgcggtgatgacagaatcagcttttgtaattatgtataatagctcatgcatgtgtccatgtcataactgtcttcatacgcttctgcactccggggaagaaggagtacattgaagggagattggcacccaggctgggagcttgccaggaacccagtggccagggagcgtggcacttacctttgtcccttgcttcattcttgtgagatgataaaactgggcacagctcttaaataaaatataaatgaaca

SEQ ID NO: 464439 - DNA, 965 bp, Homo sapiens
  misc_feature (360)..(360): n is a, c, g, or t
aagcaattgaatcgcattattaactttaaattttttgagcctgcctaaaggccggatcttatcagcagctgaacagcatctacagaaaccagctgcaaagacagaagcagaacaactggtttggtggagagacctgataacagaaagttgggaaataggtaaaataataacttggggtagaggttatgcttatgtttctccaggactgaaccatcaagacacctgaaaccttatcatgagcgaatgctgaggaagagattccgggaggatcccgaggacccccccagttgcagccatgtcaagactgatgctgaggaggaccccaactgtcacgagcaacacccgtcaaacacagccatncacctgaggtcagatcaagaagctgtcacagatggcagaagaaaacctgaggaatggtctggaacacggacctggtggagaccctggagctgcagaacctgatgctgtgtgcgctgcagaccatctacggagcagaggcgcggaaggagtcacggggcacgcacgccagggaaggctacaaggtgcagattgatgagtacgattactccaagcccatccaggggcaacagaagaagccctttgaggagcactggaggaagcacaccctgtcctatgtggacgttggcactgggaagtatagacccgtaatcgacaaaactttgaacgaggctgactgtgccaccgtccccccagccattcgctcctactgatgagacaagatgcggtgatgacagaatcagcttttgtaattatgtataatagctcatgcatgtgtccatgtcataactgtcttcatacgcttctgcactccggggaagaaggagtacattgaagggagattggcacccagtggccagggagcgtggcacttacctttgtcccttgcttcattcttgtgagatgataaaactgggcacagctcttaaataaaatataaatgaaca

SEQ ID NO: 464440 - DNA, 1054 bp, Homo sapiens
  misc_feature (360)..(360): n is a, c, g, or t
aagcaattgaatcgcattattaactttaaattttttgagcctgcctaaaggccggatcttatcagcagctgaacagcatctacagaaaccagctgcaaagacagaagcagaacaactggtttggtggagagacctgataacagaaagttgggaaataggtaaaataataacttggggtagaggttatgcttatgtttctccaggactgaaccatcaagacacctgaaaccttatcatgagcgaatgctgaggaagagattccgggaggatcccgaggacccccccagttgcagccatgtcaagactgatgctgaggaggaccccaactgtcacgagcaacacccgtcaaacacagccatncacctgaggtcagatcaagaagctgtcacagatggcagaagaaaacctgaggaatggtctggaacacggacctggtggagaccctggagctgcagaacctgatgctgtgtgcgctgcagaccatctacggagcagaggcgcggaaggagtcacggggcacgcacgccagggaaggctacaaggtgcagattgatgagtacgattactccaagcccatccaggggcaacagaagaagccctttgaggagcactggaggaagcacaccctgtcctatgtggacgttggcactgggaagtatagacccgtaatcgacaaaactttgaacgaggctgactgtgccaccgtccccccagccattcgctcctactgatgagacaagatgcggtgatgacagaatcagcttttgtaattatgtataatagctcatgcatgtgtccatgtcataactgtcttcatacgcttctgcactccggggaagaaggagtacattgaagggagattggcacccagtggccagggagcgtggcacttacctttgtcccttgcttcattcttgtgagatgataaaactgggcacagctcttaaataaaatataaatgaacaaactttcttttatttccaaatccatttaaaatattttactgttatgactttagtcatatttgttgacctaaaaatcaaatgtagtaatc

SEQ ID NO: 464441 - DNA, 1105 bp, Homo sapiens
  misc_feature (360)..(360): n is a, c, g, or t
aagcaattgaatcgcattattaactttaaattttttgagcctgcctaaaggccggatcttatcagcagctgaacagcatctacagaaaccagctgcaaagacagaagcagaacaactggtttggtggagagacctgataacagaaagttgggaaataggtaaaataataacttggggtagaggttatgcttatgtttctccaggactgaaccatcaagacacctgaaaccttatcatgagcgaatgctgaggaagagattccgggaggatcccgaggacccccccagttgcagccatgtcaagactgatgctgaggaggaccccaactgtcacgagcaacacccgtcaaacacagccatncacctgaggtcagatcaagaagctgtcacagatggcagaagaaaacctgaggaatggtctggaacacggacctggtggagaccctggagctgcagaacctgatgctgtgtgcgctgcagaccatctacggagcagaggcgcggaaggagtcacggggcacgcacgccagggaaggctacaaggtgcagattgatgagtacgattactccaagcccatccaggggcaacagaagaagccctttgaggagcactggaggaagcacaccctgtcctatgtggacgttggcactgggaagactcttcttttcatggtcaccctgggatatagacccgtaatcgacaaaactttgaacgaggctgactgtgccaccgtccccccagccattcgctcctactgatgagacaagatgcggtgatgacagaatcagcttttgtaattatgtataatagctcatgcatgtgtccatgtcataactgtcttcatacgcttctgcactccggggaagaaggagtacattgaagggagattggcacccaggctgggagcttgccaggaacccagtggccagggagcgtggcacttacctttgtcccttgcttcattcttgtgagatgataaaactgggcacagctcttaaataaaatataaatgaacaaactttcttttatttccaaatccatttaaaatattttactgttatgactttagtcatatttgttgacctaaaaatcaaatgtagtaatc

SEQ ID NO: 464442 - DNA, 1804 bp, Homo sapiens
  misc_feature (931)..(931): n is a, c, g, or t
cctcccgggctccagcaatcctcccacctcagcctcccaaggagctgagactacaggtgtgagccaccatgcctggctaatttttatattttttacagagacagggtttcaccatcttgcccaggctggtctcaaactcctgggctcaagcagtcctcctgcctcagcctcccagagtattgggattataggtgtgagccactgccagaaaaacttttcctaagacaaggcaggttttacattatatttagattttttttaatgatgtcttttttggcagtgcacagccagagaacaacacatcacacacaggaaacagttgtgctcatgtgatgggggcctcagcactaggaaggagtggactattggcacacgcagcagcttgaataaatctgaaagtcactatgctgtgtaagagaagccaaatttaaaaagtgcatgctgtgtacagagggtgtcaagaatgcctcctacgtgacggaaagcagatccgtggttgcctgcagactggcaggagcagattccaaaggcacaggaagaagcttgtgggtagaatgtgttcattaccttctgtgcattataccataaaaaagctggtcacaaaaatgcaaaccaaaaacaaaggtgaaactaggataagatttctcacctgtgtgattggtaaacgtgcagatgtgccgtcatgctttgtttatgaagctgtgggatacaaggactctcatacgtcactgtggaatgcagaatattgcagcctcatggaagaggatttggcagcgtctaacaaaactacatggcatttgccctttgactcagcaattctagaatctgcctcaaaaaaactccagcaaagaaatgaaaggactttaggcacagagttcttttcacagcctgcatgtgtttgcaacaaagttcttcactgtggcgtttgtanatgtggggaaaagagagatcaggctggtactgtgtctgtgtagaaaaggaggacgtaagaaactccattttgatctgtaccccgagcgattgttttgccctgagatgctgttaatctgtaactttagccccagccttgagctcacagaaacctgtgttgtatggaatcaaggtttcagggatctagggctgtgcaggacgtgccttgttaagaaaatgcttacaggcagtacgcttggtaaaagttatcgccattctccattctcgataaaccaggggcacaatgcactgcggaaagccgcagggacctctgcccaggaaagccgggtaccatccaaggtttctccccactgagatatggccttgtgggatgggaaagacctgaccatccaccagcccgacacccgtgaaggatctgtgctgagtaggattagtaaaagaggaaggcctctgtctcctgccttcccctgggaacggaatgtctcagtataaaactgatcgtacatttgttcaattctgagataggagaaaaaccaccctgtggtgggaggcgagacatgttggccgcaatgctgctgttactctttactccactgaaatgtttgggtggagagaagcataaatctggcctacgtgcacatctagacatagtaccttcccttgaacttacttgtgacacagattcctttgctcacatgttttcttgctgaccttctccccactgtcaccctgttctcctgccacattcctcttgctgagatagtgaaaatagtaatcaataaatactgagggaactcagagaccggtgccagtgcgggtcctctgtatgctgagcgccagtcccctgggcccacttttctttctctataaaaaa

SEQ ID NO: 464443 - DNA, 605 bp, Homo sapiens
acaacgcatttgtctcatcagtaggaggaatggtctggaacacggacctggtggagaccctggagctgcagaacctgatgctgtgtgcgctgcagaccatctacggagcagaggcgcggaaggagtcacggggcacgcacgccagggaaggctacaaggtgcagattgatgagtacgattactccaagcccatccaggggcaacagaagaagccctttgaggagcactggaggaagcacaccctgtcctatgtggacgttggcactgggaagtatagacccgtaatcgacaaaactttgaacgaggctgactgtgccaccgtccccccagccattcgctcctactgatgagacaagatgcggtgatgacagaatcagcttttgtaattatgtataatagctcatgcatgtgtccatgtcataactgtcttcatacgcttctgcactccggggaagaaggagtacattgaagggagattggcacccaggctgggagcttgccaggaacccagtggccagggagcgtggcacttacctttgtcccttgcttcattcttgtgagatgataaaactgggcacagctcttaaataaaatataaatgaaca

SEQ ID NO: 464444 - DNA, 2189 bp, Homo sapiens
  misc_feature (360)..(360): n is a, c, g, or t
  misc_feature (1316)..(1316): n is a, c, g, or t
aagcaattgaatcgcattattaactttaaattttttgagcctgcctaaaggccggatcttatcagcagctgaacagcatctacagaaaccagctgcaaagacagaagcagaacaactggtttggtggagagacctgataacagaaagttgggaaataggtaaaataataacttggggtagaggttatgcttatgtttctccaggactgaaccatcaagacacctgaaaccttatcatgagcgaatgctgaggaagagattccgggaggatcccgaggacccccccagttgcagccatgtcaagactgatgctgaggaggaccccaactgtcacgagcaacacccgtcaaacacagccatncacctgaggtcagatcaagaagctgtcacagatggcagaagaaaacctgaggaatggtctggaacacggacctggtggagaccctggagctgcagaacctgatgctgtgtgcgctgcagaccatctacggagcagaggcgcggaaggagtcacggggcacgcacgccagggaaggctacaaggtgcagattgatgagtacgattactccaagcccatccaggggcaacagaagaagccctttgaggagcactggaggaagcacaccctgtcctatgtggacgttggcactgggaagttttggcagtgcacagccagagaacaacacatcacacacaggaaacagttgtgctcatgtgatgggggcctcagcactaggaaggagtggactattggcacacgcagcagcttgaataaatctgaaagtcactatgctgtgtaagagaagccaaatttaaaaagtgcatgctgtgtacagagggtgtcaagaatgcctcctacgtgacggaaagcagatccgtggttgcctgcagactggcaggagcagattccaaaggcacaggaagaagcttgtgggtagaatgtgttcattaccttctgtgcattataccataaaaaagctggtcacaaaaatgcaaaccaaaaacaaaggtgaaactaggataagatttctcacctgtgtgattggtaaacgtgcagatgtgccgtcatgctttgtttatgaagctgtgggatacaaggactctcatacgtcactgtggaatgcagaatattgcagcctcatggaagaggatttggcagcgtctaacaaaactacatggcatttgccctttgactcagcaattctagaatctgcctcaaaaaaactccagcaaagaaatgaaaggactttaggcacagagttcttttcacagcctgcatgtgtttgcaacaaagttcttcactgtggcgtttgtanatgtggggaaaagagagatcaggctggtactgtgtctgtgtagaaaaggaggacgtaagaaactccattttgatctgtaccccgagcgattgttttgccctgagatgctgttaatctgtaactttagccccagccttgagctcacagaaacctgtgttgtatggaatcaaggtttcagggatctagggctgtgcaggacgtgccttgttaagaaaatgcttacaggcagtacgcttggtaaaagttatcgccattctccattctcgataaaccaggggcacaatgcactgcggaaagccgcagggacctctgcccaggaaagccgggtaccatccaaggtttctccccactgagatatggccttgtgggatgggaaagacctgaccatccaccagcccgacacccgtgaaggatctgtgctgagtaggattagtaaaagaggaaggcctctgtctcctgccttcccctgggaacggaatgtctcagtataaaactgatcgtacatttgttcaattctgagataggagaaaaaccaccctgtggtgggaggcgagacatgttggccgcaatgctgctgttactctttactccactgaaatgtttgggtggagagaagcataaatctggcctacgtgcacatctagacatagtaccttcccttgaacttacttgtgacacagattcctttgctcacatgttttcttgctgaccttctccccactgtcaccctgttctcctgccacattcctcttgctgagatagtgaaaatagtaatcaataaatactgagggaactcagagaccggtgccagtgcgggtcctctgtatgctgagcgccagtcccctgggcccacttttctttctctataaaaaa

SEQ ID NO: 464445 - DNA, 1078 bp, Homo sapiens
  misc_feature (360)..(360): n is a, c, g, or t
aagcaattgaatcgcattattaactttaaattttttgagcctgcctaaaggccggatcttatcagcagctgaacagcatctacagaaaccagctgcaaagacagaagcagaacaactggtttggtggagagacctgataacagaaagttgggaaataggtaaaataataacttggggtagaggttatgcttatgtttctccaggactgaaccatcaagacacctgaaaccttatcatgagcgaatgctgaggaagagattccgggaggatcccgaggacccccccagttgcagccatgtcaagactgatgctgaggaggaccccaactgtcacgagcaacacccgtcaaacacagccatncacctgaggtcagatcaagaagctgtcacagatggcagaagaaaacctgaggaatggtctggaacacggacctggtggagaccctggagctgcagaacctgatgctgtgtgcgctgcagaccatctacggagcagaggcgcggaaggagtcacggggcacgcacgccagggaaggctacaaggtgcagattgatgagtacgattactccaagcccatccaggggcaacagaagaagccctttgaggagcactggaggaagcacaccctgtcctatgtggacgttggcactgggaagtatagacccgtaatcgacaaaactttgaacgaggctgactgtgccaccgtccccccagccattcgctcctactgatgagacaagatgcggtgatgacagaatcagcttttgtaattatgtataatagctcatgcatgtgtccatgtcataactgtcttcatacgcttctgcactccggggaagaaggagtacattgaagggagattggcacccaggctgggagcttgccaggaacccagtggccagggagcgtggcacttacctttgtcccttgcttcattcttgtgagatgataaaactgggcacagctcttaaataaaatataaatgaacaaactttcttttatttccaaatccatttaaaatattttactgttatgactttagtcatatttgttgacctaaaaatcaaatgtagtaatc

SEQ ID NO: 464446 - DNA, 1062 bp, Homo sapiens
  misc_feature (360)..(360): n is a, c, g, or t
aagcaattgaatcgcattattaactttaaattttttgagcctgcctaaaggccggatcttatcagcagctgaacagcatctacagaaaccagctgcaaagacagaagcagaacaactggtttggtggagagacctgataacagaaagttgggaaataggtaaaataataacttggggtagaggttatgcttatgtttctccaggactgaaccatcaagacacctgaaaccttatcatgagcgaatgctgaggaagagattccgggaggatcccgaggacccccccagttgcagccatgtcaagactgatgctgaggaggaccccaactgtcacgagcaacacccgtcaaacacagccatncacctgaggtcagatcaagaagctgtcacagatggcagaagaaaacctgaggaatggtctggaacacggacctggtggagaccctggagctgcagaacctgatgctgtgtgcgctgcagaccatctacggagcagaggcgcggaaggagtcacggggcacgcacgccagggaaggctacaagagcctgccctgtggtcacttgttcttcagatgaactgatttttgtgcagagcacacgtgttggattctgcctggtgcagattgatgagtacgattactccaagcccatccaggggcaacagaagaagccctttgaggagcactggaggaagcacaccctgtcctatgtggacgttggcactgggaagtatagacccgtaatcgacaaaactttgaacgaggctgactgtgccaccgtccccccagccattcgctcctactgatgagacaagatgcggtgatgacagaatcagcttttgtaattatgtataatagctcatgcatgtgtccatgtcataactgtcttcatacgcttctgcactccggggaagaaggagtacattgaagggagattggcacccaggctgggagcttgccaggaacccagtggccagggagcgtggcacttacctttgtcccttgcttcattcttgtgagatgataaaactgggcacagctcttaaataaaatataaatgaaca

SEQ ID NO: 464447 - DNA, 1024 bp, Homo sapiens
acagaggtgacagttgtacaacattgtgaatgggctaaatgccactgaattgtacactttaaaatggtaaattttatgttatgtgaatttgacctcaacaaagaataactactaaaagaaaagaaagtttccacaaatctatgagaataatgccaaccacccagtagaaaagtcaattaaagatatagatataaacagcagctcacagaaagggaaatacacatgaaatgttagcccacctcactcataatgaacacaagtcaggcatgactggaaacacgggctctaacaatgcccacaggacactgtgtcttcctcctgctctccattctgcctctgtatggtggcaggctctccctgtaagatggcaaagatggcccccaaaacccccaagcttacattctcacaggttggcaatcctggcaaggaaggcaaagtctctcccaggagttccagcaaaagttttggaatggtcagctggcccctgctggggcccctggctatccctgaaccaatcgctggagccaggggaaaggatgggaaatcagtctctcagccatcaggacctgtcacggagctgctgggcaatgctgccaaggtcctctggctttctaagaacattcccattactcagcccacatctccgcctgcattctgcccctgtggaggagacctctggttctgcaactgcctgggagagtctaagtcggtgatggagagttaactggcctggtggacacatacctaccatgtcctgcaatctagcttaaagcttacactttaagaaacagaataacaagaatagattctagagctgagtttaaaccctggctccaccactgataagctgtgtgaccttgggcaagttgttagctggcacccagacacattgagaagatggtcatctgaaagccaggaaaagagactgctccagaacctgaccatgctggcaccctaatctcagatttccaccctccagaactgtgagaaaatacatgtctgatttttaagcccccaagtatat

SEQ ID NO: 464448 - DNA, 713 bp, Homo sapiens
cctatatccctcctatggtcatgtcactggcagcacctccctgtggaaggagatacttctctcaccctttgacagacagcatgcgtggccatatggggctgctccttcaaactgtgccccagaatgagaagatatgtggaggagagctaaagccaaaatgtaacatgaacaataaacaaagctttgttattatgtattactccattttcacactgctgataaagacatacctaagactgggcaatttacaaaagaaagaggattattggacttacagttccacatggctgggaaggcttcacaatcaaggcggaaggcaaggaggagcaagtcacatcttacatggatggcagttggcaataaaagagcttgtgcagggcaactccacttttaaaacaagcagatctcataagacccattcactatcatgagaacagcatgagaaagatctgtccccataattcaatcatctcccaccaggttcctcccacaaaaggtgggaattatgggagctacaagatgagattttggtggggacacagagccaaaccatatcaccagagtgaaaaacagagttgatcccatgcttcatttcacagctgcctagctacagtgagtgatatatgtttctaacacaatggatggtggcttaggaagaggatccaataaaatctatgttggagccaagaataaaatccaaggaaaatgcctct

SEQ ID NO: 464449 - DNA, 1069 bp, Homo sapiens
gctagcgtgaacgactctcttaatcctccaccgctacagggctttgacctaaagcttggagttgagtttggaacaaaaatgtgtcgtgaggggggttgcatggactccttatcatacgccaaatctaagatgaagctgtggaattgagtcctcctccaacaagggaaagaaaaggataacttacacctgtaatcccagcgctttgggaggccgaggcgggcggatcacgagatgcccgtgagttgacaagttgtttaaacgcagatgttacaataagtcagtttaagatttggtgaagaaagtagataagagtatacacagaattgaagaccttagcatcactactattcgtctgcttaggaggagcgaacagaagagaatcagtgagtttaattctcatgcatacaaactggttgataattttttcatcagatcacatccagtatgattaatgtttctcttttttcatttggccaactatgaggtgggcgagtaataacagtatcgcaaaatagaagaatatatgaatattaatgaacagttcatactttgtctccccccaacccctcacatgataaagcaaataatctcatggttcaatctctagagtactaagtttatggctggagaaagcagtagtgcatggcatatgggcaaaaagcatctctgggtagctaaggcaggggtgccttgttacaattattcagactgaagtccagcatattgtatgtaatatgctatttaaataagaacaattttggtacagttattatcatacactatacacaatactacatgtaattatccttcaagtttcctgtgaatattctatattggaaatgttaaattctataattggaaggaacgtctgtaatttagttgaaataaaaagaaagtgtgttaactttattttaaattacctctacattgtcaaacaactagagagggagcatgtatgattaaacaaaattgtaatttaaatcatgtaaagtactaatcaattaaaataataaacatagatgcggccggaaattcttatattataataaataataataatatattctgt

SEQ ID NO: 464450 - DNA, 1390 bp, Homo sapiens
tatacaccatggaatactatgcagccataaaaagggtgagttcatgtcctttgcagtgacatggatgaagctggaaaccatcattctgagcaaactattacaaggacagaaaaccaaacaccacatgttctcactcataggtgggaaacgaacaatgagaacacttggacacaggaaggggaacactgaatcccaggtgccaccctggaacaggagaggccaggctcccccgcccccacccccgcacacaacgccagcttcccaaggctacatcccagtgcacactcctccctgcatgcaggctggtcagaggttcgctgtggacctctttattcttggttgtctcatttccccttctaaagaaggctttgacctaaagcttggagttgagtttggaacaaaaatgtgtcgtgaggggggttgcatggactccttatcatacgccaaatctaagatgaagctgtggaattgagtcctcctccaacaagggaaagaaaaggataacttacacctgtaatcccagcgctttgggaggccgaggcgggcggatcacgagatgcccgtgagttgacaagttgtttaaacgcagatgttacaataagtcagtttaagatttggtgaagaaagtagataagagtatacacagaattgaagaccttagcatcactactattcgtctgcttaggaggagcgaacagaagagaatcagtgagtttaattctcatgcatacaaactggttgataattttttcatcagatcacatccagtatgattaatgtttctcttttttcatttggccaactatgaggtgggcgagtaataacagtatcgcaaaatagaagaatatatgaatattaatgaacagttcatactttgtctccccccaacccctcacatgataaagcaaataatctcatggttcaatctctagagtactaagtttatggctggagaaagcagtagtgcatggcatatgggcaaaaagcatctctgggtagctaaggcaggggtgccttgttacaattattcagactgaagtccagcatattgtatgtaatatgctatttaaataagaacaattttggtacagttattatcatacactatacacaatactacatgtaattatccttcaagtttcctgtgaatattctatattggaaatgttaaattctataattggaaggaacgtctgtaatttagttgaaataaaaagaaagtgtgttaactttattttaaattacctctacattgtcaaacaactagagagggagcatgtatgattaaacaaaattgtaatttaaatcatgtaaagtactaatcaattaaaataataaacatagaacttgatgcaagaaagtttcctattaaataataaacctgggctgg

SEQ ID NO: 464451 - DNA, 2122 bp, Homo sapiens
ggccctacggtaaaatgatctggatgctgacagtgctggcctcagctgatgcctctagatacgtgttcaggaatgagagcgtgcaccccttctctccctttgaggttaaagtaggtgtcttcaacaacaaaggagaaggccctttcagtcccaccacggtggtgtattctgcagaagaagaacccaccaaaccaccagccagtatctttgccagaagtctttctgccacagatattgaagttttctgggcctccccactggagaagaatagaggacgaatacaaggttatgaggttaaatattggagacatgaagacaaagaagaaaatgctagaaaaatacgaacagttggaaatcagacatcaacaaaaatcacgaacttaaaaggcagtgtgctgtatcacttagctgtcaaggcatataattctgctgggacaggcccctctagtgcaacagtcaatgtgacaacccgaaagccaccaccaagtcaaccccccggaaacatcatatggaattcatcagactccaaaattatcctgaattgggatcaagtgaaggccctggataatgagtcggaagtaaaaggatacaaagtcttgtacagatggaacagacaaagcagcacatctgtcattgaaacaaataaaacatcggtggagctttctttgcctttcgatgaagattatataatagaaattaagccattcagcgacggaggagatggcagcagcagtgaacaaattcgaattccaaagatatcaaatgcctacgcgagaggatctggggcttccacttcgaatgcatgtacgctgtcagccatcagtacaataatgatttccctcacagctaggtccagtttatgacaaaagttatctgaaggacttgctgtttataatataagcaacatttagctagttgttttgaagacacccagtactaagtaatattgttgttcaagtacatcttattactggaataaaaatgttttttgcttctttaggaatggcattatacagtacttcctcaaagcaaatctagctttgtctgaagtttctttggaaactctgcaatgcactgaagacatctgtaatatgatgttaccaaagcagtttacatatgtccttatatgcatattttttattatatatttagtgttttatagaattttttaaagttaacatataatgtagatattaattttttcctcggctgtaaaatgctatgggcaacacaatcatgcaattataatttgaaaatatttcctttaaagacagagtttgaaactcatcttggtaaataaattgcaaattactcgtacagttttacaaggatctcatggcagaacagcggaagacttggtccgtaactcaaggctgttgtatgcaaactactcttctagtggttaatgcacttgacatgtacagtatgtttcccatgccgttgtgattttgacatgtacagtatgttttcatgccgttgtgaattttgttgttcaacccaacttgagatggtttcaggaatggctgcaatctcaaaagctcaatgtactgcccaagaggcaccttgtgcaatattcccatccctgaatttagcattgtacaggaagattttcttttcactcaactgagttagcattgtctttgtggtagcattatcttagacattaaatttgaagtaacatatatcctgtagtaacatagacccaaagttactatagtcaaccaagtctttcaaaggataaaagatcattttattatctttaactgtatctattttgaatgtaaatttaaaaaaagtaattctctgtcaatggattcgtaatttctttacaaaatttcttatatataatatgtgtatctctgtaataatagagcccttcttttgaatcaaaattacatatggactttggaagattgctcctatttcaacaaatagttgctgcaagaatttttaatatgactctataaaagctctttagtacaattgtatggtttcttgatgattctgttttgcaataggtagcctagttgctttatatgctttaccttctaggtcttaaaatcacacattggaaaatgacaatatcaacaaaactgtattcttatgaaaagaactatttgtt

SEQ ID NO: 464452 - DNA, 762 bp, Homo sapiens
cactaaatggatgaatgaatgatgaaacctgctgctgaagggcccacctgcagacctgggctctccctgcactgcccgggccctcagggtagcaccacccaggctgggttgggccacacaccccaaaagggccctgccaaagccctcccaccccagacacagaaggggcctgcggccacccctgggcccagccccggcctccccgcgcatgcccccagccccccaccaatgccctcccctgcccctggtgggtcagagatctcctggaggctccagggagcggaggcgatgcccgcaggcgatgagcgtgttctcaggagcaggtgggcaggggccttgcagactcttcatttaggaagttattttcatgatccaaaggagcttgtaaaatacgagatttatagagcatacagaatctgcaaataaaatgattttttggttgcttttgttttacagatttaaaataagtagcattctcttaagttcatgttacttgagggaatgccacataattctagctatgtacttcttaggaatgtgaaaaagtagggaagtatgcttggtcacagtcctgatggtgactttcctatgccttaatagaaaagagcacatcagatctctcctaaggataaggtttgagagttaacaagatggcacaatcaaaagggcagtagacacttgtaacatgaatgcacaatatagtccattgctgaaattcttattctggaaacatatcacactaaatgtttactaaagcaaaat

SEQ ID NO: 464453 - DNA, 451 bp, Homo sapiens
cactaaatggatgaatgaatgatgaaacctgctgctgaagggcccacctgcagacctgggctctccctgcactgcccgggccctcagggtagcaccacccaggctgggttgggccacacaccccaaaagggccctgccaaagccctcccaccccagacacagaaggggcctgcggccacccctgggcccagccccggcctccccgcgcatgcccccagccccccaccaatgccctcccctgcccctggtgggtcagagatctcctggaggctccagggagcggaggcgatgcccgcaggcgatgagcgtgttctcaggagcaggtgggcaggggccttgcagactcttcatttcttccttcccttatcaccgttagccattttcatgggatagagatacagaggagctcccattacaaagcgccattaaactgtcatctgtgcaactgtga

SEQ ID NO: 464454 - DNA, 1565 bp, Homo sapiens
ggtcctgcctctgctggggccgtgagcaagcgtgggacggtgagcattgccaggagcatctgcggtgctttctgcaacttctctcccaccttgcctccttgcgctgaggctctctggcactttcagagaccagcagctgctgaaatgtcctgttctaagaggacctcccttctgggcacacttctacgtccccgctacccaaaactgcactggtgcactggaagagagccccacgttggtgttggcctgggcacctgttggatcaacacaataactgtaccctggagttcctggaagctgccttctgctcagccaggcctgcttgtgggcggagcccatgccagctacatgtgtcaaggaagccacagcttggctagtgagcaatgcaattctgggaatgttcaggctctctctgttctttcctctcttgcaaaccatgggcacccttgggtcccttggggtcactatgttacacctgctttttatctgtctgggcaagagctgctcaagccacaccttgtgacactgaggaggacagcacattgcactctcacctcctttgcagttaagtgtgaaatagtgccaatagagtgtaaaagaaaagaaagaagatgattcacctcccaaagattccccactgctgtgtcccttctatcaacttgatacaaaaaaacacaatggccccgggaaccacgtgttgaagatgagagagctaaaagatggaaagagactggagccctgagtcaccacctggaggaaaactacccacccatcaggaatttctactacacatttgggagtttttggggttacagcagctaatttaacgaaaacacccagagacaagagctattactgcacaaattggttaagttacctttttgtatgtttgggtcctctctattcgatgagactgcgcgttcctttgaagcaaatctgtttaaaattcttatatccccagagggcctagcagagagtatgcacagagtgagccttcagtaaatgctgagtaaataagctcctaatggatgaaactgtgtcttcgaagtttgttctgaccagtacttagtataggattttgtgctgttggtcacttttcataaaggttcttgctattaaggaacttgacatccaatgtactcatagaaagtagaaattcaggggaaacaaatagaagagatatgtccaaaaatccatttaaaatttcattgacagatatttatctctttaatcctggaagttgtttcatgtaagggaaggttcagtagaatgaaaacaggactgtaagctgggaggagatttggggtctcttggccaactctgccacaaattgtgttaccttcaacttccctgcctgtaaaatgaagtcagtggtccctaaaatgaaattggactaatggcaaattagctagcatttgattatacatcgatagtttccccatgtgattttaacgcacaaatcagattttggaaccattaggtaggtgatcttatcttatgagtttatctttttcaacatggaaaaataaatttgttttgctgaccgaaggctgtgtaacttagaa

SEQ ID NO: 464455 - DNA, 1798 bp, Homo sapiens
ggtcctgcctctgctggggccgtgagcaagcgtgggacggtgagcattgccaggagcatctgcggtgctttctgcaacttctctcccaccttgcctccttgcgctgaggctctctggcactttcagagaccagcagctgctgaaatgtcctgttctaagaggacctcccttctgggcacacttctacgtccccgctacccaaaactgcactggtgcactggaagagagccccacgttggtgttggcctgggcacctgttggatcaacacaataactgtaccctggagttcctggaagctgccttctgctcagccaggcctgcttgtgggcggagcccatgccagctacatgtgtcaaggaagccacagcttggctagtgagcaatgcaattctgggaatgttcaggctctctctgttctttcctctcttgcaaaccatgggcacccttgggtcccttggggtcactatgttacacctgctttttatctgtctgggcaagagctgctcaagccacaccttgtgacactgagatcagctatgaaaatacccagccggcctgcagccctcccggcagatgctgaaaaggaaacccgactgggagatgccgcccacccttatccccagagagctgcgttgtttcctcttgccttggcctttggatccggccatagcaagcatccctgggcacctggctgaagctggaaactcgggataagaatggaagccctggaagggaagaagaaccgaggagtgagcttgccctgaggacagcacattgcactctcacctcctttgcagttaagtgtgaaatagtgccaatagagtgtaaaagaaaagaaagaagatgattcacctcccaaagattccccactgctgtgtcccttctatcaacttgatacaaaaaaacacaatggccccgggaaccacgtgttgaagatgagagagctaaaagatggaaagagactggagccctgagtcaccacctggaggaaaactacccacccatcaggaatttctactacacatttgggagtttttggggttacagcagctaatttaacgaaaacacccagagacaagagctattactgcacaaattggttaagttacctttttgtatgtttgggtcctctctattcgatgagactgcgcgttcctttgaagcaaatctgtttaaaattcttatatccccagagggcctagcagagagtatgcacagagtgagccttcagtaaatgctgagtaaataagctcctaatggatgaaactgtgtcttcgaagtttgttctgaccagtacttagtataggattttgtgctgttggtcacttttcataaaggttcttgctattaaggaacttgacatccaatgtactcatagaaagtagaaattcaggggaaacaaatagaagagatatgtccaaaaatccatttaaaatttcattgacagatatttatctctttaatcctggaagttgtttcatgtaagggaaggttcagtagaatgaaaacaggactgtaagctgggaggagatttggggtctcttggccaactctgccacaaattgtgttaccttcaacttccctgcctgtaaaatgaagtcagtggtccctaaaatgaaattggactaatggcaaattagctagcatttgattatacatcgatagtttccccatgtgattttaacgcacaaatcagattttggaaccattaggtaggtgatcttatcttatgagtttatctttttcaacatggaaaaataaatttgttttgctgaccgaaggctgtgtaacttagaa

SEQ ID NO: 464456 - DNA, 2301 bp, Homo sapiens
gggcgcctaagcacatagttagatgaacttgcccggtagggagtgtctggtgaaggggagaattaccatttctgaagatggaaacctcagaatcatcaacgttactaaatcagacgctgggagttatacctgtatagccactaaccattttggaactgctagcagtactggaaacttggtagtgaaagatccaacaagggtaatggtacccccttccagtatggatgtcactgttggagagagtattgttttaccgtgccaggtaacgcatgatcactcgctagacatcgtgtttacttggtcatttaatggacacctgatagactttgacagagatggggaccactttgaaagagttggaggggattcagctggtgatttgatgatccgaaacatccaactgaagcatgctgggaaatatgtctgcatggtccaaacaagtgtggacaggctatctgctgctgcagacctgattgtaagaggtcctccaggtcccccagaggctgtgacaatagacgaaatcacagataccactgctcagctctcctggagacccgggcctgacaaccacagccccatcaccatgtatgtcattcaagccaggactccattctccgtgggctggcaagcagtcagtacagtcccagaactcattgatgggaagacattcacagcgaccgtggtgggtttgaacccttgggttgaatatgaattccgcacagttgcagccaacgtgattgggattggggagcccagccgcccctcagagaaacggagaacagaagaagctcgtgagtagcacccgagattcagatcatctgttctgccagctgctgttccttaggaaaagcgtttgaattcttgctgctcttcagcgctcatgcggctctgtgttagctcacccttccctttaaatgtttataatgatagaaatcaggccaggagaagcccagctgaacacgcaacgggtttcaatcaagagttgttttcttcattaggtccacttgtacagcaagagacacacggtgcttagtcctctcaaaagccagccctttcttcattggttcatttgtcaccaagattctaacagaatttcaaaaaaaaatcccacatttcaaataaaattatctcacataagtaactaatggcaaagaataatttgtgactgctctggacacagccaccatggggtaatcctgtttagaatagaaataaaaaataatttcttcagaaatgttcacttagattatctttcttagggtataaaccattcccagaaacgaagattcagaacatcgtgctcattcgaacaagaccagtcagcaattcagtatggccctctgcatatgcagcttgaatgagcacggggagagaagaacaagttcatcagggtcagccgtacttttacttagctggtgtaaagcaagaggcctacatgtgccgtcttttatagagttcccgcctgtagagaggccagtgtgttgaaggaataataaggtccctacacaaataggagttctgaccctactctcagaaaagcaaaaactcatctagatctatttgattggctttaaccaaggagacatacccagtcaccagccacataccccagtgagacctttttaaatgtggcccggagcctttcagttacgtgatgacaatatagctagtcccctgctttcttttccccttccaaaaccataattgaattaattcccctcagcaatcctgaggtggaagctcgcataatttcctctcttttatagagaaaactggtgatcaaagaggttaagctcagtgagccgggggtcaacttctgtctgccacttccttcaacactcagatcaaaactcttcctcccagaagccattcgcccaccccagctctgagcagggcgctactccggaacgccccccgcttctccatgctgactgttccttaccctggttgtcgaccttgctctaactggtgcaggcgctcctccactccaaccagcttgtaagctctgcctgggcagagcttgtactcttccctttgtgtatctccacgtggctcataaacgcataaccaaacattaggaccagacttcagtcctttcctcccttcgggaacccctcggcctctagggatggagctgaacaattggtcagacgtgtcagataacacgtgtgccttgttgaatgggaaacaggtaattaatagcagtctccttggtacatttcacttcctcgagcggtcgccgtgggccccttgacaatgctgttgctgatctccagagacaaaggggcgtgcctcagagta

SEQ ID NO: 464457 - DNA, 1244 bp, Homo sapiens
gggcgcctaagcacatagttagatgaacttgcccggtagggagtgtctggtgaaggggagaattaccatttctgaagatggaaacctcagaatcatcaacgttactaaatcagacgctgggagttatacctgtatagccactaaccattttggaactgctagcagtactggaaacttggtagtgaaagatccaacaagggtaatggtacccccttccagtatggatgtcactgttggagagagtattgttttaccgtgccaggtaacgcatgatcactcgctagacatcgtgtttacttggtcatttaatggacacctgatagactttgacagagatggggaccactttgaaagagttggaggggattcagctggtgatttgatgatccgaaacatccaactgaagcatgctgggaaatatgtctgcatggtccaaacaagtgtggacaggctatctgctgctgcagacctgattgtaagaggtcctccaggtcccccagaggctgtgacaatagacgaaatcacagataccactgctcagctctcctggagacccgggcctgacaaccacagccccatcaccatgtatgtcattcaagccaggactccattctccgtgggctggcaagcagtcagtacagtcccagaactcattgatgggaagacattcacagcgaccgtggtgggtttgaacccttgggttgaatatgaattccgcacagttgcagccaacgtgattgggattggggagcccagccgcccctcagagaaacggagaacagaagaagctctccccgaagtcacaccagcgaatgtcagtggtggcggaggcagcaaatctgaactggttataacctgggagacggtccctgaggaattacagaatggtcgaggctttggttatgtggtggccttccggccctacggtaaaatgatctggatgctgacagtgctggcctcagctgatgcctctagatacgtgttcaggaatgagagcgtgcaccccttctctccctttgaggttaaagtaggtgtcttcaacaacaaaggagaaggccctttcagtcccaccacggtggtgtattctgcagaagaagagaacccaccaaaccaccagccagtatctttgccagaagtctttctgccacagatattgaagttttctgggcctccccactggagaagaatagaggacgaatacaaggttatgaggttaaatattggagacatgaagacaaagaaga

SEQ ID NO: 464458 - DNA, 857 bp, Homo sapiens
gaggcatgtttctaagctgatatagtcagtgtccatgggatggacccggcaggtggcaagacaaactatgcaaaaggatcgtgatggaaccctcaaatatgaaggtgaaaagaactgcacaggcagcgaagtctggccctgtcacccaggctggagtagacggggtttcaccatgttagccaggatggtctcgatctgctgacctcgtgatccgcatgcctctgcctcccaaagggctgggattacaggcgtgaaccacagtgcccggcctgaaatcttgaaataaatgaaaaacgagctaatcgctgaacaaaaaaataaaaaatcactgtggaatgacaagaacattctacaaacatttatatgtgatttttgcaaaaagtgttaatgccaatgtgtatatgctgagtgatgaggagataaatgatcctgaatcagaggagcaaatcgtgacactgagaaaataaatgcaaaagctgaacaaaaaaaaaaaaaaaaaaacaaaaattttggggcggtggggcaaaaaaatttagaccccttggtggcgccgcgcccccattggttattgaacggccataccggcccaagagaaactgggcctagaactggggcggttcctaccccaataaaaagctgcgggcaccgacgggtctgcaacaacccaggggttcgacgcactagggctctaccgggggccaggagcggatgaagccagcacgcgtaggggacgagaacggggcgcgagacggcgccgtgcataaagcagttactaaccaaacccacgcgcaacacaaacagagaacgaagatacactgcgcacatgcatacagcacatggacgcaccacaacagtgt

SEQ ID NO: 464459 - DNA, 1209 bp, Homo sapiens
gaggcatgtttctaagctgatatagtcagtgtccatgggatggacccggcaggtggcaagacaaactatgcaaaaggatcgtgatggaaccctcaaatatgaaggtgaaaagaactgcacaggcagcgaagtctggccctgtcacccaggctggagtgtaggtgcatgatcttggctcactgcaatctctgcctcatgggttctcacattctcctgcctcagcctcccgagtagctgggactagaggcacccaccaccatgcttggctaattttttgtattttttcatagagacggggtttcaccatgttagccaggatggtctcgatctgctgacctcgtgatccgcatgcctctgcctcccaaagggctgggattacaggcgtgaaccacagtgcccggcctgaaatcttgaaataaatgaaaaacgagctaatcgctgaacaaaaaaataaaaaatcactgtggaatgacaagaacattctacaaacatttatatgtgatttttgcaaaaagtgttaatgccaatgtgtatatgctgagtgatgaggagataaatgatcctgaatcagaggagcaaatcgtgacactgagaaaataaatgcaaaagctgaacgtagaatgctacaccatgtgttacacagcacagtttcagaggaagggggatattaagagtgcagatggaattaatgttactcatcagctgtccttgaaacaagattatcctggagtacctgggaactgggaggactttggactggaagaaagaagacaatatgacaaccgctctcaaatatttgccggactcaacagggagctggatccatccatcaccagggaatctttactacggaacactctcctacctatgaagaaagaggtagctctgtctctacaaaaacaaacaaacaaaattaagccatgcagggtagtgtgtgcctacatcagagagccacttaggattaagaacgcaagctgcccccaatatgcatcctctgtccttaaagacctgagctatgaacatggaaaagattgaaaaacactgccttcagtattcagttgctgcgtttgatgaatcataaaatggtgtaaaacttcaattaatgttctttttaaataaaatatttatgaatgcatccagaaaaatgcttatgatttgggtattcacaaagtattcaagaatagaatgtattctgacttggaatgtgca

SEQ ID NO: 464460 - DNA, 1048 bp, Homo sapiens
gaggcatgtttctaagctgatatagtcagtgtccatgggatggacccggcaggtggcaagacaaactatgcaaaaggatcgtgatggaaccctcaaatatgaaggtgaaaagaactgcacaggcagcgaagacggggtttcaccatgttagccaggatggtctcgatctgctgacctcgtgatccgcatgcctctgcctcccaaagggctgggattacaggcgtgaaccacagtgcccggcctgaaatcttgaaataaatgaaaaacgagctaatcgctgaacaaaaaaataaaaaatcactgtggaatgacaagaacattctacaaacatttatatgtgatttttgcaaaaagtgttaatgccaatgtgtatatgctgagtgatgaggagataaatgatcctgaatcagaggagcaaatcgtgacactgagaaaataaatgcaaaagctgaacgtagaatgctacaccatgtgttacacagcacagtttcagaggaagggggatattaagagtgcagatggaattaatgttactcatcagctgtccttgaaacaagattatcctggagtacctgggaactgggaggactttggactggaagaaagaagacaatatgacaaccgctctcaaatatttgccggactcaacagggagctggatccatccatcaccagggaatctttactacggaacactctcctacctatgaagaaagaggtagctctgtctctacaaaaacaaacaaacaaaattaagccatgcagggtagtgtgtgcctacatcagagagccacttaggattaagaacgcaagctgcccccaatatgcatcctctgtccttaaagacctgagctatgaacatggaaaagattgaaaaacactgccttcagtattcagttgctgcgtttgatgaatcataaaatggtgtaaaacttcaattaatgttctttttaaataaaatatttatgaatgcatccagaaaaatgcttatgatttgggtattcacaaagtattcaagaatagaatgtattctgacttggaatgtgca

SEQ ID NO: 464461 - DNA, 1368 bp, Homo sapiens
gcacacttaaacaaccagatctcacaaaaattcactcaagtatcatcaagacaataccaaggaggatggtgctaagccattcattagaaactgcacctatgatccaatcacctcttacccagccccacgtccagcactggggattgcatttcagcatgagacgtggattagttgcaaatgtaaatccccagggagctcctgccccatcaactgagaaggggcagggctcccgcttgtctccagctcttgccatctccatggagtgtgcagccccaggtgcacctcctcacggcctgaggagggagttccaggtcctcgctgggcccctctctgcccactcctccatgcctgaccacactgctctcccttcagtgggagacttggccagccccattgtggtggcccctagggtggcaggctccagggggctcctagggttgggctccagagactgtctacctcctccccacatcctcctcacactgtcagcagtgtgataaaaataaaaacagcatacatgagcacacacattgtcactttatatttatatcactttatatttatatcaaaactctaaaaataagggaaaatgtttaaagcatcctgagaaaaatgaatgaatgatacattttagaaaacaacaagatgaataactatgacttcttatccgaaacaatggagtcaagaggacaatggattgagatctttacagttctgaagcaaaattgacaagttttaattctgtacccagaaaattaaatttcaaatatttaagcaaaattactatatttacagataagcaaaagcagagaatctgctgctggtggacttgcactataataaagacaattcttcaagctgaaggataatagcaccagatggaagcttataaatgccagaacaaatgaagatcattggaaacactgtgcactctaatgaagaggacgaccatcccagacagaggaggaccagtctttgttctaggatttctttttcctaatgacttgctcatttgccaaactggcactaatgcaagaactctgtgattaactgatgttattgaagactgctttagactgactgactgtcagcatgcctccaaaattcatatgttgaaagctaatccccaataagatggtatttggaggtggggcctttggaagatgattaggtcatggggataaaagggactagtagcttctaaaagaggctccaaagagttgccttgctctttcctccatgtaaggacacagtgagaagacaattgtctatgaagcaagcagtgggccctcacagacaccaaacctgctgatatcttgatttatgacctccataactgtaaaaaataaatgtttactgttcaagcca

SEQ ID NO: 464462 - DNA, 1495 bp, Homo sapiens
gcacacttaaacaaccagatctcacaaaaattcactcaagtatcatcaagacaataccaaggaggatggtgctaagccattcattagaaactgcacctatgatccaatcacctcttacccagccccacgtccagcactggggattgcatttcagcatgagacgtggattagttgcaaatgtaaatccccagggagctcctgccccatcaactgagaaggggcagggctcccgcttgtctccagctcttgccatctccatggagtgtgcagccccaggtgcacctcctcacggcctgaggagggagttccaggtcctcgctgggcccctctctgcccactcctccatgcctgaccacactgctctcccttcagtgggagacttggccagccccattgtggtggcccctagggtggcaggctccagggggctcctagggttgggctccagagactgtctacctcctccccacatcctcctcacactgtcagcagtgtgataaaaataaaaacagcatacatgagcacacacattgtcactttatatttatatcactttatatttatatcaaaactctaaaaataagggaaaatgtttaaagcatcctgagaaaaatgaatgaatgatacattttagaaaacaacaagatgaataactatgacttcttatccgaaacaatggagtcaagaggacaatggattgagatctttacagttctgaagcaaaattgacaagttttaattctgtacccagaaaattaaatttcaaatatttaagcaaaattactatatttacagataagcaaaagcagagaatctgctgctggtggacttgcactataataaagacaattcttcaagctgaaggataatagcaccagatggaagcttataaatgccagaacaaatgaagatcattggaaacaggatgtgaggccaatctggctgggacatctgccaccccatggatctccagggttgattcggctgatctggctggctaggctggtgtccccttcctccctcaccactccttgtgtgtctgtcccgaagctgtgcactctaatgaagaggacgaccatcccagacagaggaggaccagtctttgttctaggatttctttttcctaatgacttgctcatttgccaaactggcactaatgcaagaactctgtgattaactgatgttattgaagactgctttagactgactgactgtcagcatgcctccaaaattcatatgttgaaagctaatccccaataagatggtatttggaggtggggcctttggaagatgattaggtcatggggataaaagggactagtagcttctaaaagaggctccaaagagttgccttgctctttcctccatgtaaggacacagtgagaagacaattgtctatgaagcaagcagtgggccctcacagacaccaaacctgctgatatcttgatttatgacctccataactgtaaaaaataaatgtttactgttcaagcca

SEQ ID NO: 464463 - DNA, 724 bp, Homo sapiens
atttcactgccaagtgccagaagaatgaggtatgtgaaattaccccagagaccaaccagacatttaagtagtaaactcatacacatccaagacttgtccaataaggaacaatggaggaacctactaaaaatttctgcaggccctctaactgtcctctgttgtttacagactaacaccacatctacagacactgaccctagatcacacctccaggagacaggagacaacatcttaacacttttcaccatgcatcctcctcttgaatcagagtggactatttgtaactttcgccagatacggaggtgtgtcagacagaccccttcaaggaagaatgtgctgcccagctttgaggaatgtcactgtcagatggcctccacctgttctctccttcagcaactgcctcagtgttcaagctgaggtcctgctcatttcagaacagccccagccaataagcatgcaaggccaaagtcaaggaagtgatgcaaaggcctagccatgtccgtccgctgcggccccctctggcagataacctttgctcctgagttcccactggcctagtagagactgtcaagcctgcatcacagtctgataattcctctttcttcccctttcctttcatggatataactccccaataatctttcttttttaaattgaggtaaaaatacacctaatataaaacttaccatcttaatcatttttaagtgtacagtttggtagtgtt

SEQ ID NO: 464464 - DNA, 897 bp, Homo sapiens
ggggtgtacaccccctgtgaaattaggagtatcatctcgccagaatattacgaataatgtcacagggtgttatcttctgtgacaataggagtatagacccctgggaaattatgaatactatcacaggggttaacatcccacaaaagtataatgaatactttcccaaggtgtacaccctctgtgacattaaaagtaacatttccctagaatatgccgatgatatcacagagcgtacatcctctgtgatacgagaagtgacatctgataaggatcatgcgagtaatttgacaaggtgtacaaaccctggggtaaaaattgatgtgaaccttggagacttaagggaagggggtatttgctgccatagtcagcaaacagcatcccaagagaagaagggaggccacagcagtgacaagaggccgtttactttcatggaattcgtgggagcaggtgaaattaacgaggttctaccaatgatgaaaccaggcccagaattgaaagggaagtgctgtttatcgagttctgtcacaagcacggcatttggattgtctgaatgaatcctcaaagtgacactttgaaataaatacctgtactgtgattttccacagaattcaactcagaaagtgcatcacctgaagactggttggatgagaaaactgaggtccgaagcggaagacccaggctttcagcacccagagattgtgcagaggaagagagagagagacaccactggtgcccccaccttgggacgtgcctaaagatcatgcggtagcccctacccccacccccaggtttctggtttataaaggacctccatgtcttcaatctcccctgagactcacaagagtcctgagaaaaggtaaaatgaagactcatttgagaaagaaaattaggcccagc

SEQ ID NO: 464465 - DNA, 2089 bp, Homo sapiens
gctagtccgaggggggaaaggggtgggaggggccctcggaggggcccctacaagggatcccagtccgcagaattaaaaattcgttcgcaagggagcgcccttccggggtcagggtcgtgaagagacactcgagaattagggtcctggactgcagtggggccgggcctggacttcgggcaggtgtttcctggccgccctggggccctgcagcaccgagggccgcgctgatctcagggctcaggcggacgaggggccgccacaggcaccttaggaccctggcggcctgaaggcctggggccttcaggaaagcctcgggcactcccagcgggggacctagcgccaggtcacgattccattcggggcggggagcttctaagcaggagttgctgaccaaggaaagagtctggacccgggacctcatccctgaggaccagaccacgaccttggagctcagctctcagtccttcccggctagggatgcggaggggtcgggagctcgacggctaagcggcagggaatcctgagttcctagagatctacagaaagcagaagaacgacactagatgagactagacagtgacggcggaaggacggaaccacatggagactgacacactttgcgagttgggactcaattgcatttctttaagtccttgattccgaagtttccccgccctcctatgcaagagcgtttggggaaactaagttccttagactctttcatccttgttatgtgagctcagggaggaaggcagacaatagctgcagcctaaacacctgctatctctcaatgcaataagatatagacggtgattggagtcgtttctctttttgcttccagagggagctcaaacctgaagcatcaaggttatctttttccaaaggatttgtgtgaacctaagttcggtacctgcgacgagtaaaaacacttatttgaccctctagagactcagctagaactgactgagcaaagggaaatcaggcaaaagaaagggaaggtactgaggagaaaacggcagatgttgttatctcccgctgagaggcgcggccggcggggccggatcctccgcttcccgcgactgccggagtcgcgctggactaggctgaccgcgcagggcggcgaggctggaagggaggtctccgcccgacaatgcgcaggtgccagaggagccaggaggagtgagaagcgccctagacccgcggcctcaagcgccatgcacgtcaaggggaagtgactccggagttgtgccaggaagaacaccaagaacgagctgtgcgtttttgcgcagagaagtagtcttcgcaagaccgcagctccctgccgaaggcccagaaagggagtgcgggggagagggcaaactagtgagtttggctggcagtgctcccccgacacaccccactttcttttcctgccactccagactccttcccggcagcgggcctccagaaccccttgttggtaaaggcgaggtgctgtggggatgcaggatatggaattagggaattcgggacggaaacactgcgcccagggactagaagagcaagtgggagtgagcagccgatatctgggggctgggatggcccccgggggaggaggcacccgactgggcctcagcttcaagatccggattctggggcctggaacgcaagtcaaccctgaatgtgcagccaaaccgatctcggagcggtaccttctcatcgcctttttggggaactacactaaagatctagtgtgcactgaacaggtctgtgggaaccaggaaggcagaggaaggaagggaggctcccgggagcccaggccccggcaaggcccttacagttcccagacccgccaaaccgaaagagagaccctggagagggctgagcccctgtgggcctggctggaggcctcgggtaggatgctgaggcaagagccacagcggtccgagtccaagaaccacgtccagactcagcttaaggttccgaggtgaaaggcctggcctagaagggagggagagagatctgaagaagagggggtgggtgaaagaaacgtggacactacaactgcgttttctgctcctgcagctgagcgtgcctggacaagtatgta

SEQ ID NO: 464466 - DNA, 863 bp, Homo sapiens
cattcctggtgcgcaccccttcgaaactcccagaaccccttcagatgtggaaatttggaacacccaccctttgccggcatccagtggcgactgtgagtgtacgtttggctggggaagtggccaggattcttgagcgccaacgttgcactggcccttcacgcgcctccaccatcctcactacggtccagggaccatcagaagcagcccagatccaacaagatcagggccaatggaggcaggacttcacccaaggcagggaccaagatggattggttctgcagtgtcccgggactccgtgggctacagaaggctccaccttgaggacaggcttgctgagtgaacgcctgctggtgacagcctcaagaagaaagtacattaagccaccttcttcccaggaaagagagaaaagcgtcaagtccgtggggtgaggagatggtgcctcagatgaggaggctgagtcccagggtacactcagaccaggaaggcaggcatctcagcagtgacaagaacaggctaaaggacaagagccctactccaatattctgagtttgtgagaaccccaggattttaccacccagggtgcaacagaagtgaccacgtgccagttctgagtctgggcctcaggtggccttggagctcccacttgttctcttggaaccttcgccaggccccatgtgagcatgactagggtggcctgctgggatcagacaccatgtggaggacaccatctcagaggccatcctagactagcagagcacaaaatgagagcgcagccggacaagaacctcccccaaccctgctgtcttatagattcatgagcaacaataaatgtctgtcgttcaaagtatcaagctttggggtgg

SEQ ID NO: 464467 - DNA, 415 bp, Homo sapiens
gagtaggcattgtgtgatagagtgatggcaaaatgtctgtgtatccctgccccttgccttgtgactttacacctcccatcgagaggtggagtctattcccccagcccttgcatctggtctggcctagtgactttctttggctaatagggtgcaacagaagtgaccacgtgccagttctgagtctgggcctcaggtggccttggagctcccacttgttctcttggaaccttcgccaggccccatgtgagcatgactagggtggcctgctgggatcagacaccatgtggaggacaccatctcagaggccatcctagactagcagagcacaaaatgagagcgcagccggacaagaacctcccccaaccctgctgtcttatagattcatgagcaacaataaatgtctgtcgttcaaagt

SEQ ID NO: 464468 - DNA, 876 bp, Homo sapiens
gcatagattgtctttccacactatgtggttgctgccaagggatgagggaggactccaagagagggttcttggatcttgcacaagaaagaattcaggaatggattgggatgatgaatattctcataattcttttgacctacattgtttgttaaactcatttcctggagacttggagtttgagcagatcttcagtgacattgatgaaaagattgaacaaaatgctgcaagagattcaaatttagatgtaatagctcatggatatcaaagtacaatgcttaagttatactcagtaataaaagaggattttaacacactatgtgaaattttagctccatcttcaatggtgaaattcattaaagaaacttacctggatactgttacagaagaaatggcaaaatttcttgaaaatttttgtgagctgcagttcagagaaaatgctgttcgtgtggttaaaacaagcaagagctccagcaagcatagaggagcagtgcatgctttggacaaagtcgaattcttatcgcagctcataaaatcctttatgaaactggaaaaaggtgttcaagaattgtttgacgaaatacttttatcactcaagataaccagggatacttcaggattagatgcttcagatttcgatatgttataatgttatatagggttgtgagaattaaatgacagtgaaaataaaatacctaagaaaatgtctagtatatcataaacgatcaataaatgtgagttgttaaaatagtaattataattatggaatatgttgtttttagtttagtcttaacaaaacccctttgaaaaaagccatgctgtgtgtactgaataatatttccaacattaaaggtaaaattcaaaggtataatggttgag

SEQ ID NO: 464469 - DNA, 2124 bp, Homo sapiens
tctctcacaacaggcgttggtcccagatggaatatgtgtcaaaaccagaaatcctgacttacgacaggctcgtgaatggcatgctccaatgtgtggcagcaggattcccagagcccacaatagattggtatttttgtccaggaactgagcagagatgctctgcttctgtactgccagtggatgtgcagacactaaactcatctgggccaccgtttggaaagctagtggttcagagttctatagattctagtgcattcaagcacaatggcacggttgaatgtaaggcttacaacgatgtgggcaagacttctgcctattttaactttgcatttaaagggaaaaccctgggtgctggagctttcgggaaggttgttgaggcaactgcttatggcttaattaagtcagatgcggccatgactgtcgctgtaaagatgctcaagccgagtgcccatttgacagaacgggaagccctcatgtctgaactcaaagtcctgagttaccttggtaatcacatgaatattgtgaatctacttggagcctgcaccattggaggctcatacatagaaagagatgtgactcccgccatcatggaggatgacgagttggccctagacttagaagacttgctgagcttttcttaccaggtggcaaagggcatggctttcctcgcctccaagaatttctacaagatgatcaaggaaggcttccggatgctcagccctgaacacgcacctgctgaaatgtatgacataatgaagacttgctgggatgcagatcccctaaaaagaccaacattcaagcaaattgttcagctaattgagaagcagatttcagagagcaccaatcatatttactccaacttagcaaactgcagccccaaccgacagaagcccgtggtagaccattctgtgcggatcaattctgtcggcagcaccgcttcctcctcccagcctctgcttgtgcacgacgatgtctgagcagaatcagtgtttgggtcacccctccaggaatgatctcttcttttggcttccatgatggttattttcttttctttcaacttgcatccaactccaggatagtgggcaccccactgcaatcctgtctttctgagcacactttagtggccgatgatttttgtcatcagccaccatcctattgcaaaggttccaactgtatatattcccaatagcaacgtagcttctaccatgaacagaaaacattctgatttggaaaaagagagggaggtatggactgggggccagagtcctttccaaggcttctccaattctgcccaaaaatatggttgatagtttacctgaataaatggtagtaatcacagttggccttcagaaccatccatagtagtatgatgatacaagattagaagctgaaaacctaagtcctttatgtggaaaacagaacatcattagaacaaaggacagagtatgaacacctgggcttaagaaatctagtatttcatgctgggaatgagacataggccatgaaaaaaatgatccccaagtgtgaacaaaagatgctcttctgtggaccactgcatgagcttttatactaccgacctggtttttaaatagagtttgctattagagcattgaattggagagaaggcctccctagccagcacttgtatatacgcatctataaattgtccgtgttcatacatttgaggggaaaacaccataaggtttcgtttctgtatacaaccctggcattatgtccactgtgtatagaagtagattaagagccatataagtttgaaggaaacagttaataccattttttaaggaaacaatataaccacaaagcacagtttgaacaaaatctcctcttttagctgatgaacttattctgtagattctgtggaacaagcctatcagcttcagatggcattgtactcaatggatttgatgctgtttgacaaagttactgattcactgcatggctcccacaggagtgggaaaacactgccatcttagtttggattcttatgtagcaggaaataaagtataggtttagcctccttcgcaggcatgtcctggacaccgggccagtatctatatatgtgtatgtgcaaacagtattgtacaagtgtgttgcacaacttga

SEQ ID NO: 464470 - DNA, 1020 bp, Homo sapiens
ctgattcctttgcagtcctctcatgtggagtcagcctgttctcaatctgtccttccatgttcctcagagttgctctcagcatgctggcccccagcaccagtcccagctgcctatgtcaaagcttctctccctcttgagtctcaggtcctccaactacacggacctccaccccgccgctgctttccctaaccaccacctgattagtactcactctcatgatagtctgatgatgacagtggtatctggtccacagtcttcccttcatcccatatcaccaccccaggtgacatcacggtcatctacagtggccaacctacaccatttccagacttctcagggtcctagcttctcatctcccctctgcatgcagcactcaccattcatcattcaacaaatagttaccagtacctactactcactgaaggcccaacaacatctctcatctcacatgctctcctgcaatgtgaccatgccctagtcacatcaagaagtagtgtctacatcccagctcttaaatctgggaaggctggtgactgtttctatcaatagaatatgccagtttcatctataaaatggagattacaaataagaaagaaaaataaaattaaaatggaaaaatagaatatggctgggaacagcagctcacacctataatcccagcattttgggaggccaaggtgggaggatcacttgaggccagaagttcaagaccagcctaggaaacataatgagaccttcatctctacttttgaatgaacctggacaccctccaccggtaacacaactactctgagaccaccaagctggggtggccacacggaggcattctggttgtcagactccactgaactccctgccaacagtcagcatcaactcaccagctaggttgatcaagtcaccttggaaatgcatcctccagctccaatctcatgactatttctgttgccatgagaagcagaaacaagccatgtccattgagccctgcccaaaagaaaataattgtgtacaaaataactgatc

SEQ ID NO: 464471 - DNA, 2947 bp, Homo sapiens
gctgtctgaagtaggctaagaaaccatcatgctcatgactccaggccactttctgtctgacaggattcaggatgccctgtgtgccctagagggttcccaggctctggaacccaaaggtggtgagggatctgaaggagtagaggctgagggtccagggacagaaacagagacagtcctgcctgtctccacactgaacttctgcccagagatacagattgacatagcagacaaggagatagaacaaggagaagttaccacctctgttacagctttgctggaggggctggaaaagacctgctcctcacggccctcatgcttagagaaggatctcaccaatgatgtgacctaccttgatcctagtctgctaccagttcactcagccatcttcagctttgaacccctaagcagtccagatggcccagttgtcatccagaaccttcatatcactggcaccattacagcccaagagctcagtggcaccggattgcaaccatgcacacgctatactgtgaagtgtgagacatcccttgatggtgaaaacagcagcctgcagcagctggcctaccacactgtgaatcaccgctattgggagttcttgaatctgcaggccatcaggagaagaaaccagatctatgaaagttcattaaaaataatagagaagatggtggtgagtgccattgtggacaacttgaagacagcatttccttgctctgaatcccagggcccaacagaggagctgagtgaggccgagactgaaagcaagtcccaaacagaaggcaagaaggctaggaagtccaggctgaggttctcatccagtaaaatttcgccagcattaagtgtgactgaagcacaagacacgattctttattgtctccaggaaggcaatgtggagtccaagaccctatccatgtctgggatggaatcttttattgaaaaacagacaaagttactggaggtgcagccaacagaagccccagaaaaagatcctgaacaacttcccaaaggacatgtggacagttgcttgtcagatgcagctgtgccagcccaagatcccagcaacagcgattcaggaacagagacagagttagctgacacagccctgaatctgcttctcttgctactaacagaacagtggaaatggctgtgtattgaaaacatgcagaagtttcttcggcagaggatccttgggaaggaaagtgacacactggtgcacaaccagtatggtgcccaccatctcagttcaggtccaaggggagagtgggtatggctgtgcgagctggccactggttctgtgttctcaggaaattctctaatcatcactgattgtgttgccctggctagcaagcgcaaaggggctccccaaccgtttagcactcggcaggtgtaacgggtccatcctttttctgctattcggactgcggtttcagtagttaggagcattagcacctatttttattagtttttagaccaaagaaagccaaacaccattttatatttgacaatgcttcctgtatgattttataccagataagctaaatttcacctttatattagtgtgccattaatgttaaactcaattttaataaaaccttgtaggcatatttatccaattttaatgtctgaccataagttaaacattatgtaaacgaaagtacagaaccctggcaaaattgaaaggccccaatattattggaactcttttatgattcagcttttcatggagttctactttatcatgaaatctagcacactggttcctttcaattaatccctgaaggttaatatttttggaccacagttgacctgaggtaactgaaactgctgaaaacaaaaccatggataagggagaactcttgtattatcacagattatatcaaaactatggctctaggctttttagaagagtttaacaagtggagcttgaagctctgtttttaccctttctccgggctgttattgtcatacaaattacatctttatacatgttgtgctgaacaacaagtggatttgtaggtgtttctttgtgaagttatcttctaaatcagaattagggaagaaattattcaagatagactcctagaaatacaattatcagctcgtgagtacggacataatttgataaatacagcaaattgctttctaaaagttgttcagtaatttttgaccaaatagagcttccatgttttcaaatttttttgtcttatttatttagccattctgatgtatataaataaatattgcattaaaattcaatacgtatatgaataattattaatacagttaagcaaactttcatatgcttattgagcatttgaatatctccttttgtaaagggcttatcaagtttttgcccatttatccattagtctgcttttttcttactgatttatgagcagacttttagtattttcaatataaagtttaaaaggaggaatatcttgggggctgcttatatgcttagtaaatttctttttccaaattatgagctgcattttcactctcataatgtctttaatgatgattatgtattttaatgaagtctagcttgtcattttttcttttaagtttaaaataatttgccatatttaagaaatccttgcatatacaaaagtcatgaaaacattctcctatgtctcctatatcatcttctaaaagctttatttttatttatatagagatatatattattctgaattatttttgtgaattttgtgaatttagagccaagcttttttgtagttgtttgttcaaggtaggagtataattgccaagcatcatatttttgtttcttctcttcattatcctatttctcatagatcaggtaactatatactttctttttgttcccagaatctctaatgtgtttcactagcatgtttcttttttctttaccaatacaagatttcaatatatagtcttttgtttaacttttatttttatttcaggg

SEQ ID NO: 464472 - DNA, 2866 bp, Homo sapiens
  misc_feature (2035)..(2035): n is a, c, g, or t
aggactcagcactgggggacgatcatagagaatatatggcacaacaggacgataaatgagccatcattgtcatcgaaaaggaaaatgtgtgaaatggccaccagtggtgacagacaaagagactcagaagttaatttcaaggaactgagaacagcaaaaatgaaacctgaactactgagtggacacatccccccaggccacattcctaaacctatcgtgatgcccgactatgtggcaaaataccctgtgattcagacagatgatgagcgagaacgctataaagctgtgttccaagaccagttttcagagtacaaagagctgtctgcagaagttcaggctgtcctgaggaagtttgatgagctggatgcagtgatgagcagattgccacatcattcggaaagccgacaggaacatgagagaatttcaagaatccatgaagagtttaagaaaaaaaagaatgatcctacatttctggaaaaaaaagaacgctgtgattacctaaagaataaactttctcacataaagcaaagaattcaagaatatgataaagtaatgaattgggatgtacaaggttattcttaacgcttatttgaaaccactttatttttttattttattttatttttttgagatgaagtctcgctctgttacccaggctggaatgcagtggcacaatctcggctcactgcaacctccacctcccgggttcaagcaattctcctgttcaagcaattagcctccccagtagctgggattacaggcgtgcgctgccacaccccgctaatttttgtatttttagtagagacgaggtttcaccatgttggtcaggctgggaaactactttttttaaaaaatagcaagtttactatttatttactgcctttttaatgctagcctctgtggtagagaagcaagcgcttcccaaatcagcttccaattggtttaaccagtatgcaacattaaagattttactcagacatttttaaacgaattcaaatgttctaagggcctttactaagaatggaaaaaatcctgtgttcatctttcatctgtgaccaatttcatattcatctatctcatttaaatgtgtcatcattttagagatcgtatcctggcagtgtgatgggcaagtggaccatcaattctggtgctactttttccttttttactcaggcaggttcctaggatttttctgggacaaatttctcttcctagagaaattcctaggggatttctaaaggatttttctaagggaaaaagggtgacatctttcaaaggtgtcatttattcccttgaaaggtgtttgaatcccagatcaacattttcagacatcctgatcttgggcaaattgcttaatctctctgtgcctgtttcctcttctgtaaaatggggctaataatagttccttcctcatagagttgttaggattaaaggagttactaatatggtaggaactatattagtgtttgtgaagtctactgaagtgtttgtgaaatgaataaattataaagaatgagtctcaagaaaaggtccttaatgagcaagcccaacctacttaaccaaaagcccaagtgtctggtgcctttctggtttgtggtgttaactcatggccttagcctggtgcttcactgtggctctgtggcccctggggttccacatggcctccctgtctttcatcagtgtgactgtacatctctccatctccccatagtccagcctgccctggacacattgaattgtatgaatggtattgctttttttttttttttttgggggaaacaaattttacctttgtgcccccaacatgtggggagtgtgcgcaagtggtgtgcgcaactccctcgggctctcccatgtggcggggtctccggcctctcccaaggtgtccacgtgctcttttccccttgcgccttcaagcctctccccgagatgtggcttgggcacatctgggaggcgccactttgcgccaaccaacgcgcccagcgtatatattttgggggcttatatttgggggtacaagcacgatagtggggtnttccgcccgtgtgtttgggcgcccggggatagtgactactcttgcggaactctctcgtgtgacaccctctgcgtgtgatactccacaccgcggcttctgcggccctcctcgcgcgggagattttggctgcgcggacatttgggccgagcgccgtgtgaaagtctcaccgcggggcgccccagggctgggcgttttattgcggcttttctctatatatccccccctgtgtgtggcgccacatttcccgcgttgtgactttaaaaggggtctcccccacacagtatggtgtggccgccatatttctcactgttgggaggaaacacctcccccccttttttttctttttctttctcgcggagagagagcgtagcgcgggattctccgcctctctgtgttgtgtcgtgccccccagagggcggtgggagcatcacacccggcgtggtgtatatcaggatcttctctgcgggcccccccatcagttgagcccgcctctttgtcgcgccctcccgggggggttgtttcaacagacagggcattatttccctgcgccgagcgcctgctgtttgccgcccccccacccgaagagttgtcgtcgtggcgcgggactatatcagcgcgcgagcccccccacgaaccgcatagtgtgtggccccccgacggtcaattcactcttgcgtggggcagccccttttatcgagctccgacacacgccggccggggggtatttctccccacacatgattgtttggcgcgcccgccgagggttggtgtgcctccaccaacggcctccttgctctagacccgcctgaaggatgttgtgtcttgtccacg

SEQ ID NO: 464473 - DNA, 1546 bp, Homo sapiens
  misc_feature (715)..(715): n is a, c, g, or t
aacaacggctaagtcgagccgcggttgtatttcggcaggctctgtgcctgtttcctcttctgtaaaatggggctaataatagttccttcctcatagagttgttaggattaaaggagttactaatatggtaggaactatattagtgtttgtgaagtctactgaagtgtttgtgaaatgaataaattataaagaatgagtctcaagaaaaggtccttaatgagcaagcccaacctacttaaccaaaagcccaagtgtctggtgcctttctggtttgtggtgttaactcatggccttagcctggtgcttcactgtggctctgtggcccctggggttccacatggcctccctgtctttcatcagtgtgactgtacatctctccatctccccatagtccagcctgccctggacacattgaattgtatgaatggtattgctttttttttttttttttgggggaaacaaattttacctttgtgcccccaacatgtggggagtgtgcgcaagtggtgtgcgcaactccctcgggctctcccatgtggcggggtctccggcctctcccaaggtgtccacgtgctcttttccccttgcgccttcaagcctctccccgagatgtggcttgggcacatctgggaggcgccactttgcgccaaccaacgcgcccagcgtatatattttgggggcttatatttgggggtacaagcacgatagtggggtnttccgcccgtgtgtttgggcgcccggggatagtgactactcttgcggaactctctcgtgtgacaccctctgcgtgtgatactccacaccgcggcttctgcggccctcctcgcgcgggagattttggctgcgcggacatttgggccgagcgccgtgtgaaagtctcaccgcggggcgccccagggctgggcgttttattgcggcttttctctatatatccccccctgtgtgtggcgccacatttcccgcgttgtgactttaaaaggggtctcccccacacagtatggtgtggccgccatatttctcactgttgggaggaaacacctcccccccttttttttctttttctttctcgcggagagagagcgtagcgcgggattctccgcctctctgtgttgtgtcgtgccccccagagggcggtgggagcatcacacccggcgtggtgtatatcaggatcttctctgcgggcccccccatcagttgagcccgcctctttgtcgcgccctcccgggggggttgtttcaacagacagggcattatttccctgcgccgagcgcctgctgtttgccgcccccccacccgaagagttgtcgtcgtggcgcgggactatatcagcgcgcgagcccccccacgaaccgcatagtgtgtggccccccgacggtcaattcactcttgcgtggggcagccccttttatcgagctccgacacacgccggccggggggtatttctccccacacatgattgtttggcgcgcccgccgagggttggtgtgcctccaccaacggcctccttgctctagacccgcctgaaggatgttgtgtcttgtccacg

SEQ ID NO: 464474 - DNA, 3177 bp, Homo sapiens
gataccggtttcagagtcctgggcagcgtgcgcgctcttcctggcggctgcgcaggtgtgaaaatcacaaatgtcaaatgatggaagatccaggaatcgggacaggcgctacgatgaggtcccaagcgacctgccctatcaagataccaccataagaacccacccaactcttcatgacagtgagcgggcagtgagcgctgatcccttgccaccaccccctctcccattacagccaccattcggcccagacttctactcaagtgacacagaagaaccagctatagcgccagatctcaaaccagtaaggcgctttgtccctgactcctggaagaactttttcagagggaagaaaaaggaccccgaatgggataagccggtgtctgatatcaggtacatctccgatggagtggagtgttcaccaccagcctctccagcaagaccaaaccaccgttcgcccctcaactcctgcaaagatccctacggcgggtcagaaggaacctttagttcccggaaagaggctgacgcagtgtttccccgggatccctatggatctctagaccgacacacacaaacagttcgaacatacagtgagaaggtggaggagtataacctgagatactcctacatgaagtcgtgggcaggcctgctgagaatactgggtgtggtggagctgcttttgggggccggtgtctttgcttgtgtcacagcttacattcacaaggacagtgagtggtacaacttgtttggatattcacaaccgtatggcatgggaggcgttggtggattgggcagtatgtatgggggctattactacactggccctaagaccccttttgtactcgtggttgctggattagcttggatcaccaccattattattctggttcttggcatgtccatgtattaccggaccattcttctggactctaattggtggcccctaactgaatttggaattaacgttgccttgtttattttgtatatggccgcagccatagtctatgtgaatgataccaaccgaggtggcctctgctactatccgttatttaatacaccagtgaatgcagtgttctgccgggtagaaggaggacagatagctgcaatgatcttcctgtttgtcaccatgatagtttatctcattagtgctttggtttgcctaaagttatggaggcatgaggcagctcggagacatagagaatatatggaacaacaggagtgtgaaatggccaccagtggtgacagacaaagagactcagaagttaatttcaaggaactgagaacagcaaaaatgaaacctgaactactgagtggacacatccccccaggccacattcctaaacctatcgtgatgcccgactatgtggcgtgagtgtcagtctgaattcttcctcaaggtagaagttgagaggccccatttggtcctttcattttccagtttgtctccaagttaatactctgtgcttaaaatcgtgtatgtaaatagttgttatctgagaggtaatgtattgaattgaaggtacaatatgatcagtaaggaataagataagctgatttcccattcagcttcttttagtgaaacaattatatctttggcttatgtttttcccctagaaaataccctgtgattcagacagatgatgagcgagaacgctataaagctgtgttccaagaccagttttcagagtacaaagagctgtctgcagaagttcaggctgtcctgaggaagtttgatgagctggatgcagtgatgagcagattgccacatcattcggaaagccgacaggaacatgagagaatttcaagaatccatgaagagtttaagaaaaaaaagaatgatcctacatttctggaaaaaaaagaacgctgtgattacctaaagaataaactttctcacataaagcaaagaattcaagaatatgataaagtaatgaattgggatgtacaaggttattcttaacgcttatttgaaaccactttatttttttattttattttatttttttgagatgaagtctcgctctgttacccaggctggaatgcagtggcacaatctcggctcactgcaacctccacctcccgggttcaagcaattctcctgttcaagcaattagcctccccagtagctgggattacaggcgtgcgctgccacaccccgctaatttttgtatttttagtagagacgaggtttcaccatgttggtcaggctgggaaactactttttttaaaaaatagcaagtttactatttatttactgcctttttaatgctagcctctgtggtagagaagcaagcgcttcccaaatcagcttccaattggtttaaccagtatgcaacattaaagattttactcagacatttttaaacgaattcaaatgttctaagggcctttactaagaatggaaaaaatcctgtgttcatctttcatctgtgaccaatttcatattcatctatctcatttaaatgtgtcatcattttagagatcgtatcctggcagtgtgatgggcaagtggaccatcaattctggtgctactttttccttttttactcaggcaggttcctaggatttttctgggacaaatttctcttcctagagaaattcctaggggatttctaaaggatttttctaagggaaaaagggtgacatctttcaaaggtgtcatttattcccttgaaaggtgtttgaatcccagatcaacattttcagacatcctgatcttgggcaaattgcttaatctctctgtgcctgtttcctcttctgtaaaatggggctaataatagttccttcctcatagagttgttaggattaaaggagttactaatatggtaggaactatattagtgtttgtgaagtctactgaagtgtttgtgaaatgaataaattataaagaatgagtctcaagaaaaggtccttaatgagcaagcccaacctacttaaccaaaagcccaagtgtctggtgcctttctggtttgtggtgttaactcatggccttagcctggtgcttcactgtggctctgtggcccctggggttccacatggcctccctgtctttcatcagtgtgactgtacatctctccatctccccatagtccagcctgccctggacacattgaattgtatgaatggtattgctttttttttttttttttttgtgagacagagtcttactctgttgcccag

SEQ ID NO: 464475 - DNA, 1390 bp, Homo sapiens
gatgtgctcatctattaccacaatgaatattaaaacctattccaaagaggactacggctccaccgctgttcagtcatttttagcatcacttgatggagagaagctggaactcttaaaaaatgacctaatttccattaaagacatctttgcagccaaagaattagagaatgaagaaaatcaagaagaacaagcaagcagtggtttacataggtactcacttatccaggccatgaagagggctcatgactgggtggaagaggatcaaaccgtggtgtcagtagatgtggcaaaagtgtccgaagaagaaacaaagaaggaagaaaaggaagagaaatctcaagaccctcaagaagacaaaaaggaggaaaagaaaactaagaccatagaggaagtatacatgtcgtccattgaaagtctggcggaggtaacagcgcgctgtattgagcagcttcataaagtagcagaattaattcttcatggacaagaagaggaaaaaccagctcaggaccaagcaaaagttctaataaaattaactactgcaatgtgcaatgaagtggcctctttatcaaagaagtttacgaattctttaaccactgtggggaaaaaatcatttgttcccacagggtatcttgatcaggaaggcttctcccccagacatccgcgcggcttcctccctcgcttcttgaaggtgtttattcaaaaaccaccttctaaataaaccacctttcccaccttcgtatttttttctcttcaggacataccactgtctaacatcctttatatcctaccgatttttctgttatctgccttgcacgaggatgtagattccaggaaaggagggatttttctgtgttctgtttgttaccatattcctaacacccacagcagtgcttggcaaatagtcggtgctcaataatgatttgttgaattaacaaataggtcaaagtcttctgtgtataatctgtaaacgctgaatgagagaacggaaatagctgtactatagggtaatttgtgggaaaatatctggttgagttacattaggaaatgttaactgtgaagtaatggtgctcattttaatggtatttggtggtatagcattaatgattatgattggggagcttagaaatgagtaagctttttcccagtaaaattaatacgatgtactctttttttactttgaagaatttgctgtttgaggggtctttcaagattcttcagggtaaggtagactgcagtgaaaattcagaagccctgaagaagttaatggtggtgcaccaatactctggaatattatgcaacagtaaaaacaaatgaaaagaatggaatagatccctgtagtgacagctccaagatgtgtaattgagtgaaaaaaaaaagaagctgtagtatg

SEQ ID NO: 464476 - DNA, 1082 bp, Homo sapiens
agcggagaggtttcagcaacaccagtggcctacaaagaaggagccttcctcctctccccagactccagactctaaagggcgacctcctcctgctcctgctcctggagcgcagctagcgcacagcgtttccgcaggaatcttgagaatggcaaggcccgcatacccgcggtggttcccaggcccgccccctctcgcagctgcagccccacctgccagtgcgtgccgcctccgagcgacttccgggagccgggcggccaccgcggtgcaggcgcgcgcccaacggctttgcgaggctcactcggtctgagaggtcggaggctgcgagtgtcgctgctgaaggctgtggtggaccgggctggatcgcggattttggattagataatagatttgggatcgccgattgggggttggattgcggatttggggttggataggggatttggggctgggtcggcgggggcaggggcggggaggtgaaaaggtgacagggagctgcctcctctcaagagcagttggttgggagtctgagaagtcaccaccatgaagttgttcggcttcaggagccacaggggccagacggtcctgggcaccatagaccacctgtacacgggttccgggtaccgaatccggtactcggaactgcagaagatccacaaggcagctgtcaagggcgacgccgcggagatggagcgctgtctggcgcgcaggagcggagacctggacgccctggacaagcagcacagcagtgtgtccccaagaaagtgtcagagcctttacgtggaccttcccatggaaaaggaaacagaatagtcaatggaaaaggagaaggacctcctgcaaaacatccttccttgaagcctagcactgaaatggaagatcctgctgtgaaaggagcagtacaaagaaagaatgtacagacattgagagcagaaaaagccttaccagtggcttcagaggaagagcaacaaaggcgtgaaagaagtgaaaagaagcaaccacagctaattttagaacatgcactctgacagaaaagacatctgagaaacaaaacaagcaaatttgttttcctttttgcacctgcc

SEQ ID NO: 464477 - DNA, 901 bp, Homo sapiens
ggtttatatacattataggaggtgcctaatgagagaactcattcccctgtcaaaaataccaactgctctacatttggcctgtgccagtggccatgtgaaagtggtcactctcctggttaacagaaaatgccagattgatatctgtgacaaagaaaatagaacacctttgatacaggaggagtcttgtgccgttattctgctggaagatggcaccattccaaaccttaagggtatctacggcaacactgctctccattatgctgtgtatagtgagagcacctcactggcagaaaaactgcttttccatggtgcaaatattgaagcactggacaagcaactcgtggcagccattgatgtttactctgtcttcatagttttacttttttcagaagagtcacatagttggaataatactgtggatatatttttgaatattaagaaaattaaagctccatggcaattgaaggacctcctgcaaaacatccttccttgaagcctagcactgaaatggaagatcctgctgtgaaaggagcagtacaaagaaagaatgtacagacattgagagcagttcatttgaactaaaacagtgaatttgtcaacagaaaaagccttaccagtggcttcagaggaagagcaacaaaggcgtgaaagaagtgaaaagaagcaaccacaggtcaaagaaggaaataatacatacaaaagtgaaaaaatacaactatcagaaaatatatgtcatagtacatcttcttctgctgctgacagattaacccaacaaagaaagattgggaaaacataacctcagcaatttcccaagaaactgaaggaagagcatgatagatgcaccttaaaacaagaaaatgaagaaaaaacaaatgttaatatgctgtacaaaaaaaaaaaa

SEQ ID NO: 464478 - DNA, 996 bp, Homo sapiens
gagcaactggcgcaggcgcgctgctcggttgctgtagaaatggacctctacccgcccagatgttaccattcatcgcgaagggtgtcgtgaagatgaatgccctgtcgaacatcatccagcaggaggtcaaggaattttaactgaatgattgaatagtcttgcaagatctatgaaacaagcttcggctgctgtagagaaacaaaaatgggttcctgcaattctaaataagatgtactgggtgctctgagagttaataagctaaaaaattcaatgtttgttacaattatagtgtaaacagaaagcatttctgatacaatattattttactagattcagaaaagtatgagccatggtccctaccactaaaaaaactacaacccagaactacaggactaatacacatgaaacactaggaggtatccaaaatcatacttagtaaaatgcaaaattatattaacacaagagctccgagaaaatggagatcagtgaagaatgaaggggccctgcggctactcagactcctagatctgtatcagaggcacgggcctggcagccttcactgcacttgggctctgaaagacgttctcactcttgcaagtcacctgggaaagccagaatcgatactgtatggtttaacatttgaaactgacttgcagcacaagtctggacttatgtggaattctgggagacgttttgaagctattgatgaagtggtgaatccaacagaaatagatacacatgcaaagcagtgtgtattggacatgaatcaccataggggtgtctcatcctcatcattccttcttactaaaaacaaattatgtttatttcccttaagaagactatgattaattatacacaattacacttgcctttaattgaacagatttcttctttactctggattagtgggttattgtatattattaaatagcttcagaaaacccaaagaaggaaacctttctcttcagaactaaagctgggtaagtaatggtggtc

SEQ ID NO: 464479 - DNA, 574 bp, Homo sapiens
actctagaggatcgttgtctcttgaaaatagctttaaatgcttctccatccagttcttcagagagctactatcaacagattgagttgacaggaaaaagtcataatccaggccaaagtgagcaaactcccaagagcattcctggtcagcaccgcagcaaatccgtggcaagtgcaggtaattcattctcatgacagtgtccagagagtagggctaaaatgaaaacagcggtgagtgatgtggtgctgcttcacctttttcactggggaaatatgaatataagagaaagtaatttgtgcagaagtaaaatggaggtgtctttagtttgtgaaaatccctggtgcccctagtcattcctctataccatgaaactcccacagttactatgccctaaagaaacattatttggactggctaaacataggactgaaaaagaaaaagaaaaaaaaggcaaacagtgaagggtgaaggaaccatagcctcaagattgcagaataacaaaatcaatagctaaactttttttaatcttggaaacaaatcacttttcctaaattaggactaaagttcaaaataaag

SEQ ID NO: 464480 - DNA, 1120 bp, Homo sapiens
agatcatagagcaccttgaaagatgtgggctttcattctgagcccctctgctgcaggtctgctagagtttgctggaggtctactccgaccctgtttgcctgggtatcaccagtggaggctgcagaccagcaaagattgctgcttgttccttcctctggaagcttcatcccagaggggcacccaccagatgccagccaaacctcttctagccagcaggtgggaatgtttaagtctgccgaagctgcgtccacatctgcccctgcccctaggtgctctgttccagggaaatgggagttttatctataagcccctgactggggctgctccctttctttcagagatgccctgtccagagaggaggaatctagaaaggcaatctggccacagcgactttgctacactgcagtgtgggctgcatgtggtgaattcctcccaaagtctacagtatgaaaagggagaaaagagtaactttgcagtggaaagacctgacaaacactacctcagccaggccaatggctggcatcagtaattaatcaaacaacttttttttttttttttttgctgagcttgaaaatagctttaaatgcttctccatccagttcttcagagagctactatcaacagattgagttgacaggaaaaagtcataatccaggccaaagtgagcaaactcccaagagcattcctggtcagcaccgcagcaaatccgtggcaagtgcaggtaattcattctcatgacagtgtccagagagtagggctaaaatgaaaacagcggtgagtgatgtggtgctgcttcacctttttcactggggaaatatgaatataagagaaagtaatttgtgcagaagtaaaatggaggtgtctttagtttgtgaaaatccctggtgcccctagtcattcctctataccatgaaactcccacagttactatgccctaaagaaacattatttggactggctaaacataggactgaaaaagaaaaagaaaaaaaaggcaaacagtgaagggtgaaggaaccatagcctcaagattgcagaataacaaaatcaatagctaaactttttttaatcttggaaacaaatcacttttcctaaattaggactaaagttcaaaataaag

SEQ ID NO: 464481 - DNA, 998 bp, Homo sapiens
aaaaggaagtatggacagaaaacagacagctgcctggacacgcttcccatcccattgtgggccccgagcctattttacaatgaaatggtccatagagcagaccgggctgcctctcatgatgccccaggacaacatagatgatgccttctgcaaagactacttccactggtgctacctggtaccccagcacgggatgtgcagccacaagttctacggcaagcagtgctgcaagacttgctctaagtccaacttgagggcccctcgagccatcaggagtgaccaacttcctgggtggaggtcaggggagctccaggaggctgcccaggctcctcctcctcctccccagcggccgagcatctcttaccaggaacctggagccaccgccggagccagcgtcatctctagggtcactggccaggggactgcattctggtttgggactttgcctatggaaatgggaaaaatgaaattcctgctaaggtgcttctatctctttcagattcatgcattgaaggagagattttttatactttatgttttatctttctcagttatttgcaagtgagtgtccttttaaaaacacacttcttcatgcttttctttgtaaatgacagatcgaagtataggttacatcaaaaccctaccatcctgagaagagttatggttctattatagcagacgtcagccacacagcctatgtgacaataaccttagagtcctgtgttttgtttttgtgtgttgtgagattttaatcttttttttttcggtgagtctggccatttctataatgccaggtgggaagccaggctgcgggtgttagggtgggaatctgcccggcgtctctggcaccctccctgccatcctcagtgcggctgctgttctcctgtccggtgctgtggctccattccaaaggggcacctggatatttatatttgctgaagttttataataaagtttatatggtacagtgtgcttctgaactacctcatgattcttca

SEQ ID NO: 464482 - DNA, 857 bp, Homo sapiens
gcatctgggagactgggtagagcatgcacctcaaagctatcctgcctaatggaccagggagctggggtatttataccccactcccatcagtcactggttcagggctgctcccaggaagagctaattctccagcatttctggcctgctatttggaagggcagagtggctctagggccagagagagacctcaggaaagggatgcagggcaggcagtggtagtcaggcagatgtgcactgaaggggtcaggttcagttctaaagaccactggcccatctggactgtcctggacattctgtctgcagcctgtctattcagcaggtgcaagaaactgctaccaatccaccccagcctcttcttgaatgttgactgctagatcaaccctgtggacagccaattcccagatggaccatccccatagaagtggttcccaaacctggctgcccactggaatcatgaggaggatgtggagagcttttagaaaatgcccatgcttgttctgcccacagagatggttcctggagagcccacacctctctcttctcctgtcctcaaggaaaggcccaaccaccctgatgtgtgaccttggccaagacctcctctcactcccagcttcagtcttcttatccagaaaacaggaaatctggactcttcaatgtcacagtccctttcggctttcatattcaggagttttcaggctttgttaaaagcaaaatgcccaggcccatcccctgtagattcaggatgtggtgcaggctcaggccaggtttgggacttctgcaggtttcaacatcatccctgaggagttgtctgatgcctattaaagtgcaccctctatgacagtgtgtaccgaacatgg

SEQ ID NO: 464483 - DNA, 818 bp, Homo sapiens
taattaaacagacataaattaataatgttttctaggactatacttactgtcagaccacctcagaaaatagtatcacctaaacaagaacatgaagataggaaacatgacaaagtcactgataaaggaagtgaaagtgggacttcctgtaatgagctctccacttccagttgtgacagccattcagaggcaagcactccccaggacaacccatccagtgcccagcaggcaacagctcaccaacctaacactttaacattggatcgcccctctaaaaaagcacctgtacaatggatacccccaccagacaaacgcagaaacagtgaactctttcagaccctcatcagcaagtcccgggaaacaaatctgtccaaaaagaaagtctgtgagaagctaagtgtggaagaagaaatgaaaaagtgtattcaggattttaaaaaaatccacattccagattattttccagagcgcaaacgccaatggcaatctgaactgttgcagaagtatggacaaagcctataaatgtaagctgtctaggagattgaattttctttgttctggatctgtgacttttttgtgtatgtgtatggtgtttatgtatattaagatggtgtaaatatgccttatactgttatttatggcatcaacattcatttactaatgctagtcatgattattactgtgaaatgagtcttacatcgggctgtgaaaattggtataatgatgctttgaaagatcctattatcatgttaatcaaaataatagagggaaatggtaaagagctttatgtatttattaaaaaaagaaaaatgtattagaat

SEQ ID NO: 464484 - DNA, 1565 bp, Homo sapiens
cagccattttctttggtaacagtgaactggaaaaggggaaataactaggttttgttttttttttttttttttttgaggatgcttggacacaggatctgagttggcacagatattcagggttccaaagtgataatatgcagaatgtggggactagaaaacaaatggagtcttcacctagatccaggtaccagtgaagctactaggtccattattccacctgatgaacacttctctagcattctaatgtataattagcataaacacacatggcagttgatgggaccttcatctaaagttcttgacctataagacagagattaaaaaacaaacaaacaaagcaaaacaaagtagagtacatgccagagggaacggcagagattactgtcaccctcagtaactaaaaaaatgcaggggtggccactataatatcccacctaatttatcagtctgaccctgaaaaatataaatattttttaaaaagggatcattctttcttttaaaaatatctacaaaaacctataacttctagctatggacactgatggccatcctccccattctggtatcttttcagcagtgccccattatgacaagaacagcacaggaaagacctgcccccatgattcaatcatctcccaccaggtccctaccacagcacgtgggaattatgggagctacaagatgagatttgagtggggacacagagccaaaccatatcagagatacagtgtcagaattgagttggaggacacccagctggtggctgctgtagagatgatggcttgcctgcttattggtggggagaagtcctcacacatttggtcacagaggtcttctgtgttgattgctatggggcgagagcagagaaaaaacagtttgtgtgtatttccactcactcaacttgtatctgaagagaggaacatttacatcggcatagtcatttaaacgctatcttactggtttttcactttaaaaattaacctgtagataaggcatgaagacagttataaggaataactgatataatctaggaggtattttgcaggaagagaggaacccaggcaggctgtggctagaatagggaaatatggagataggatctaaataaactgaaataaaaatgtagaggttttaatatattttcaaaaattactacaataaaggaaggtaaaataataacataactatctaatgtgttcacctgcagggaacagaagcgaaagtacagtggtatgaaatgagatatagccttcttttctctatcagggaatcagatgtttttgaaagtacgtgagcgtcaaatgatcacataaactcattcttgggatttttaaataattgcataaaattcttgaaataacttgtaactgcttgtgtttaaaatattttcatgacatcaacaaatttgagcaaacattctgagtaaagataattaattgtacttgaaatgtcagactgagacccagggtcaaatttgcaaaattttttaaaaaagtaattattctctagtgccataaaatatttagttttaatattgctaaaatctatgttatgtctattacgtt

SEQ ID NO: 464485 - DNA, 1013 bp, Homo sapiens
gcaggcgggaatggaggctgcgcatggtgctcgcgggccaacacaagttccgggtgggtgtgggctctgtgggccccgcactgggggcagccgggctggccgcggcagccaggccagcagctgcagagggtgcaccaggtcccccagcagtgctggcccgccggcactgtgctcgaattctcgctgggcctcagctgcctccccgcagggcagagcttgggacctgcagcctgccatgcctgagcctccccaccgctgggggctgctgcccagcggagcctccccgacaagcgctgccccctgctctgtggcacccggtcccactgacgcccaaaggctgaggagtgggggcacatggcgggggactggctggcagctccgtctgtgccccgccagcgaggctacgaacccaccagaagtaagaaactctgaacgtgtatgaacatcagaaggaacaaactctggacacatcaccttgaagaactgtaacactcaccgcgagggtccacgtcctcatttttgagaatcccagtgtgctcatcccatctgtgactcctggtcaccgacacataaagtgtagcacactgccaagcagcacctaactttcagatttcatggtgaacttgtccgtgtgggaaaaggagtcctcgcaactactgaggatgctattgcttactttggaggcaagaaattattctaaacctaattaatccaccgcatcataaaaacttacaccgttgctgtctgaatttgtctagaagagactgctgcacaagtattttctaagaatcgcttgagaacctgctaagatacttccaggcccagataatttaggttgtaatgcaagattaagaaactgatgtacaggagaaaaacccaggcaatcagccataatttggctacactttttaagaaaatgttatctagatatatttctcattagagcttaccatgctttaatgtatctcaataaagtctccatgaatacctaaaatgttacaattcacagcctt

SEQ ID NO: 464486 - DNA, 1438 bp, Homo sapiens
ttacccagaaggaaaacaagagctattttctaaacatctgaaatcttgcgcgaggcgcggggagcctaggacctggagcgagagccgcctacctgcagccgccgcccacggcacggcagccatcatggcgttcctgctgcgcttcgtgctcctgtgcggagtcgcggatttcaccagaagtttgagtatcactactcctgagcagatgattgaaaaagccaaaggggaaactacctatctgccatgcaaattatgcttagtcctgaagaccagggaccactggacattgagtggctgatatcaccagctgataatcagaagatggatcaagtgatgattttatattctggaaacaaaatttatgatgattactatccagaactgaaaggccgagtacattttaagagaaatgatctcaaatctggtgatgcttcaataaatgtaacgaatttacagctgtcagatattggcacagatcagtgcaaagtgaaaaaagctcctggtgttgcaaataagattcagctggtagttcttgttaagccttcaggtacaagatgttatgttgatggatcagaagaaattggaagtgactttaaactaaaatgtgaaccaaaagaaggttcacttccattacagtatgagtggcaaaaattgtctgactcacagaaaatgcccacttcatggttagcagaaatgacttcatctgttatatctgtaaaaaaaatgcttcttctgagtactctgggacatacagctgtacatcagaaacggagtgggctctgatcagtgcctgttgcgtgtaaacgttgtccctccttcaaataaagctggactaattgcaggagccattataggaactttgcttgctctagtgctcattggtcttatcatcttttgctgtcgtaaaaagcgcagagaagaaaaatacgaaaagtaagttcatcacgatatcagggaagatgtgccgcctccaaagagccgtacatccgctgccagaagctgcataggcagtaatcattcatccctgggatccatgtctccttccaacatggaaggatattccaagactcagtataaacaagtaccgagggaagactttgaacgcactcctcagagtccgactctcccacctgctaaggtagctgcccctaatctaagtcgaatgggcgtgattcctgtgatgattcccgcacagagcaaggatgggtctatagtatagagcctccatacgtctcatctgtgctctccgtgttcctttccttttttgatatatgaaaacctattctggtctaaattttgttactagcctcaaaatgtatccaaaaataagttaatcaggagctgtaaggaatatatttttttaaatttttctttggttatatcgaaatagttacaggcattaaagttagtaaagacaagtttaccatctgaaaaagct

SEQ ID NO: 464487 - DNA, 1133 bp, Homo sapiens
gattcttagttccgagggctacaaggaaccacattcagacctgacagagaatatccttttattcagagatcctgaacttagagctgtatacggtgatcagatgggactttgactgtttctcttggagaagagtgaatgtcttctatatgcaggaagagtgaaacatatttggtgaccagaggtagagtatagccaagaatgctactgcttggcaatatgagctatagcttccggcctcctttaaaattaggagtggtcaattggctgcattctggtcaactgaatataaatgcaaaaggtttaaaggaaatgattacagttgccaccatctccttgattattaattaaaggcttttcttcaattatcatattattccatatagtcaatggttatataagttttataagtaaaaaagataagcaaagcaaaatgttaacacctaccattattcccttcaactctctggcagggtgtgggaaaagtccgaggtttccactgaaggtgaaagcaactcctggctggcagacagcaagaaaacagactaatagccacgagaaattgaattctgccaataccaggaatgtgcttggacagatgttctgcagagttttcatgacctctgttgaatatcaactctgggaaagtcaatatttacggagttttaaaagggagtacaaatcaaaagtaaaagacagcttcagttggcacaagaaaaaatacttcatgggtaaaagagtacaaaagaggaccattaaggatggaagaattggagaatcacttggtgtggaaatcccacacatttggtgtcagaagtgctgccagcaagagggtcacgctagctcaaggagggctccagtcccttttaaagaactcacttgattaagaccaccaaagatcatctcccttttgattaactcaaaattgattaagaacatttattacatttgcaaaattagcacaatcacaagagtgatattccattatatcacagattctatccactctgaaggggagggaattatacaaagacatggatcattagaggtcattttagaattcttattccacaagtcttaaatccagccttatttagctgaattattacatccaattttccagacctcaaaacagg

SEQ ID NO: 464488 - DNA, 1892 bp, Homo sapiens
gtttatttggctaacggttctgcaggctgcacaggaagcaagtcactgacatctgcttctggggagggtctcaggaagcttccactcatggcgggaggagaagaggggccagcatgtcacatgtaatgctattcactgcacatccacttgtcacctgcctctctttgtgctgccctatgggtaccggggctccaggaactggcgtaaaaaacgttactcagcctactgcttttgctgcagaaaatgtgatttcagcgtatgaagtgttcacccatattgaaaagaaagctgcgcacacgactgtggaatttacctctaagagtacatcaattcagggcacttgctacagtgcaaaagggagccagcaggcaaaggatgtgtgcagtcatcgcaagcagaacacagaagggaagcgtgaagctgagagacaggagctttacaggcgctatgggactcaacttgatggaaggcaaaacgcaagaatcaaccaattgttcttgagcaggatttccggatcaatacagtggatgttgcaccaaatcatttcacaataataagtggaaggaaacccatagaggagatgtcctgagtcacaaacaaccatacagttacccaaatttgcatattttaggttttcactgttctcacatctttctatggaatgatcagtttttgaaggacaatcttttggtcccctaataattgaccaattgcatcttattttcttgttttattgcctcagtaactgcagtgcatataatttcctttttctcctctaagtttctcactaataccttaacagtttgggtttatataacaaatgtccttacacttcccaggtaaatgtataaaaaaaaagttctggaactggatgtggtaatggttgaaccacattgtgaagaaacactgccactgaatttacacttgaaagtggctaaaatggtaacttttatgttagtatattttaccacaatagaaaatgcgtagaaaaaaaccgtctcttccatggaaaatttcttctctactctctgttctgacttgttcatgatctagtagttttctctaaggaaggctatgtagtttggagagagactgactcaccaagcctatctccttttcctggaaacacaatcaaattaactttccagtcaccgctgtgtctaggtgtggccatatgagtagttctcaccagtggaatgtagtgaaaacgagatgctgtctcttagggactaaggaagctgtctttcctcttccgacatttgctgactggtcgatgctagatgatcttgagaccctgtgctgaggactggagaactacaggaaaggagcagtatctctgaattatcgtgtggaaggtcacttgtctagcccctgatgactgtgagcctcttcctcctgcttgccacctctcagtcacaagacggctgctgcgactcaggctcatgtcccaattcaaggcagcaagaaggccatggagcggcacctgccagcagatgcccctgcaggccatctctccaggctcaggaacctaaagaagaatctacccagatgtggtggctcacacctgtgatcccaccactttgggaggctgaggcaagaggatcacttgagcccaggagttggagaccaacgtaggcaatacagcaagactcccatctctacaaaaaaaaaaaagaaagaaagaaagaaagaaaagaaattagctggctgtggtgctgcacatttgtaataccagctactctagaggctgaggctggaggatcacttgagccgaggagtgagctatgaccacaccattgcatttcagcctcagtgacagagcaaggccctgcctcaaaaaaaaaaaaaaaaaaagaaaagaataagataaaataaataatacaggagaacct

SEQ ID NO: 464489 - DNA, 762 bp, Homo sapiens
gcccagggcaccagctgccactccatgctctgaatccatcctggcctgtgctgagaccccccctttccatgggctgctccccacccgtgatggggcatggcaggggcactaggcagcccccttcctgagagacatggggctcctctgcctagaatgttgtctcagcacttctcttctgccttgctgaactttccctagagccaaggaggcctccatacaacctttcctctccttcatttggagtcagacttgcactgcagtctaatggtcatcccacttttttccagctccctgataaaatctatggcttctgcttcttggaggacccagattatcacagcttatctcattcctttgcagcagatgcccctgcaggccatctctccaggctcaggaacctaaagaagaatctacccagatgtggtggctcacacctgtgatcccaccactttgggaggctgaggcaagaggatcacttgagcccaggagttggagaccaacgtaggcaatacagcaagactcccatctctacaaaaaaaaaaaagaaagaaagaaagaaagaaaagaaattagctggctgtggtgctgcacatttgtaataccagctactctagaggctgaggctggaggatcacttgagccgaggagtgagctatgaccacaccattgcatttcagcctcagtgacagagcaaggccctgcctcaaaaaaaaaaaaaaaaaaagaaaagaataagataaaataaataatacaggagaacct

SEQ ID NO: 464490 - DNA, 1515 bp, Homo sapiens
gtttatttggctaacggttctgcaggctgcacaggaagcaagtcactgacatctgcttctggggagggtctcaggaagcttccactcatggcgggaggagaagaggggccagcatgtcacatgtaatgctattcactgcacatccacttgtcacctgcctctctttgtgctgccctatgggtaccggggctccaggaactggcgtaaaaaacgttactcagcctactgcttttgctgcagaaaatgtgatttcagcgtatgaagtgttcacccatattgaaaagaaagctgcgcacacgactgtggaatttacctctaagagtacatcaattcagggcacttgctacagtgcaaaagggagccagcaggcaaaggatgtgtgcagtcatcgcaagcagaacacagaagggaagcgtgaagctgagagacaggagctttacaggcgctatgggactcaacttgatggaaggcaaaacgcaagaatcaaccaattgttcttgagcaggatttccggatcaatacagtggatgttgcaccaaatcatttcacaataataagtggaaggaaacccatagaggagatgtcctgagtcacaaacaaccatacagttacccaaatttgcatattttaggttttcactgttctcacatctttctatggaatgatcagtttttgaaggacaatcttttggtcccctaataattgaccaattgcatcttattttcttgttttattgcctcagtaactgcagtgcatataatttcctttttctcctctaagtttctcactaataccttaacagtttgggtttatataacaaatgtccttacacttcccaggtaaatgtataaaaaaaaagttctggaactggatgtggtaatggttgaaccacattgtgaagaaacactgccactgaatttacacttgaaagtggctaaaatggtaacttttatgttagtatattttaccacaatagaaaatgcgtagaaaaaaaccgtctcttccatggaaaatttcttctctactctctgttctgacttgttcatgatctagtagttttctctaaggaaggctatgtagtttggagagagactgactcaccaagcctatctccttttcctggaaacacaatcaaattaactttccagtcaccgctgtgtctaggtgtggccatatgagtagttctcaccagtggaatgtagtgaaaacgagatgctgtctcttagggactaaggaagctgtctttcctcttccgacatttgctgactggtcgatgctagatgatcttgagaccctgtgctgaggactggagaactacaggaaaggagcagtatctctgaattatcgtgtggaaggtcacttgtctagcccctgatgactgtgagcctcttcctcctgcttgccacctctcagtcacaagacggctgctgcgactcaggctcatgtcccaattcaaggcagcaagaaggccatggagcggcacctgccagctccctgattcctttgcagcaggca

SEQ ID NO: 464491 - DNA, 2249 bp, Homo sapiens
actaagaaaggtttgagtaaaaaggaaatgcgttccagaaaaaagacggtattggatataaggcagaatggctaatatccaaacaccagatgctggcaaggatgtggagcaacaggaactctcatttctgatgggaatacaaaatgacacagatcttatggaagacagtttgatgggttcttacaaagctaaacatattcttactatattatccagcagttgtggacatgtggaaactatctttgactgcaaattcaaacctgacgatcctaatcttttagcaacagcttcatttgatggcactataaaagtctgggatataaacacattaacagcagtgtacacatccccgggtaatgaaggtgttatttattccctttcttgggctccagattatgctatagaaccaggcactcctcctctactgtgtggtaaagtgtcaagagatattagacaggaaatagaaaaactaactgctaattctcaagtgaaaaaactaagatggttctcagaatgtttatctcctccaggtggcagtgacaatttatggaacttggttgctgtgataaaaggacaggatgatagcttacttcctcagaactactgcaaaggaataatgcacttgaaacatctgattaaatttagaacatctgaagctcaagaactaacaacagtcaagatgtctaaatttggtggtggtattggtgtacctgctaaagaggaaagactgaaggaagctgctgaaatccacttgagattaggacaaattcagagatactgtgaacttatggttgaacttggagagtgggacaaagccctgtcaattgcaccaggagtctctgtgaaatactggaagaagttaatgcagagcaagcttgctatggcatacctgattcgcggaaatgaactggagttggcagtctgtgtgggcacagtactaggagagtctgcagcaccagcaacccactatgccttagaattactggcgagaaagtgcatgatgatttcagtatggaatttggcagctgatcttcttctgatgattcctgataatgaactacatttaataaaactctgtgctttctacccaggatgtactgaagagataaatgaccttcatgataaggtatgctgatgatgttaaatattctggtttggaatgcagtgctatgatttaattaattgtaggttcaagcaaatagagatgcatgcagagaaacaaatgtgtggtccctttggggtacctacaagtacaacaaaagtgttgtacaataggaagtaacatttactgaactgctatgtgcttggcactcttctaaatctttacatgtatttgtatcttcattctcataaaactttgaaaagcatgggataattatacaaagaaaactcagagaaggtatttgtgtgatggaaaactactaactcattaactaatatcccctcttactgtttttagatcttaaaggtatttccataaatatattctcttaattcaaataatttcatttacatctattttagataactttaataagaaaaccatactaggaaagctgaaagtattttgtacttacactattgcttttatccgtttgaattttagtaacattgttgtcaaatcaattattttctagtgtaagctacccacagtggaagaatgtatgcagttagctgagacagcccgtgcagatgacaatatatttgaaactgtaaaattacttgttaagtcaagaacctgaaaaagcccttcctattggtattagctttgttaaagaatacatcagtagctcagactggactttggataccatataccctgttcttgacctactgagctatattcgtactgaaaaattactcttgcatacgtgtactgaagctcgaaatgagttgctgatattatgtggttacattggtgcattactggctatcagaagacagtaccaaagcattgttccagcactttatgagtacacaagtcagctattaaaacgtcgggaggtgtcagtacctttaaaaattgaatatctttctgaggaattggatgcatggagaacttgcacacagtccaccaacagatcattagaagactctccgtatacacccccttctgattcacaaagaatgatttatgcaactttattaaagagactaaaagaagagtcactgaaaggaattattggaccagattatgtgactggatcaaatcttccaagtcattctgatattcacatttcttgtcttac

SEQ ID NO: 464492 - DNA, 1619 bp, Homo sapiens
gcgggctgcctcgggattatttagatgccgctgctgcggagaacatctcggctgctgtctcctcccgggttcctgcctcagaagcgcaccaagctggtcacgatcggcctcattgtcgcctctttgctctggcctctgtgctgcacgcttggctgggctgatgcacttgttggaccgctgacctctcactgtactacgcttctgacgtaccattcggagaggacggtcacgtttacctatgtcatgctcgtcatgctctgggggacctccatctgcctggggctgctgcccgtcatgggctggaactgcctccgagacgagtccacctgcagcgtggtcagaccgctctaccaagaacaacgcggccatcctctcggtgtccttcctcttcatgtttgcgctcatcttcagctctacatccagatctgtaagattgtgatgagcacgcccatcagatagcccctgcagcaccacttcctggccacgtcgcactatgtgaccacccggaaaggggtctccaccctggctatcatcctggggacgtttgctgcttgctggatgcctttcaccctctattccttgatagcggattacacctacccctcattctatactacgccaccctcctgcccgccacctacaattccatcatcaaccctgtcatatatgctttcagaaaccaagagatccagaaagcgctctgtctcatttgctgcggctgcatcccgtccagtctcgcccagagagcgcgctcgcccagtgatgtgtagcacccttgcacccaggaggactctgcatttaccaagcacttccactgcctggccaaggtttgagatgcttcccttgaattccttgcattggattccctctcaagccacaggagcacttagcatccgtgaaacaatgacatcgttcagatgagttaagtgattgaagtgaaaataatgttaccagtgttttcaccattaaaaaaaattgttgagctctccactcaacattattttgttttgcttgggggcaagggtttccttttatactttgtttggagggctgactgggggtaggaaaggaagggatatgatacgcccatgatgttattagaagtaaatgagtttcagagtttttacctggactttaaaataaatttgagtgattgaggaaaattgagaaagacttactttttccagactattttttttttacatgatggtagattttttaatgctgcatgtatgtaacagaatatgacccctttcaatccaatacaaatagtttacataattgtgtttggaagggacctgattttgctaacatgaactcagtaatgtcaccgacactgaaaccgtgaacccattcttatccattctttctttcctttcggcaattactgttcacgagaattccttcggtatttctataaatgttgcaactccttctgcatggtcgactgtgttagctagaccacttgtttcaaatgttgccatgtcaatctagattccaacgggtcatttttcaatatagttttccaatatgtactttctaaaatgaatcctgaagtaggttttgatcttcatatgaagtaggattgattagatccaccattgtagtttcttaagcta

SEQ ID NO: 464493 - DNA, 931 bp, Homo sapiens
acaaagctcccattatacatcctgatcagctccttactgttctatgggacctatggcttcaaagaactttccaggactttactcctacccaaataacttttctctctttttgcttctttctttcaatataaattccctaatcacatcaacctcaccaatacaaccactcctcactgctctcaaactagaatgctctataaaccttacacaattcctcctgcagcaacctaactcttcctttgctccagagtgctggatgtgcttatcgctgtcttcctcagcttacacagcccttcctacaccccttcatgaccttttaacaggaaacataactctaatttataaactccaaaaaggagcttcctttttcgatagagctgtctccctggtgatgagagtccaggtgatcggaagttttggggtgtgcaagtatttactaagagcctactaagtgtccagcactgttctaaaagctgaggatacagtggtgaaccaaaacagacaaaactctctgcctttgtggagcttatgttctagtcctttctttccccttgaagcacagaaagcatgtcttcttactattccagtcttcttcttattcttatacatctagtgctccagagcaaaggaagaattagcttgcagcaagaatttcagcaggaattccagaagaatttgtgacacatgtcaggcacatataatctctcattctccagatctgcctgtcttctgcaaaggccaaacaggccaagtgaggacaccttgagatggtggacccccgccagctgggaagaggaccctcacctgaccatgctgatgctctgattgcagacttccaacctccagaactgtgagaaaataaatatttgttgcttaaaccacacacaaaatgggctaagatggtgaattttatgtatattttcccacagat

SEQ ID NO: 464494 - DNA, 960 bp, Homo sapiens
  misc_feature (7)..(7): n is a, c, g, or t
  misc_feature (10)..(10): n is a, c, g, or t
  misc_feature (12)..(15): n is a, c, g, or t
  misc_feature (19)..(19): n is a, c, g, or t
agtcacnttnannnnttantttactagatcttctggataacctgcagtagcttctccatcagcacttgctgcttcaccttgcactgttatgttatggaggtgacctcttttctcagctctcatgaaccaacaacctccactagcttccaacttttcttctgcagtttctttacctttctcagccttcacaaagttgacttagggtcttgctcaggtttagactttgatttaagggaatattgcggctggtttgatctattcagaccactcaaaactttctccgaatcagcaataaagctgttttgctttcttatcatttgtgtgttcactagagtagtatttttaatttccttcaagaacttttcatttgcattcacatatctaactatttggtgcaagaggcctagcttttggcctattgctgttttcaacatgcctttctcactaagcttaatcatttctagcttttgatttaagatgagaggcatggtgttgctgcctttgtgcttgttatggtttgaatgtttgtgtaccccccaacatttttatgtttgaatttaatctccaatgtgatagcattaacagaaagaagtcttggccggctacagtggcgcatgcctgtaatcccagccctttgggagactgaggcaggcagatcgcttgaggtcaggtgttcgagaccaggctggccaacatggtcatcaatctctgacaagaacctttcagagtgcttgatgatattgcaagtagcaagctgtgctgcattaaaagatgatgaatctctgttcaggatggaacggagtgtttggcatctccacttcatctttcgtaaaggctgaatgaactctttgctgccacttattgaagataaaaggaggcagaattacccttaagtaaatactttggcctcagtatttcctccactttgtacattaataaaaatccctttctttcaccctg

SEQ ID NO: 464495 - DNA, 1317 bp, Homo sapiens
tagttcagctaaagatggagtccttatcacacaggcacgaaaattgaggcttgcagacaattgaagagtgagaaaaacggggtttattgggcaaaaagaaaaaaatgggaaagagagacttttagcaaagcaagagagtgtgcttcctgcctgtgggcttcccgcctcgcagatgaattccaggttccacacaggaagaggaggggccaagctcctcccctccgcaaactgcgtgaactactatggctccgctccagtacgcagataatgtcacttgtcaactgaggaatgacaaggttcataaacctagaaagaagagctttcttctcataaagggctgcagcctgcagggcagccattgtgacaggctgagaagcagagcctccagccagaagccagaaacagacccttccaggggcagaagaacaagacaggaatttatgctgaatgagaccgagtctcgctctgtcccccaggctggagtgcggtggtgtcatctcggctcactgcagcctccacctcccaggttcaagtgattctcctgcctcagcctctggagcagctggggttacaggtatttgctgctcagaattggcaaatagaggaataaactctgttaccaaattccttaatttcaggagaacccatgaaaggagtatcatccaatcaggtcaactctctttggtttcctaatgtctaaacatttcacaatttatggaattatgaaaggatccagctccccagaggatgtgagcacatctgaacacaattatgcactgcagccagacaactgttagctttctggggcaaaagacacagagaaagaccaggataatcctttctgggcgaattccaagaaatccctcagaagaaagtgccatgcagaaatatcctggcgggggaactgcccacacagctgtgccagttattcaccctcgccagattcttcatgctctttcccacttcaaggcccttgcattagctgttctccctgaccatgcacttgactctcaagaacatttaggatgggagccttcctgggcagtcactactgggtggggcgctccagtcaagacatcaagacagacagctaaggctttctcccaaaccaaaagacttgcaaacttccctacaagttctgagttttcttctgaagctaacttcttggaactcaatggcatgaaaccgtcatgcagttaaagcatttaagggctgtatatgccctgggggctgtcaatgtcatagacactgtcatttctctctccctgcacaaaaataactaaaatgatgaatccggctggctctcccctctccctc

SEQ ID NO: 464496 - DNA, 699 bp, Homo sapiens
cactgtaggagtttagagggcaaaatagctgccacaagacctaaatgatgtcgggatgcttttcagaaagtctactctgttccctacttctggtgcagttaggcagttgccacttttcagagaagcttgcaggagggtggaatccgatccaaaatgtttgctgggggagaggagacacagaatgcaaatatatggagaccgtgaatttattcacattacaactcagagattcaaagaaactattctttattgtctctatagcttcatctgatatttctcatgagacgctagcctgctgggcaaactacatgaacactttggtggatgagaatgggttcaccagaggcccaaagcctgccccatctggatggccaaatgcatcaaaattaagcagctgtgggtgctgtatttatggaggaatttttggacacaatcaaccttcagagatgactggaggaagaacatagcataaatatggtgaaggatgcggctattcgggtccttggtctgtatattagaagagcactttacaagcacttttacatacttttctgtcaaccaagtcagtaagcaggacaaatagcaccacctggatacaaagactgaagaatggagctgaggactagtgtgacctgaccacagggcattgaactcaactctcccaagaattccctaagtctctcctcctccccctgtgct

SEQ ID NO: 464497 - DNA, 772 bp, Homo sapiens
gaatttagctggcttaacacaatgattgtcaatcaggattctcaagtgtggtccaggttagtcacaactgaatctttcagaggaggaaagagcagaagatctgatgggagaaacaacaggactggtgggatacggggcttaaaagatttgtggaaattaagctatgaagacacaaattttgggttgcacccatccagccccttcatccacacctgtgggatatatttcggaaaaaaaaggctaaataaggacaagaactgtggaataacactgtgttcccaaagaaaacataactgccatagatcacagaatgaaagccccagagcacgcagcagagaagtccagcaacaggagtcaacatttacagaaaaccctgtaggaagactgtggcactaccaactgatcaacatgttacagaactcattttatactgcagccaggctgaggagggcccatcacctgcacataaatatttggacagtggcgacaacttgaagacagctagctgcagagtgatattccagaataagagttttgaagctccagatgactagctgacctgggtattaatgctggatatagcaacgtccttctatgtccttctaaattttcttcatgagtagtgataagttatgctgagaaaaattcttgaacctacagttatacaacattgttcttgccgcctttcaaaaatggacaatgtctcccatatggaatatctactgatgatcttgcaagaaggtgaataaaaaatccaatgaagacataaaac

SEQ ID NO: 464498 - DNA, 2523 bp, Homo sapiens
caagattgtcgcaaattttgcactactgacatcggtggagccatgacaatttaggatttcaagactctcgagtcttccatccagggcctctggatgtgaagctgagatcaacttcacacttcttagatggcattcgatgacctcctaacaaataatctgctacaaccaatagaggagctgtaacactcaccatgaaggtctgcagcttcactcctgaagccagcgagaccacgaacctactggaaggaatgaacaattccagatgcgctgcttttaagagctgtgacattcaccataagggtctgtggcttcattcagcgagaccaagaaccgactgattacggggacactgggtctacaggtgtgcaccaccacacccagctaatttttatattttttagtagatagggggtttcatcatgttgtccaggatggtctcgatctcttgacctcgtgatccaccggcctcggcctcccaaagtgctaggattacaggcgtgagccaagccaccgggcctggccacttacaacatttttataaacaatattttaaagcaataaatctccctttcctcatggaagaaataaattgatgctgtcttgctctgaacacgaacacctaaaatatcacacgtgggctttgagctcactgccttcacccactgcagtgtgagaacgctggcaacagggcttcggttccccagatgtcagcagccaggactgggtacatttctttaaatggcgcccgcaaacgaagtccagatcgcttggatgcagccccctacattggaaagcgtccttcccaggaaaggtctggcttacagccctctctggctggttggctggattccgagagcgcggcctgccccggcccggttaccagagagcggaccccgcggggcgcgtctcccgggcccggcgtcccctccctggcgggtggggagggccccacaaagccctttgttgaggctcccgtgtgacgcgaggagccccagactcggcgcccgcggcgagcgggaaggaggcgtgtgcctgcggcgcggccccgaggcgtgtgcgcggccatgtgcgcttagcgcagcgcgctcttacctcagtaccccggccgcgaccctccgagcccctggagcccgggtaaccaggccgccggcgccggctcgcggggacccgccaccctggaagccccgcgcacacagcgcattcctggcgagtcggaggcagggtggggcccaggtgtgggaaggagccgaggctgaggccgttcccttctccgcgggctctgtgggcggccgaggcccccacccgtcccgggaaccagttcctcccgggccctgcgcgtccgtccggggaagggtaaagtgaacagagttatctgtgacattccatcaggcacctatgtaacgaaatcataccgtaataactcaccatggcgtatggagtgccaagaaagaacacagtgaaaaccattttgcggggcagttgttataatgtacaggaaccttgggatattgcattgcttgcaaagacctggtccacaaacctagccaatatcaagttgcctttcttggaagaaatttcatttggtggttctgtgcagctcacaaaatgtaccaccattaaagatggactgctcccttctgcagaatctatcaaactcgaaagggagtatgaagtgaagcgtctttgtaaactgaagtgtcaagaaaatacatctaaggaaattcagcttctcctgagggaaaggccagccggtttgagaagacctcttccatctaaatgacacctgaagcgcggattgtagatgaagaaactcagcagcgccggcgggaactgcttctcctgggccgcccaggacccgctcccggccccggccgtcgctgcgctgcagccatcctggcccggcccccacctcaggaagcctcccacggcccgcccagagaccgagaaaatctcttaatttcagtggaactcagtttgtttctctttttaaacattgccagttataaatgtattttattttatattatttttatttatttatttatttgagaccgagtcttactctgttgcctggagtgcaggggcacaatgtcagctcactgcaagctccgcctcttgggttcaagtgattctcatgcctcagcctcctgagtagctgggactagaggcgcaagccaccacgcctggctaatttttgtatttttagtacagacggggttttgccatgttggccaggctggttttgaactcctgacttcaggtgatccacccgccttggcttcccaaagtgctgggattacaggcatgagccactctgcccggcttctgtaaatgtatttcaaataaagatttgttttttaaaacagtagtttccaagctggtcatggtggcttatgcctgtaatcccagcacttttggaggctgaggtgggaggatctcttgaggccaagagttcaagaccagtctgaacaaaagagtgaaaccccatctctacaaaagcaaaaaaaaaaaaaaaaaaaaaaa

SEQ ID NO: 464499 - DNA, 899 bp, Homo sapiens
gaaagtgaagatctcagaacctgagctctgccaggttaccggatgattggctcactctctttctgccaccatcttggttcctcgttccctgcacaaaatgccctgtgaagccacagaaaccgtccctgctacagagcaggagttgccgcagccgcaggctgagacagggtctggaacagaatctgacagtgatgaatcagtaccagagcctgaagaacaggattccacccagacgtccacacaagaagcccagctggtggcagcagctgaaattgatgaagagccagtcagtaaagcaaaacagatttggagtgaaaagaaggcacagaaggctatgtccaaactgggtcttcgacaggttacaggagtcactagagtcgctatccggaaatctaagaatatcctttttgtcatcacaaaaccaaatgtctgcaagagccctgctttggatacctacatagtttctggggaagccaagatcgaagatttatctgagcaagcacaactagcagctgctgagaaattcaatgttcaaggtgaagctgtctcaaacattcaagaaaacacacaaactccaactgtacaaaaggagagtgaagaagaagaggtcgatgaaacaggtgtagaagttaaggacatagaattggtcatgtcacaagcaaatgtgtggagagcaaaggcagtccatgccctgaagaacaacagtaatgatattgtaagtgccattatggaattaacaatgtaaccatctgaaagcaacttttcttggtgtctcaaaggagtaactgcagcttggtttgaaatttgtactgtttctatcataaataaagttatggcttcttgttggaaaaaaaaaacctagatgatgggttgataggtgtaggaaaccaccatagcac

SEQ ID NO: 464500 - DNA, 584 bp, Homo sapiens
cctgggcagagctaaggggagaatgatcaaaagccaagctctgtccccgtcagcacaattgcctgagtgggagcagtctttccagcctcgaaaaatgtttaaacaatatgcagatgacctagcacaaataaagaatgctagcaaccgctgttatgtgcacaagttctcacaacagccctttgaatacatgaatcagtcacacctctcttggttgccattgacaggaactcaactgttaggcagaagggaggaatgtactgttgatatggacagactccaagaaggggagggactgctgggactactagaacgagaatgcctctgcccctatggctcagctctgcaactctctctgcacattggcttcatgctgttagaccagcttcctccatatgtctggaaacaaggccactgacagctcccaacatttcatcttctgcctcatcatcagacaggcgagggtttcaccatgttggccaagctggtctcaaactcctgacctccagtgatccgtccgcctcagcctcccaaagtgctggattacaggcatgagccaccatgcctggcctaccaggccaaaatct

SEQ ID NO: 464501 - DNA, 642 bp, Homo sapiens
cctgggcagagctaaggggagaatgatcaaaagccaagctctgtccccgtcagcacaattgcctgagtgggagcagtctttccagcctcgaaaaatgtttaaacaatatgcagatgacctagcacaaataaagaatgctagcaaccgctgttatgtgcacaagttctcacaacagccctttgaatacatgaatcagtcacacctctcttggttgccattgacaggaactcaactgttaggcagaagggaggaatgtactgttgatatggacagactccaagaaggggagggactgctgggactactagaacgagaatgcctctgcccctatggctcagctctgcaactctctctgcacattggcttcatgctgttagaccagcttcctccatatgtctggaaacaaggccactgacagctcccaacatttcatcttctgcctcatcatcagacaggcgagtgcagtggcataatctcggctcactgcaacctttgcctcctgggttcaagcaaaaactggaatgatgcagcttcaggccaaggaatgctggcagccaccagaagctgaaggacacaaggaatggattctcagagcctcggcaggaaatgtggccctgccaacaccttgatttcagacttctc

SEQ ID NO: 464502 - DNA, 1142 bp, Homo sapiens
agactaacataggatggttaagaaaaacaaacaaacaaacaaacaaacctacagtcatccttggttatatacagggtattggttccaggacccccacagatatcaaaatccgaacatactcaagtccatactcaagtcctacagaacccatgtgaaaagccagtcctcaggttttgcatcctgggaatacttcgagcagctcaaaggtttcttttcagcagcaatggctcacgtggctgcttctcatatggacaggttgctgctgccaagcggggaggaccctctgctcattagcactccgatgagtggcttgctatgggcaggtcccccagacgcctctcccccagtaagctggccacactgctcctccagggatctcagagagatggcagcttgtcaagttcctgagtcgctggtctcaatgtaggttgctgcaaggtttgatgctttaatgacatcatgaaggacccagccattccatctctctgctttgcattcctcaatgtgtcagctttgtgccagagtcacaagacggctacactcctccaggcattgtatgcagatataacgacataccccaaaagaagagaagacttctccagaagcctcccaggagaccttcacacatggcttattagatcagagcccctccttaaaccaatcactaaaaaggaaaatggaattgccatgagtggctcagcaaaatcatgatttacccctggatgggaatcagggtcaccttcaaagagcatatggacatgtgaaggagcataaacacaatcacaaaattggggctcccaccatcggttgcagaggcagtcggcagtgtctgctacaagtgacatcaagtagcatctatcaagtggcattactttaacaaatattaacaatagggtcctcatctcagtttagaagaaaaatccaaaatcaaagtagactgaagataaggtaaacggtgatgtttgccacactagtggtgaggttttcatagttttacccaaaccagtttttatttttagtgcttggttggggtcactgaaacttccaggttgtcctaacctgttaaaatcttttaaaacattatttgtgactgtttctctttggacagtgctttttgttaatcacaaaaaacagggtagaag

SEQ ID NO: 464503 - DNA, 615 bp, Homo sapiens
ctgactctatccctagcccaatccaggtgattgagaatgatagagccagcagaggaggacaagtttatgccaccaacaccagaggccagatcctcccctggtcactacagattgcatgatacaagaccaaggaaatgccagtcctcgattcatccgttgtacaacatactgttttccatgcacgtcagatatggctaagcaagctcagattccattagctgctgtcatcaagccctttgccaccattccttcaaatgagaggccatctttgaagaagtaaacaagtaccatacactaaagggatgacagaacaacgaaacaaaagattacagcaaagctttctgctttcctttcttgctctgataccctcaaaattatactctgttcctgggattccagagtcttctgccacaaccaaggcttccgaggcgatccggcaacatcagtcttcagccgctaagccaagaagatctgggaaggagtcaatcagagagccttgggccagagttccaggggctgtggaagtggctgccagtgctatgctggtggtacaggctcagtgatgggaaattcaagtaaggaaaatagaagactatgaaagtcggtgaattcaaa

SEQ ID NO: 464504 - DNA, 969 bp, Homo sapiens
ctgactctatccctagcccaatccaggtgattgagaatgatagagccagcagaggaggacaagtttatgccaccaacaccagaggccagatcctcccctggtcactacagattgcatgatacaagaccaaggaaatgccagtcctcgattcatccgttgtacaacatactgttttccatgcacgtcagatatggctaagcaagctcagattccattagctgctgtcatcaagccctttgccaccattccttcaaatgagaggccatctttgaagaagtaaacaagtaccatacactaaagggatgacagaacaacgaaacaaaagattacagcaaagctttctgctttcctttcttgctctgataccctcaaaattatactctgttcctgggattccagagtcttctgccacaaccaaggcttccgaggcgatccggcaacatcagtcttcagccgctaagccaagaagatctgggaaggagtcaatcagagagccttgggccagagttccaggggctgtggaagtggctgccaggaaggcacccctgcggagatcagacaccagtggaacgtgggtgaataatccaagaggcatctcggcgatgattaaacaccaagaatatcaccaaccagtgactgctgtatgccttctgactttctcctttggattgggcatgtttattgtgggtattctccccccatgtcagttttggtggctgagaagtccaagatcaagatggcaacgatggggaaaagggcccctaaaggctgtcattgggagcacattcctgaaggacatgttgaaagatgagaaagtcttcacccagtaaataagcaataaacactgccagctgactcgaaagccgctagattttcaactttgttttaagaagctcatgttttcttggaactggggatgggctgctaggatgccagaggcatctgtgtcttctgctgcccatagcaacc

SEQ ID NO: 464505 - DNA, 2081 bp, Homo sapiens
ccatctgtcatctcactaccaccatgctggcctcagggctgcttctggtggccttgctggcctgcctgactgtgatggtcttgatgtctgtctggcagcagaggaagagcagggggaagctgcctccgggacccaccccactgcccttcattggaaactacctccagctgaacacagagcacatatgtgactccatcatgaagttcagtgagtgctatggccccgtgttcaccattcacttggggccccggcgggtcgtggtgctgtgtggacatgatgccgtcagggaggctctggtggaccaggctgaggagttcagcgggcgaggcgagcaagccaccttcgactgggtcttcaaaggctatggatttcatgctattcttacttccacatctccagcctccatctcctgcaacggggagcgcgccaagcagctcctgcgctttgccatcgccaccctgagggacttcggggtgggcaagcgaggcatcgaggagcgcatccaggaggagtcgggcttcctcatcgaggccatccggagcacgcacggcgccaatatcgatcccaccttcttcctgagccgcacagtctccaatgtcatcagctccattgtctttggggaccgctttgactatgaggacaaagagttcctgtcactgctgagcatgatgctaggaatcttccagttcacgtcaacctccacggggcagctctatgagatgttctcttcggtgatgaaacacctgccaggaccacagcaacaggcctttaagttgctgcaagggctggaggacttcatagccaagaaggtggagcacaaccagcgcacgctggatcccaattccccacaggacttcatcgactcctttctcatccacatgcaggagaacctcttcattgggggcaccgagaccgtcagcaccaccctgcgctatggcttcttgctgctcatgaagcacccagaggtggaggccaaggtccatgaggagattgacagagtgatcggcaagaaccggcagcccaagtttgaggaccgggccaagatgccctacatggaggcagtgatccacgagatccaaagatttggagacgtgatccccatgagtttggcccgcagagtcaaaaaggacaccaagtttcgggatttcttcctccctaaggtgctatccgcccccaccccccagactacggggacttccagcccctctctgtgtccccagcatcccacccacattagaagctttctagaccctgtcccactccctcaatcagtcaaaaaagacttccccaaccaccacatccgttccacctttccacttagacactcctgagtcctgcatctctccagactctttgtgtcaggagaatcaaacacatgttcccaaacttcctatcttaagaaacagaagccccctttccattcggccttttgtcatagggacagaaatctcaggtcccccaaactcctgcctagaaggacatggaccccatgtctcccaaacttcctgtttcagagatgtgaaccttctatcccccaaagctcctccatcagaggaccccaactcctccatgcctgccacttccccttacctggggcacactagttccccctccagcccctgtgtactttcaccaatcccccgaccctcctcatcacacacaacttcctcctccctaccagggcaccgaagtgttccctatgctgggctctgtgctgagagaccccagtttcttctccaacccccaggacttcaatccccagcacttcctgaatgagaaggggcagtttaagaagagtgatgcttttgtgcccttttccatcggaaagcggaactgtttcggagaaggcctggccagaatggagctctttctcttcttcaccaccgtcatgcagaacttccgcctcaagtcctcccagtcacctaaggacattgacgtgtcccccaaacacgtgggctttgccacggatcccacgaaactacaccatgagcttcctgccccgctgagcgagggctgtgccggtgcaggtctggtgggcggggccagggaaagggcagggccaagaccgggcttgggagagg

SEQ ID NO: 464506 - DNA, 542 bp, Homo sapiens
actcatccgtcctagctcctggacgctggaccgctcctcaactccctgctcagggggagactagctcctcgtattatgttcagtctctacgtttctctacagaaagccctcccaagtcccacggcagctgggtcttcatctctccactgcacccagaatcacacgctgacccagataaagctcaatgcagtgaacactcttggtctggaggtccaacatcagggagttgccgggactggtttcagacacacggaggaggagacacacagagaaaaggaggcagtgatgtgaccacagaggcagagattgacatgatgcagccgcaagaggcagagttatgcaggcctcacgatgcaactgcttctggaaaatgcaactgcgtgcatggtgaatcttcagctgttactccacaggatccgctgaacataggatgtgccagcaaaatctacctcgtgtattcttcctctttcactcatgagctgcacaatgcggatctgagcacaatgtctgcagactgtgtggacaaacctctgaagaaccta

SEQ ID NO: 464507 - DNA, 1033 bp, Homo sapiens
actcatccgtcctagctcctggacgctggaccgctcctcaactccctgctcagggggagactagctcctcgtattatgttcagtctctacgtttctctacagaaagccctcccaagtcccacggcagctgggtcttcatctctccactgcacccagaatcacacgctgacccagataaagctcaatgcagtgaacactcttggtctggaggtccaacatcagggagttgccgggactggtttcagacacacggaggaggagacacacagagaaaaggaggcagtgatgtgaccacagaggcagagattgacatgatgcagccgcaagaggcagagttatgcaggcctcacgatgcaactgcttctggaaaatgcaactgcgtgcatggtgaatcttcagctggcaagagatgctgagagctcagcccaagcaggtagctatggaggtggtaagatgtgggcagattctgggtatattttgaagatagggccaacaggatttactgagagactggagatgtggacagcatctaaagccacggacccatggtctcaaccaggggaggagtgtggacagaggagaaaaacatcagggactgagccctggggcacaccaggattcagaggacccagccaagagactgagaaggagcagccggggagagaggaggcaaaacagcagagtgagtgcataagcatgtgctcgcatgctacacaaatgcccagtagaaaggccgtgtggctctctgttgttgcctatgactgggagaaggtagagtgtgtctgtacccctttagcctgtgagaggctgtacgcatcacggtaaagcactggctttggagtcagacagtacttctctgatcatcgaccttctccagtattagttacctcctctgagagaatcatattacatcagggctgctgccagtccacatgggacttttggacaaattagaagaggtggcccttatgctttactttcatctgttgaaaaattgtcataatatactgattctgtttgaataagacccttt

SEQ ID NO: 464508 - DNA, 477 bp, Homo sapiens
atagaactaaggctagtagagctcgtgttaatcggcagaggctccggcgtcaagtgattctctgcctcagctcccaagtagctgggattacagccctcccaagtcccacggcagctgggtcttcatctctccactgcacccagaatcacacgctgacccagataaagctcaatgcagtgaacactcttggtctggaggtccaacatcagggagttgccgggactggtttcagacacacggaggaggagacacacagagaaaaggaggcagtgatgtgaccacagaggcagagattgacatgatgcagccgcaagaggcagagttatgcaggcctcacgatgcaactgcttctggaaaatgcaactgcgtgcatggtgaatcttcagctgccagaacaatcacttctcctggagacagattcattatgaaaggactttaattctggtctgacagactgcttgacattggagtgaattc

SEQ ID NO: 464509 - DNA, 3417 bp, Homo sapiens
ggaaacggaaccgtcggcgcccgagcggggggtggggggggagggagggcggagcggcgaggcacagcttcccattggacgcccgccctcctgcggtcctgcccccggccgcgcgctgattggccgcgcgaaggcaaccgtcggcgtttgaaactccggcgcgccggcggccatcaagggctagaagcgcggcggcggtagcagccaggcttggcccccggcgtggagcagacgcggacccctccttcctggcggcggcggcgcgggctcagagcccggcaacgggcgggcgggcagaatgagtctgcaggtcttaaacgacaaaaatgtcagcaatgaaaaaaatacagaaaattgcgacttcctgttttcgccaccagaagttaccggaagatcgtctgttcttcgtgtgtcacagaaagaaaatgtgccacccaagaacctggccaaagctatgaaggtgacttttcagacacctctgcgggatccacagacgcacaggattctaagtcctagcatggccagcaaacttgaggctcctttcactcaggatgacacccttggactggaaaactcacacccggtctggacacagaaagagaaccaacagctcatcaaggaagtggatgccaaaactactcatggaattctacagaaaccagtggaggctgacaccgacctcctgggggatgcaagcccagcctttgggagtggcagctccagcgagtctggcccaggtgccctggctgacctggactgctcaagctcttcccagagcccaggaagttctgagaaccaaatggtgtctccaggaaaagtgtctggcagccctgagcaagccgtggaggaaaaccttagttcctattccttagacagaagagtgacacccgcctctgagaccctagaagacccttgcaggacagagtcccagcacaaagcggagactccgcacggagccgaggaagaatgccggcacggtggggtctgtgctcccgcagcagtggccacttcgcctcctggtgcaatccctaaggaagcctgcggaggagcacccctgcagggtctgcctggcgaagccctgggctgccctgcgggtgtgggcacccccgtgccagcagatggcactcagacccttacctgtgcacacacctctgctcctgagagcacagccccaaccaaccacctggtggctggcagggccatgaccctgagtcctcaggaagaagtggctgcaggccaaatggccagctcctcgaggagcggacctgtaaaactagaatttgatgtatctgatggcgccaccagcaaaagggcacccccaccaaggagactgggagagaggtccggcctcaagcctcccttgaggaaagcagcagtgaggcagcaaaaggccccgcaggaggtggaggaggacgacggtaggagcggagcaggagaggacccccccatgccagcttctcggggctcttaccacctcgactgggacaaaatggatgacccaaacttcatcccgttcggaggtgacaccaagtctggttgcagtgaggcccagcccccagaaagccctgagaccaggctgggccagccagcggctgaacagttgcatgctgggcctgccacggaggagccaggtccctgtctgagccagcagctgcattcagcctcagcggaggacacgcctgtggtgcagttggcagccgagaccccaacagcagagagcaaggagagagccttgaactctgccagcacctcgcttcccacaagctgtccaggcagtgagccagtgcccacccatcagcaggggcagcctgccttggagctgaaagaggagagcttcagagaccccgctgaggttctaggcacgggcgcggaggtggattacctggagcagtttggaacttcctcgtttaaggagtcggccttgaggaagcagtccttatacctcaagttcgaccccctcctgagggacagtcctggtagaccagtgcccgtggccaccgagaccagcagcatgcacggtgcaaatgagactccctcaggacgtccgcgggaagccaagcttgtggagttcgatttcttgggagcactggacattcctgtgccaggcccacccccaggtgttcccgcgcctgggggcccacccctgtccaccggacctatagtggacctgctccagtacagccagaaggacctggatgcagtggtaaaggcgacacaggaggagaaccgggagctgaggagcaggtgtgaggagctccacgggaagaacctggaactggggaagatcatggacaggttcgaagaggttgtgtaccaggccatggaggaagttcagaagcagaaggaactttccaaagctgaaatccagaaagttctaaaagaaaaagaccaacttaccacagatctgaactccatggagaagtccttctccgacctcttcaagcgttttgagaaacagaaagaggtgatcgagggctaccgcaagaacgaagagtcactgaagaagtgcgtggaggattacctggcaaggatcacccaggagggccagaggtaccaagccctgaaggcccacgcggaggagaagctgcagctgtgagtgctgggcgaggccccacctggagggagaatctgagcacctgggccccagctcagcctctgccccgcccctacccctccagggcaaacgaggagatcgcccaggtccggagcaaggcccaggcggaagcgttggccctccaggccagcctgaggaaggagcagatgcgcatccagtcgctggagaagacagtggagcagaaggtgggtgcgggaagcccagctcaaggggccgtctggcagcaccttctagaaggcccttgggcctgctgctccctccaagcagggagaagccccgcaactcatcttcctcctccagactaaagagaacgaggagctgaccaggatctgcgacgacctcatctccaagatggagaagatctgacctccacggagccgctgtccccgcccccctgctcccgtctgtctgtcctgtctgattctcttaggtgtcatgttcttttttctgtcttgtcttcaactttttttaaaactagattgctttgaaaacatgactcaataaaagtttcctttcaatttaaacactgaagccgctctggtcttgatgaagcaaaggtttcccagctctagcctgaggctgagccgacccgcaggtgccctcccttcccctcagagctggccacttggtccctgcctaccccaggctcaggcaaacaacccgaggggcagggacagccagtggatagaggaggctcaggcctgcccagtctgccccggcacctcgggttggctacatggtcctggcctcaggtacacacatcaaagtccaaatggactcgtttttttgtttgtttttttgtt

SEQ ID NO: 464510 - DNA, 1024 bp, Homo sapiens
ggaaacggaaccgtcggcgcccgagcggggggtggggggggagggagggcggagcggcgaggcacagcttcccattggacgcccgccctcctgcggtcctgcccccggccgcgcgctgattggccgcgcgaaggcaaccgtcggcgtttgaaactccggcgcgccggcggccatcaagggctagaagcgcggcggcggtagcagccaggcttggcccccggcgtggagcagacgcggacccctccttcctggcggcggcggcgcgggctcagagcccggcaacgggcgggcgggcagaatgagtctgcaggtcttaaacgacaaaaatgtcagcaatgaaaaaaatacagaaaattgcgacttcctgttttcgccaccagaagttaccggaagatcgtctgttcttcgtgtgtcacagaaagaaaatgtgccacccaagaacctggccaaagctatgaaggtgacttttcagacacctctgcgggatccacagacgcacaggattctaagtcctagcatggccagcaaacttgaggctcctttcactcaggatgacacccttggactggaaaactcacacccggtctggacacagaaagagaaccaacagctcatcaaggaagtggatgccaaaactactcatggaattctacagaaaccagtggaggctgacaccgacctcctgggggatgcaagcccagcctttgggagtggcagctccagcgagtctggcccaggtgccctggctgacctggactgctcaagctcttcccagagcccaggaagttctgagaaccaaatggtgtctccaggaaaagtgtctggcagccctgagcaagccgtggaggaaaaccttagttcctattccttagacagaagagtgacacccgcctctgagaccctagaagacccttgcaggacagagtcccagcacaaagcggagactccgcacggagccgaggaagaatgcaaagcggagactccgcacggagccgaggaggaatgccggcacggtggggtctgg

SEQ ID NO: 464511 - DNA, 374 bp, Homo sapiens
  misc_feature (236)..(236): n is a, c, g, or t
  misc_feature (240)..(240): n is a, c, g, or t
  misc_feature (255)..(255): n is a, c, g, or t
  misc_feature (264)..(264): n is a, c, g, or t
  misc_feature (267)..(267): n is a, c, g, or t
ggcctctgctgactctgtctccccaggcagctgcattcagcctcagcggaggacacgcctgtggtgcagttggcagccgagaccccaacagcagagagcaaggagagagccttgaactctgccagcacctcgcttcccacaagctgtccaggcagtgagccagtgcccacccatcagcaggggcagcctgccttggagctgaaagaggagagcttcagagaccccgctgaggtctnggcncgggcgcggaggtgnttacctggngcngttggacttctcgttaggagtcgcttagagcagtctttactcagttaccctctagacatctgtaacagtccgtgcacgagacagcgctccgtgaataatccagatcg

SEQ ID NO: 464512 - DNA, 2944 bp, Homo sapiens
ggaaacggaaccgtcggcgcccgagcggggggtggggggggagggagggcggagcggcgaggcacagcttcccattggacgcccgccctcctgcggtcctgcccccggccgcgcgctgattggccgcgcgaaggcaaccgtcggcgtttgaaactccggcgcgccggcggccatcaagggctagaagcgcggcggcggtagcagccaggcttggcccccggcgtggagcagacgcggacccctccttcctggcggcggcggcgcgggctcagagcccggcaacgggcgggcgggcagaatgagtctgcaggtcttaaacgacaaaaatgtcagcaatgaaaaaaatacagaaaattgcgacttcctgttttcgccaccagaagttaccggaagatcgtctgttcttcgtgtgtcacagaaagaaaatgtgccacccaagaacctggccaaagctatgaaggtgacttttcagacacctctgcgggatccacagacgcacaggattctaagtcctagcatggccagcaaacttgaggctcctttcactcaggatgacacccttggactggaaaactcacacccggtctggacacagaaagagaaccaacagctcatcaaggaagtggatgccaaaactactcatggaattctacagaaaccagtggaggctgacaccgacctcctgggggatgcaagcccagcctttgggagtggcagctccagcgagtctggcccaggtgccctggctgacctggactgctcaagctcttcccagagcccaggaagttctgagaaccaaatggtgtctccaggaaaagtgtctggcagccctgagcaagccgtggaggaaaaccttagttcctattccttagacagaagagtgacacccgcctctgagaccctagaagacccttgcaggacagagtcccagcacaaagcggagactccgcacggagccgaggaagaatgccggcacggtggggtctgtgctcccgcagcagtggccacttcgcctcctggtgcaatccctaaggaagcctgcggaggagcacccctgcagggtctgcctggcgaagccctgggctgccctgcgggtgtgggcacccccgtgccagcagatggcactcagacccttacctgtgcacacacctctgctcctgagagcacagccccaaccaaccacctggtggctggcagggccatgaccctgagtcctcaggaagaagtggctgcaggccaaatggccagctcctcgaggagcggacctgtaaaactagaatttgatgtatctgatggcgccaccagcaaaagggcacccccaccaaggagactgggagagaggtccggcctcaagcctcccttgaggaaagcagcagtgaggcagcaaaaggccccgcaggaggtggaggaggacgacggtaggagcggagcaggagaggacccccccatgccagcttctcggggctcttaccacctcgactgggacaaaatggatgacccaaacttcatcccgttcggaggtgacaccaagtctggttgcagtgaggcccagcccccagaaagccctgagaccaggctgggccagccagcggctgaacagttgcatgctgggcctgccacggaggagccaggtccctgtctgagccagcagctgcattcagcctcagcggaggacacgcctgtggtgcagttggcagccgagaccccaacagcagagagcaaggagagagccttgaactctgccagcacctcgcttcccacaagctgtccaggcagtgagccagtgcccacccatcagcaggggcagcctgccttggagctgaaagaggagagcttcagagaccccgctgaggttctaggcacgggcgcggaggtggattacctggagcagtttggaacttcctcgtttaaggagtcggccttgaggaagcagtccttatacctcaagttcgaccccctcctgagggacagtcctggtagaccagtgcccgtggccaccgagaccagcagcatgcacggtgcaaatgagactccctcaggacgtccgcgggaagccaagcttgtggagttcgatttcttgggagcactggacattcctgtgccaggcccacccccaggtgttcccgcgcctgggggcccacccctgtccaccggacctatagtggacctgctccagtacagccagaaggacctggatgcagtggtaaaggcgacacaggaggagaaccgggagctgaggagcaggtgtgaggagctccacgggaagaacctggaactggggaagatcatggacaggttcgaagaggttgtgtaccaggccatggaggaagttcagaagcagaaggaactttccaaagctgaaatccagaaagttctaaaagaaaaagaccaacttaccacagatctgaactccatggagaagtccttctccgacctcttcaagcgttttgagaaacagaaagaggtgatcgagggctaccgcaagaacgaagagtcactgaagaagtgcgtggaggattacctggcaaggatcacccaggagggccagaggtaccaagccctgaaggcccacgcggaggagaagctgcagctggcaaacgaggagatcgcccaggtccggagcaaggcccaggcggaagcgttggccctccaggccagcctgaggaaggagcagatgcgcatccagtcgctggagaagacagtggagcagaagactaaagagaacgaggagctgaccaggatctgcgacgacctcatctccaagatggagaagatctgacctccacggagccgctgtccccgcccccctgctcccgtctgtctgtcctgtctgattctcttaggtgtcatgttcttttttctgtcttgtcttcaactttttttaaaactagattgctttgaaaacatgactcaataaaagtttcctttcaatttaaacactgaa

SEQ ID NO: 464513 - DNA, 3001 bp, Homo sapiens
ggaaacggaaccgtcggcgcccgagcggggggtggggggggagggagggcggagcggcgaggcacagcttcccattggacgcccgccctcctgcggtcctgcccccggccgcgcgctgattggccgcgcgaaggcaaccgtcggcgtttgaaactccggcgcgccggcggccatcaagggctagaagcgcggcggcggtagcagccaggcttggcccccggcgtggagcagacgcggacccctccttcctggcggcggcggcgcgggctcagagcccggcaacgggcgggcgggcagaatgagtctgcaggtcttaaacgacaaaaatgtcagcaatgaaaaaaatacagaaaattgcgacttcctgttttcgccaccagaagttaccggaagatcgtctgttcttcgtgtgtcacagaaagaaaatgtgccacccaagaacctggccaaagctatgaaggtgacttttcagacacctctgcgggatccacagacgcacaggattctaagtcctagcatggccagcaaacttgaggctcctttcactcaggatgacacccttggactggaaaactcacacccggtctggacacagaaagagaaccaacagctcatcaaggaagtggatgccaaaactactcatggaattctacagaaaccagtggaggctgacaccgacctcctgggggatgcaagcccagcctttgggagtggcagctccagcgagtctggcccaggtgccctggctgacctggactgctcaagctcttcccagagcccaggaagttctgagaaccaaatggtgtctccaggaaaagtgtctggcagccctgagcaagccgtggaggaaaaccttagttcctattccttagacagaagagtgacacccgcctctgagaccctagaagacccttgcaggacagagtcccagcacaaagcggagactccgcacggagccgaggaagaatgccggcacggtggggtctgtgctcccgcagcagtggccacttcgcctcctggtgcaatccctaaggaagcctgcggaggagcacccctgcagggtctgcctggcgaagccctgggctgccctgcgggtgtgggcacccccgtgccagcagatggcactcagacccttacctgtgcacacacctctgctcctgagagcacagccccaaccaaccacctggtggctggcagggccatgaccctgagtcctcaggaagaagtggctgcaggccaaatggccagctcctcgaggagcggacctgtaaaactagaatttgatgtatctgatggcgccaccagcaaaagggcacccccaccaaggagactgggagagaggtccggcctcaagcctcccttgaggaaagcagcagtgaggcagcaaaaggccccgcaggaggtggaggaggacgacggtaggagcggagcaggagaggacccccccatgccagcttctcggggctcttaccacctcgactgggacaaaatggatgacccaaacttcatcccgttcggaggtgacaccaagtctggttgcagtgaggcccagcccccagaaagccctgagaccaggctgggccagccagcggctgaacagttgcatgctgggcctgccacggaggagccaggtccctgtctgagccagcagctgcattcagcctcagcggaggacacgcctgtggtgcagttggcagccgagaccccaacagcagagagcaaggagagagccttgaactctgccagcacctcgcttcccacaagctgtccaggcagtgagccagtgcccacccatcagcaggggcagcctgccttggagctgaaagaggagagcttcagagaccccgctgaggttctaggcacgggcgcggaggtggattacctggagcagtttggaacttcctcgtttaaggagtcggccttgaggaagcagtccttatacctcaagttcgaccccctcctgagggacagtcctggtagaccagtgcccgtggccaccgagaccagcagcatgcacggtgcaaatgagactccctcaggacgtccgcgggaagccaagcttgtggagttcgatttcttgggagcactggacattcctgtcagaggtaagaggcaagggcgaaatgggttcctgtttcatccccatctcccgcaggtgccaggcccacccccaggtgttcccgcgcctgggggcccacccctgtccaccggacctatagtggacctgctccagtacagccagaaggacctggatgcagtggtaaaggcgacacaggaggagaaccgggagctgaggagcaggtgtgaggagctccacgggaagaacctggaactggggaagatcatggacaggttcgaagaggttgtgtaccaggccatggaggaagttcagaagcagaaggaactttccaaagctgaaatccagaaagttctaaaagaaaaagaccaacttaccacagatctgaactccatggagaagtccttctccgacctcttcaagcgttttgagaaacagaaagaggtgatcgagggctaccgcaagaacgaagagtcactgaagaagtgcgtggaggattacctggcaaggatcacccaggagggccagaggtaccaagccctgaaggcccacgcggaggagaagctgcagctggcaaacgaggagatcgcccaggtccggagcaaggcccaggcggaagcgttggccctccaggccagcctgaggaaggagcagatgcgcatccagtcgctggagaagacagtggagcagaagactaaagagaacgaggagctgaccaggatctgcgacgacctcatctccaagatggagaagatctgacctccacggagccgctgtccccgcccccctgctcccgtctgtctgtcctgtctgattctcttaggtgtcatgttcttttttctgtcttgtcttcaactttttttaaaactagattgctttgaaaacatgactcaataaaagtttcctttcaatttaaacactgaa

SEQ ID NO: 464514 - DNA, 1975 bp, Homo sapiens
tagggggcggggggcccgggcgggcgggcggggggcggcccgcgcgggccacgcccccgggcggcccaggcgccgcggcgggcccctgcagggtctgcctggcgaagccctgggctgccctgcgggtgtgggcacccccgtgccagcagatggcactcagacccttacctgtgcacacacctctgctcctgagagcacagccccaaccaaccacctggtggctggcagggccatgaccctgagtcctcaggaagaagtggctgcaggccaaatggccagctcctcgaggagcggacctgtaaaactagaatttgatgtatctgatggcgccaccagcaaaagggcacccccaccaaggagactgggagagaggtccggcctcaagcctcccttgaggaaagcagcagtgaggcagcaaaaggccccgcaggaggtggaggaggacgacggtaggagcggagcaggagaggacccccccatgccagcttctcggggctcttaccacctcgactgggacaaaatggatgacccaaacttcatcccgttcggaggtgacaccaagtctggttgcagtgaggcccagcccccagaaagccctgagaccaggctgggccagccagcggctgaacagttgcatgctgggcctgccacggaggagccaggtccctgtctgagccagcagctgcattcagcctcagcggaggacacgcctgtggtgcagttggcagccgagaccccaacagcagagagcaaggagagagccttgaactctgccagcacctcgcttcccacaagctgtccaggcagtgagccagtgcccacccatcagcaggggcagcctgccttggagctgaaagaggagagcttcagagaccccgctgaggttctaggcacgggcgcggaggtggattacctggagcagtttggaacttcctcgtttaaggagtcggccttgaggaagcagtccttatacctcaagttcgaccccctcctgagggacagtcctggtagaccagtgcccgtggccaccgagaccagcagcatgcacggtgcaaatgagactccctcaggacgtccgcgggaagccaagcttgtggagttcgatttcttgggagcactggacattcctgtgccaggcccacccccaggtgttcccgcgcctgggggcccacccctgtccaccggacctatagtggacctgctccagtacagccagaaggacctggatgcagtggtaaaggcgacacaggaggagaaccgggagctgaggagcaggtgtgaggagctccacgggaagaacctggaactggggaagatcatggacaggttcgaagaggttgtgtaccaggccatggaggaagttcagaagcagaaggaactttccaaagctgaaatccagaaagttctaaaagaaaaagaccaacttaccacagatctgaactccatggagaagtccttctccgacctcttcaagcgttttgagaaacagaaagaggtgatcgagggctaccgcaagaacgaagagtcactgaagaagtgcgtggaggattacctggcaaggatcacccaggagggccagaggtaccaagccctgaaggcccacgcggaggagaagctgcagctggcaaacgaggagatcgcccaggtccggagcaaggcccaggcggaagcgttggccctccaggccagcctgaggaaggagcagatgcgcatccagtcgctggagaagacagtggagcagaagactaaagagaacgaggagctgaccaggatctgcgacgacctcatctccaagatggagaagatctgacctccacggagccgctgtccccgcccccctgctcccgtctgtctgtcctgtctgattctcttaggtgtcatgttcttttttctgtcttgtcttcaactttttttaaaactagattgctttgaaaacatgactcaataaaagtttcctttcaatttaaacactgaa

SEQ ID NO: 464515 - DNA, 1714 bp, Homo sapiens
tctaatcgacggtaggagcggagcaggagaggatcccccatgcagcttctcggggctcttaccacctcgactgggacaaaatggatgacccaaacttcatcccgttcggaggtccggcctcaagcctcccttgaggaaagcagcagtgaggcagcaaaaggccccgcaggaggtggaggaggacgacggtaggagcggagcaggagaggacccccccatgccagcttctcggggctcttaccacctcgactgggacaaaatggatgacccaaacttcatcccgttcggaggtgacaccaagtctggttgcagtgaggcccagcccccagaaagccctgagaccaggctgggccagccagcggctgaacagttgcatgctgggcctgccacggaggagccaggtccctgtctgagccagcagctgcattcagcctcagcggaggacacgcctgtggtgcagttggcagccgagaccccaacagcagagagcaaggagagagccttgaactctgccagcacctcgcttcccacaagctgtccaggcagtgagccagtgcccacccatcagcaggggcagcctgccttggagctgaaagaggagagcttcagagaccccgctgaggttctaggcacgggcgcggaggtggattacctggagcagtttggaacttcctcgtttaaggagtcggccttgaggaagcagtccttatacctcaagttcgaccccctcctgagggacagtcctggtagaccagtgcccgtggccaccgagaccagcagcatgcacggtgcaaatgagactccctcaggacgtccgcgggaagccaagcttgtggagttcgatttcttgggagcactggacattcctgtgccaggcccacccccaggtgttcccgcgcctgggggcccacccctgtccaccggacctatagtggacctgctccagtacagccagaaggacctggatgcagtggtaaaggcgacacaggaggagaaccgggagctgaggagcaggtgtgaggagctccacgggaagaacctggaactggggaagatcatggacaggttcgaagaggttgtgtaccaggccatggaggaagttcagaagcagaaggaactttccaaagctgaaatccagaaagttctaaaagaaaaagaccaacttaccacagatctgaactccatggagaagtccttctccgacctcttcaagcgttttgagaaacagaaagaggtgatcgagggctaccgcaagaacgaagagtcactgaagaagtgcgtggaggattacctggcaaggatcacccaggagggccagaggtaccaagccctgaaggcccacgcggaggagaagctgcagctggcaaacgaggagatcgcccaggtccggagcaaggcccaggcggaagcgttggccctccaggccagcctgaggaaggagcagatgcgcatccagtcgctggagaagacagtggagcagaagactaaagagaacgaggagctgaccaggatctgcgacgacctcatctccaagatggagaagatctgacctccacggagccgctgtccccgcccccctgctcccgtctgtctgtcctgtctgattctcttaggtgtcatgttcttttttctgtcttgtcttcaactttttttaaaactagattgctttgaaaacatgactcaataaaagtttcctttcaatttaaacactgaa

SEQ ID NO: 464516 - DNA, 3145 bp, Homo sapiens
ggaaacggaaccgtcggcgcccgagcggggggtggggggggagggagggcggagcggcgaggcacagcttcccattggacgcccgccctcctgcggtcctgcccccggccgcgcgctgattggccgcgcgaaggcaaccgtcggcgtttgaaactccggcgcgccggcggccatcaagggctagaagcgcggcggcggtagcagccaggcttggcccccggcgtggagcagacgcggacccctccttcctggcggcggcggcgcgggctcagagcccggcaacgggcgggcgggcagaatgagtctgcaggtcttaaacgacaaaaatgtcagcaatgaaaaaaatacagaaaattgcgacttcctgttttcgccaccagaagttaccggaagatcgtctgttcttcgtgtgtcacagaaagaaaatgtgccacccaagaacctggccaaagctatgaaggtgacttttcagacacctctgcgggatccacagacgcacaggattctaagtcctagcatggccagcaaacttgaggctcctttcactcaggatgacacccttggactggaaaactcacacccggtctggacacagaaagagaaccaacagctcatcaaggaagtggatgccaaaactactcatggaattctacagaaaccagtggaggctgacaccgacctcctgggggatgcaagcccagcctttgggagtggcagctccagcgagtctggcccaggtgccctggctgacctggactgctcaagctcttcccagagcccaggaagttctgagaaccaaatggtgtctccaggaaaagtgtctggcagccctgagcaagccgtggaggaaaaccttagttcctattccttagacagaagagtgacacccgcctctgagaccctagaagacccttgcaggacagagtcccagcacaaagcggagactccgcacggagccgaggaagaatgccggcacggtggggtctgtgctcccgcagcagtggccacttcgcctcctggtgcaatccctaaggaagcctgcggaggagcacccctgcagggtctgcctggcgaagccctgggctgccctgcgggtgtgggcacccccgtgccagcagatggcactcagacccttacctgtgcacacacctctgctcctgagagcacagccccaaccaaccacctggtggctggcagggccatgaccctgagtcctcaggaagaagtggctgcaggccaaatggccagctcctcgaggagcggacctgtaaaactagaatttgatgtatctgatggcgccaccagcaaaagggcacccccaccaaggagactgggagagaggtccggcctcaagcctcccttgaggaaagcagcagtgaggcagcaaaaggccccgcaggaggtggaggaggacgacggtaggagcggagcaggagaggacccccccatgccagcttctcggggctcttaccacctcgactgggacaaaatggatgacccaaacttcatcccgttcggaggtgacaccaagtctggttgcagtgaggcccagcccccagaaagccctgagaccaggctgggccagccagcggctgaacagttgcatgctgggcctgccacggaggagccaggtccctgtctgagccagcagctgcattcagcctcagcggaggacacgcctgtggtgcagttggcagccgagaccccaacagcagagagcaaggagagagccttgaactctgccagcacctcgcttcccacaagctgtccaggcagtgagccagtgcccacccatcagcaggggcagcctgccttggagctgaaagaggagagcttcagagaccccgctgaggttctaggcacgggcgcggaggtggattacctggagcagtttggaacttcctcgtttaaggagtcggccttgaggaagcagtccttatacctcaagttcgaccccctcctgagggacagtcctggtagaccagtgcccgtggccaccgagaccagcagcatgcacggtgcaaatgagactccctcaggacgtccgcgggaagccaagcttgtggagttcgatttcttgggagcactggacattcctgtgccaggcccacccccaggtgttcccgcgcctgggggcccacccctgtccaccggacctatagtggacctgctccagtacagccagaaggacctggatgcagtggtaaaggcgacacaggaggagaaccgggagctgaggagcaggtgtgaggagctccacgggaagaacctggaactggggaagatcatggacaggttcgaagaggttgtgtaccaggccatggaggaagttcagaagcagaaggaactttccaaagctgaaatccagaaagttctaaaagaaaaagaccaacttaccacagatctgaactccatggagaagtccttctccgacctcttcaagcgttttgagaaacagaaagaggtgatcgagggctaccgcaagaacgaagagtcactgaagaagtgcgtggaggattacctggcaaggatcacccaggagggccagaggtaccaagccctgaaggcccacgcggaggagaagctgcagctgtgagtgctgggcgaggccccacctggagggagaatctgagcacctgggccccagctcagcctctgccccgcccctacccctccagggcaaacgaggagatcgcccaggtccggagcaaggcccaggcggaagcgttggccctccaggccagcctgaggaaggagcagatgcgcatccagtcgctggagaagacagtggagcagaaggtgggtgcgggaagcccagctcaaggggccgtctggcagcaccttctagaaggcccttgggcctgctgctccctccaagcagggagaagccccgcaactcatcttcctcctccagactaaagagaacgaggagctgaccaggatctgcgacgacctcatctccaagatggagaagatctgacctccacggagccgctgtccccgcccccctgctcccgtctgtctgtcctgtctgattctcttaggtgtcatgttcttttttctgtcttgtcttcaactttttttaaaactagattgctttgaaaacatgactcaataaaagtttcctttcaatttaaacactgaa

SEQ ID NO: 464517 - DNA, 793 bp, Homo sapiens
ccccagattatcccaagcttttaccgcacagccagaaggaccggatgcagtggtaaaggcgacacaggaggagaaccgggagctgaggagcaggtgtgaggagctccacgggaagaacctggaactggggaagatcatggacaggttcgaagaggttgtgtaccaggccatggaggaagttcagaagcagaaggaactttccaaagctgaaatccagaaagttctaaaagaaaaagaccaacttaccacagatctgaactccatggagaagtccttctccgacctcttcaagcgttttgagaaacagaaagaggtgatcgagggctaccgcaagaacgaagagtcactgaagaagtgcgtggaggattacctggcaaggatcacccaggagggccagaggtaccaagccctgaaggcccacgcggaggagaagctgcagctggcaaacgaggagatcgcccaggtccggagcaaggcccaggcggaagcgttggccctccaggccagcctgaggaaggagcagatgcgcatccagtcgctggagaagacagtggagcagaagactaaagagaacgaggagctgaccaggatctgcgacgacctcatctccaagatggagaagatctgacctccacggagccgctgtccccgcccccctgctcccgtctgtctgtcctgtctgattctcttaggtgtcatgttcttttttctgtcttgtcttcaactttttttaaaactagattgctttgaaaacatgactcaataaaagtttcctttcaatttaaacactgaa

SEQ ID NO: 464518 - DNA, 1662 bp, Homo sapiens
ggaaacggaaccgtcggcgcccgagcggggggtggggggggagggagggcggagcggcgaggcacagcttcccattggacgcccgccctcctgcggtcctgcccccggccgcgcgctgattggccgcgcgaaggcaaccgtcggcgtttgaaactccggcgcgccggcggccatcaagggctagaagcgcggcggcggtagcagccaggcttggcccccggcgtggagcagacgcggacccctccttcctggcggcggcggcgcgggctcagagcccggcaacgggcgggcgggcagaatgagtctgcaggtcttaaacgacaaaaatgtcagcaatgaaaaaaatacagaaaattgcgacttcctgttttcgccaccagaagttaccggaagatcgtctgttcttcgtgtgtcacagaaagaaaatgtgccacccaagaacctggccaaagctatgaaggtgacttttcagacacctctgcgggatccacagacgcacaggattctaagtcctagcatggccagcaaacttgaggctcctttcactcaggatgacacccttggactggaaaactcacacccggtctggacacagaaagagaaccaacagctcatcaaggaagtggatgccaaaactactcatggaattctacagaaaccagtggaggctgacaccgacctcctgggggatgcaagcccagcctttgggagtggcagctccagcgagtctggcccaggtgccctggctgacctggactgctcaagctcttcccagagcccaggaagttctgagaaccaaatggtgtctccaggaaaagtgtctggcagccctgagcaagccgtggaggaaaaccttagttcctattccttagacagaagagtgacacccgcctctgagaccctagaagacccttgcaggacagagtcccagcacaaagcggagactccgcacggagccgaggaagaatgccggcacggtggggtctgtgctcccgcagcagtggccacttcgcctcctggtgcaatccctaaggaagcctgcggaggagcacccctgcagggtctgcctggcgaagccctgggctgccctgcgggtgtgggcacccccgtgccagcagatggcactcagacccttacctgtgcacacacctctgctcctgagagcacagccccaaccaaccacctggtggctggcagggccatgaccctgagtcctcaggaagaagtggctgcaggccaaatggccagctcctcgaggagcggacctgtaaaactagaatttgatgtatctgatggcgccaccagcaaaagggcacccccaccaaggagactgggagagaggtccggcctcaagcctcccttgaggaaagcagcagtgagaggaaggagcagatgcgcatccagtcgctggagaagacagtggagcagaagactaaagagaacgaggagctgaccaggatctgcgacgacctcatctccaagatggagaagatctgacctccacggagccgctgtccccgcccccctgctcccgtctgtctgtcctgtctgattctcttaggtgtcatgttcttttttctgtcttgtcttcaactttttttaaaactagattgctttgaaaacatgactcaataaaagtttcctttcaatttaaacactgaa

SEQ ID NO: 464519 - DNA, 835 bp, Homo sapiens
gtggcgtggggcagctgccctgcagtgtatgtggtccaggacccgaggccagaagtgtcatcagatactcctttgaggccgggtaggttctgcctgaggaggggcctctggataaaaacagggctcaggtggctcccagctgagggtgcttggccttgccttggctgccatgcatctctttagtgctcctggcctaaggagggatccaataagggcgggctcaggccagaagccaaatgcaaccaaccctgggcaggaccctgtcccccagtcatgttcctcctcaggtgaacttgacttgggtgtgtaactccaaaagccaggcaaagcctgttactgcctgggtggcgtccgctgcttgctggggtcttggccgtgggtctgctgcctcctggctgaatggtcttaggctacatctcctagagttgctcagtgggagattgtcctgcctgtagggtccagccctactgggtctgtgggttttttctcctcgtgtgcatagacaagagattgtacaaataaagacacaagaaaaagacagaagaaaagacagctgggcccgggggaccactaccaccaaggcacggagatcggtaatggccccgaatgtctggctgcgctgttacttattggatacaaggcaaggggacaggttaaggagtgtgagccatctccacggagccgctgtccccgcccccctgctcccgtctgtctgtcctgtctgattctcttaggtgtcatgttcttttttctgtcttgtcttcaactttttttaaaactagattgctttgaaaacatgactcaataaaagtttcctttcaatttaaacactgaa

SEQ ID NO: 464520 - DNA, 479 bp, Homo sapiens
aggaagttcagaagcagaaggaactttccaaagctgaaatccagaaagttctaaaagaaaaagaccaacttaccacagatctgaactccatggagaagtccttctccgacctcttcaagcgttttgagaaacagaaagaggtgatcgagggctaccgcaaggtatgtctccgccaccctggtgtcctcacctcggaggctgatggactcatggtccaagccagcggggctacaagctgctgtctttgcaccttggtccttggccaagcctccccttgccacgggggcatgggatgacctgtgaacgagacagggtgcaggagtcacagcatagctggtttgcgaggcagctgagggcggcaggaggcagagtgagcagggaggccatctgagccgtccgctgttgtgtgacagacgactcggctatgatcaggcatctgtgagatttgagacagcgctggtgcaccggggcctggggca

SEQ ID NO: 464521 - DNA, 598 bp, Homo sapiens
ttggcccctcaggccaaaaattcggccacgagggaaaaaagaccaacttaccacagatctgaactccatggagaagtccttctccgacctcttcaagcgttttgagaaacagaaagaggtgatcgagggctaccgcaagaacgaagagtcactgaagaagtgcgtggaggattacctggcaaggatcacccaggagggccagaggtaccaagccctgaaggcccacgcggaggagaagctgcagctggcaaacgaggagatcgcccaggtccggagcaaggcccaggcggaagcgttggccctccaggccagcctgaggaaggagcagatgcgcatccagtcgctggagaagacagtggagcagaagactaaagagaacgaggagctgaccaggatctgcgacgacctcatctccaagatggagaagatctgacctccacggagccgctgtccccgcccccctgctcccgtctgtctgtcctgtctgattctcttaggtgtcatgttcttttttctgtcttgtcttcaactttttttaaaactagattgctttgaaaacatgactcaataaaagtttcctttcaatttaaacactgaa

SEQ ID NO: 464522 - DNA, 2854 bp, Homo sapiens
ggaaacggaaccgtcggcgcccgagcggggggtggggggggagggagggcggagcggcgaggcacagcttcccattggacgcccgccctcctgcggtcctgcccccggccgcgcgctgattggccgcgcgaaggcaaccgtcggcgtttgaaactccggcgcgccggcggccatcaagggctagaagcgcggcggcggtagcagccaggcttggcccccggcgtggagcagacgcggacccctccttcctggcggcggcggcgcgggctcagagcccggcaacgggcgggcgggcagaatgagtctgcaggtcttaaacgacaaaaatgtcagcaatgaaaaaaatacagaaaattgcgacttcctgttttcgccaccagaagttaccggaagatcgtctgttcttcgtgtgtcacagaaagaaaatgtgccacccaagaacctggccaaagctatgaaggtgacttttcagacacctctgcgggatccacagacgcacaggattctaagtcctagcatggccagcaaacttgaggctcctttcactcaggatgacacccttggactggaaaactcacacccggtctggacacagaaagagaaccaacagctcatcaaggaagtggatgccaaaactactcatggaattctacagaaaccagtggaggctgacaccgacctcctgggggatgcaagcccagcctttgggagtggcagctccagcgagtctggcccaggtgccctggctgacctggactgctcaagctcttcccagagcccaggaagttctgagaaccaaatggtgtctccaggaaaagtgtctggcagccctgagcaagccgtggaggaaaaccttagttcctattccttagacagaagagtgacacccgcctctgagaccctagaagacccttgcaggacagagtcccagcacaaagcggagactccgcacggagccgaggaagaatgccggcacggtggggtctgtgctcccgcagcagtggccacttcgcctcctggtgcaatccctaaggaagcctgcggaggagcacccctgcagggtctgcctggcgaagccctgggctgccctgcgggtgtgggcacccccgtgccagcagatggcactcagacccttacctgtgcacacacctctgctcctgagagcacagccccaaccaaccacctggtggctggcagggccatgaccctgagtcctcaggaagaagtggctgcaggccaaatggccagctcctcgaggagcggacctgtaaaactagaatttgatgtatctgatggcgccaccagcaaaagggcacccccaccaaggagactgggagagaggtccggcctcaagcctcccttgaggaaagcagcagtgaggcagcaaaaggccccgcaggaggtggaggaggacgacggtaggagcggagcaggagaggacccccccatgccagcttctcggggctcttaccacctcgactgggacaaaatggatgacccaaacttcatcccgttcggaggtgacaccaagtctggttgcagtgaggcccagcccccagaaagccctgagaccaggctgggccagccagcggctgaacagttgcatgctgggcctgccacggaggagccaggtccctgtctgagccagcagctgcattcagcctcagcggaggacacgcctgtggtgcagttggcagccgagaccccaacagcagagagcaaggagagagccttgaactctgccagcacctcgcttcccacaagctgtccaggcagtgagccagtggattacctggagcagtttggaacttcctcgtttaaggagtcggccttgaggaagcagtccttatacctcaagttcgaccccctcctgagggacagtcctggtagaccagtgcccgtggccaccgagaccagcagcatgcacggtgcaaatgagactccctcaggacgtccgcgggaagccaagcttgtggagttcgatttcttgggagcactggacattcctgtgccaggcccacccccaggtgttcccgcgcctgggggcccacccctgtccaccggacctatagtggacctgctccagtacagccagaaggacctggatgcagtggtaaaggcgacacaggaggagaaccgggagctgaggagcaggtgtgaggagctccacgggaagaacctggaactggggaagatcatggacaggttcgaagaggttgtgtaccaggccatggaggaagttcagaagcagaaggaactttccaaagctgaaatccagaaagttctaaaagaaaaagaccaacttaccacagatctgaactccatggagaagtccttctccgacctcttcaagcgttttgagaaacagaaagaggtgatcgagggctaccgcaagaacgaagagtcactgaagaagtgcgtggaggattacctggcaaggatcacccaggagggccagaggtaccaagccctgaaggcccacgcggaggagaagctgcagctggcaaacgaggagatcgcccaggtccggagcaaggcccaggcggaagcgttggccctccaggccagcctgaggaaggagcagatgcgcatccagtcgctggagaagacagtggagcagaagactaaagagaacgaggagctgaccaggatctgcgacgacctcatctccaagatggagaagatctgacctccacggagccgctgtccccgcccccctgctcccgtctgtctgtcctgtctgattctcttaggtgtcatgttcttttttctgtcttgtcttcaactttttttaaaactagattgctttgaaaacatgactcaataaaagtttcctttcaatttaaacactgaa

SEQ ID NO: 464523 - DNA, 3380 bp, Homo sapiens
ggaaacggaaccgtcggcgcccgagcggggggtggggggggagggagggcggagcggcgaggcacagcttcccattggacgcccgccctcctgcggtcctgcccccggccgcgcgctgattggccgcgcgaaggcaaccgtcggcgtttgaaactccggcgcgccggcggccatcaagggctagaagcgcggcggcggtagcagccaggcttggcccccggcgtggagcagacgcggacccctccttcctggcggcggcggcgcgggctcagagcccggcaacgggcgggcgggcagaatgagtctgcaggtcttaaacgacaaaaatgtcagcaatgaaaaaaatacagaaaattgcgacttcctgttttcgccaccagaagttaccggaagatcgtctgttcttcgtgtgtcacagaaagaaaatgtgccacccaagaacctggccaaagctatgaaggtgacttttcagacacctctgcgggatccacagacgcacaggattctaagtcctagcatggccagcaaacttgaggctcctttcactcaggatgacacccttggactggaaaactcacacccggtctggacacagaaagagaaccaacagctcatcaaggaagtggatgccaaaactactcatggaattctacagaaaccagtggaggctgacaccgacctcctgggggatgcaagcccagcctttgggagtggcagctccagcgagtctggcccaggtgccctggctgacctggactgctcaagctcttcccagagcccaggaagttctgagaaccaaatggtgtctccaggaaaagtgtctggcagccctgagcaagccgtggaggaaaaccttagttcctattccttagacagaagagtgacacccgcctctgagaccctagaagacccttgcaggacagagtcccagcacaaagcggagactccgcacggagccgaggaagaatgccggcacggtggggtctgtgctcccgcagcagtggccacttcgcctcctggtgcaatccctaaggaagcctgcggaggagcacccctgcagggtctgcctggcgaagccctgggctgccctgcgggtgtgggcacccccgtgccagcagatggcactcagacccttacctgtgcacacacctctgctcctgagagcacagccccaaccaaccacctggtggctggcagggccatgaccctgagtcctcaggaagaagtggctgcaggccaaatggccagctcctcgaggagcggacctgtaaaactagaatttgatgtatctgatggcgccaccagcaaaagggcacccccaccaaggagactgggagagaggtccggcctcaagcctcccttgaggaaagcagcagtgaggcagcaaaaggccccgcaggaggtggaggaggacgacggtaggagcggagcaggagaggacccccccatgccagcttctcggggctcttaccacctcgactgggacaaaatggatgacccaaacttcatcccgttcggaggtgacaccaagtctggttgcagtgaggcccagcccccagaaagccctgagaccaggctgggccagccagcggctgaacagttgcatgctgggcctgccacggaggagccaggtccctgtctgagccagcagctgcattcagcctcagcggaggacacgcctgtggtgcagttggcagccgagaccccaacagcagagagcaaggagagagccttgaactctgccagcacctcgcttcccacaagctgtccaggcagtgagccagtgcccacccatcagcaggggcagcctgccttggagctgaaagaggagagcttcagagaccccgctgaggttctaggcacgggcgcggaggtggattacctggagcagtttggaacttcctcgtttaaggagtcggccttgaggaagcagtccttatacctcaagttcgaccccctcctgagggacagtcctggtagaccagtgcccgtggccaccgagaccagcagcatgcacggtgcaaatgagactccctcaggacgtccgcgggaagccaagcttgtggagttcgatttcttgggagcactggacattcctgtgccaggcccacccccaggtgttcccgcgcctgggggcccacccctgtccaccggacctatagtggacctgctccagtacagccagaaggacctggatgcagtggtaaaggcgacacaggaggagaaccgggagctgaggagcaggtgtgaggagctccacgggaagaacctggaactggggaagatcatggacaggttcgaagaggttgtgtaccaggccatggaggaagttcagaagcagaaggaactttccaaagctgaaatccagaaagttctaaaagaaaaagaccaacttaccacagatctgaactccatggagaagtccttctccgacctcttcaagcgttttgagaaacagaaagaggtgatcgagggctaccgcaagaacgaagagtcactgaagaagtgcgtggaggattacctggcaaggatcacccaggagggccagaggtaccaagccctgaaggcccacgcggaggagaagctgcagctggcaaacgaggagatcgcccaggtccggagcaaggcccaggcggaagcgttggccctccaggccagcctgaggaaggagcagatgcgcatccagtcgctggagaagacagtggagcagaagactaaagagaacgaggagctgaccaggatctgcgacgacctcatctccaagatggagaagatctgacctccacggagccgctgtccccgcccccctgctcccgtctgtctgtcctgtctgattctcttaggtgtcatgttcttttttctgtcttgtcttcaactttttttaaaactagattgctttgaaaacatgactcaataaaagtttcctttcaatttaaacactgaaaaaaaaaaaaaaaaacaaaaaaaaaaaaaaaaaacaacacaccacaaaaaaaaaaaaagcgggggcgcgcccaaaaagacgcccccgaaggggaccccactacccagccacaccgagtcctatggacaacacaaacaagcgggcccacaaacgcacgcgcgaggcacacaactacaccagaagagagcaaggcgcacccagaacaaaacaaaagcgacagcggggcggcaaacacctgtgcgaaaaacaaagcgagcgtaacactctccggggaaacaacaggatctctactaacatctcccagcggcagcgcacgacacaacatctttgtggaagcaattcaccaccacaacaatcgaagctatgatagaagcaactcatcaagcggggatggaaatgtgtcacgacttgcgctcacgctgtgtatcataaagag

SEQ ID NO: 464524 - DNA, 3059 bp, Homo sapiens
ggaaacggaaccgtcggcgcccgagcggggggtggggggggagggagggcggagcggcgaggcacagcttcccattggacgcccgccctcctgcggtcctgcccccggccgcgcgctgattggccgcgcgaaggcaaccgtcggcgtttgaaactccggcgcgccggcggccatcaagggctagaagcgcggcggcggtagcagccaggcttggcccccggcgtggagcagacgcggacccctccttcctggcggcggcggcgcgggctcagagcccggcaacgggcgggcgggcagaatgagtctgcaggtcttaaacgacaaaaatgtcagcaatgaaaaaaatacagaaaattgcgacttcctgttttcgccaccagaagttaccggaagatcgtctgttcttcgtgtgtcacagaaagaaaatgtgccacccaagaacctggccaaagctatgaaggtgacttttcagacacctctgcgggatccacagacgcacaggattctaagtcctagcatggccagcaaacttgaggctcctttcactcaggatgacacccttggactggaaaactcacacccggtctggacacagaaagagaaccaacagctcatcaaggaagtggatgccaaaactactcatggaattctacagaaaccagtggaggctgacaccgacctcctgggggatgcaagcccagcctttgggagtggcagctccagcgagtctggcccaggtgccctggctgacctggactgctcaagctcttcccagagcccaggaagttctgagaaccaaatggtgtctccaggaaaagtgtctggcagccctgagcaagccgtggaggaaaaccttagttcctattccttagacagaagagtgacacccgcctctgagaccctagaagacccttgcaggacagagtcccagcacaaagcggagactccgcacggagccgaggaagaatgccggcacggtggggtctgtgctcccgcagcagtggccacttcgcctcctggtgcaatccctaaggaagcctgcggaggagcacccctgcagggtctgcctggcgaagccctgggctgccctgcgggtgtgggcacccccgtgccagcagatggcactcagacccttacctgtgcacacacctctgctcctgagagcacagccccaaccaaccacctggtggctggcagggccatgaccctgagtcctcaggaagaagtggctgcaggccaaatggccagctcctcgaggagcggacctgtaaaactagaatttgatgtatctgatggcgccaccagcaaaagggcacccccaccaaggagactgggagagaggtccggcctcaagcctcccttgaggaaagcagcagtgaggcagcaaaaggccccgcaggaggtggaggaggacgacggtaggagcggagcaggagaggacccccccatgccagcttctcggggctcttaccacctcgactgggacaaaatggatgacccaaacttcatcccgttcggaggtgacaccaagtctggttgcagtgaggcccagcccccagaaagccctgagaccaggctgggccagccagcggctgaacagttgcatgctgggcctgccacggaggagccaggtccctgtctgagccagcagctgcattcagcctcagcggaggacacgcctgtggtgcagttggcagccgagaccccaacagcagagagcaaggagagagccttgaactctgccagcacctcgcttcccacaagctgtccaggcagtgagccagtgcccacccatcagcaggggcagcctgccttggagctgaaagaggagagcttcagagaccccgctgaggttctaggcacgggcgcggaggtggattacctggagcagtttggaacttcctcgtttaaggagtcggccttgaggaagcagtccttatacctcaagttcgaccccctcctgagggacagtcctggtagaccagtgcccgtggccaccgagaccagcagcatgcacggtgcaaatgagactccctcaggacgtccgcgggaagccaagcttgtggagttcgatttcttgggagcactggacattcctgtgccaggcccacccccaggtgttcccgcgcctgggggcccacccctgtccaccggacctatagtggacctgctccagtacagccagaaggacctggatgcagtggtaaaggcgacacaggaggagaaccgggagctgaggagcaggtgtgaggagctccacgggaagaacctggaactggggaagatcatggacaggttcgaagaggttgtgtaccaggccatggaggaagttcagaagcagaaggaactttccaaagctgaaatccagaaagttctaaaagaaaaagaccaacttaccacagatctgaactccatggagaagtccttctccgacctcttcaagcgttttgagaaacagaaagaggtgatcgagggctaccgcaagaacgaagagtcactgaagaagtgcgtggaggattacctggcaaggatcacccaggagggccagaggtaccaagccctgaaggcccacgcggaggagaagctgcagctggcaaacgaggagatcgcccaggtccggagcaaggcccaggcggaagcgttggccctccaggccagcctgaggaaggagcagatgcgcatccagtcgctggagaagacagtggagcagaaggtgggtgcgggaagcccagctcaaggggccgtctggcagcaccttctagaaggcccttgggcctgctgctccctccaagcagggagaagccccgcaactcatcttcctcctccagactaaagagaacgaggagctgaccaggatctgcgacgacctcatctccaagatggagaagatctgacctccacggagccgctgtccccgcccccctgctcccgtctgtctgtcctgtctgattctcttaggtgtcatgttcttttttctgtcttgtcttcaactttttttaaaactagattgctttgaaaacatgactcaataaaagtttcctttcaatttaaacactgaa

SEQ ID NO: 464525 - DNA, 1913 bp, Homo sapiens
  misc_feature (278)..(278): n is a, c, g, or t
  misc_feature (280)..(280): n is a, c, g, or t
  misc_feature (286)..(286): n is a, c, g, or t
  misc_feature (296)..(296): n is a, c, g, or t
  misc_feature (299)..(299): n is a, c, g, or t
  misc_feature (306)..(306): n is a, c, g, or t
  misc_feature (308)..(308): n is a, c, g, or t
  misc_feature (311)..(311): n is a, c, g, or t
  misc_feature (314)..(314): n is a, c, g, or t
  misc_feature (317)..(317): n is a, c, g, or t
  misc_feature (323)..(324): n is a, c, g, or t
  misc_feature (326)..(326): n is a, c, g, or t
  misc_feature (328)..(328): n is a, c, g, or t
  misc_feature (331)..(331): n is a, c, g, or t
  misc_feature (336)..(336): n is a, c, g, or t
  misc_feature (348)..(348): n is a, c, g, or t
  misc_feature (361)..(361): n is a, c, g, or t
  misc_feature (366)..(367): n is a, c, g, or t
  misc_feature (372)..(372): n is a, c, g, or t
  misc_feature (374)..(374): n is a, c, g, or t
  misc_feature (382)..(382): n is a, c, g, or t
  misc_feature (402)..(402): n is a, c, g, or t
  misc_feature (443)..(443): n is a, c, g, or t
  misc_feature (483)..(483): n is a, c, g, or t
  misc_feature (517)..(517): n is a, c, g, or t
  misc_feature (551)..(551): n is a, c, g, or t
  misc_feature (566)..(566): n is a, c, g, or t
  misc_feature (582)..(582): n is a, c, g, or t
  misc_feature (640)..(640): n is a, c, g, or t
  misc_feature (665)..(665): n is a, c, g, or t
  misc_feature (727)..(727): n is a, c, g, or t
  misc_feature (771)..(771): n is a, c, g, or t
  misc_feature (777)..(778): n is a, c, g, or t
  misc_feature (798)..(798): n is a, c, g, or t
  misc_feature (804)..(804): n is a, c, g, or t
  misc_feature (822)..(822): n is a, c, g, or t
  misc_feature (829)..(829): n is a, c, g, or t
  misc_feature (833)..(833): n is a, c, g, or t
  misc_feature (848)..(848): n is a, c, g, or t
  misc_feature (857)..(857): n is a, c, g, or t
  misc_feature (860)..(860): n is a, c, g, or t
  misc_feature (872)..(872): n is a, c, g, or t
  misc_feature (896)..(896): n is a, c, g, or t
  misc_feature (899)..(899): n is a, c, g, or t
  misc_feature (934)..(934): n is a, c, g, or t
  misc_feature (949)..(949): n is a, c, g, or t
  misc_feature (979)..(979): n is a, c, g, or t
  misc_feature (981)..(981): n is a, c, g, or t
  misc_feature (983)..(983): n is a, c, g, or t
  misc_feature (985)..(985): n is a, c, g, or t
  misc_feature (998)..(998): n is a, c, g, or t
  misc_feature (1063)..(1063): n is a, c, g, or t
ggaaacggaaccgtcggcgcccgagcggggggtggggggggagggagggcggagcggcgaggcacagcttcccattggacgcccgccctcctgcggtcctgcccccggccgcgcgctgattggccgcgcgaaggcaaccgtcggcgtttgaaactccggcgcgccggcggccatcaagggctagaagcgcggcggcggtagcagccaggcttggcccccggcgtggagcagacgcggacccctccttcctggcggcggcggcgcgggctcagagcccncncccccngcgcccgccncgnccccccncncgnccnccngccccnncncnccnacccnctcgcccccccntcccacccccccngcccnnccccncnccctctcncccccccccccccccccccncccccccccccctcccccgcgtccccccccccccccctgcnccccccccccccccgcccccccccctcccccgcccccccncccccccccccccccgccccccccccccccccgncctccccccccccacccggccccccccccccccnccccttccccccccncccccccccttggccngccccccccccccccggccccgccccccccccccccccccccgcctcccccctccccngccgccccccctcccgccccctccncccccccccccccccccccccccccccccgcccccccccccccccccccccccccccccccnccccccccctgccccccccccccccccccccccccccccccccnggggcnncctgccttggcgctgacagnggcgcncttccgcgcccccgctgnggttctnggcncgggcgcggaggtgnttacctggngcngtttggcccttnctcgtttccggcgtcggccttgangangccgtccttctccctcccgttcgcccccctcctgngggcccgtcctggtngcccagtgcccgtggccaccgcgccccgcngncngnccggtgcccctgngcctcctccggccgtccgcgggccgccccgcttgtggcgttcgctttcttgggcgccctggcccntcctgtgccaggcccacccccaggtgttcccgcgcctgggggcccacccctgtccaccggacctatagtggacctgctccagtacagccagaaggacctggatgcagtggtaaaggcgacacaggaggagaaccgggagctgaggagcaggtgtgaggagctccacgggaagaacctggaactggggaagatcatggacaggttcgaagaggttgtgtaccaggccatggaggaagttcagaagcagaaggaactttccaaagctgaaatccagaaagttctaaaagaaaaagaccaacttaccacagatctgaactccatggagaagtccttctccgacctcttcaagcgttttgagaaacagaaagaggtgatcgagggctaccgcaagaacgaagagtcactgaagaagtgcgtggaggattacctggcaaggatcacccaggagggccagaggtaccaagccctgaaggcccacgcggaggagaagctgcagctggcaaacgaggagatcgcccaggtccggagcaaggcccaggcggaagcgttggccctccaggccagcctgaggaaggagcagatgcgcatccagtcgctggagaagacagtggagcagaagactaaagagaacgaggagctgaccaggatctgcgacgacctcatctccaagatggagaagatctgacctccacggagccgctgtccccgcccccctgctcccgtctgtctgtcctgtctgattctcttaggtgtcatgttcttttttctgtcttgtcttcaactttttttaaaactagattgctttgaaaacatgactcaataaaagtttcctttcaatttaaacactgaa

SEQ ID NO: 464526 - DNA, 1980 bp, Homo sapiens
ggaaacggaaccgtcggcgcccgagcggggggtggggggggagggagggcggagcggcgaggcacagcttcccattggacgcccgccctcctgcggtcctgcccccggccgcgcgctgattggccgcgcgaaggcaaccgtcggcgtttgaaactccggcgcgccggcggccatcaagggctagaagcgcggcggcggtagcagccaggcttggcccccggcgtggagcagacgcggacccctccttcctggcggcggcggcgcgggctcagagcccggcaacgggcgggcgggcagaatgagtctgcaggtcttaaacgacaaaaatgtcagcaatgaaaaaaatacagaaaattgcgacttcctgttttcgccaccagaagttaccggaagatcgtctgttcttcgtgtgtcacagaaagaaaatgtgccacccaagaacctggccaaagctatgaaggtgacttttcagacacctctgcgggatccacagacgcacaggattctaagtcctagcatggccagcaaacttgaggctcctttcactcaggatgacacccttggactggaaaactcacacccggtctggacacagaaagagaaccaacagctcatcaaggaagtggatgccaaaactactcatggaattctacagaaaccagtggaggctgacaccgacctcctgggggatgcaagcccagcctttgggagtggcagctccagcgagtctggcccaggtgccctggctgacctggactgctcaagctcttcccagagcccaggaagttctgagaaccaaatggtgtctccaggaaaagtgtctggcagccctgagcaagccgtggaggaaaaccttagttcctattccttagacagaagagtgacacccgcctctgagaccctagaagacccttgcaggacagagtcccagcacaaagcggagactccgcacggagccgaggaagaatgccggcacggtggggtctgtgctcccgcagcagtggccacttcgcctcctggtgcaatccctaaggaagcctgcggaggagcacccctgcagggtctgcctggcgaagccctgggctgccctgcgggtgtgggcacccccgtgccagcagatggcactcagacccttacctgtgcacacacctctgctcctgagagcacagccccaaccaaccacctggtggctggcagggccatgaccctgagtcctcaggaagaagtggctgcaggccaaatggccagctcctcgaggagcggacctgtaaaactagaatttgatgtatctgatggcgccaccagcaaaagggcacccccaccaaggagactgggagagaggtccggcctcaagcctcccttgaggaaagcagcagtgaggcagcaaaaggccccgcaggaggtggaggaggacgacggtaggagcggagcaggagaggacccccccatgccagcttctcggggctcttaccacctcgactgggacaaaatggatgacccaaacttcatcccgttcggaggtgacaccaagtctggttgcagtgaggcccagcccccagaaagccctgagaccaggctgggccagccagcggctgaacagttgcatgctgggcctgccacggaggagccaggtccctgtctgagccaacaagagattgtacaaataaagacacaagaaaaagacagaagaaaagacagctgggcccgggggaccactaccaccaaggcacggagatcggtaatggccccgaatgtctggctgcgctgttacttattggatacaaggcaaggggacaggttaaggagtgtgagccatctccacggagccgctgtccccgcccccctgctcccgtctgtctgtcctgtctgattctcttaggtgtcatgttcttttttctgtcttgtcttcaactttttttaaaactagattgctttgaaaacatgactcaataaaagtttcctttcaatttaaacactgaa

SEQ ID NO: 464527 - DNA, 1059 bp, Homo sapiens
ggaaacggaaccgtcggcgcccgagcggggggtggggggggagggagggcggagcggcgaggcacagcttcccattggacgcccgccctcctgcggtcctgcccccggccgcgcgctgattggccgcgcgaaggcaaccgtcggcgtttgaaactccggcgcgccggcggccatcaagggctagaagcgcggcggcggtagcagccaggcttggcccccggcgtggagcagacgcggacccctccttcctggcggcggcggcgcgggctcagagcccggcaacgggcgggcgggcagaatgagtctgcaggtcttaaacgacaaaaatgtcagcaatgaaaaaaatacagaaaattgcgacttcctgttttcgccaccagaagttaccggaagatcgtctgttcttcgtgtgtcacagaaagaaaatgtgccacccaagaacctggccaaagctatgaaggtgacttttcagacacctctgcgggatccacagacgcacaggattctaagtcctagcatggccagcaaacttgaggctcctttcactcaggatgacacccttggactggaaaactcacacccggtctggacacagaaagagaacctgagtcctcaggaagaagtggctgcaggccaaatggccagctcctcgaggagcggacctgtaaaactagaatttgatgtatctgatggcgccaccagcaaaagggcacccccaccaaggagactgggagagaggtccggcctcaagcctcccttgaggaaagcagcagtgagaggaaggagcagatgcgcatccagtcgctggagaagacagtggagcagaagactaaagagaacgaggagctgaccaggatctgcgacgacctcatctccaagatggagaagatctgacctccacggagccgctgtccccgcccccctgctcccgtctgtctgtcctgtctgattctcttaggtgtcatgttcttttttctgtcttgtcttcaactttttttaaaactagattgctttgaaaacatgactcaataaaagtttcctttcaatttaaacactgaa

SEQ ID NO: 464528 - DNA, 1380 bp, Homo sapiens
caggaaaaaggggtgatgccggccccgggcaaggtgcaggcattatctcctccagtgctcagattgcacactcatgagaggtgagcaagcttccaagaacatccaatgccgatgctccagaaaagcctttaacaaaagtcagaggtccatggtaaggtaccaggtgaaaactccatcagatgatatctgtacagagctagtcaaatcctgcatagacctggttgtcacagaagtatatggaataaaaggtggtactgtacctatgaatgtagacatgctccacaagtacattttcaaccttctgcttttctctctggatatcctcttcccagagagctcaaatgttcccaagttgtccctgataatacctccaaacaccaccttgagcagtgctacccaacagaaataccaacagcagaaaatgcatctggtatgtgccttgcccttagtagttcaatactcatatgtgaaaaattattattttttgtgttttggaatattgctaatgaactacagataaggcagagagtgtaatgaaaacaaaaataaaatggaaatatataaataaaaaaacacaaattaccatttctttctgtaaatctttgtacatttgggggaaatctatatttgcaggaatttggaggaaaaatcaacatgaaacaaaggtttttcaggtgttcattagagtgtgacagggaaatacaccaaaatgttaacattggttgtattttttctgcttctatgtacttgtcttcatttacctgttatcaagagtaagcatgtataactcttaaggaagttataattatacaataaaaacccaacaccaaaagggaaaggagagggaggaatacagaggactttgtcttgcaacttgggtgccagctcagtcacagtaaaataaaccacaaagcagattcttaaagcctctgattctagggcccggctcctggacagcatttctaaacctgcttgggccagaagggaacctgctactctcaagatgttactacaaacattcaaactgatacctactgagaagcactctaggctaagtggtttggaaattctgcatcccccagaatgcttcaatgcttctgatgaaagccctgatatatgggattcctgttgtgagatcctaggtgaataatcctaactgcaggactaatattggacatactcagagacagacttcataaggccaccctcacttttccacatcaggtggaaagagaaaaatgaaattattacctttcaaaatatttgtctgcttgaattatttcactcttacccttaatagtaacaccaactataatttacttgctccagagacaaaatcaggtcttcacatatccttgaggcaactctatgtgttgcatg

SEQ ID NO: 464529 - DNA, 1237 bp, Homo sapiens
ataaggcccagccccgccttctgctgttgccgcagcaacccagaaagcgtcatggctgccgccggccaggaaaaagggtatttgacacagactgcggcagcctagacaagtcaccgtcactttcgccacagctagcagctcccatccgagggaggcctaagaagtgtctggtctatccgcatgcgccgaagagctcccgcttgtctcgttccgttctgcgttggcttcagggtctggatctcagcttcttccccaggaacatcaacagagatttttcaaatggcttcctaattgcagaaatattctgtatatattacccctgggaacttgaattatcatcctttgaaaacgggacctctttaaaagtcaagttggataactgggcacagttggagaagttcctggcaagaaaaaaatttaaattacctaaagaactaatccatggaacaattcattgtaaagctggagtgcctgaaatattgatagaagaggtttacactttattaacacatcgagaaattaaaagtatccaggatgactttgtgaatttcacggactatagctaccagatgcgtttacccctggtttccaggtctacagtttcgaagtctattaaagataacattaggttatcagaattactaagcaatcccaacatgctgaccaatgaacttaaagcggagttcctcatccttttacatatgttgcaaagaaaattaggcagaaaattgaatccagaatggtttgatgtgaaaccaacagtgggagaagttactctcaatcaccttcctgcccaagcctctgggcgcagatataatttaaaagttaaaagaggaagagttgtccctgttttaccaaatataggtagtggtggcagttcacatagagaaatacatgtgaagcaagctggacaacattcttattactctgctatgaaacctatcagaaacatggacaagaaaccttgaaaagcacctgtcaaatggctttgaagaagtgatgccaccatctctagccataataaagaaacagaatcacctagtattggatgtatttcaataataaatagagtggtgtcttttccataattgtgttaaagaacatttcttttccattcaatttgtttattaaactcctatgccaggcatttctatattacctagctctgataaggaaaagcataatttcaaaaacacaagatgcaatacaaattatgttttcttaattaggttctaaa

SEQ ID NO: 464530 - DNA, 737 bp, Homo sapiens
ttaagaggcaggtggagggactggttaaaaaagggtgaaaaagtggtgggttcctggcaagaaaaaaatttaaattacctaaagaactaatccatggaacaattcattgtaaagctggagtgcctgaaatattgatagaagaggtttacactttattaacacatcgagaaattaaaagtatccaggatgactttgtgaatttcacggactatagctaccagatgcgtttacccctggtttccaggtctacagtttcgaagtctattaaagataacattaggttatcagaattactaagcaatcccaacatgctgaccaatgaacttaaagcggagttcctcatccttttacatatgttgcaaagaaaattaggcagaaaattgaatccagaatggtttgatgtgaaaccaacagtgggagaagttactctcaatcaccttcctgcccaagcctctgggcgcagatataatttaaaagttaaaagaggaagagttgtccctgttttaccaaatataggtagtggtggcagttcacatagagaaatacatgtgaagcaagctggacaacattcttattactctgctatgaaacctatcagaaacatggacaagaaaccttgaaaagcacctgtcaaatggctttgaagaagtgatgccaccatctctagccataataaagaaacagaatcacctagtattggatgtatttcaataataaatagagtggtgtcttttcca

SEQ ID NO: 464531 - DNA, 1085 bp, Homo sapiens
ataaggcccagccccgccttctgctgttgccgcagcaacccagaaagcgtcatggctgccgccggccaggaaaaagggtatttgacacagactgcggcagcctagacaagtcaccgtcactttcgccacagctagcagctcccatccgagggaggcctaagaagtgtctggtctatccgcatgcgccgaagagctcccgcttgtctcgttccgttctgcgttggcttcagggtctggatctcagcttcttccccaggaacatcaacagagatttttcaaatggcttcctaattgcagaaatattctgtatatattacccctgggaacttgaattatcatcctttgaaaacgggacctctttaaaagtcaagttggataactgggcacagttggagaagttcctggcaagaaaaaaatttaaattacctaaagaactaatccatggaacaattcattgtaaagctggagtgcctgaaatattgatagaagaggtttacactttattaacacatcgagaaattaaaagtatccaggatgactttgtgaatttcacggactatagctaccagatgcgtttacccctggtttccaggtctacagtttcgaagtctattaaagataacattaggttatcagaattactaagcaatcccaacatgctgaccaatgaacttaaagcggagttcctcatccttttacatatgttgcaaagaaaattaggcagaaaattgaatccagaatggtttgatgtgaaaccaacagtgggagaagttactctcaatcaccttcctgcccaagcctctgggcgcagatataatttaaaagttaaaagaggaagagttgtccctgttttaccaaatataggtagtggtggcagttcacatagagaaatacatgtgaagcaagctggacaacattcttattactctgctatgaaacctatcagaaacatggacaagaaaccttgaaaagcacctgtcaaatggctttgaagaagtgatgccaccatctctagccataataaagaaacagaatcacctagtattggatgtatttcaataataaatagagtggtgtcttttcca

SEQ ID NO: 464532 - DNA, 1056 bp, Homo sapiens
ataaggcccagccccgccttctgctgttgccgcagcaacccagaaagcgtcatggctgccgccggccaggaaaaagggtatttgacacagactgcggcagcctagacaagtcaccgtcactttcgccacagctagcagctcccatccgagggaggcctaagaagtgtctggtctatccgcatgcgccgaagagctcccgcttgtctcgttccgttctgcgttggcttcagggtctggatctcagcttcttccccaggaacatcaacagaaatattctgtatatattacccctgggaacttgaattatcatcctttgaaaacgggacctctttaaaagtcaagttggataactgggcacagttggagaagttcctggcaagaaaaaaatttaaattacctaaagaactaatccatggaacaattcattgtaaagctggagtgcctgaaatattgatagaagaggtttacactttattaacacatcgagaaattaaaagtatccaggatgactttgtgaatttcacggactatagctaccagatgcgtttacccctggtttccaggtctacagtttcgaagtctattaaagataacattaggttatcagaattactaagcaatcccaacatgctgaccaatgaacttaaagcggagttcctcatccttttacatatgttgcaaagaaaattaggcagaaaattgaatccagaatggtttgatgtgaaaccaacagtgggagaagttactctcaatcaccttcctgcccaagcctctgggcgcagatataatttaaaagttaaaagaggaagagttgtccctgttttaccaaatataggtagtggtggcagttcacatagagaaatacatgtgaagcaagctggacaacattcttattactctgctatgaaacctatcagaaacatggacaagaaaccttgaaaagcacctgtcaaatggctttgaagaagtgatgccaccatctctagccataataaagaaacagaatcacctagtattggatgtatttcaataataaatagagtggtgtcttttcca

SEQ ID NO: 464533 - DNA, 265 bp, Homo sapiens
gacaacattcttattactctgctatgaaacctatcagaaacatggacaagaaaccttgaaaagcacctgtcaaatggctttgaagaagtgatgccaccatctctagccataataaagaaacagaatcacctagtattggatgtatttcaataataaatagagtggtgtcttttccataattgtgttaaagaacatttcttttccattcaatttgtttattaaactcctatgccaggcattgttgaaaatacaaaattaaataaat

SEQ ID NO: 464534 - DNA, 553 bp, Homo sapiens
ctctaacctgcgaacaaatctatcaagcagacggcacagtactgaatttgaaaccagaaatactgggtttttatataaatgcttcatagatttgttttatgataaagggcacataactctcctaaacctcacaccacctcttgaataggtataataagtccacatcaatgctgatgccttagctattattaaactcttacagtatgatgtaaagtgaaagtacaatgtaagatcattcctaggccaactttgaccagttttatacagaaacatgtgccaacttttctgtttgcaaggataatatcaaagcaaacaccagaaagttatatctttgatgcatttttttcaaaatcatacacataatacacaaaccaaagacaaatgatgaatattatgtcagaaaatataaagtcttcccctttcttcttttgccaagaaagtccaatattttcaccatttttatgcacacaatcaactttatttaagctggaagttaatgtctcattgttttcattgttctaaataaacaccttttcccttgagtattgttcta

SEQ ID NO: 464535 - DNA, 4053 bp, Homo sapiens
ctctaacctgcgaacaaatctatcaagcagacggcacagtactgaatttgaaaccagaaatactgggtttttatataaatgcttcatagatttgttttatgataaagggcacataactctcctaaacctcacaccacctcttgaataggtataataagtccacatcaatgctgatgccttagctattattaaactcttacagtatgatgtaaagtgaaagtacaatgtaagatcattcctaggccaactttgaccagttttatacagaaacatgtgccaacttttctgtttgcaaggataatatcaaagcaaacaccagaaagttatatctttgatgcatttttttcaaaatcatacacataatacacaaaccaaagacaaatgatgaatattatgtcagaaaatataaagtcttcccctttcttcttttgccaagaaagtccaatattttcaccatttttatgcacacaatcaactttatttaagctggaagttaatgtctcattgttttcattgttctaaataaacaccttttcccttgagtattgttctaaaaattttgaagttgtgtgaaaaattttgttctgatttttcacatttgtgctaatgatatgtgaaaaggaatacagatggtatttaattatgaacaggaaaagatgttaaatatcattagtcattagaaatttgcaaattaagaccacaatgactaacacatgtatatcagaatagctaaaataaaaataaaacatcaaacgctggggagcatgagtaaaaactggagctttcacacatgactcgtgggaacgtaaaatcgtacagctatgccaaaaaggagtatagtagtttcttaagaaactaaaggaacctgagtccccaggcctgcagtctgggccaaggtcactggccctggatcaatcaggatggggttcaggggccttcctggggccatccagtgtccaaggtgccctttggtggcctcgtctgcccctcagcccctgagcacgtccctctgtccctccaatcctccctgccatgggacatctgtcacagagccatgccctacctcctgctttctggagatgccaactgcctggggtgctcttagccctgccctccccatctctgggtcctgaccaaggtgttctaatggacaccccctgacccaggtctcagagagctgccagcaccctgggtccctgaagctaagatccagcaagacacatgtggcctgagagtcccactttctggctggcagaacccagaggtgggagcacactggagtgtccttcagggtgtcttcaccccatgagagggctgggggctttgggagtttgcagctggcaggagtcagggcccagtcccctaactctgatgcatccttggttaaatcctgtgcctcagcctgcagggcctattgtggtcaccagacaaaaggtggagcctggcatcctgccctgcgtgggctccagcctgctgccatctggggaaactgagtcatggcgaggctcaaggatgtttctcagaccacaccagtccctgaagaactgctatgctcgctaccaccaggccttcgccaactgcaaccagtcagagcaggagctgcaggggcatgaaagccagcagctggccgcagagacccaggcgctggcgcaggggacgcagcaagactccacgcgcagggtgggcgagcaactgcaggacacgcacagctggaagtcagagctgcagcgtgaggtggaggcgctggctgcggagaccgacctgctgctggcccagaagcaacgcctggagcacgccctggatgccacggaggcgcccttctccatcgccactgacaacctgcagtgcagccagggccaccagaacgctaacctcatgcgcgaccatgtggagacggagctgctgaaggtgccagcagccgcccatccccctgcaccctctcagtgcctcaataactgcttcagctctcgcaaaccctctgcccgcaacaagggcccctgccaagtgatggagacactgacagtgcaggaagaggcaaacccagggacagaagggtgcaggactcgggccctggcacacaagaaggaagctgagctcatccggaacattcaggagctgctgaagagagccatcgtgcaagcagtgagccagatccgcctgcagcatggaggatccccagcggtgccctccccggccacacaccaaggccctgccccaccccgccccagactgaaccgggagcacacggagatctgcgagatggactggtcggacaaggtggaggcctacaacctcgacgagacctgcgggcgccaccacagccagagcaccgaggtgcaggctcatccggcactccaccaccttccaagagaggggggccccagctctgcccccacacttgccctggctgtggtctcgcctccctctgcctgggggccccagcggcgctgcttcccccagcctgacccggaggccctcgcccccgaggacacttgggcaactgtctgcccctggcatgacgcctccaccccggagacctggaccaagttcacgcaggacaatctgtgccgctcccagcgcgagcacctggactcggccaacctgtgggtgctggtggactgcatctttcgcgacacctccgaggacctgggactccagtgtgacgctgtgaacctggccttcgggcgccgctgtgaggagctggaggacacgcggcacaagctgcagcaccacctgcacaagatcagaaacaacgtggcggcactgaaggaggccatcaaggacaaggaggcacctctgcacatagcccagacccttctgtacctgcgcttgcactggcccaacatggagctgtgtggcaatgcagcccagttcagacatgacactgggcaggtcatgggtcgggtgcctctcagtgccagggacctgtgcccacgtggtctcaccccaccctgtgctacctcgtcttcccgggaagaagctccttcagacaagccccagctcacaccccccaacatccccaagctggtgagtgaggtggaggagctgaacatgtccatcacagcgctgcgggagaagcttctagaaggggagcagtccctttgcaacctcgaggacatccacatgagcctggagaaggacgttaccgccatgaccaacagtctcttcatcgaccgccagaagtgcatggcccatcgtacttgctaccccaccatcctgcagctggctggctaccagacccctccagaggccactgctgaagacgaaaaacactactgccgttcactgggggaggcccaggtggtgctgcccagccctgtcgggtccccatcagtctcaggacctccttgtcccaccctggagggtgtggctgatggagagctgagtgtggaggatgccaggggagggggcctgggagacattgtccaacccccacccctgaggccatctggacactggcagctgctgctaacccacaggcccctctgtggagtccccgttgacctggccttgaactcctacccatggtggagatcagtggagcctggacacagctgccccctccgtgttggggtcgccctcagctgtctcatgtctgggttccctcatctgccccctgtgcagtggctcctagagatcactctcacaggcatcagatgcatggctcaaggacacagaaacccaggcatccaggagcccaaggtctcacacccagggagcgaagggcttgccaaggctcttaccccagtgcccatcacccctgccagcatcccagagtacagtgggggagatgccattggtctgagccgtgcagagctggttccaatggctgcaggcaccacagtcgcagagctggaagaaacaagaatcctccccaagagtctgcagagggagtgcatttctgcccacaccttgattttggacttgtggcctccagaacggtgagagaataaattcctgatgttgtaagccatcactacagcagctcctggacactaatattgctcagtccgtccaggctcctctctctgtttgttgttgttctaggttttt

SEQ ID NO: 464536 - DNA, 1331 bp, Homo sapiens
cagccaccggccccctcaagccccgccccccagtgggcggagaaggcgttacaagccaagggtgcctggtgtcaaatcttatgtactgggactcctaaaacatctgaagtctaccatctccttcctagcctcatcttcctgggcccttaaatacctcttcctagatgaaggcagcaccttgagactaaattcaacccaacactacaggttgggttgcagatatggccttgaagcaatggtaaaggaaaaagaatcagaaaattggctgccatcgctacaggctgtgtacttagttatgtgtcatctgtatctctactgcaacccttgctagaatgtgtgccggctatgagcagggtcactgtctgtcttgttcactgctagatcctcagcacgtggaactatacctggaacatggaaggaagtcaagcaatatttatttaatgttaaataagtgaatctctgtagcattaatggtaaaaagacttccatatttgccttcaattagattttaagatgacagtctataaaaaacagcttgcaatatacagaagttcatttaagaataactttgctggtatctattctcttgaggtatacttacatgctatttttttcaaaatcacgaagcaatcagtatctgccaaacggaatgaaagctggatcacaaagagggataaagaagagaaagcaatatatatgctaagcagcagcacttctccaaacacagccccaggtagaaccaatctagcaaagagtgacctgtcagtcatgcaccagccaaagcaagctgtgccaacttgtaagaagtcagaagataccagtgctctatacgcttgtctgttttcaaacatttatattttcctttcctctcaccctgacagaatgccccctcatacacagtcaaaaattaaattgactattttgggggagcagcacatcacagaagatcatttctaattttatctaactgctaccacaatgtctctttcagctttattgcttccatatttctatgtcctatgaatatttttccttcaactattaattttccttttaatttcttcactacattttctatcatctttctgtggctctgatttctgtgtaatattttgtgacccttatcaatggcccagagaacataggaaagcctaaataaataagttatttgttccgtataaacagaaatagaaacaggaaaatgagagtatttctgcaaatgccttttcagtcctatagaattagaataatcaataatagttttaaattatagccttaaattctaaaatgcctaatgggagtatatagtaccatgtggaatttttcagtgt

SEQ ID NO: 464537 - DNA, 964 bp, Homo sapiens
gccgcgatgtaagacgtgcttttcaccttcggccatgatcatgaggcctccccagacacatgcaactataagtctattaaatctctttttctttataaattatccagtctcggtatttgcaagattgtgtgggaaagaaaaagaggaggaagaggagaaagaagaaagaaaggaaagaaaggatgaagggaaggaaatagagaaagaatgtaagacttcaaatgcaaagaagaaagtgcaaaatccagtcaaatgttttggctggttgagaaatgaaagcagcatccttgaacagtctgtaatggcccaaatgtacttcaagaatgcagcaattgaaaacaagtcacccggagcacacagactagagtctctgtgggccaccatgcatgaggacattcaagcagccttatggagcagtttacatggagaaaaactaaggcctcctgccaacagccagcaccaactggccatataaatgaactaccttgatcatgaatgcagactctctaaagcctttacatggatgcaacctcatgagagacccctgtccagaagaacacaattaagctcctgaattcctgacccacagaagagctgtgagatactaaatgcctattgttgttttaagccactaaattttgagacacgcattttaaaacccatcaaaaaagctgacaagtcaggaatccgttttaggacacctatgggcatattctgggaaaggagtcttaatcattgagaagcaaactctggagccatttcatggagggatcttaaaggcacacaaccattggttttactgcacatgtgtcaccgtctgaagccatcctgcaactctcacgagtcatctgctctgaagtagagcacacctatttctggaaaaagaggatcagactgtctttttctgagtgtggttggcatctatgggataggctttcctggttaaaaactagttagttaaaaa

SEQ ID NO: 464538 - DNA, 1391 bp, Homo sapiens
gccgcgatgtaagacgtgcttttcaccttcggccatgatcatgaggcctccccagacacatgcaactataagtctattaaatctctttttctttataaattatccagtctcggtatttgcaagattgtgtgggaaagaaaaagaggaggaagaggagaaagaagaaagaaaggaaagaaaggatgaagggaaggaaatagagaaagaatgtaagacttcaaatgcaaagaagaaagtgcaaaatccagtcaaatgttttggctggttgagaaatgaaagcagcatccttgaacagtctgtaatggcccaaatgtacttcaagaatgcagcaattgaaaacaagtcacccggagcacacagactagagtctctgtgggccaccatgcatgaggacattcaagcagccttatggagcagtttacatggagaaaaactaaggcctcctgccaacagccagcaccaactggccatataaatgaactaccttgatcatgaatgcagactctctaaagcctttacatggatgcaacctcatgagagacccctgtccagaagaacacaattaagctcctgaattcctgacccacagaagagctgtgagatactaaatgcctattgttgttttaagccactaaattttgaggtaatttattatgtggtaatagataactaagacatgaatatacactaaccctaaaataatctcaaaatcccttcatgttgtccaggtagtaccattaaatgtgacctgcatgttctcataagtgtatgtggtaagaaatgttccatgcatttatttacatgtgtctctagaaaaatattctacagggaaacaattcttctattcctcaatggatccaggtagggcccaccaacactttcatttattctggtggccaggcaagtgcaatggtccatgcctgtaagcccagcactttgggaggttgaactgggcagatcacctgaggtcaggggttcaagcagcctggccaaatggtgaaaatctgtctctactaaaaatacaaaaaaaaaaaaaattagccaggcgtggtagcatgcacctgtaatccagctatgcgggagactgaggcaaaagcttaaactcaagagatggaggttgcagtgagccgagatggtggggctgcactccagcctgggtgagaaagcgagactctatctcaaaaaaaaaaaaaaaattcttctggtcagagaaaatcaattcagcctttagctgagtagaatgagtacaaactgaaaagattattagagagtgaattttattcatgcagacaacacgctcttgacatgagggatgcaggtgtttaggcatatgctatacaaacttccagggcataaaaccaggccagaaagaattttctggtcaaacaagc

SEQ ID NO: 464539 - DNA, 1675 bp, Homo sapiens
agcaaataaatataatatagcatgataattgcaagaatattaacatgtccaaaagttaaagagagaaagcataaagaagaaagtgatgagctctgaggggttgaggcttttgctctctcttaaattgattgctatttagcacccatcaaaagctctgcagaggggaccatcattaacggcatttacgaagacatccacttattccaacagcaggaggaagaccaacgcttcttatcataaacacaagttcctgctatacacaacacatccttgaattctagggaagccaagatgtacatgaaatgactgcaggtcttaaaggtcttgaatctaattgtggcactggggcatatgtagagataaatatcacgtagcatatgctaaggtgatttcgaagatctattctatcttaagacactgtaagtctaattattaaatgagcaatacagacatttacccgcgcggctgcgcgtctcagtccacccctggggcgcgcggctgtcacccagggcggggcggcgcgggcgttgccacgacgcgggccgcgcgcgtccctggcagccaacccgtccacgtcaaggtttgtttaataatcgccagggtatctatggccgggctcaggcggctgctggggagccaggagaccgcgcgggacggcggatgaggcgcggcggctgcggcccagggcacctcccctctggcttcccgaacccggccaggtccgacccgagggggaggatggaaacacctgccgcgctctgagccccccagaagagaacacccttcccgccatatcaccccacggtcctgcggaggccaccgcctggtccccccaagtctccatcgcgcagcgtggggccgagaggaatagtgagcgatggcggaaaacctgaaaagactggtctcaaacgaaactttacgaacgttgcaggaaaagctagacttctggctgaaggagtacaacacaaacacgtgtgatcaaaatctaaaccattgccttgaactcattgagcaagttgccaaggtgcagggacaactctttgggatcctcacagcagcagcccaagaaggaggacgtaatgatggtgtggaaacaatcaagtcacgccttttgccttggctggaggcttcctttactgctgcttccctgggaaaatctgttgacagcaaggtcccctctctgcaggacacgtttgatagggagagacataaagatcccagtcctcgggatcgggatatgcaacagttagactctaatttgaactcaacccggagtcaatgcaaccaggttcaagacgattactgatttatcttacagtctggttgaaactgaaaagaatcttgaagaaagcaagaacagatcggccatatcccttttggctgcagaggaggaaataaatcagctgaaaaagcagcttaaatctcttcaagctcaggaggatgcccgccacagaaacacagatcagaggagctcagagaataggcggtcagagccttggagcttggaggagcggaagcggatactgtccatttcactgcagggtatttcccttttatatctgactttgatggcatgtgtaggtgaagtgttcttgtgaaatccctttctacttatggacagattttaagacaggtcatccagacagtgttaagtaaggacaaagtaggtgtttct

SEQ ID NO: 464540 - DNA, 1656 bp, Homo sapiens
agcaaataaatataatatagcatgataattgcaagaatattaacatgtccaaaagttaaagagagaaagcataaagaagaaagtgatgagctctgaggggttgaggcttttgctctctcttaaattgattgctatttagcacccatcaaaagctctgcagaggggaccatcattaacggcatttacgaagacatccacttattccaacagcaggaggaagaccaacgcttcttatcataaacacaagttcctgctatacacaacacatccttgaattctagggaagccaagatgtacatgaaatgactgcaggtcttaaaggtcttgaatctaattgtggcactggggcatatgtagagataaatatcacgtagcatatgctaaggtgatttcgaagatctattctatcttaagacactgtaagtctaattattaaatgagcaatacagacatttacccgcgcggctgcgcgtctcagtccacccctggggcgcgcggctgtcacccagggcggggcggcgcgggcgttgccacgacgcgggccgcgcgcgtccctggcagccaacccgtccacgtcaaggtttgtttaataatcgccagggtatctatggccgggctcaggcggctgctggggagccaggagaccgcgcgggacggcggatgaggcgcggcggctgcggcccagggcacctcccctctggcttcccgaacccggccaggtccgacccgagggggaggatggaaacacctgccgcgctctgagccccccagaagagaacacccttcccgccatatcaccccacggtcctgcggaggccaccgcctggtccccccaagtctccatcgcgcagcgtggggccgagaggaatagtgagcgatggcggaaaacctgaaaagactggtctcaaacgaaactttacgaacgttgcaggaaaagctagacttctggctgaaggagtacaacacaaacacgtgtgatcaaaatctaaaccattgccttgaactcattgagcaagttgccaaggtgcagggacaactctttgggatcctcacagcagcagcccaagaaggaggacgtaatgatggtgtggaaacaatcaagtcacgccttttgccttggctggaggcttcctttactgctgcttccctgggaaaatctgttgacagcaaggtcccctctctgcaggacacgtttgatagggagagacataaagatcccagtcctcgggatcgggatatgcaacagttagactctaatttgaactcaacccggagtcaatgcaaccaggttcaagacgatctggttgaaactgaaaagaatcttgaagaaagcaagaacagatcggccatatcccttttggctgcagaggaggaaataaatcagctgaaaaagcagcttaaatctcttcaagctcaggaggatgcccgccacagaaacacagatcagaggagctcagagaataggcggtcagagccttggagcttggaggagcggaagcggatactgtccatttcactgcagggtatttcccttttatatctgactttgatggcatgtgtaggtgaagtgttcttgtgaaatccctttctacttatggacagattttaagacaggtcatccagacagtgttaagtaaggacaaagtaggtgtttct

SEQ ID NO: 464541 - DNA, 1447 bp, Homo sapiens
agcaaataaatataatatagcatgataattgcaagaatattaacatgtccaaaagttaaagagagaaagcataaagaagaaagtgatgagctctgaggggttgaggcttttgctctctcttaaattgattgctatttagcacccatcaaaagctctgcagaggggaccatcattaacggcatttacgaagacatccacttattccaacagcaggaggaagaccaacgcttcttatcataaacacaagttcctgctatacacaacacatccttgaattctagggaagccaagatgtacatgaaatgactgcaggtcttaaaggtcttgaatctaattgtggcactggggcatatgtagagataaatatcacgtagcatatgctaaggtgatttcgaagatctattctatcttaagacactgtaagtctaattattaaatgagcaatacagacatttacccgcgcggctgcgcgtctcagtccacccctggggcgcgcggctgtcacccagggcggggcggcgcgggcgttgccacgacgcgggccgcgcgcgtccctggcagccaacccgtccacgtcaaggtttgtttaataatcgccagggtatctatggccgggctcaggcggctgctggggagccaggagaccgcgcgggacggcggatgaggcgcggcggctgcggcccagggcacctcccctctggcttcccgaacccggccaggtccgacccgagggggaggatggaaacacctgccgcgctctgagccccccagaagagaacacccttcccgccatatcaccccacggtcctgcggaggccaccgcctggtccccccaagtctccatcgcgcagcgtggggccgagaggaatagtgagcgatggcggaaaacctgaaaagactggtctcaaacgaaactttacgaacgttgcaggaaaagctagacttctggctgaaggagtacaacacaaacacgtgtgatcaaaatctaaaccattgccttgaactcattgagcaagttgccaaggtgcagggacaactctttgggatcctcacagcagcagcccaagaaggaggacgtaatgatggtgtggaaacaatcaagtcacgccttttgccttggctggaggcttcctttactgctgcttccctgggaaaatctgttgacagcaaggtcccctctctgcaggcttaaatctcttcaagctcaggaggatgcccgccacagaaacacagatcagaggagctcagagaataggcggtcagagccttggagcttggaggagcggaagcggatactgtccatttcactgcagggtatttcccttttatatctgactttgatggcatgtgtaggtgaagtgttcttgtgaaatccctttctacttatggacagattttaagacaggtcatccagacagtgttaagtaaggacaaagtaggtgtttct

SEQ ID NO: 464542 - DNA, 594 bp, Homo sapiens
ctctctccagctctgggagacagttggagcctcagcgctattcaattttgaggaattttcacctagaggaatccaagatcttcagtccaaacagcaatttctggggagttattacttctctaaaacctttgtgctgggaattaacaagagttcttcaatctaatcacgctctttggcatcaaggtctcccaattctaaagttaccattgcataggctgttgcataattttagacgtcatggagagtcccactgatgaaatctgagaaggctcatgtcagaccactgactgctaaagacatcactacatgaaagatcagtagtgtgaaactttaaaaacatcgatccaaatgaatcaattaaatcaacattcatccctcttaagtgtgtggtttaaaactatcattgttgcttttttaaaaaaaccttacatagattttgagataaatgctggaatgctttgatggctacttctattctcgaatctccgttaatcgactttgtgctattcccctcttttcaacatcttccacttggtgtacattctttacttttagtacagtgcatgacagttgcaatgctttaaatctaaaacc

SEQ ID NO: 464543 - DNA, 1326 bp, Homo sapiens
ttgtgatttttctgagatttttttttcctatcgcctgtcaggaggcgtctgggcagccttgtaaactcagagtgacttctcatatcgtgctatgttttcccagcgatgcgctttcctctgcgctgaagccctgggaatcatttcagcccaagaattaaagcggctttttagcaccgttgttctgaactatttgtgggcatttgatcagtacagtgctggtaatgttattattgcccttgttttcgtcacactttttctctttttgattaagatattcaaaacacttttggagggattcctttgtgttgaagcacgaagagagaaaatcagtagttctaaatttctggtggaaaaaattaagataagccaaaaagacctgaatattgttttcatgaggcaaaataaaggagtgttaccaaagcctttaattatgtcaggaaagactgaaatcatggtatttcttttaatggggataactatcttttgcaacctctctgtgtaatttactgatgcaaagcaaaagcaaaaatggggaggggggaggggaggaaccaacaaaaccaccacaacaaaccatcaatatttcttcagttgataaatcctgattatccaagtacccagagaaggtgtgaacatttattggaaaaaagccatttatttaattatggctaaaaaaagaagaaaataaacctttgaaaaattatttggaggtacatgaagatgaactggatcagaggcacctttttcagacacaatgggatatggtgacatattcaattttgaggaattttcacctagaggaatccaagatcttcagtccaaacagcaatttctggggagttattacttctctaaaacctttgtgctgggaattaacaagagttcttcaatctaatcacgctctttggcatcaaggtctcccaattctaaagttaccattgcataggctgttgcataattttagacgtcatggagagtcccactgatgaaatctgagaaggctcatgtcagaccactgactgctaaagacatcactacatgaaagatcagtagtgtgaaactttaaaaacatcgatccaaatgaatcaattaaatcaacattcatccctcttaagtgtgtggtttaaaactatcattgttgcttttttaaaaaaaccttacatagattttgagataaatgctggaatgctttgatggctacttctattctcgaatctccgttaatcgactttgtgctattcccctcttttcaacatcttccacttggtgtacattctttacttttagtacagtgcatgacagttgcaatgctttaaatctaaaacc

SEQ ID NO: 464544 - DNA, 1507 bp, Homo sapiens
tcgttttaagactagtcaagtgcagtagtgagaaaggggaaagagtggaacaaggagttcgatctgtaacggactgaacaagcaacagagaaaactcactcccttggcaccagccacgagcacattcttgaagccaaactcatccatccgtactgggagatagatgatcatagaaacatcaagtgtgagtctggtttgagtttaaaacgaaaagtgctttagagttatggaaacttagcttcaaagaagaggcaccaaggatgccgcgcgaaaactcacgaggccacttaacacaggctgcgtgggaaacaggggctccgcgactgcgctcagattaacggaaaaagacacccctctagagtccggcagcagcgggcgggcaccggcgccttctccacacaggagaatctcggcgatttacacccccaggctacgcagaaaaagcggcttcggaatccgccgcaagtcccctcctcgggtcgccggggaagtctggcctcccgcgtctgggtccccttcgggacgccccaaggccccgtttaccacggcgactccccgcctctcgcgccaccgaaccacggcgcggggccaccagggcgggcctcgcctcgtgcggaaaagtcgcctcgacgggcggcgcagacggcggaggcagggggacgtagtccacgcgcccagctcggagcgcagggccccgcgcccacgaccgcccgcgccctccacgtgccgcgggcaaagctcggagccggtgcgccgaggaatgggcagcgtggacaagagaggagggggcggcggcgcgctccgcccgggctcggtacctgagcgcggccgcgggggggcggagcgagaagactgccggccgcccaggccccgctcgctcagggcgacgcgcctcagccgcggcggaacaaaaccgcggccgccgccccgccccctccggccgccctcattggccgcccgcgccccgccgccgccgcgagcccgtcagccgccgccttctccacgccggccctcagccgcgccgcgccgacggagggggcggggcctccaggcgcccaggctcgcaccgcccaccgagtccgcagcgcgccctgtgcgagggtctggccccgcccccggatcgacgccccgccccctgcgcgcgtgcgtgcctggcactcggcggcgtcctccaggcctagaaggcaagacctgtggcggcggcgacctgaggcggcggggcaggacgcgcagaggagggcccggtcgctcgccctctcgggtcgcacttctgcacctgcacagtgtgaattaggccctcgctcatggcaaataacaagtggatgcgcgagtctggggggaatggggagcaactgcctactgggtacagggtctccttttgaggtgatgaaaatgttttgaaactagatagagggagtggccacacaacattatgaatgtatcaatgcactacgttgtatgctttaagtggtttattgtatattaatttcacctccataaaaactaa

SEQ ID NO: 464545 - DNA, 445 bp, Homo sapiens
gttcatgagggatctgcccccatgacccaaacacctcctaccagaccccatctgtagattgaggattacatttcaacatgatatttggaggagaaacgtcatctaaactttatcagagagaaatgaatgtaaactccgcagaagtatgtagactctgctacaagatcatagttcacctcaactactttatagataacaacttaaatattaaggaaacattaagttttccctttgaaatattgtttcaggtcctgcatgccagtaaaactactcatgtcagctgttctgcaggatcccatgagaagcctctcaccctccacaatccccttaaaaactgtagcccagaactctctggaatgatgaatttgaaggtttgctcctgtctcctcactcagaagcctgtaatcattaaactctttctctgatgcaaactctgctgtctcag

SEQ ID NO: 464546 - DNA, 393 bp, Homo sapiens
cagtggtgcttcaggatattgtgaatttgggcttctgaaagcagaattctgatttaacagtataatggaattcgtgaacgtcatgatgctaatttgaaccaacaagcacccttgtgagaggattctgcttttcctcaagtctgaagaacaccaggagaatctttctgtatggagttaccaggaatcctctgctaaggtcctgcatgccagtaaaactactcatgtcagctgttctgcaggatcccatgagaagcctctcaccctccacaatccccttaaaaactgtagcccagaactctctggaatgatgaatttgaaggtttgctcctgtctcctcactcagaagcctgtaatcattaaactctttctctgatgcaaactctgctgtctcag

SEQ ID NO: 464547 - DNA, 1116 bp, Homo sapiens
ttgagtgccacctccaccactcaataaaacccccacattcaccatcctcaagtctgtgtgcaacttaattctttctggatgctggacaaggaactgggtaccaagagggcactgaacaggttaacacttaagccgtctgtggatggcaaagttaaaagagtgcactgtaacacatgcccacttgggctgtgggagtcgcaggaacccacccctagacagtaccatggccacttgccctgcctattgcacctgcctgtctgcatgctcccctgcccaacggagattcactcttgttgcccaggctggagtgcaatggcacaatttaggctctccacaatctctgcctcccagattcaagctattctcctgcctctgtctcccaaggagctgggattacagatgaaagcaccattatcaagtcagaagagcacaagtcaaaccactgtaagttgaggactctctgtactttcttaaatgtttgatagaattcacctaagaaagcatgtagcctgtaagtatagaaatctttttaaattaaaaaaaattcttcaatacatagagaagctattactttttctatttcattttgcatcagttttaagaattagttttacaaataatttcccatgttattttaattgtcaaatgtattggcctaaagttttcataattatattgatgtctgtaggttctgtagttacatcttctatttaattcccattatctacattatgtagcttctctaaattttttcgagataaatcttgctagccattgtttattaaaaaaatttttttcaaagaaccaatttgtgggtatattaattagctccaccttttgttatttgctatgttgttggtttacatttttatctttatcatcttccttcttcttaatttggatatactttgctcattttttagcctcttaaaaaagaacctaaaggtcattgattgaagccttttattttcagtatattacatctataaatgtacctttaagaaaagatttatctgcatcccccattttattaagtttttaaaaattttctttcaacttaacctatttttttttttgcgtgtgaaaactttttttggccaatgggtttttctgaag

SEQ ID NO: 464548 - DNA, 996 bp, Homo sapiens
tctgaactctcgggcggcggcgaggacggcgtgtccactgtcgaggcatgaaggctgctgtgctggaccttgggtctctcttggccaaactcttcgagacctcgacggcgccccccgcaggcccctcctccagaccctcgggaggtgctgccgctgcagggtcggggggctccagggcgggcaccccgttgggtaccgccccgaccctcctccgcgccctggctccggactccccctccgcctcgcggcggtcgcccgccccgctgctctcctccccctactcccggggctccgccgccagccgcgccgcgggagcagtggggaccctgctctcttggcccagtagccctagagcgggtaaagccccgccccagccccccactccctccggcgggggctgctcccctgctcgcctggtggtcccagcgcggccgccctcgggccccggcggggtctgggccgcgctccccaggaacccgctccagcctggccccggagagcgagagctcggcgcctgcgtggcccccggggctggccccagaaccctgttccttacgctgcctgacatcggcgaggagggggcctcggacggcgactccggggatggcgaagcgttggagtgcagtggtatgatcactgttcattgcagcctcaacctcccaggctcaagcgatctgattctcccgtctcagactctcgagtagctgggactacaggtgtgagctactatgcctggccaattttaaaaatgtttctgtggagacggggtctccctatgttgcccaggctggtcttgaactcctggcctcaagcaatcttcccacctgggcattgctgggattacaggcatgagccactgcatctggccatgaaattgaattttagaagaggactgtcagaaggacgtagaaggcacggttttactgtgaggagcaaagattctttacctacgcattttacaagaaatgtgcagaaagccattgataaatatacctg

SEQ ID NO: 464549 - DNA, 1068 bp, Homo sapiens
tctgaactctcgggcggcggcgaggacggcgtgtccactgtcgaggcatgaaggctgctgtgctggaccttgggtctctcttggccaaactcttcgagacctcgacggcgccccccgcaggcccctcctccagaccctcgggaggtgctgccgctgcagggtcggggggctccagggcgggcaccccgttgggtaccgccccgaccctcctccgcgccctggctccggactccccctccgcctcgcggcggtcgcccgccccgctgctctcctccccctactcccggggctccgccgccagccgcgccgcgggagcagtggggaccctgctctcttggcccagtagccctagagcgggtaaagccccgccccagccccccactccctccggcgggggctgctcccctgctcgcctggtggtcccagcgcggccgccctcgggccccggcggggtctgggccgcgctccccaggaacccgctccagcctggccccggagagcgagagctcggcgcctgcgtggcccccggggctggccccagaaccctgttccttacgctgcctgacatcggcgaggagggggcctcggacggcgactccggggatggcgaagcgttggagtgcagtggtatgatcactgttcattgcagcctcaacctcccaggctcaagcgatctgattctcccgtctcagactctcgagtagctgggactacaggtgtgagctactatgcctggccaattttaaaaatgtttctgtggagacggggtctccctatgttgcccaggctggtcttgaactcctggcctcaagcaatcttcccacctgggcattgctgggattacaggcatgagccactgcatctggccatgaaattgaattttagatccacgactactcacattcccttcctctcatcataccccactcctttttcaatcactaaaacataagagacaaaggggaaggaagaaagtattaagacggcttttctttcaatactgcagactttgcaccttgaaggattctttttccctcctggatttctgtggtagtgatttataacacc

SEQ ID NO: 464550 - DNA, 820 bp, Homo sapiens
tctgaactctcgggcggcggcgaggacggcgtgtccactgtcgaggcatgaaggctgctgtgctggaccttgggtctctcttggccaaactcttcgagacctcgacggcgccccccgcaggcccctcctccagaccctcgggaggtgctgccgctgcagggtcggggggctccagggcgggcaccccgttgggtaccgccccgaccctcctccgcgccctggctccggactccccctccgcctcgcggcggtcgcccgccccgctgctctcctccccctactcccggggctccgccgccagccgcgccgcgggagcagtggggaccctgctctcttggcccagtagccctagagcgggtaaagccccgccccagccccccactccctccggcgggggctgctcccctgctcgcctggtggtcccagcgcggccgccctcgggccccggcggggtctgggccgcgctccccaggaacccgctccagcctggccccggagagcgagagctcggcgcctgcgtggcccccggggctggccccagaaccctgttccttacgctgcctgacatcggcgaggagggggcctcggacggcgactccggggatggcgaagcgtgagtagcagcgtggtccgggcgcgtgtaccttttgccgggacccccgacccctccgcctgccgcactcaccttcgcaggtgcacttcaggaaatgaaatatttgtagtaactttcataaccccctgggcaccctccttgcacgtttcctgggtttttactccttggctttgcgggctttcagacataagctgtgacatgctttgt

SEQ ID NO: 464551 - DNA, 4015 bp, Homo sapiens
cagccaaacacttcacccacccatgaccctccaactgtcccgctacagcaggggatgggggttgtcttccgatcgacctcggggggcaaaggcaaaagtccctagctgcttcggaaccgctcctcgagtcctgaagccgctccacgcctcctcgcccaccacttggtccccgcaggacgtggcagtctcgggctccagcctggaaaggagcccgcccgggtgccgtcacccgccccgcgcggcctcacctgccgctccccggaaatctcagcgctgccctgcccccgcccccaccctcccgcgtcctccaactcgaggccgcgacttccgccttcctgcttccggtctggcggtgagtggggagtgggatccgatcccgtggggctatgtaggggaagttggtggctgcagctgccgtggttttctcctggtgtccagcagaaacggcggcggcgcaaggtgtggctgggccaacccaggatctcccaggaccctccgctctgcgcgacaaggggcccgcgcttgccaaggccgacgggcaggagtgaacgtggcctccgtgggtctgcagccccgataggccaattgtacagaatttaaaccgtctctcagatgtgtacagtagaactcaagaagacagactaccaagggtcatctgaagtcgtgattgggtcactaataacaccaggacaaagttaagggatcactactcaagcataagccccagttttcataagactgctgtgaagatgtttgatataaaggcttgggctgagtatgttgtggaatgggctgcaaaggacccctatggcttccttacaaccgttattttggcccttactccactgttcctagcaagtgctgtactgtcttggaaattggccaagatgattgaggccagggagaaggagcaaaagaagaagcaaaaacgccaagaaaacattgcaaaagctaaacgactaaaaaaggattgaaggactgaacaggctttgcaaccagaggaaaatcatttggaaaattacacagctttggaagaatccactaaagtttcttctttggatttcttgacagtatgatttagtaaatgaaatttgaccaaatggaagaatcatgttagttctgacctcaatactatagtaacttttaggcgtgggtgtagaagtttataggtttctattgacagttattgtaaattagcatttactgtggtacaaattctttataactgacttagtcatttgccgcttagcagtttatatactgaaatgaaaacatcttgtggggaaaagtgactttagattatgaactcaattcaaatgaactctatttaaaatggggtcctattttggacaaaggaaattaagaatgtaaaagtcagaacagtcttgaggtaaaaagtgtgctttggcttaaaagggatacagtatattaattacatcttttattattattgtttatttcttagaatcatttctggctttctcaaaacaaaataatattaatgagtacttctatttgctgcatttttcttattacagcctttgagacagctggtaattataagtcattttccattttttaaaacataattttataaagaattctcttatctcgactatgtagaataccacctactggacagaacaatttttgtactcacaaacactgccattttcttagagatggcttgagaggagtaacactatggtttaaagcttgcagtaaaaatgccaaacactgtagtaccttggaacccagtttattcttgtgctaagcagaactgtaaaatagttaaaatgtcttatcaagtaattcgccgattacaaagacaccatttgttttttatttcattctttgttttaactcatgtggtagtgatatttaatactttctgatcaaacaggttcaaagtaaaacgttaaatttcacatttcttttaaagaactcttaaagtgtaacagttacgccatacttcataagtggtaaagaaaggtataaaatttggaaacattttgttgggcatagtagtgattgggtgaaaaggataaattatatcaaaatgagaatgtgctgtaattggaagtagggagctaaaggatgtttctttcagtttagtagaactggaacgttttactattaaacatggcttttataaatgcatggtccaataattttattcactgttagtatttaattcactgtcagcttattaatgttttctgtacccattaatgaattttaaattacaaaaaattgtctagcagctacagtttaaaaatgaaactagacattaaaataaatttgataattttttataaagaggtcctggattttttttttttttttggaggaactaacattttaagttacattatgttatgcaagttagaatttcagttacagctaagcatacttgtaaaatttcaggactgtatctctcagaacctaaggaccactgagaatgtttatggaccagtttgaataacacttaatgctattcttttagattatcagtctctacttggtgccagtgtgagcaacacattataactcaaggcactgaaattattcagtgttaagatatatctataatatgtttggttttctgcaatcaagctgttcatggaaagaatttatgtacatgttttacttagggtcacattttagagtaaaagtattgaagcaaaggatatagtcataattctcagttacctactaaagttatggtttcatcagttctgttgtaacaacttaaaggtatttaaaggtctgtttttctataatttattagtcttaacacatgccagttttgtatttgtttgacatatgctttttttttccacttttttccatcatttagagagcctttctatatatgtgagattcatactttacagtgtgtgtgtgtgtgtgtgtgtgtgtgtgtgtgtaaggggctggagtatagagaatattgtgaggtttgggattcttcagaaaaatcacctctcactgcaacagagtactgttgttaaagaatcccatttgctattatctagaatacttttaagaaattgtttacttattacattgtttctgaagttctgagaactaagtacaatcaattaccattctaaagctggtcttgggggagaaagaaagctgtcccctggctgcctctaacaaacattttatcaaaaatcagcaaataaataaaagtttgtatgtcagaacttgagccatagtatccatgataactttcagcatattactagttatcagatatataaggacattttaaattttacttgtttataataagcaaactagaaataagcacaggaggccgggtgcggtggctcatgtctgtaatcccatcactttgggaggccaaggcaggcagatcacaaggtcaggagttcaagaccagcctggccaacatgatgaaaccccgtctctactaaaaatacaaaaattagctgggtatggtggcgtgcacctgtaatcccagttactggggaggctgaggcaggagaattgcttgaacccaggaggtagaggttgcagtgagccaagatcatgctactgcactccagcctggcgacagagcaaggctctgtctcaaaaaaaagcacaggaagctgtgggctggaaacctaatgttgaaatagaccttatattttatatggttctaagttggaggcaatttgatcctatttaggaatgattgcttttatatttgctactggttatagaatcatgctgatttacttcatatctggaataaatatttaaggacaaattctgcatttctcaaacatattaaaagggatcacatggtcaaatacccaaagtttgggaaacacagactatatggtaaacatttgcaaaaggtgtatatggaatgcaattaatgagataacaggaatttggcagtagaaacactagtgtgttaaaacatttacagttttctctacaatccagtctaggagttaagaacatcttaatctcaattcacagtcccaactatatcaca

SEQ ID NO: 464552 - DNA, 2134 bp, Homo sapiens
tgcgcatgctcagctcagctcggccctcgcctttgatttattttttttctgggcggccgctgcgacccgggactgacttcgggatgggaagtggagcccccggagctgctaccgtggcggcggcgctgtgaggagcagccagggggaggcagctgcggctcgccggtgagtatccgggaagcgccaccatggggctccgtaagaagagcaccaagaacccccccgttctcagccaggaattcatcctgcagaatcatgcggacatcgtctcctgcgtggggatgttcttcctgctggggcttgtgttcgagggaacagcagaagcatccatcgtgtttctcactcttcagcacagtgttgctgtccctgcagcagaggaacaagccacgggctcaaagtccctctattattatggtgtcaaagatttggccacggttttcttctacatgctggtggcaatcattattcatgccacaattcaggaatatgtgttggataaaattaacaagagaatgcagttcaccaaagcgaaacaaaacaagtttaacgagtctggtcagtttagtgtgttctactttttttcttgtatttggggcacattcattttaatctctgaaaactgcctgtcagacccaactcttatatggaaggctcgtccccatagcatgatgacatttcaaatgaagtttttctacatatcccagttggcttactggtttcatgcttttcctgaactctacttccagaaaaccaaaaaaacaagacatccctcgtcaacttgtctacattggtcttcacctcttccacattactggagcttatctcttgtacttgaatcatttgggacttcttcttttggtactgcattattttgttgaattactttcccacatgtgcggcctgttttactttagtgatgaaaagtaccagaaaggcatatctctgtgggccattgtgtttatcttgggtagacttgtgactttaattgtttccgtactcactgttgggtttcacctggctggatcgcagaatcggaatcctgatgcccttactggaaatgtaaatgtgttggcagctaaaattgctgttctgtcgtccagttgcacgatccaagcctacgtaacatggaacttaattactctctggcttcagaggtgggtagaagattctaatattcaggcctcatgtatgaaaaagaaacggtcgagatcttctaaaaaaagaacagaaaacggagtgggagtggaaacttcaaatagagtagactgtccgccaaagaggaaagagaaatcttcataatctttgcaagcgcattgattaatgtctgcaaaggaatctgctctttgaggtttctttctgcactagagatttttctgtttttgaaaatagttcgtgctcttcggtttttgttattgaactgtttcatgtattttttaaagacatttgaggggaggaggattattatgaatgggaaaaaaagattttggttgagactaaattactcatcgtcaaaataatgtcaaaatagttttggggatcaccactatattttgttttgatttttaacctttcaacattttcctaatgatttgcagagataactgcacaattttgcatatcaatgatactggttcttactcccaccagtgtttcataatactaacaagatggtctctcctagcaagattatgtgtttaatgcttgctttggggtaaaataaaagtacgaaaaaggtggaagtcaaatcagtattctgtaattgttagaatttattttttaagaacttacaactcagaaaagattgctagactcaccaaaataataaatgttctttattttacagagctctatggcagttaaagaagccatttaatcctacaatacttttattttgtgatggttgtctccatttagtgtactttagcctgccataaaagagattttatttataacaaacacagattaaggggaaaatcctaaaattcacatgaaatttgaagggatcttgaatagccaaaacaatctttaaggaaagaaaaccaagtttaaaaatctcacaattccttattccaaagcatattacaaagctgtagtaataaaaacagtgtggtactggcataaaaagcagacatat

SEQ ID NO: 464553 - DNA, 2333 bp, Homo sapiens
tgctagctctctaaaggaatgaaaataaccttgggttctcactaagcatcaattctgtgactggctctgtggggtagagatgaaaaggctcactcagttccagcccctgcagatcccccaggaccctggcagcagcagatctatgagcccacatttccccctgcttgtgaggatcacaccaagagagacattcacatcctggcctcacaaagaagagatggcaaagtggaaaaaggccggagtccccaaccctgagccctttaccctgtctcagtcttttataacgaggtgtgtgtgcttgggcaatgcctctctcttctgggactcagtgtacccatctctgctgtggggaggttggactagatgagagtttcccaaactccagttgtttctttccctccctccacacctggagatcagaacacctgtactaaaaagtactgaaaatctttattcaaatgagctcactttttttcaaccaaaataaacttattttagagtgaaactttattgctaccataaatgggaaaaaaatggatctgctcagcactggtatcctgcctgctgtgtgtccagggaggtggctggtaggggctgcaccaatgggctccctctccctctggcttcatgttaggtttggccaatgagaagctctggtttccctgtacttagagcgtggactgtgaacccccaagcagacgctgaccttcttagatcactgtgggtcaaaaccactctgaggggctggccgttggactgttggagctcagtgtaagcaaagtctcttctctcagcagcttttctgggagactgaaaattggtcactattcctagaggtctacttggtactgactctttatttcttgcctaaatgtcttgggactccgtgctgtggtagatgttagcaagggagtcaaccaaataaagtcctgtgggcctgcttccatcctgcctctcatagaaccctcacagccactctgggacatagccaggcgcgccgaggaggcttggagtagcagggctgatcgatgccgggaggctccttgcggctgccagagccgtagtcatgggtgggggcggctgtgggctctgcagcagcggctctctgtgtctctgccctgctgctggcagccagagttccagacagctccctgccctccagaccctcagcccagagtcccagagcccagggcacaggagaggcctgctcctgggttacagcttgcctggtacacacccaggaggggctatggctgtttcgattggaggaggaaacagctcagagtccgttcctgctcattccatgaagcagcggcaggacttggctctgccaaaactcaaggctctgttctgggctttccactgcctgggcttattcaaccctcacacaagtggatcagagaggagaagcaactggccagtgtcacacagccagtacgtggtcaaccagcttcctgccgaccgccaagccaagattcttgagagatctcagcagggcaagcccgcaaggccggacctggtgcacagtaggctcacagacccacaggggtctcctggctggcaccctgtgcttcctggttttgtaggctccgagaatgtccaggtattggaagctggggtgttgctgggtggcccagcaggggctcagggcagagctagtagagggcagtgcaggggtgtggcccccatggccccccaccagccccagcccctctgctctccaatactgtgctcctaccacctggtggtttcttgcacagaaatggtgcactgttcagcaaggcggtacagatgaaactctgaattgaaaggcctgtgggaaagcctagcacaagctacctctcccaccttccccttggttctgtgttatctcaaatgtcttcttctcaaagaagccctccagaatccaggagcgtgcatggttgggaggcgtagaagccacacttctttgtattccctccaaattttgtcacttaagaacacaaagcttgtgacattaggctacatgtataacttgtgtcatccttcttaatcttggtaacaaccaatgaaagtactgtaattacctccacttcacaggaaaccctggttctcttttgaaactaagccagggaggagcaaacgccaaggaattcacaatcctgtctgggactttctgttttcctctttgaagaaatatgagcttttttgattgctactaaagtgatgcttaaccgttctacagtgacagcttctccctctgcatctgttatatggggcatgctactaaaaatgttctaagaactttgatttcaaagccttggcatctcccttgaagaaatcagagacacatt

SEQ ID NO: 464554 - DNA, 1092 bp, Homo sapiens
gttttggacactatcagctattgggatggctcctcagttagtaacagaagctctcaacacacatgtgctcgccaagaaccatatcaacgatggcagcatcaccagacttcaagaatttagggtcatcttccagctttttaccagaacagatatcaatcttttccttcagctcagcaaagttgcatgcaatgtgagctgtgtggcaatccagcacaggggcatagccagtgctgaactggcccggatggttcaggataagcacctgagcggtgaaaccagctgcttccactggtgggtcgttttttctgtcaccagcaacgttgccaggacgagcatccttgacagacactttcttgatattgaggcccacattgtccctaggaagagcttcactcaaagcttcatggtgcatttcgacagattttacttcagttgtaacactgaccggagcaaaggtgaccagcataccaggtttgagaacaccagtctccacttggccaacaggaaaagtaccaataccaccaagggcttgtcagttggacaagtttgtggggctcttgggcctttggccacagactgaaggctgcactgaccattttcctacttttgaggttttgggacttggactgagccgctactggcttccttgctcttcaacttgcagacagcctgtagtgggacttcaccttgtgatcatgctgctgactaacttaatgaactgaacggattaaaatggtgcaagagaaaagggcatttttacacaaaaggaagcattttctgtgttccagttcagctgttccaatgacatttggtggtgttatcagtgtgaattatacaagcaagtttctttatccagactgacgcatcaaccatgatctagcatttgcaagatgtgtaattactttgactttcaagaaaacatcttctgatctaaggaacttcccaagatatcaaagctggctggctcaggaatactctcacagtgatggcagaagagcaaatctggaagttcaaacactcaaatgtgttgttggatttctgcatgcatcacatgggctaacaactggtcaaagcaaatcacatggccaaact

SEQ ID NO: 464555 - DNA, 669 bp, Homo sapiens
gagctaaatatggggacttcaaacagaagcacagcttgtccccggccaagcagccaatcaaatttccccaaacagcagctgtttcggtggaatttggtgaaaaggcatatagagggcggctttgaaggaaggaactggagggtaggagctggtaagaggcctcacgctgctgacaggctggtggagggaggcgcttggcttgctccctctgagtcactgccattcccagtcacatggtgtaagcagcttggctttgccccaagaacctggtgggggcagataaggagcctcccatcatgcttgagtccagcctcactctctggaaaagtctggcctcctgcggcagccaagcatggcaggcctctgccaacagaggttaagccaagcatcctcagaccatgtcccagctccagttcaatctgacctgcgtgccgagattagcagccagctagtggagtgaaaagggatctcctcaacttgcttcccttttgccttcctcaaaggaagagctaagaagaggaggccaggaaacagctcctaccttaagtgcatctgatgacaaatgactcaaacaccactttgcagaagtaaaggtgctaggctgagtctttgtaacaactggacccagaagggcactgagaaacacacagctgctttctgttgaagact

SEQ ID NO: 464556 - DNA, 375 bp, Homo sapiens
gattctgaggcctccccagccacgtggaactgtaagtccaattaaacttctttttcttcccagtctccggtatgtctttatcagcagcatgaaaacaagactaatacacccccacaccatggtaccgaagacgggacacagctgctctactgattaaattcaactgacgtgaggttgcagctattctattcatatattcaccatcccattcttgatgatgttcctcaagcttacttaacttgcacgtggatgcagaagaaaggtttcttttgaaagactgttgtaaataaaagagtctgtagtgcttatgttgttgtttgttgactgactataaaatagatccttgctgatttgtacatttgatttcccatgggg

SEQ ID NO: 464557 - DNA, 822 bp, Homo sapiens
catcccagtataaaatgctttctcataccagcttgctagtgcttcacatgccagcaacaaacggaaaaaccctccatttcacaattccaacctcatgcatgatacttgagtatctcagatcccctttgactttaaaattcaaattaggttacacaccgctggattcagcgtgcacccaggagccagcatttaacagcagtggtgaacacagacacacgggggctgtagggtggtggaatgggggttgtgtgccctggatttacaagaggatccccgaagctacagaatcacagatgacgcggagctgcgtgaaggcgtctctgggcgagtcccacagggaagatgaaaagcaagcggcccggaagggcccgagggcggagcgcaggctcacgggacacagcgcgcaccaatgatgagcaaactgaaccagcgtcaggaggcgccagttaaactcaaatgtttcagctcaacaaggcctgtgaggtggttcctatttctccagttttacgttctccggtatgtctttatcagcagcatgaaaacaagactaatacacccccacaccatggtaccgaagacgggacacagctgctctactgattaaattcaactgacgtgaggttgcagctattctattcatatattcaccatcccattcttgatgatgttcctcaagcttacttaacttgcacgtggatgcagaagaaaggtttcttttgaaagactgttgtaaataaaagagtctgtagtgcttatgttgttgtttgttgactgactataaaatagatccttgctgatttgtacatttgatttcccatgggg

SEQ ID NO: 464558 - DNA, 828 bp, Homo sapiens
  misc_feature (1)..(1): n is a, c, g, or t
  misc_feature (53)..(53): n is a, c, g, or t
  misc_feature (213)..(213): n is a, c, g, or t
  misc_feature (218)..(218): n is a, c, g, or t
  misc_feature (226)..(226): n is a, c, g, or t
  misc_feature (235)..(235): n is a, c, g, or t
  misc_feature (248)..(248): n is a, c, g, or t
  misc_feature (253)..(254): n is a, c, g, or t
nttaaatgttagctatagcaatcaaacgcacctattagctgatgtcagagcgngactaaactatcgtgctgtacaaacaaaaagttttttttacgccctttattatcgggtctgtctggtaatagcgaaaattctgataactgatagaaatattatttttacagggacaacttgtataaaatcactctacaaagaaaacaaaaatttgccttnacatnaaccagtncctaaggancagcccgattaantccanntgtgatgggaattgcagtgataccagaggcttagaaatcgctataaagcaacgtgttgatgatgcactcacttcaaaacttccaatgttttacttagtcaacagacctcatattagtttagtaccctctgcatatccccttcaaatgaacttggaatataaatttctgagtctgaattgggcacaaggagatgtttctttggagattgtggatggcctgagtgggaagatcactgaaagttccccatttaaaagtggtatgtcaatggcaagtcggctttgtaaggctgcaatgttaagtcggtttaacctgcttgccaaagaagctaaaaaagaattacttgaagctggtacatatcatgcagctaagtgtatgtctgcctcctatcaagaagctaaatgtaagttgaaatcctacttacaacaacatggctatggatcctggattgtgaaatctccctgcatagagcaatttaacatgtgaaataggcaatccattatcacattaaaaatcttgttttgtttggtgtgttttgactagtaaaaatgtttttaaaatattggtggttttcaac

SEQ ID NO: 464559 - DNA, 2046 bp, Homo sapiens
tgccagttcaaccagcgacaaagacgataactacacccacaggatggtcctcagaaagttacggcctgtccaagatggcatccaaggttacgcaagtaattttccagagccgttgctttccaagaatctttcatctatttcaaatcctgtccttcctccaaaaaaaatacctaaggaatttataatgaaatacaaacgtggagagataaatcctgtgtcagccttgcaccagtttgcacaaatgcagcgagttcagcttgaccttaaggaaactgtgacaacaggcaagtgtaatgttatgggaccatattttgccttttgtgctgtggtggatggtattcagtacaagactggactgggacaaaataaaaaggagtctagatccaatgcagcaaaattagctcttgatgagcttctacaactggatgaacctgaaccacgaattttagaaacatcaggggctcaggcccagggagatccaaattctgtccctgagcctctagctggagttattggagatcctccagggaagccccgcccaatgaggaaggatgggtcaggtttaggcctgaagaggccctttggccacagactgccacagccgatcgttaaagaaagatttaatcaactaatttctaatcgttcagaatacctgaaatatagcagttcattggctgcttttataattgaaagagctggacaacatgaggttgtagctataggcacaggtgaatacaattacagccaggacattaagccagatggaagagtattgcatgacactcatgctgttgttacagcaagaaggtctcttcttagacgtcttaatccacattctatatctgcatttgaagccaatgaagaactctgtctccacgtggctgttgaaggcaaaatttatctgactgtttactgtcctaaagatggtgttaatagaataagcagtatgtcctcaagtgacaaattgaccagatgggaagtgcttggtgtacagggagcattgctgagtcattttatacagccagtttacatcagcagtatacttattggtgatgggaattgcagtgataccagaggcttagaaatcgctataaagcaacgtgttgatgatgcactcacttcaaaacttccaatgttttacttagtcaacagacctcatattagtttagtaccctctgcatatccccttcaaatgaacttggaatataaatttctgagtctgaattgggcacaaggagatgtttctttggagattgtggatggcctgagtgggaagatcactgaaagttccccatttaaaagtggtatgtcaatggcaagtcggctttgtaaggctgcaatgttaagtcggtttaacctgcttgccaaagaagctaaaaaagaattacttgaagctggtacatatcatgcagctaagtgtatgtctgcctcctatcaagaagctaaatggagtatacaaagaggattagggctagaacctcaaggaacactcaaatattggatttggaaaaataaggaaacatggagttatttgacaggtaagtgtagagtgaggatagcacaaagagaataaaataagcattctaaagtgctgcagaggggtcaaggagaatgagaactataaaaataacttttgatttggcaaccatgagttcactggtgtctaaaacagcagttcgcaaacctggttgctcgggagaagcaccactccaagatagtctgagcaaatcaggggaaagttcccaaatctgcattttgacaagttattacaggtgatttgatacaggtggtactttgtccacactttgaaaaataccaccctgcagaataataataaaaagtagtatcagaattgagattggccatcattaaggaatgaatggaagatgagaagttgtaggcaatgtctgcattctattcttcctagcagtttggtgatgagaataatatggttaggatgttttaaatgtttgtttaaagtgctgggattacaggcatgagccaccatgcctggtccataaattttttaaaaacacacaaaaagca

SEQ ID NO: 464560 - DNA, 2942 bp, Homo sapiens
tgccagttcaaccagcgacaaagacgataactacacccacaggatggtcctcagaaagttacggcctgtccaagatggcatccaaggttacgcaagtaattttccagagccgttgctttccaagaatctttcatctatttcaaatcctgtccttcctccaaaaaaaatacctaaggaatttataatgaaatacaaacgtggagagataaatcctgtgtcagccttgcaccagtttgcacaaatgcagcgagttcagcttgaccttaaggaaactgtgacaacaggcaagtgtaatgttatgggaccatattttgccttttgtgctgtggtggatggtattcagtacaagactggactgggacaaaataaaaaggagtctagatccaatgcagcaaaattagctcttgatgagcttctacaactggatgaacctgaaccacgaattttagaaacatcaggggctcaggcccagggagatccaaattctgtccctgagcctctagctggagttattggagatcctccagggaagccccgcccaatgaggaaggatgggtcaggtttaggcctgaagaggccctttggccacagactgccacagccgatcgttaaagaaagatttaatcaactaatttctaatcgttcagaatacctgaaatatagcagttcattggctgcttttataattgaaagagctggacaacatgaggttgtagctataggcacaggtgaatacaattacagccaggacattaagccagatggaagagtattgcatgacactcatgctgttgttacagcaagaaggtctcttcttagacgtcttaatccacattctatatctgcatttgaagccaatgaagaactctgtctccacgtggctgttgaaggcaaaatttatctgactgtttactgtcctaaagatggtgttaatagaataagcagtatgtcctcaagtgacaaattgaccagatgggaagtgcttggtgtacagggagcattgctgagtcattttatacagccagtttacatcagcagtatacttattggtgatgggaattgcagtgataccagaggcttagaaatcgctataaagcaacgtgttgatgatgcactcacttcaaaacttccaatgttttacttagtcaacagacctcatattagtttagtaccctctgcatatccccttcaaatgaacttggaatataaatttctgagtctgaattgggcacaaggagatgtttctttggagattgtggatggcctgagtgggaagatcactgaaagttccccatttaaaagtggtatgtcaatggcaagtcggctttgtaaggctgcaatgttaagtcggtttaacctgcttgccaaagaagctaaaaaagaattacttgaagctggtacatatcatgcagctaagtgtatgtctgcctcctatcaagaagctaaatggagtatacaaagaggattagggctagaacctcaaggaacactcaaatattggatttggaaaaataaggaaacatggagttatttgacaggtaagtgtagagtgaggatagcacaaagagaataaaataagcattctaaagtgctgcagaggggtcaaggagaatgagaactataaaaataacttttgatttggcaaccatgagttcactggtgtctaaaacagcagttcgcaaacctggttgctcgggagaagcaccactccaagatagtctgagcaaatcaggggaaagttcccaaatctgcattttgacaagttattacaggtgatttgatacaggtggtactttgtccacactttgaaaaataccaccctgcagaataataataaaaagtagtatcagaattgagattggccatcattaaggaatgaatggaagatgagaagttgtaggcaatgtctgcattctattcttcctagcagtttggtgatgagaataatatggttaggatgttttaaatgtttgtttaaagattacggagatttctgccaggcgaggtggctgacgcctgtaatcccagcactttgggaggccgaggcgggcagatcacctgaggtcaggagttcaaggctagcctggctaacatggtgaaaccccgtttctactaaaaaatgccaaaaatgagccaggtgtggtggcacgcacctgtaatcccagctactcaggaggctgaggcaggagaatcacttgaacctgggaggcggaggttgcagtgagctgagattgcatcattgcactccagcttgggcaacgagcaaaactcagtctaaaaaaaaatttttggagatttcgtgtacatgcatgaatttatagtggagccacctaatgtgatttttacaacttgttttgggtcctaatggatgttagccaggtcagagaattgacccagctgtaattgggtcagctgtgattatagagaatctaggctgatatgaatatattactgaaatggctgaagccaaaatgagggaaataagagtaaagagaagaattgagtggaagtaaagcagtttcattgagtaatgggcagattatgttcagggtattttcagtgtgagttcatagaaatttaaccctggcctgtattttttcatgctcccctccaccttatccccaactgaactcaattattagcagaaatagtacagtagttaaaatagacatgaatgatggcttatgaatggagacttaatagtgggttgttttagcctttgagaggtgtgtatgggccctgagacagctagagccctggacagttaactctggcctcaggcagcctgttatttactccactgtgcaatgccattttcttatctgtgccatggcataaaagacaaatagaatctagaatattcatttgatcttattgaagcttgtttttagtctttgttagggctggtatatttcagatttgtccttattccaagacatgtt

SEQ ID NO: 464561 - DNA, 1728 bp, Homo sapiens
tgccagttcaaccagcgacaaagacgataactacacccacaggatggtcctcagaaagttacggcctgtccaagatggcatccaaggttacgcaagtaattttccagagccgttgctttccaagaatctttcatctatttcaaatcctgtccttcctccaaaaaaaatacctaaggaatttataatgaaatacaaacgtggagagataaatcctgtgtcagccttgcaccagtttgcacaaatgcagcgagttcagcttgaccttaaggaaactgtgacaacaggcaagtgtaatgttatgggaccatattttgccttttgtgctgtggtggatggtattcagtacaagactggactgggacaaaataaaaaggagtctagatccaatgcagcaaaattagctcttgatgagcttctacaactggatgaacctgaaccacgaattttagaaacatcaggggctcaggcccagggagatccaaattctgtccctgagcctctagctggagttattggagatcctccagggaagccccgcccaatgaggaaggatgggtcaggtttaggcctgaagaggccctttggccacagactgccacagccgatcgttaaagaaagatttaatcaactaatttctaatcgttcagaatacctgaaatatagcagttcattggctgcttttataattgaaagagctggacaacatgaggttgtagctataggcacaggtgaatacaattacagccaggacattaagccagatggaagagtattgcatgacactcatgctgttgttacagcaagaaggtctcttcttagacgtcttaatccacattctatatctgcatttgaagccaatgaagaactctgtctccacgtggctgttgaaggcaaaatttatctgactgtttactgtcctaaagatggtgttaatagaataagcagtatgtcctcaagtgacaaattgaccagatgggaagtgcttggtgtacagggagcattgctgagtcattttatacagccagtttacatcagcagtatacttattggtgatgggaattgcagtgataccagaggcttagaaatcgctataaagcaacgtgttgatgatgcactcacttcaaaacttccaatgttttacttagtcaacagacctcatattagtttagtaccctctgcatatccccttcaaatgaacttggaatataaatttctgagtctgaattgggcacaaggagatgtttctttggagattgtggatggcctgagtgggaagatcactgaaagttccccatttaaaagtggtatgtcaatggcaagtcggctttgtaaggctgcaatgttaagtcggtttaacctgcttgccaaagaagctaaaaaagaattacttgaagctggtacatatcatgcagctaagtgtatgtctgcctcctatcaagaagctaaatggagtatacaaagaggattagggctagaacctcaaggaacactcaaatattggatttggaaaaataaggaaacatggagttatttgacagcacaccctcccacttctgcatataccagaatccacacaatctcaaatcctgcagtcagccctgtagaacccacataaattggctctctctataggccccttggacgttccagtctattgaatgttttatggatttgcttgttctacataattcacttaagtggaataatataatatttgtccttttgtgt

SEQ ID NO: 464562 - DNA, 988 bp, Homo sapiens
tgcctgtaatccctgcactttggaaggccaaggcaggacgtcccagtggaacagtttgtatagaatggggcactctaccagcaaagaagcagtagataggaacccagagagtaagatggcgttgctctcagagtctggagcctggctcagcataggctatttctaccccagccagttcttgctgaaggatggcttctgcagccagttcagcggcccctcctccaggcaacctacctctagggactccaggcagcatgctggctcccctggccttgtgtggtacagtgggttctcacagcccatggggcgtgaggccacgagtcacctacctggccctctggcatccctgctgaaggctctgttcctggcaccaccaggcagtcctcctggcctcatacaaggaccttccccagcttctgcccatcttgggggagctagagaaccccacggcaatggcattggccctgtggacaccaatgatgtgagtcgaggggtgccaggcagctccctctgctgcaaatccctcccactcaccaaactgctgccgcctgcaattccacaatgagcactttagtcatcaaatcataaaatgtcagcttgtaattagccttggaacctgtctagttcaatttcccagctcagagtgctcttggaagatacctgaacgggccctttattttagagtgaattagtggcagagctggaactcgagtctgaccctgcacagtgaaggacgctagaggcatctgcagcttcttcaatgggaagttggggcatcatatgcctttttgaaattatgtgtattggtaggttatatgatgtgtgaattttcttggaagataaagaaaaaaagtaaaatgatgttggatccaatgggaccaagagccaccagcacagtggatagaaacaaaggccctgtactgaatcctgccctgcctcctaattagctaggaccttgcatatgagcatgaacatcagctcttacccc

SEQ ID NO: 464563 - DNA, 1740 bp, Homo sapiens
aaccagaccagttatgcattacgagagccctcatgggacaagaggaaaagattgaggcaaaaagtctatttaaagaattaatggcaggcagaaaatttcccaaatttgagaaaaaatatggatgtagaattgttttaaaacacaactactgtacactgaaatcaattcaaaaattttacaccaataaatattataatcagtctttcaaaagtcacagacaaagaatattggaagcagaaaaagaaaaaatggatcatgacataaaagggaattcacatgatatcaacaagatacaagaggatatctttttaaaccaaaaatataaagagaacattataaagttatcaagaatttatcatgatcaaccagtgaagcccctggatcgagcagtcttctggattgaatttgtcatgtgccataaaggagccaaacaccttcaggttgcagcccgtgacctcacctggttccagtaccactctttggatatgattgggttcctgctggactatgtggcaacttcttgctttggctatgcagacttcaagctgagaatcaaatcaagaattcaacccttttcacagcagctgaatcaaaaagaaaaagaaaaacataaaatacttagaaatatacccaaacaagaagcccagagaaaggagctgttctcccgcgtccccggtgcccctcccctgacagcacaagggaacccggaggggttgcaggacggttccaggaatggcgccctttcttcagaaccatggtatcataccttggatccaccacagttggctgaaaccggcagcccaggaccagtggaccagccagtaggacccagaccatctgacctggctgatcatgcaatgagaccacgttgccagtggagatgacaacagccctattctggtcactccggaagctgacccgtctatgcacggaagaaggttgaggaaacagcaagccctgctctagtcacactgggagctgactagtctgtgcatggctgaagcttgaagaatcatcatcagatgagcaaatgtggccagaagtcttagtcccagtaatcttctttgtattattcattatattgctataaccaccatgaaataaaatattttatttttcatccacttttatgtggcactcatttttaacatctacacaaaaagttcacatatttatcttttctggttcattaatcaagctggtgtctatttgattttcctttagctgtaaagagaatgttatgtagttatcaatcatttattatgatcagtctctgaagcccttggaccaaaaactcttctggattgaatttgtcatgcaccacaatggagccaagtacctgctgccacctgcccacaagctcacctggtttcagtactgctctctggatgtgctggcctgcacagctcttgttactctctttgtcatactatgatgcttgattatcaaaagtttgttaagatgagaaagaaggaaaagagagtaggtctgtttgagatctaaggcaggcaggcatgataccaaaaattgtgccatttaatgccaccactatgcatcaaggtatggactaaattctttattacattttacaagacctgtgccttcctgatttgtttgaattttttaatctttgttaaacataagtattgtaaaattttattttcagaaaacctataataattcaattttaatgcttatctgtgtatatttttcagctgaaaataaaatgagtttcactgg

SEQ ID NO: 464564 - DNA, 381 bp, Homo sapiens
acgtaattagtacccgcctatgcatctaactatcctaccagggccctggtctgcccatggacattctctgcacacagctattatggtcagtacctgaaagctcagtccctctcctgttctacacaaacaccaatgtctccccagtgcctcacacaccaacttgagactcctgagtaacacacgcatctgcattttcaatcaacgccttgagggactgaatcatctgcaaagggaacatccagacatgagattacacctgacaactagatcccctcctgcattcatgcacaaggctcttctcctaaaacaggctgatgtgatgatattaaacgcttttttatctgactttcaaaaaaaaatactacggcctccttcgcctta

SEQ ID NO: 464565 - DNA, 1350 bp, Homo sapiens
agtctgagcagtcactcacactctccctctttggaactggtaatgggcaaaagttggaacagtttggagagctcagaaaaagacaggaagatgagggaaagtttggaacttcctagagacttgttaaattgttgtgaccaaaatactgatagtgacatggacaatgaagtccaggctcaggaggtctcagatggaaatgaggaacttattgggaactggagtagaggtcacttttgctatgctttagcaaagagcctggctgcactgtatccctgctctagggatctgtggaaccttgaacttgagagtgatgatttaggatatctggcagaagaaattcctaagcagcaaagtgttcaagatgtagcctggctgcttctaacaacctatgctcatatgcacaggaagagaaatgacctgaaactggaatttatatttaacagggaaacagagcataaaaagaccttcctgacagcccctcctatcacagacctgaggcctaggcaggaagaatggtttcatggaccaggtccagggcccagctgctctgtacagcccctggacactgctccctgtagtccctttcttttggctgatttctccctttcgaaacgggattatttactcaatccctatatccccattgtaacttggaagtttccatttgcaaatataattgacccttcaacaacaggggtgttaggggcattgactctgcatgcagtcaaaaatctgcatgtaacttttgactccccaaaaagtttactaataatagcctactttggacctgatggatgctttactggtaacataaacagttgattaacacatattttgtatatgatatgtattatgtactatattcttacaataagaacagtccttatgctggatttctttatcctgaaatagcagtcaactgcagacctcaatctatggtatatactaagcaattcaactctttcttaagcaccttccttatctattgccaactgcctcccatcaggtctgcccatggacattctctgcacacagctattatggtcagtacctgaaagctcagtccctctcctgttctacacaaacaccaatgtctccccagtgcctcacacaccaacttgagactcctgagtaacacacgcatctgcattttcaatcaacgccttgagggactgaatcatctgcaaagggaacatccagacatgagattacacctgacaactagatcccctcctgcattcatgcacaaggctcttctcctaaaacaggctgatgtgatgatattaaacgcttttttatctgactttcaaaaaacaaacaaaaattggcctcgttggtctcagcggagga

SEQ ID NO: 464566 - DNA, 1308 bp, Homo sapiens
agtctgagcagtcactcacactctccctctttggaactggtaatgggcaaaagttggaacagtttggagagctcagaaaaagacaggaagatgagggaaagtttggaacttcctagagacttgttaaattgttgtgaccaaaatactgatagtgacatggacaatgaagtccaggctcaggaggtctcagatggaaatgaggaacttattgggaactggagtagaggtcacttttgctatgctttagcaaagagcctggctgcactgtatccctgctctagggatctgtggaaccttgaacttgagagtgatgatttaggatatctggcagaagaaattcctaagcagcaaagtgttcaagatgtagcctggctgcttctaacaacctatgctcatatgcacaggaagagaaatgacctgaaactggaatttatatttaacagggaaacagagcataaaaagaccttcctgacagcccctcctatcacagacctgaggcctaggcaggaagaatggtttcatggaccaggtccagggcccagctgctctgtacagcccctggacactgctccctgtagtccctttcttttggctgatttctccctttcgaaacgggattatttactcaatccctatatccccattgtaacttggaagtttccatttgcaaatataattgacccttcaacaacaggggtgttaggggcattgactctgcatgcagtcaaaaatctgcatgtaacttttgactccccaaaaagtttactaataatagcctactttggacctgatggatgctttactggtaacataaacagttgattaacacatattttgtatatgatatgtattatgtactatattcttacaataagaacagtccttatgctggatttctttatcctgaaatagcagtcaactgcagacctcaatctatggtatatactaagcaattcaactctttcttaagcaccttccttatctattgccaactgcctcccatcaggtctgcccatggacattctctgcacacagctattatggtcagtacctgaaagctcagtccctctcctgttctacacaaacaccaatgtctccccagtgcctcacacaccaacttgagactcctgagtaacacacgcatctgcattttcaatcaacgccttgagggactgaatcatctgcaaagggaacatccagacatgagattacacctgacaactagatcccctcctgcattcatgcacaaggctcttctcctaaaacaggctgatgtgatgatattaaacgcttttttatctgactttc

SEQ ID NO: 464567 - DNA, 737 bp, Homo sapiens
gggtgtgatcacagctcactatagtctcgatctcctgggcctcccacatcagccttatcactcattctgggggcagccctctggcatgtaatgagcagtcctatggagaggcccatgtgacagtagccatgcgagtgacactggaagtgaaacctgcagctccagtcaagcctttagaagactgcagccctggctgacagcttgacagcaaactcatgagagactctcagcttgaacaactcagctaaactgttcctgggttcctggtcctcaaaaactgttataaaagacattgtggctaccatctctcatcactcactcaaagggaagccaaccaccatgcaatgagaatctcaggtaatgaggacctgagacctgttgtcaatcacgtgaataagcttgggaggagattctccagccccagtcaagcctcagaagacttcagccctaggtgacagcttgatgataatctcgggaggcagaaccacccaactaagccactcctggattcctgaccctgaccctgaccctagaaacagtgtgagctggaattctgtgaagcacatgacctcaagtcttcggataaatggaaacgcagcttatgccggaaagatggaaggctggctgtactaatatcagaaatggaagaggagagacatcactagagatcccatggatattgaaaggataataaaggagtattatgagcattgttaaaatttatgtctcctataagc

SEQ ID NO: 464568 - DNA, 1608 bp, Homo sapiens
cctgcacaaatttgcttgctggcaaccatgtgagatgggactttctcctccttgactttcgccatgattgtgaggccttcccagccatgtggaactcttctttcgtggcaattttcccccaggagggatttccctgcagtggacctcctccccattggtaccttcagccatcagaacacctcgctttagatctgtgggtcccaaatttcatcaaatccaatgaccatttctatgatcactcattctgggggcagccctctggcatgtaatgagcagtcctatggagaggcccatgtgacagtagccatgcgagtgacactggaagtgaaacctgcagctccagtcaagcctttagaagactgcagccctggctgacagcttgacagcaaactcatgagagactctcagcttgaacaactcagctaaactgttcctgggttcctggtcctcaaaaactgtatgagatgaaaaaaaagtttgtttttttaagctgccaagttttgggataatttgttattctaatatattttttaatacctggaaatctctaagcaataatcttttacgcaatcccctttattttgttatgaaaaaagagcctaggtagttcttttaaggtttacttttttgtaaaggttccttttgtatctcttttcactagcagaggtgtctgctatgggtaggattccctctggggttccctttgaccaagcttctgcagccagaagcactgaggagggcactggggtgatgggactgaccctgaggccctgatcacaggactcctaagtaggagttcctctgaggagatatgctaggacctggtttatcaaaccagcaatgggatatctggaaaagccgctggggggctgccaggactgcttctcaacatactgtgtgttaacctgcattaacactgcacgaagcaggaacttagagttttctgagcttggctcagtttgtgtgtaacaaccaggctgaggtttcaggggtggctccatttggggtttaacctgcagaccagaggagggaacaatgaaagactagttgtgtttctgtgtttctgtggtctggaagaggaggtgaagagagcgtaggacaaatcactgagtgttcatgtcaaaatatctgcagactgctcagcttggttgctgttgagctccctagttcagcagcagcaggtcgaggaccaacacttatcctcggataataatgactactatttattcagtcctcccatgtgctagatgacatattaggtgctttatgtgtacaaccttagcaatcctttaagagaggtgatattcccatttgtcaaattttagaaagctagttagacagtccagagaagattagtggtttgttcaatgttaggcttccaataagtggccaaaattttaactttggtacacagttatctttgctaagacatcatatgcattcctaaaaaaaaaaaaaaacactcttcagttagcaatatagtatacttaaaataatagggcttatgagaaaaatggggttggtgttagaattaggaagtaaaaaacctgagagtgtaatacaaatagaaatactagcatggctgaatctctgtaaacatttgccttt

SEQ ID NO: 464569 - DNA, 1481 bp, Homo sapiens
atccaggaatagtaagctggctttgtgtgccactaagctctatattttgtattacctatatggaagccataagatgcatccgtaggagaccctctgctgcaactaaaatcactcattctgggggcagccctctggcatgtaatgagcagtcctatggagaggcccatgtgacagtagccatgcgagtgacactggaagtgaaacctgcagctccagtcaagcctttagaagactgcagccctggctgacagcttgacagcaaactcatgagagactctcagcttgaacaactcagctaaactgttcctgggttcctggtcctcaaaaactgtatgagatgaaaaaaaagtttgtttttttaagctgccaagttttgggataatttgttattctaatatattttttaatacctggaaatctctaagcaataatcttttacgcaatcccctttattttgttatgaaaaaagagcctaggtagttcttttaaggtttacttttttgtaaaggttccttttgtatctcttttcactagcagaggtgtctgctatgggtaggattccctctggggttccctttgaccaagcttctgcagccagaagcactgaggagggcactggggtgatgggactgaccctgaggccctgatcacaggactcctaagtaggagttcctctgaggagatatgctaggacctggtttatcaaaccagcaatgggatatctggaaaagccgctggggggctgccaggactgcttctcaacatactgtgtgttaacctgcattaacactgcacgaagcaggaacttagagttttctgagcttggctcagtttgtgtgtaacaaccaggctgaggtttcaggggtggctccatttggggtttaacctgcagaccagaggagggaacaatgaaagactagttgtgtttctgtgtttctgtggtctggaagaggaggtgaagagagcgtaggacaaatcactgagtgttcatgtcaaaatatctgcagactgctcagcttggttgctgttgagctccctagttcagcagcagcaggtcgaggaccaacacttatcctcggataataatgactactatttattcagtcctcccatgtgctagatgacatattaggtgctttatgtgtacaaccttagcaatcctttaagagaggtgatattcccatttgtcaaattttagaaagctagttagacagtccagagaagattagtggtttgttcaatgttaggcttccaataagtggccaaaattttaactttggtacacagttatctttgctaagacatcatatgcattcctaaaaaaaaaaaaaaacactcttcagttagcaatatagtatacttaaaataatagggcttatgagaaaaatggggttggtgttagaattaggaagtaaaaaacctgagagtgtaatacaaatagaaatactagcatggctgaatctctgtaaacatttgccttt

SEQ ID NO: 464570 - DNA, 2116 bp, Homo sapiens
aaccacagctgacacacagatctgaggacaagaagatcgtatttatgttaccacttttctcagggtgcttaacctgcttcagtgcggccgttgctaccgcccgctgcctgggacaggaaactttagctgttgctaaggcaactgcagagttctggctcttaagctggctgtgcgaggagtatctcagagccccagatgcctctgctgtcactcactgtcagaccaagtgcaaaggacttggtagtgaactcacagaaacaatgagaccatttttgaattctgaaaagcaagttattgtgatctactcctctttggagtttttcctggctgtgtcagaccatggcttaggctatagacaaggaagagtctatgtgtcccaacttggctgctttgtaagaagtggacttctgcctcctcagcctaacctgaagaatagaaccagcttctttcgtggcaattttcccccaggagggatttccctgcagtggacctcctccccattggtaccttcagccatcagaacacctcgctttagatctgtgggtcccaaatttcatcaaatccaatgaccatttctatgtccttagtaattggtggcaacctggtggagagggaagaccacaggctgtggagttggacctgggtttgaagattggctttgcatgcctagcaggatgtaagcttggcccactgacttcacttctgagccttgttctccatgtctgtcaagtgcaggggaaggatcactcattctgggggcagccctctggcatgtaatgagcagtcctatggagaggcccatgtgacagtagccatgcgagtgacactggaagtgaaacctgcagctccagtcaagcctttagaagactgcagccctggctgacagcttgacagcaaactcatgagagactctcagcttgaacaactcagctaaactgttcctgggttcctggtcctcaaaaactgtatgagatgaaaaaaaagtttgtttttttaagctgccaagttttgggataatttgttattctaatatattttttaatacctggaaatctctaagcaataatcttttacgcaatcccctttattttgttatgaaaaaagagcctaggtagttcttttaaggtttacttttttgtaaaggttccttttgtatctcttttcactagcagaggtgtctgctatgggtaggattccctctggggttccctttgaccaagcttctgcagccagaagcactgaggagggcactggggtgatgggactgaccctgaggccctgatcacaggactcctaagtaggagttcctctgaggagatatgctaggacctggtttatcaaaccagcaatgggatatctggaaaagccgctggggggctgccaggactgcttctcaacatactgtgtgttaacctgcattaacactgcacgaagcaggaacttagagttttctgagcttggctcagtttgtgtgtaacaaccaggctgaggtttcaggggtggctccatttggggtttaacctgcagaccagaggagggaacaatgaaagactagttgtgtttctgtgtttctgtggtctggaagaggaggtgaagagagcgtaggacaaatcactgagtgttcatgtcaaaatatctgcagactgctcagcttggttgctgttgagctccctagttcagcagcagcaggtcgaggaccaacacttatcctcggataataatgactactatttattcagtcctcccatgtgctagatgacatattaggtgctttatgtgtacaaccttagcaatcctttaagagaggtgatattcccatttgtcaaattttagaaagctagttagacagtccagagaagattagtggtttgttcaatgttaggcttccaataagtggccaaaattttaactttggtacacagttatctttgctaagacatcatatgcattcctaaaaaaaaaaaaaaacactcttcagttagcaatatagtatacttaaaataatagggcttatgagaaaaatggggttggtgttagaattaggaagtaaaaaacctgagagtgtaatacaaatagaaatactagcatggctgaatctctgtaaacatttgccttt

SEQ ID NO: 464571 - DNA, 2079 bp, Homo sapiens
aggcaggagagccaggtttatagcagcagccactgctgggtactctggagccagagagtccctgggcagcatgctgtgtgccctgctcctcctgcccagcctcctgggggccaccagggccagccccacctcaggcccccaggagtgtgcaaagggctccacggtgtggtgtcaggatctgcagacagctgccaggtgcggggctgtggggtactgccaaggggccgtatggaacaaacccaccgcgaagtctctgccctgcgacgtatgccaggacatagcagccgccgctggcaatgggctgaaccctgacgccacggagtctgacatcctggctttggtgatgaagacctgtgagtggctccccagccaggagtcttcagccggatgcaagtggatggtggatgcccacagttcggccatcctgagcatgctccgtggggccccggacagtgccccggcacaggtgtgcacagcgctcagcctctgtgagccgctgcagaggcacctggccaccctgaggccactctccaaagaggacacctttgaggctgtggctccgttcatggccaatgggccccttaccttccacccccgccaggcgcctgaaggagctctgtgccaagactgtgtacggcaggtctcccgactccaggaggctgtccggtccaacttgaccttggccgacttgaacatccaggagcagtgtgagtccttggggcctggcctggccgtcctctgcaagaactacctcttccagttttttgtccctgctgaccaagcactgaggcttctccccccgcaggagctctgcaggaaggggggattcttagtggccatggacggggtcccctccctggagctggggttgccaaggaaacagagcgagatgcagatgaaggccggtgtgacctgtgaggtgtgcatgaacgtggtgcagaagctggaccactggctcatgtccaacagctctgagctcatgatcaacccatgccctggagcgcgtgtgctcggtaatgcctgcctctatcacgaaggagtgcatcatcttggtggacacctaacagcccctccttggtgcagcttgtggccaaaatcaccccagagaaggtgtgcaagttcatccgtctgtgtggcaaccggaggcgggcccgggcagtccatgatgcctatgccatcgtgccgtccccagagtgggacgcggagaaccagggcagcttctgcaatgggtgcaagaggctgctcacggtgtcctcccacaacttggagagcaagagcaccaagcgagacatcctggtggccttcaagggtggctgcagcatcctgccgctgccctatatgatccagtgcaagcacttcgtcacccagtacgagcccgtgctcattgagagtctcaaggacatgatggaccccgtggctgtgtgcaagaaggtgggggcctgccacggccccaggaccccactgctgggcaccgaccagtgtgccctgggcccaagcttctggtgcaggagccaggaggccgccaagctgtgcaacgctgtgcaacactgccagaagcatgtatggaaagagatgcacctccacgctggggaaacacgcgtgaccgtggctgccagagacccagagcctgctagcgaggcccatgagaatggggatgatcatacctgcctcacaagaatgttgagacaattcacagagacgttctggagcccctttcccccgagaccggcattcatgagtctgctgggaccagaaaacccatctcaaggggcccagcggggcacccaggagagtctggcggtgcaagcgctctagcctctgaaaatgcattttcattgttatatttttacagatctttaagttacactgtgatttccaggtctggtaaggcagattcactttcccagagtaccttaaccactctctgctgctgttttcttcatgtcttcctcaccaaatgcccttagggcaggaaagaaggcgatgggacctggtaaattagccaaatgctgatgccaaggccctgagagcacgtatgggtgcagggatgcccagctgctgtgagcccccaagccacat

SEQ ID NO: 464572 - DNA, 909 bp, Homo sapiens
tcacagtggtggaatgtcatcagctaaggcagcacctggctattttcacttcttttgtggatcttcagctgcttcaggccatctggatgtatacgtgcagatatgctaattataaagaaatactctagatattttgacgatttctttggtgggggaaaagaggagtgtaaggatatagaagaaaataaactcagattctcctgctatactctcacaacacagaacatgtcttcagttcagttcaccattttgcaaccaggactatcattcacaagcctggcaaagcctgactgtgaagtctgtacctctactctcgcctactccttagatgaaatgacctggaacacagaaaaatatgaaataaagatagaccattttgattatttcatagaaagaaatgtcatggtattacttattattaatgaatatgttgaaggaataattagtaaaaatgaatatatgatatatattgcagtgctttgcattgatggcctgatgcaaatagcagtaattacttacacaggatggctaacatttctgggaaagacattctaatcaatagttgctatctgtggtaggttaagtgtttgaattaaaaaaaaaaaagcagtaattcattgtgatacttccaaatgcactgttcacattttaagttggagacagattattacaagaaataggaaagataatcctaaatcttagtcaattttttttctcattacagattttaaaaagtgactagtaagggagaattttgagagtctagaaaacctggagggaaagaaaaaagagggaaggaaggagagaaaaaaggaaggaaagaaggaagaaaggaaaaaaaggaggaagggagggaggagataaaggaaagaaaaggaaaagaaaaaaggcagaaagaaaagagaaaga

SEQ ID NO: 464573 - DNA, 1859 bp, Homo sapiens
tttccacagcatttcctcaggtgcatgaattcttactctgctcttgcaggtctgggaagggggagaatcgccctggcacagacagccggtgtcctgaggagtctggagcaggaggagccctttgacctctctcagaagcgccgggccaaggtgccggtgttccagtcagacggggagagtgcccagggcagccactgccacgaggaggaagaggaggataactgctacgaggtggagccctacagccctggcctggccccccagagccagcagctctgcacacccgaggatctgtccaccaagtcggagcacgcccccgaggtgctggaggaagcctgcaaggaggagaaggaggatgcatccaagggagaatgggagaagaggagcaagggtgaccttggggcagagggcggccaggagagagactgtgccggcagagatgagtgtctcagtctcagggcttttcagagtacccggcggggcccctctttttctgattacttatacttcaagcacagagatgagagtttgaaagaattactggagaggaaaatggaaaaacaagcagtgcttttaggtatctaagtggacagttttaaaattacatttggaaaatgagaaggaggcagttcaaatatagctttctgcatgaactgtcattttctggagactggcgaatagtaccaatctctacaaatggcttagactaaatgagcagggatgtaggtaatggaaagccttctcaggtcattcacggggcccttgatacccttcacacatgtgcagggtcttcatcagtggcgttttatgcattgccagtataataaactgcactggcactgagaaaagcaatactgactgggtgtcgtgtacgtgtgactgcccatagcaataaccctctggtactgtgtctgtttatgtaaaaacttcttgtttggtagttttgactcgtatttgtagagctaggtactggttattattgtgcttcatcctatcccagatttcccagtacattcctttagaagacatgtccatctccaactgctgggggctggccttttctgtaggccaaggtgctgccccattagccccacctggttgtcatcactcacccatgtgttgtgtccatctctgacccatttcccctgccaccttgcctaaagcttctcctgtcagcctccccaccaccatgaagtgctaagagtactatgtcctgaggtaagggcacctgcaacggagattgtgaagagaagactgtgggtttctgtggttacaagcacaactctgggtcaaaaacccattccaagtcctcagaggggcaagtcccttccattcagtattaatatagctcatcagtgcctctgatgaaattgcccaggatgctggcagtgtggcctgggaggcttccagctcttggggtctggttacacatttattcacactgcggccatgtgttgaggacctactatgtgctgtgtttgaccacacgtcctgtagaatgccgtttggttctgagtatgcctggctggaatggaaaccaggaaattctagagtaacaggctctagtcctttccaaccaaaacaaacctcatgggaatgtttgagggaccagttaatgttgagacagagagagtatggtctagaatggtggttttcagattgtgttttgagaagccagaggtcatctttaggcctctgaagagtggtaaggggaggagaagctctcaactcccacacccacctcactccaagcagctcaagttccatctgatttatacattagcattctaagtaaaattttatttggaggcagtaaaaaggtctaggagaaataaaaacaatttgttatggagtgtatt

SEQ ID NO: 464574 - DNA, 635 bp, Homo sapiens
gtgagatacaatatgcagaggccagttttggggcgagccggaggccgggcgcgtctaacctgcggggaagggaaagcggagggtaaggcaagggctgctgtaggcgccagacaacagggactctccgaaccggaagtgccccgcgtcgccatggctacaggcgctcccagcagaacccgtagcgttccgttcccatggcaacggtattgtctccttggccggacctgggctgcggaaggtaactggggacgtcgcaggctgtgcagctttcgcgaggcaccgctttggcgcccggaccgaggaagaagatgcaagccagccccatccgtatcccaactgttagcaatgacatcgactgggatttctgcttccatatgtcacagcaaaccgagatcccagctcaccagcaaacagatgagttgtatcccactggtgggtgtggagagagtgaagaggaaactaaagctaaagagaaggagaaggccatagactgtatgtctcatcccaaagagaaattagcccaatcccagaagaaagtagctcagctgattaaggaaaaaatggtaaaacaaaaaactcactaaaattttgtttccatttaaaaatatgttcctgtttagagaagctttgccttc

SEQ ID NO: 464575 - DNA, 1296 bp, Homo sapiens
agcgggtcgccttgggcggacctgggctgcggaaggaagaagatgcaagccagccccatccgtatcccaactgttagcaatgacatcgactgggatttctgcttccatatgtcacagcaaaccgagatcccagctcaccagcaaacagatgagttgtatcccactggtgggtgtggagagagtgaagaggaaactaaagctaaagagaaggagaaggccatagactgtatgtctcatcccaaagagaaattagcccaatcccagaagaaagtagctcagctgattaaggaaaaaatgaatactcaagcaaacaaggagctgattcgatgtgtcatcctttctcggattatttttggggaccatcactggaaatgtgcacgagctctggccaacctagcttatggctacttgacactgagaggcctcccagttcaggccaagaaacatgctacatcagccaagaatacactgttgacctggaaggcaaatacgacctcaaataaggagaaagaggaaatcctggaagctctggtcaagctgtactacactctgggcgtggcctggctcctgcagaaccgtggcagagaagcctatttcaacctgcagaaggcagagagaaacatgaaggagctgaaagaattatataaaggaggtgtttgtgaattacaagtctctgagaacgacctaacacttgctttgggcagagcctccttggccatccacagactgaacctagctctggcatactttgaaaaggcaattggcgatgttattgctgccaagggtgataggacgtcagatctgatcagcctgtacgaggaagctgctcagatagagcagctgaggaggaaccacaaccaggccatccagtacttgcagcaggctcattctgtctgtgtttctttgttcactgaagtcagccccaaaactgcagaaatgagtgcgttactggccaaagcttatgccatgtctggagaggcccagcacagggatgctgttgagatatatttcataagaagtatcaatgcatatcgagcaacattgggctcagaggattttgaaacactgagcaccactgaagaattttgcaaatggcttgtccaaaatggagaaaaacaggacaagtagcagttcatccagatggagaagagaagccattcctggaagaaggaactctacatacaaaggcacagaagcatgacagagggcagtgtatggaggaatggtcttctgttatcaaattgaaaacctctatacaggatagccaacaataaagacaaccttgttgatgataaa

SEQ ID NO: 464576 - DNA, 1251 bp, Homo sapiens
gtgagatacaatatgcagaggccagttttggggcgagccggaggccgggcgcgtctaacctgcggggaagggaaagcggagggtaaggcaagggctgctgtaggcgccagacaacagggactctccgaaccggaagtgccccgcgtcgccatggctacaggcgctcccagcagaacccgtagcgttccgttcccatggcaacggtattgtctccttggccggacctgggctgcggaaggtaactggggacgtcgcaggctgtgcagctttcgcgaggcaccgctttggcgcccggaccgaggaagaagatgcaagccagccccatccgtatcccaactgttagcaatgacatcgactgggatttctgcttccatatgcctcccagttcaggccaagaaacatgctacatcagccaagaatacactgttgacctggaaggcaaatacgacctcaaataaggagaaagaggaaatcctggaagctctggtcaagctgtactacactctgggcgtggcctggctcctgcagaaccgtggcagagaagcctatttcaacctgcagaaggcagagagaaacatgaaggagctgaaagaattatataaaggaggtgtttgtgaattacaagtctctgagaacgacctaacacttgctttgggcagagcctccttggccatccacagactgaacctagctctggcatactttgaaaaggcaattggcgatgttattgctgccaagggtgataggacgtcagatctgatcagcctgtacgaggaagctgctcagatagagcagctgaggaggaaccacaaccaggccatccagtacttgcagcaggctcattctgtctgtgtttctttgttcactgaagtcagccccaaaactgcagaaatgagtgcgttactggccaaagcttatgccatgtctggagaggcccagcacagggatgctgttgagatatatttcataagaagtatcaatgcatatcgagcaacattgggctcagaggattttgaaacactgagcaccactgaagaattttgcaaatggcttgtccaaaatggagaaaaacaggacaagtagcagttcatccagatggagaagagaagccattcctggaagaaggaactctacatacaaaggcacagaagcatgacagagggcagtgtatggaggaatggtcttctgttatcaaattgaaaacctctatacaggatagccaacaataaagacaaccttgttgatgataaa

SEQ ID NO: 464577 - DNA, 157 bp, Homo sapiens
cagaagcatgacagagggcagtgtatggaggaatggtaagtactttacagctgttgtacagggcagcatgtcctgaaaggggctgcaagaaatgctgattccaagggatgtgtgccagttctctgggggaggaagaaaggctctgtagcagaaagac

SEQ ID NO: 464578 - DNA, 1562 bp, Homo sapiens
gtgagatacaatatgcagaggccagttttggggcgagccggaggccgggcgcgtctaacctgcggggaagggaaagcggagggtaaggcaagggctgctgtaggcgccagacaacagggactctccgaaccggaagtgccccgcgtcgccatggctacaggcgctcccagcagaacccgtagcgttccgttcccatggcaacggtattgtctccttggccggacctgggctgcggaaggtaactggggacgtcgcaggctgtgcagctttcgcgaggcaccgctttggcgcccggaccgaggaagaagatgcaagccagccccatccgtatcccaactgttagcaatgacatcgactgggatttctgcttccatatgtcacagcaaaccgagatcccagctcaccagcaaacagatgagttgtatcccactggtgggtgtggagagagtgaagaggaaactaaagctaaagagaaggagaaggccatagactgtatgtctcatcccaaagagaaattagcccaatcccagaagaaagtagctcagctgattaaggaaaaaatgaatactcaagcaaacaaggagctgattcgatgtgtcatcctttctcggattatttttggggaccatcactggaaatgtgcacgagctctggccaacctagcttatggctacttgacactgagaggcctcccagttcaggccaagaaacatgctacatcagccaagaatacactgttgacctggaaggcaaatacgacctcaaataaggagaaagaggaaatcctggaagctctggtcaagctgtactacactctgggcgtggcctggctcctgcagaaccgtggcagagaagcctatttcaacctgcagaaggcagagagaaacatgaaggagctgaaagaattatataaaggaggtgtttgtgaattacaagtctctgagaacgacctaacacttgctttgggcagagcctccttggccatccacagactgaacctagctctggcatactttgaaaaggcaattggcgatgttattgctgccaagggtgataggacgtcagatctgatcagcctgtacgaggaagctgctcagatagagcagctgaggaggaaccacaaccaggccatccagtacttgcagcaggctcattctgtctgtgtttctttgttcactgaagtcagccccaaaactgcagaaatgagtgcgttactggccaaagcttatgccatgtctggagaggcccagcacagggatgctgttgagatatatttcataagaagtatcaatgcatatcgagcaacattgggctcagaggattttgaaacactgagcaccactgaagaattttgcaaatggcttgtccaaaatggagaaaaacaggacaagtagcagttcatccagatggagaagagaagccattcctggaagaaggaactctacatacaaaggcacagaagcatgacagagggcagtgtatggaggaatggtcttctgttatcaaattgaaaacctctatacaggatagccaacaataaagacaaccttgttgatgataaa

SEQ ID NO: 464579 - DNA, 4559 bp, Homo sapiens
acacctgctctccactcctgtcccagccaagcctccaaggcaccggcctgcggccctggcgagctggggagcctggggcgggtggaggggatgcgtctgcacggaggcccttgcccttggtcagccccagtcagccatggtcagccccagtcagccatggtcagccccgatcagccacggtcagccccagtcagctgtggtcagtcctggacagccccagtcagccatggtcatcctcagtcagccatggtcagccccgtgcccactcactctcctaggcagccgagggaagcccccagccccagccaaggagactggagtccttcgtcacagccgaagggacaagaacatggacgacagtggcaccagatccaagaacccagtgtccttcagagtggccctcggggggccggccgagcctaccacatgcaggatggacctcagaggcatccgggcctcctcacacttggacttcctccttgctcgccccctcacccttgtggcagggaccgtgctgcggacatcagccctagggctggcccagagtcttcacctgggccagcagcaccgagggtccctcttccacacctgcctactcccggaacaggccttcactcggaacctgggctctgggtacaagggacgcacctggttccaccctctccctgtgtcccggacagtttgctctgatgagtccaggaaccgagaacgggagaaccctccaggtcctgggcactgctttagccctgtctctccaatcatcgcccagatcatcacctgtgtctctccaatcctcgcccagaccatcacctgtgtctctccaagcatcgcccagaccatcacagcagctaccgggtacatcattgtcatcatcatcatcatcatcatcaccaacaccaccattaccatcacctccatcaccatcatcactatcaccaccgccatcaacagcatcatcaccaccaccaccatcatcgacatcaccaccatcaccaggaccatcaccaccatcatcatcatcaccaccatgaccactatcagcaccatcaccaccaccaccatcaccgccagcctcactataataaccatcatgtcttaactccttgtcaggctctgtgtgaagcactttaggagtgttcctcatttctaccctcacaacaactcttcagagtagtgctgttcatttttcctattttacaaatgagcacattgcagttcagagaggttaagtgacttgtccaaggtcacacggccaccagatgtggagcagggagagaaacacagagctgcctgacaacagatacggcgttttggataggaaggggaagatcaaatgcaacgtccagacccaaacccccgaatgtcagagagcatcctcacctttcaaaaacctaatctcccccaaacaatgctgacaataagaatctgtcaacagatggaagagatggttaggatccaaaataagcagctgggactagagagtgcctttcaagtgatcaagatgaagctgggtgaagcgccatgccaggccttgctgttgcactgtgaaagcacaagagcactcattcattcactctacgcgttgatgcattcaacaaacctttccaagtgcccccactgcacccagaaccatgaggcttcttggctgttacacagaaggaaagtaacccccatcctcgacgctatgcacacatcttttttcagtgtattcttctcaaatagatagtcccaggcaactgccatgttccaggccctgggctgatcccatgagtactgcgaggatggagacatagcgtgagggggatgggagcagctgagtgacagccatgcatacgaggcttcgggtgctgcacgactcagtcaccatcaacaaggttgcgacccatgacgatgttaatagtggtagctccatacctggaaggaggacggtggagtcccacttagacctggggctattcacacagaagccttgtaatcagtacttagggggaacaaggagaaccagagcctgctcagaagagggtggcagagtgatgtaggggcagagaacaactgtgccttgcaggggacagttgagatggaaacagatgcgggagctgggggcactgagggagaacccgctgccatcctcatacctcggtgtggctccatggggcagaaaggtacagatcttgcttctgaagccaggaggacagagccagccccttgggcaggagcccactcaaacccaacctggcagctatctcctgtgataaagaggccaaggggcttgagcctcccagggacacaccagcagaacaaattcctgagatgtagaaaagcacccaggaaagctgcagaggaacccttgtgcggggaccggctccgggagccacagcagccagggctaaagagtactttggaatgcagcccctcattttgtggcagtggccgctgagaccaagagctgggtggcatctcccccagaggccagagctgggactggagcctagggctgagggagccggagccctggctccttcaagattcaggaggcctctgaagcttagtgcaggccccgctgagctgtgagcagcaggcagcctccaagtggcatagactgcccaggcccacactcaggagctgggtggctccagcccagccgccctctgacttctgtcaccttatgaatgagatgtcacttgactcggaggccagagtgatgatgagagctgtgaggacaaggtgacctggcagtcgccacctccttgatcacccaacccagaggccaaccgaaggccccagggtgagctcctcatcccagggccccaagaagaaaggacagcagatctgagtgggagccctagggacccttccactctctgctgctgtcctggccacagtggatacggacaaaggcagcagcgtgggggctgtggatgacacgtcattcgcccatgtctggcagcttccaacagcagcacacaggccttgctgcctcctggacatccaggggaccacttgtggcatgctctggccaggaaaactgcagctgccaaacgcctggggggacgccaggctggaccgtggtgggagctttagatgctgagacaaaaccacacaatgcttcagtgtcttccctccaaacactctgcctctgtgtgggctgtgtgctccaagccaaagagccacagagccactgagccacctgcatacatacaagccccacccatctccaaagagaaaggcagcagggtgcctcccctggcatttaggtccatttccatcccagccctgtccaagcacatggcaaatagaggtcaagtgacagcgtccaaccaggttccaggacctcccaagtgcctatgcctcccagcacccctgggccgattctggaaccacttagggaatcgcccagccagaaagctgggagtctgcctggatttgccgtcttccacaccctgtatgtagtgggccacccactggttctgcctcccacctgtattccctgctccccgggctcagtcctcaccagctaccgcctgggccaaggtgcccacctcctacaggaccccgtgtttccaggctgcccctttccatgggtttccactgcagccagagggagaatggggtatggacgtgaggccaggtgagtgtgtgcctgtgttagagatgacacagtctccagaactggctcattaaactgcttctctccatgcaccccctgcccccataccaagaccacatttcccagcctcctctgagtggggcgtggccatgtgactgagctctggccagcggaatgtgggcagagtcctgggtgccatggtggaccagcccataacaccctcccccgtggaatcccgccagcctctccttgtctcctagatctggaggagggcagagccacaaggaggcaggagcctgggcccctgattgactgcaggggcgtgaaccagatgtactctcacccccacctgccctgaagttctcatcagactgagacaagaccaggaaacaccttttggtttggggacgtttgttccagcagaaaccactcagagaatgcttgcacattcatatccctttgtgtggaaaaaatctggataaatgaatacccatgatgtggatagcaatagtcttcgagctgtgagatttggggcaattaataaaaaatttctatcaacctggagccctgggttcccaccctggccctgcccctgccccaggccttctgccttgcatggatccttggcctgtctgcacctctgtttcctcatctgcaaaacgggaatgatgagagaacccacctcccagggtcatcatggtttactcctgtaaacacttagccccccactaaaaaacagcagtggctaataagccatgcctttgtctgggcttgcgttctattcaccatcttgatggagattacatatcaacctcttgtacatgtgtaactattagaagcggggaagccttattgtccttggtgagtaggaccatgtatgaattttcttttcaatattttctacatgttctagaatgtctacgtatctttataaaggagaaaaaacgaactt

SEQ ID NO: 464580 - DNA, 1059 bp, Homo sapiens
aatagcctcatcatccccaccatcatagccaccatcaccctcctacaggaccccgtgtttccaggctgcccctttccatgggtttccactgcagccagagggagaatggggtatggacgtgaggccaggtgagtgtgtgcctgtgttagagatgacacagtctccagaactggctcattaaactgcttctctccatgcaccccctgcccccataccaagaccacatttcccagcctcctctgagtggggcgtggccatgtgactgagctctggccagcggaatgtgggcagagtcctgggtgccatggtggaccagcccataacaccctcccccgtggaatcccgccagcctctccttgtctcctagatctggaggagggcagagccacaaggaggcaggagcctgggcccctgattgactgcaggggcgtgaaccagatgtactctcacccccacctgccctgaagttctcatcagactgagacaagaccaggaaacaccttttggtttggggacgtttgttccagcagaaaccactcagagaatgcttgcacattcatatccctttgtgtggaaaaaatctggataaatgaatacccatgatgtggatagcaatagtcttcgagctgtgagatttggggcaattaataaaaaatttctatcaacctggagccctgggttcccaccctggccctgcccctgccccaggccttctgccttgcatggatccttggcctgtctgcacctctgtttcctcatctgcaaaacgggaatgatgagagaacccacctcccagggtcatcatggtttactcctgtaaacacttagccccccactaaaaaacagcagtggctaataagccatgcctttgtctgggcttgcgttctattcaccatcttgatggagattacatatcaacctcttgtacatgtgtaactattagaagcggggaagccttattgtccttggtgagtaggaccatgtatgaattttcttttcaatattttctacatgttctagaatgtctacgtatctttataaaggagaaaaaacgaactt

SEQ ID NO: 464581 - DNA, 3712 bp, Homo sapiens
  misc_feature (2)..(2): n is a, c, g, or t
  misc_feature (10)..(11): n is a, c, g, or t
  misc_feature (13)..(14): n is a, c, g, or t
tngtgacatnncnncatctggcaagcactgatgtagtgcacgcttttaacacccgagttccatgccacctccccgccctttacagacatgctataaggcccccagcccagtcactccgcagtgcctctctcttcctccccatggactatacacaggccctgcttgtcctggaggaaagtttggacgtcattatatagatcaggagactgaagtactgaaaggttaaatgacttgccaaagaatgagatctttttttctaacattttacataatatcctcagagaagatcacgccctggtgactagagctgtggccatgaaggtggaaaatttcaaaacaagtgaaatacaggaactctttgacatatttacttacagcaagggagcgtctatggcccggatgctttcttgtttcttgaatgagcatttatttgtcagtgcactcaagtcatatttgaagacattttcctactcaaacgctgagcaagatgatctatggaggcattttcaaatggccatagatgaccagagtacagttattttgccagcaacaataaaaaacataatggacagttggacacaccagagtggttttccagtgatcactttaaatgtgtctactggcgtcatgaaacaggagccattttatcttgaaaacattaaaaatcggactcttctaaccagcaatgacacatggattgtccctattctttggataaaaaatggaactacacaacctttagtctggctagatcaaagcagcaaagtattcccagaaatgcaagtttcagattctgaccatgactgggtgattttgaatttgaatatgactggatattatagagttaattatgataaattaggttggaagaaactaaatcaacaacttgaaaaggatcctaagaaggaatctgacatggcagaggacatgaagggaggggtaatgtgagaagaaggagaggcagaaaggtgagccagactggagtacccaaatcactgttcccacactaacgttagatgttatcaactttttagaaaggattactatattgagtcgtattggcttttgacttcatattaattagaatgtatttgaacaccggtgggggtaaactattcgtaatgcaattttgttgagtaatatttgaaagagattgctctctcaacaagaatgataaatcatctctgtttcaaaaataacccctgttgaagttgacaagagcaggaagggatgaagtttgccaggtaatctaataggtgcttccatatacattttctcatttatgcaccagaacaatgcttctaagtatctgttattctccatttttacaatttataaattgcccaaggtaatgtcaaatccagccctgcctcctcgggtaaactttctcctgtgtctggcagaaattcacacatttagcaccataggtaggtttcctctgttttccatttttatttttaaggttggaatttgggttctttggaactcaaatttcttgagtcattttatagatttttgctgcctagctggccagttaaaatagagaactaagaaatgtttcttctttcttcatagaaacagtttcgcttgcctcaattatatgcagagttatattgtccttcacgttgctcaggtagacccagtgtaagttacagctagaaagttagaaaaacagcagcactattttccctcacctttattagtatattatgccagagttaactcttatcatttttaatttcaagtacatatttttgaagtaaatcaattgtatatattaactattcaactgtctcttggtcagtccattataataaccctattttaatttttctttcctttttaatgcacccaaagtcttttatttacttttttaactacagccacactttgagcaggtatggaacacaatcattgattaatctaatatatacaatagggagaaccgtaactacagatttacagattgtggagctgcagcagtttttcagtaacatgttggaggaacaccagaggatcagagttcatgccaacttacagacaataaagaatgaaaatctgaaaaacaagaagctaagtgccaggatagctgcgtggctaaggagaaacacatagcttgtggctatctttcagcactcctcttgcatattataatgtagtttgttcacagttttgtcttccaatactttgtgagtctggaaaaccacacattttatttgtatttcagtcacatttattactcagagtgccattcttctcatattgtcatgtttggccctgagggtgggtgattgctgacaattttgccaatgctgctgtatttctgggaaagatgtcacttcatgttgggttataatcccacagaatttactttaaatgtcacgtaaaaacaaattcacctaagatagtcttgcttattttgttgcgaaggccagtggaatataaaagtcaatggcattaatgaggagcacattctttgctgagggaaataacagtttttccaggccctagggtttatttagttcaacattgaagattgaaaagactaatgagaagataacatgacaatataaaaagacagaaactcaaaaagtatattcactagaagacagtggagccaaagaaaagcaagttgaaaaagaaagaggagacaatttaacgagccctaaaggcaagaagtgtgtcttctcctgcccatttctctctcccacagtacatcctgcattgaaccacgtgttgctggttactaaactttatggtgtcacaaaaagacaaatgattgtaggatccatggaagtgcacttaggcttgctgtggtggaggccatagtggagatgaaggctctgctctgaagctcttaattgtgtattcaccagtgggatggacaccctttcagcctaagcgtacgagtgaaaacaatgatgtcaaaagacaatagcaagtataggctactatttagggcaaaaggaatcttgaaatgaaagaaacagaactaaaaggctaactggagcataatccttacagttttgcactcaggggattaagtttgaaacatagtgtcttttggccaaattgaacctacttgtaatgtggaccaacttactttacacattttcatcagtcccaatgtatggaattagcttagttttctcatgcttgattaaaacaagacaactaaagctaatcattcctcttctagactttgtgtatatgatttaatcttttatttttatttttgtagaatgggggtaaaactacaaatctcctcctcagggtgatatttttaaagattaaggagtatgacatcaattaacagtctttaaagatgttacatacgctcaaagcaatgtgattaagactttttgcctatttcttgtataagttaaggcagccataaatgaaaatacaaaacaaacgtttgcttttgtatttgattcacaagaggattctccctgagtgtcaggggaggctgtgggacttcaccacgtggacaaacgaaagcacaggctactcagacttggccacaggtcataggtcagagaattttttcttcaaatgtagaaatgtaaattttcagcaataaaatatctgcatgcctacaaagtgttgtagctgagataccttcctgttttttttcttaaacactcattctatatttcccatatttcctctgataatgaatctcatctttcaataactttgtcttcacttg

SEQ ID NO: 464582 - DNA, 4031 bp, Homo sapiens
tgaactaaaataaaattctctaggtcagtctgaaaaagaagatgtgaatggaagcaaatggactgttacaaccttttccactacgccccacatgccaacttacttagtcgcatttgttatatgtgactatgaccacgtcaacagaacagaaaggggcaaggagatacgcatctgggcccggaaagatgcaattgcaaatggaagtgcagactttgctttgaacatcacaggtcccatcttctcttttctggaggatttgtttaatatcagttactctcttccaaaaacagatataattgccttgcctagttttgacaaccatgcaatggaaaactggggactaatgatatttgatgaatcaggattgttgttggaaccaaaagatcaactgacagaaaaaaagactctgatctcctatgttgtctcccacgagattggacaccagtggtttggaaacttggttaccatgaattggtggaacaatatctggctcaacgagggttttgcatcttattttgagtttgaagtaattaactactttaatcctaaactcccaagaaatgagatctttttttctaacattttacataatatcctcagagaagatcacgccctggtgactagagctgtggccatgaaggtggaaaatttcaaaacaagtgaaatacaggaactctttgacatatttacttacagcaagggagcgtctatggcccggatgctttcttgtttcttgaatgagcatttatttgtcagtgcactcaagtcatatttgaagacattttcctactcaaacgctgagcaagatgatctatggaggcattttcaaatggccatagatgaccagagtacagttattttgccagcaacaataaaaaacataatggacagttggacacaccagagtggttttccagtgatcactttaaatgtgtctactggcgtcatgaaacaggagccattttatcttgaaaacattaaaaatcggactcttctaaccagcaatgacacatggattgtccctattctttggataaaaaatggaactacacaacctttagtctggctagatcaaagcagcaaagtattcccagaaatgcaagtttcagattctgaccatgactgggtgattttgaatttgaatatgactggatattatagagttaattatgataaattaggttggaagaaactaaatcaacaacttgaaaaggatcctaagaaggaatctgacatggcagaggacatgaagggaggggtaatgtgagaagaaggagaggcagaaaggtgagccagactggagtacccaaatcactgttcccacactaacgttagatgttatcaactttttagaaaggattactatattgagtcgtattggcttttgacttcatattaattagaatgtatttgaacaccggtgggggtaaactattcgtaatgcaattttgttgagtaatatttgaaagagattgctctctcaacaagaatgataaatcatctctgtttcaaaaataacccctgttgaagttgacaagagcaggaagggatgaagtttgccaggtaatctaataggtgcttccatatacattttctcatttatgcaccagaacaatgcttctaagtatctgttattctccatttttacaatttataaattgcccaaggtaatgtcaaatccagccctgcctcctcgggtaaactttctcctgtgtctggcagaaattcacacatttagcaccataggtaggtttcctctgttttccatttttatttttaaggttggaatttgggttctttggaactcaaatttcttgagtcattttatagatttttgctgcctagctggccagttaaaatagagaactaagaaatgtttcttctttcttcatagaaacagtttcgcttgcctcaattatatgcagagttatattgtccttcacgttgctcaggtagacccagtgtaagttacagctagaaagttagaaaaacagcagcactattttccctcacctttattagtatattatgccagagttaactcttatcatttttaatttcaagtacatatttttgaagtaaatcaattgtatatattaactattcaactgtctcttggtcagtccattataataaccctattttaatttttctttcctttttaatgcacccaaagtcttttatttacttttttaactacagccacactttgagcaggtatggaacacaatcattgattaatctaatatatacaatagggagaaccgtaactacagatttacagattgtggagctgcagcagtttttcagtaacatgttggaggaacaccagaggatcagagttcatgccaacttacagacaataaagaatgaaaatctgaaaaacaagaagctaagtgccaggatagctgcgtggctaaggagaaacacatagcttgtggctatctttcagcactcctcttgcatattataatgtagtttgttcacagttttgtcttccaatactttgtgagtctggaaaaccacacattttatttgtatttcagtcacatttattactcagagtgccattcttctcatattgtcatgtttggccctgagggtgggtgattgctgacaattttgccaatgctgctgtatttctgggaaagatgtcacttcatgttgggttataatcccacagaatttactttaaatgtcacgtaaaaacaaattcacctaagatagtcttgcttattttgttgcgaaggccagtggaatataaaagtcaatggcattaatgaggagcacattctttgctgagggaaataacagtttttccaggccctagggtttatttagttcaacattgaagattgaaaagactaatgagaagataacatgacaatataaaaagacagaaactcaaaaagtatattcactagaagacagtggagccaaagaaaagcaagttgaaaaagaaagaggagacaatttaacgagccctaaaggcaagaagtgtgtcttctcctgcccatttctctctcccacagtacatcctgcattgaaccacgtgttgctggttactaaactttatggtgtcacaaaaagacaaatgattgtaggatccatggaagtgcacttaggcttgctgtggtggaggccatagtggagatgaaggctctgctctgaagctcttaattgtgtattcaccagtgggatggacaccctttcagcctaagcgtacgagtgaaaacaatgatgtcaaaagacaatagcaagtataggctactatttagggcaaaaggaatcttgaaatgaaagaaacagaactaaaaggctaactggagcataatccttacagttttgcactcaggggattaagtttgaaacatagtgtcttttggccaaattgaacctacttgtaatgtggaccaacttactttacacattttcatcagtcccaatgtatggaattagcttagttttctcatgcttgattaaaacaagacaactaaagctaatcattcctcttctagactttgtgtatatgatttaatcttttatttttatttttgtagaatgggggtaaaactacaaatctcctcctcagggtgatatttttaaagattaaggagtatgacatcaattaacagtctttaaagatgttacatacgctcaaagcaatgtgattaagactttttgcctatttcttgtataagttaaggcagccataaatgaaaatacaaaacaaacgtttgcttttgtatttgattcacaagaggattctccctgagtgtcaggggaggctgtgggacttcaccacgtggacaaacgaaagcacaggctactcagacttggccacaggtcataggtcagagaattttttcttcaaatgtagaaatgtaaattttcagcaataaaatatctgcatgcctacaaagtgttgtagctgagataccttcctgttttttttcttaaacactcattctatatttcccatatttcctctgataatgaatctcatctttcaataactttgtcttcacttg

SEQ ID NO: 464583 - DNA, 1370 bp, Homo sapiens
  misc_feature (3)..(7): n is a, c, g, or t
  misc_feature (17)..(18): n is a, c, g, or t
ctnnnnncactaccaannatttacattgtgctaaacaacttatgcacattatttctttgattctttttaacacatggttgtgggctgaatggtgtctcccaagaagtcatatgccgggatcctgtcccatagtgcctcacaacgtgacattgtttggagttagggttgttgaagatgtcattagtcaagatgaggtcatacttgagtgaggaagaagagaactgtagacatgcagcagccatcttgtggatatgagggaagagccaaatagactacaaatcggttaaaacagagaactaaaattgtggagctactgaatgaaccagctatggaattgtctgtgtgtgggcattcagatggacataccggataaaattctggactggcaacagaagcatcttctgttctaatgaagtgactcttggtgtgtacccggataacctcatgactggagttggttggctgctagaagaacaaatcatgtgattagagtgttggaactttcaaccttagccctcaacttctggggaggggagaagcgcaaaaggtagagttgaccactaatggccagtgatttaactaatcatgcctatgtaatgaagcatccataaaaaactaaagatcacggtgcagagagcttctagattgctgaataagtggtagttcctggaggatgatgcacccagagaggcatggaagctctgtacctctttccacatgtctttgcctatgcatttcttccatctggcggatcatctgtttgctttgtagtattttgtatttaaaaaatggataaatgtaaataaaatgtttccctgagttatgtgagccactatagcaaattaattgaaccaaggagatcatggaaaccccaatttatagctgcgcccacgcaagggtgctgtccaaaccagagacagcctatggggactgccagttagctctgccaaaaaacatccttcctgtccaagtctcccccaagtctctaataagaagagccaccttgaagctttggactccaagcatggctttccggtacaactttaacacagaagtttatattcaattacctacagataccaaaattatcattactatcattattaataaacatacagttaattacaacaagtcttcaagaatgaatatgagttattctggagaagaaagtatgtgtgtttggcaggaagtacaaatgcttggagaagacaaattaaatagcacatccaaactatggggatgtgaaagaatgtggagtgttggtagacttatgaaagggtagcgtgggccaggacataacctaaatgtgggagaatggagagaaaggatgctgttcaaattatggatggctttgtgtacgacattgaatt

SEQ ID NO: 464584 - DNA, 487 bp, Homo sapiens
cctcagagccttcagaagaaagcaatcctgctggcaccttcatcttggactttgagcctctagaactgtgaggcaatacatttctgttgtttaagccacccagtttgtggcattttgttacagcagcactggaatcctaatggatgctgtattagataaatattttaggcttaggaagaagagaactgtagacatgcagcagccatcttgtggatatgagggaagagccaaatagactacaaatcggttaaaacagagaactaaaattgtggagctactgaatgaaccagctatggaattgtctgtgtgtgggcattcagatggacataccggataaaattctggactggtaagagtgtggggaaattgccagtcttaagcagtgctgatggaggtgtgaattggtaaaacaatttgaaaagtaagttgctagtttttataaaatttttaaaaataaatgtattctctgacccagtaaaaaaaaaac

SEQ ID NO: 464585 - DNA, 523 bp, Homo sapiens
  misc_feature (3)..(7): n is a, c, g, or t
  misc_feature (17)..(18): n is a, c, g, or t
ctnnnnncactaccaannatttacattgtgctaaacaacttatgcacattatttctttgattctttttaacacatggttgtgggctgaatggtgtctcccaagaagtcatatgccgggatcctgtcccatagtgcctcacaacgtgacattgtttggagttagggttgttgaagatgtcattagtcaagatgaggtcatacttgagtgaggaagaagagaactgtagacatgcagcagccatcttgtggatatgagggaagagccaaatagactacaaatcggttaaaacagagaactaaaattgtggagctactgaatgaaccagctatggaattgtctgtgtgtgggcattcagatggacataccggataaaattctggactggtaagagtgtggggaaattgccagtcttaagcagtgctgatggaggtgtgaattggtaaaacaatttgaaaagtaagttgctagtttttataaaatttttaaaaataaatgtattctctgacccagtaaaaaaaaaac

SEQ ID NO: 464586 - DNA, 243 bp, Homo sapiens
  misc_feature (3)..(7): n is a, c, g, or t
  misc_feature (17)..(18): n is a, c, g, or t
ctnnnnncactaccaannatttacattgtgctaaacaacttatgcacattatttctttgattctttttaacacatggttgtgggctgaatggtgtctcccaagaagtcatatgccgggatcctgtcccatagtgcctcacaacgtgacattgtttggagttagggttgttgaagatgtcattagtcaagatgaggtcatacttgagtgaggtgggtttctaatccaatgtgactggtgtctgt

SEQ ID NO: 464587 - DNA, 2353 bp, Homo sapiens
gatgagaagaagaaaccgaaagactaggagatatggagttttggacactaacatagaaaatatggaattgacacctttagaacaggatgatgaggatgatgacaacacgttgtttgatgccaatcatcctcgaagtgttgaattcctggggttctttgtggcccaggccattgtccaaaatcaaaagaactttaaaagtcagtcccctactagcaatgtacttctggacttcagggacaaagcatcagtggaaccagtccagaaaaagagttttcagtgtccaggccttcttcttgtacaactaaaagactggcagctggtgtttgtcttttcccttcaaggtttggtggttagcagctttaatccagatacgaacaaagatcatcgagattcaggagaagggcaaaacccaatccaagaaatctatggaatccagtaaaatgacacaagacccgaaagtgaaaatatctcagtaggcctttgagactaaagttaagggatgatttcaagtgctcggaaagtacagcaaataaggaaatatccagagcattgacagtagtggagtgatttgcttgtacctgatttatttggaggctggagctacaacctgtgctcatcagtgtgactgagagtccccagtctgcatattctccgtacttggctacttgatgctgatcctctggtgaggtctactgctgacccagacaatgcaagctctggtctttaccctttgcccatcagccctttccctcctcctctgacaccaactttcatcttccctgcagccagagttttccaggcatgaaaaagtgactctcttctcagatatgacaggcagaaaagctgccacttacactgagtgcactttgggtctttagaggaaagtaaggggaattcaaatgaggggaacccttcatgtagcttcgcagttaactaactttgatgactgtttatctttcatcttcacagctgtttttttgaagcaaatatatttaaggaaaatagtaaactagatcctaaagtttaaaatacctttccttgttgtatcctctgctttctttttccttgtctattaagtttaagacaaatttacaatgaaaataaagtggacctctgatggtaccctgaagtctgaattttttattattattatcttttctttttcattaggtctgactcctgtgtaactatgcctgcagggaaggagatactacccaagcaggcactgttattatttggagctataatatatcccttttacaggttgttttgcatttctttcctggagataatagcagtataattttgaaatattctttagtagaagcttctactattatacatcatagaaaaaatttgacttgcactggtcactgtaatatatttgtcgttacatatattcagcaactgtttatagcaagtttggcttagttgactgatacatttccttaattatttagataagaataatcataagcattaaatatggaaggaaagttggtttgaggctacccagaggactgtgagattttgttgcatttcggtctgacatgtccttacatgcttcagtatagaagaaagtgtaatagaaaaagtcacttgatttttacttccaggtctcccactattatttccacaggcaagagatttcatgtcttcatacttcagatgcttatttataaagttaatgaagagcttggctatttccaaagcctttctcagaaatatatatttcctcaagcataggaaacatttaagatttaaattgtaacaagtccttgctcaggaatatgaatggatgtgatgaggttcatgacacagtacctcaaaatgtggcaccatggaatactgagtattttaacctaaaggaattttagaaaacaacagaagcaggaaggacactctgacattccttcacaattctcctctgaagcaggccataaaagaattatctgacattcctttaaagtcatagaaccttcatttcagatgggtctctctgtactcagaagaaaggagtgaagacacagagacagtagaatctgaacaaacaggccaaacttagttctccagcttattgccattagaccatacccttttgttctccaatcactcttcttcatgatcgtccataaaaatacacagtttttcccgtttctatgggtcttcatttctgaagggtcccatgtcttgaccataaacttgtaatggatgaagaaaagatattactctttttcccctacaattaagtgcaaaatacaggttaaataacttgagtcatgattttatatagctctaaaaattagaattctatgtggaaaaataaaatgaatctgatataaatgtatggctc

SEQ ID NO: 464588 - DNA, 1734 bp, Homo sapiens
ttttttcttctctttttcagtctgcatattctccgtacttggctacttgatgctgatcctctggtgaggtctactgctgacccagacaatgcaagctctggtctttaccctttgcccatcagccctttccctcctcctctgacaccaactttcatcttccctgcagccagagttttccaggcatgaaaaagtgactctcttctcagatatgacaggcagaaaagctgccacttacactgagtgcactttgggtctttagaggaaagtaaggggaattcaaatgaggggaacccttcatgtagcttcgcagttaactaactttgatgactgtttatctttcatcttcacagctgtttttttgaagcaaatatatttaaggaaaatagtaaactagatcctaaagtttaaaatacctttccttgttgtatcctctgctttctttttccttgtctattaagtttaagacaaatttacaatgaaaataaagtggacctctgatggtaccctgaagtctgaattttttattattattatcttttctttttcattaggtctgactcctgtgtaactatgcctgcagggaaggagatactacccaagcaggcactgttattatttggagctataatatatcccttttacaggttgttttgcatttctttcctggagataatagcagtataattttgaaatattctttagtagaagcttctactattatacatcatagaaaaaatttgacttgcactggtcactgtaatatatttgtcgttacatatattcagcaactgtttatagcaagtttggcttagttgactgatacatttccttaattatttagataagaataatcataagcattaaatatggaaggaaagttggtttgaggctacccagaggactgtgagattttgttgcatttcggtctgacatgtccttacatgcttcagtatagaagaaagtgtaatagaaaaagtcacttgatttttacttccaggtctcccactattatttccacaggcaagagatttcatgtcttcatacttcagatgcttatttataaagttaatgaagagcttggctatttccaaagcctttctcagaaatatatatttcctcaagcataggaaacatttaagatttaaattgtaacaagtccttgctcaggaatatgaatggatgtgatgaggttcatgacacagtacctcaaaatgtggcaccatggaatactgagtattttaacctaaaggaattttagaaaacaacagaagcaggaaggacactctgacattccttcacaattctcctctgaagcaggccataaaagaattatctgacattcctttaaagtcatagaaccttcatttcagatgggtctctctgtactcagaagaaaggagtgaagacacagagacagtagaatctgaacaaacaggccaaacttagttctccagcttattgccattagaccatacccttttgttctccaatcactcttcttcatgatcgtccataaaaatacacagtttttcccgtttctatgggtcttcatttctgaagggtcccatgtcttgaccataaacttgtaatggatgaagaaaagatattactctttttcccctacaattaagtgcaaaatacaggttaaataacttgagtcatgattttatatagctctaaaaattagaattctatgtggaaaaataaaatgaatctgatataaatgtatggctc

SEQ ID NO: 464589 - DNA, 2546 bp, Homo sapiens
gctactgctcactctttgggtccacgctgcttttatgagctgtaacactcaccgcgaaggtctgcagcttcactcctgaagccagtgagaccacgagcccaccggaaggaacgaacaactccagacgcgccaccttaagagctgtaaccctcaccgcgaaggtccacggcttcattcctgagccagcgagaccacgaacccaccagaaggaagaaactccaaacacatccgaacatcagaaggagaaaactccagatgcgccaccttaagagctgtaacactcaccgcgagggtccgcagcttcattcttgaagtcagtgagaccaagaacccaccaattctggacacgctacctcgatccagatgaaggtaccccaagcagcttgagatgtgatgatggagaccagtttgagaagacccatcatctctgatttccctctgattatgaagtaatacaacaaagctacagtaagtggactgatacggtggtgattgcaaactgtttctaacttctctcatttactggctggtgtctttagaggacatccctgaaggacagcagtgaagggaaatcttcccagtgggcagaactctgagcagcgcacctggttgtgcactttgcctggaaggagaaatggtcagatgtgcgattaggtactgattcatgggctgcagccagtggtttggctggatggtcagggacttggaagaagcatgactggaaaactggcaacaaaaaaatttggggaagaagtatgtggatgctcctctctgagtggtcaaaaactgaagctatttgtatcccatgtgagtgctcaccaacgggtgacctcaggagaggaggagtttaataatcaagtggataggatgacccgttctgtggacaccactcagcctctttccccaaccatcctgtcatcgcccaatgggcccatgaacaaagtggccatggtgacagggatggacaaagccacatatgctctgaatcagtatccaatatatggtactatttctccaatagccaggattcacgggtacaggaatcaaggggaggaagtggaagtggtaccactcaccatcacctctagtgatccacgagcaaaagttttgcttcctgttcccatgacattatgttctgctggcctagaggtcttagttccagagggaggaatgctgccaccaggagacacaacaatgattcaattaaactggaagtaaagattgccacctggacactttgggatcctcttaccattaagtcaacaggctaatgaaggagttacagtgtgggctggggcgattgactcaaactatcaagatgaaatcagtctactattccacaatggaggtaaggaagagtgcacatggaatacaggagatccattagggcatctattagtattaccatgccctgtgattaaggtcaatgggaaactgcaacagcccaatccaggcaggactacaaatgacccagacccttcaggaatgaaggtttggttcactctaccaggaaaaaagaatgacctgctgaggtgcttgctgatggcaaaggaatacagaatgagtagtagaagaaggtagccatcaataccagctatgaccacgtgaccagctgcagaaatgaggactgtaattgtcatgattatttcttccttcttttgttaaaaacatgtttgtgcatgtatatacttgtactaagaaaatatcttaattttgtttccctttatcttatgaaataagatttattgacttcacatctgcctttaagtacttaataactttatgtaatagtatttgatttggggattgtgtcacattttccatgtttttaaattgtttagtgtctgaatgccctcaagatctactcgtctattcacttcatgttgtataaaacatcatactttgtaaaactgctaattgacaaattctccatatatttgctaaatcaatgaataaaatgtatagctcagcattctatacatgtaaataagacattaatttatattctatcattgctaaaatctggctcagtcaaatgtttagtggtgaaaaaggagcattagtttataagtcaataggctgggactctaaccaattccgctacttgccagaaatacatcttgataaaggaaagttttctctatttcattattttcacttgcgatgtgaagaccttggaaacaatgacctctaggacctcttccaggtcctagacttataagtctgttgattttagtacaaattgttagccttttcccatttcctccagtgcatatatagagtgctttcaagaggatgtagaatttctaggccagttattctacagagtcgaagtattcttcattttaaagacaaattacccagtattggcttattttttttttttagtgtttagcatgtgaactcatagaatagtaagttgcctcaaattcagtattaccatcccaacaaaagaaatggaaaaagtagtccctaactcttggattatgtgatcttataactcattaaaattcttgtcattttataaacaagtggggaaaattttt

SEQ ID NO: 464590 - DNA, 4085 bp, Homo sapiens
gcgggtgaagctcggcgttactatcaagcaaccaaactgcaaagctttgggagttgttcgctgtccctgccctgctctgctagggagagaacgccagagggaggcggctggcccggcggcaggctctcagaaccgctaccggcgatgctactgctgtgggtgtcggtggtcgcagccttggcgctggcggtactggcccccggagcaggggagcagaggcggagagcagccaagcgcccaatgtggtgctggtcgtgagcgactccttcattcctgatgattaaaattacatagtctggatgtgcccatgggattttttgaaaatattacttaaagttatctttgtgatttaaacttagagaatgggcagtactggaaattgactagatggcattttattacagagtgctcttgtaatcaaaggcaaatgaaggaagcaggattgtgcagaggagaagctgaattttgttgccatcttatgaatgacagttctcaaactagtatggtgcttcagagctgctttccaataggagtgaggagaacagacctttccacctgcatgttggatggccactggttgtgggctgctcctagaatggggcatggtgttgggcaaagcagctgtcttcagcagaggcaattgttcattcctaaaagggaatccgaatgtggatcacaacatcccagaaacttccaaagatgactgagatatataggtttgttattttttttagtgtagtatgaatgcatagatttttctatatttgtgcttaaattttttgcattcacggccgggcgcggtggctcacgcctgtaatcccagcactttgggaggccgaggtgggcggatcacgaggtcaagagatcaagaccatcctggctaacacagtgaaaccccgtctctactaaaaatacaaaaaaattagccgggcgtggtttcgggcgcctgtagtcccagctactcgggaggctgaagcaggagaatggcgtgaacctgggaggcggagcttgcagtgacctgatatcgcaccactgcactccagcctgggcgacggagcgagagtccgagtatggaattttggtatgtgcgaagtagagggtgcttatataatcagcacccccgcctaaaaaacttgggtactgattctctaatgagcagaaacaacacttcacatgtgtcgtcgcaatttgatggtggaagaattatgtcctctgagactccaaccggacactttaatcgtgtggaagcgtggacaagagatgttgctttcttactcagacaagaaggcaggcccatggttaatcttatccgtaacaggactaaagtcagagtgatggaaagggattggcagaatacagacaaagcagtaaactggttaagaaaggaagcaattaattacactgaaccatttgttatttacttgggattaaatttaccacacccttacccttcaccatcttctggagaaaattttggatcttcaacatttcacacatctctttattggcttgaaaaagtgtctcatgatgccatcaaaatcccaaagtggtcacctttgtcagaaatgcaccctgtagattattactcttcttatacaaaaaactgcactggaagatttacaaaaaaagaaattaagaatattagagcattttattatgctatgtgtgctgagacagatgccatgcttggtgaaattattttggcccttcatcaattagatcttcttcagaaaactattgtcatatactcctcagaccatggagagctggccatggaacatcgacagttttataaaatgagcatgtacgaggctagtgcacatgttccgcttttgatgatgggaccaggaattaaagccggcctacaagtatcaaatgtggtttctcttgtggatatttaccctaccatgcttgatattgctggaattcctctgcctcagaacctgagtggatactctttgttgccgttatcatcagaaacatttaagaatgaacataaagtcaaaaacctgcatccaccctggattctgagtgaattccatggatgtaatgtgaatgcctccacctacatgcttcgaactaaccactggaaatatatagcctattcggatggtgcatcaatattgcctcaactctttgatctttcctcggatccagatgaattaacaaatgttgctgtaaaatttccagaaattacttattctttggatcagaagcttcattccattataaactaccctaaagtttctgcttctgtccaccagtataataaagagcagtttatcaagtggaaacaaagtataggacagaattattcaaacgttatagcaaatcttaggtggcaccaagactggcagaaggaaccaaggaagtatgaaaatgcaattgatcagtggcttaaaacccatatgaatccaagagcagtttgaacaaaaagtttaaaaatagtgttctagagatacatataaatatattacaagatcataattatgtattttaaatgaaacagttttaataattaccaagttttggccgggcacagtggctcacacctgtaatcccaggactttgggaggctgaggaaagcagatcacaaggtcaagagattgagaccatcctggccaacatggtgaaaccctgtctctactaaaaatacaaaaattagctgggcgcggtggtgcacacctatagtctcagctactcagaggctgaggcaggaggatcgcttgaacccgggaggcagcagttgcagtgagctgagattgcgccactgtactccagcctggcaacagagtgagactgtgtcgcaaaaaaataaaaataaaataataataattaccaatttttcattattttgtaagaatgtagtgtattttaagataaaatgccaatgattataaaatcacatattttcaaaaatggttattatttaggcctttgtacaatttctaacaatttagtggaagtatcaaaagaattgaagcaaatactgtaacagttatgttcctttaaataatagagaatataaaatattgtaataatatgtatcataaaatagttgtatgtgagcatttgatggtgctcgatgagttacttgtatttgatgggattgtttggatgtatttaatgggagtatttggagtatttaacgggatgtaaaccctggatgtacctgattttgttactgttttattttaataggtaatatatatacagggtaaaagcttcaaatggtacaaaagggttaacagtgatcgtgaagtctctgtcctttccctcttccctgccatccagttccccctccaagaagcaagtaccgaaaccacctgcttacgcatttttagagattggccacaaatttataaacaaatgtatatattcctttccccctacacaaacggtaacatactgcacacattgttctgcatgttgcttctttttccttttttttttcacttaacagtagatatctagaggtgaaattactgagtcaagactatatttagcaaaattacactagatactacaaattacctctaaagaaggtatactaactgataatctcaccattatttttctttttatgagtaacgtagagcatattttcatgtatttaacagccactggaatctgctttaccatggcctttcctatttctattctttgcctatttttctgttggttgttggtctttgttttgtattacaggtgtgctttagatattagctttttgtaagagatcctgcaaatatcttctttccagtttgtcattgtcatttgtcttttgactttgttctggtattttttgatatgtagaaatttttattttcatgtaagcaaatttatgaatctttgtacaccataagtatatacaattatgatttgtcaattaaaaatattagtacaaaatttacagatctttgcttttcatttattattttttgtccttttgataataaccattctaactgggtgagattacacctcattgtgattttatctttttctattaaaaaaaggctagatactaaatattttaggctttgtgagccatatggtctctttcacaactactcatctctacc

SEQ ID NO: 464591 - DNA, 4139 bp, Homo sapiens
gcgggtgaagctcggcgttactatcaagcaaccaaactgcaaagctttgggagttgttcgctgtccctgccctgctctgctagggagagaacgccagagggaggcggctggcccggcggcaggctctcagaaccgctaccggcgatgctactgctgtgggtgtcggtggtcgcagccttggcgctggcggtactggcccccggagcaggggagcagaggcggagagcagccaagcgcccaatgtggtgctggtcgtgagcgactccttcattcctgatgattaaaattacatagtctggatgtgcccatgggattttttgaaaatattacttaaagttatctttgtgatttaaacttagagaatgggcagtactggaaattgactagatggcattttattacagagtgctcttgtaatcaaaggcaaatgaaggaagcaggattgtgcagaggagaagctgaattttgttgccatcttatgaatgacagttctcaaactagtatggtgcttcagagctgctttccaataggagtgaggagaacagacctttccacctgcatgttggatggccactggttgtgggctgctcctagaatggggcatggtgttgggcaaagcagctgtcttcagcagaggcaattgttcattcctaaaagggaatccgaatgtggatcacaacatcccagaaacttccaaagatgactgagatatataggtttgttattttttttagtgtagtatgaatgcatagatttttctatatttgtgcttaaattttttgcattcacggccgggcgcggtggctcacgcctgtaatcccagcactttgggaggccgaggtgggcggatcacgaggtcaagagatcaagaccatcctggctaacacagtgaaaccccgtctctactaaaaatacaaaaaaattagccgggcgtggtttcgggcgcctgtagtcccagctactcgggaggctgaagcaggagaatggcgtgaacctgggaggcggagcttgcagtgacctgatatcgcaccactgcactccagcctgggcgacggagcgagagtccgagtatggaattttggtatgtgcgaagtagagggtgcttatataatcagcacccccgcctaaaaaacttgggtactgattctctaatgagcagaaacaacacttcacatgtgtcgtcgcaatttgatggtggaagaattatgtcctctgagactccaaccggacactttaatcgtgtggaagcgtggacaagagatgttgctttcttactcagacaagaaggcaggcccatggttaatcttatccgtaacaggactaaagtcagagtgatggaaagggattggcagaatacagacaaagcagtaaactggttaagaaaggaagcaattaattacactgaaccatttgttatttacttgggattaaatttaccacacccttacccttcaccatcttctggagaaaattttggatcttcaacatttcacacatctctttattggcttgaaaaagtgtctcatgatgccatcaaaatcccaaagtggtcacctttgtcagaaatgcaccctgtagattattactcttcttatacaaaaaactgcactggaagatttacaaaaaaagaaattaagaatattagagcattttattatgctatgtgtgctgagacagatgccatgcttggtgaaattattttggcccttcatcaattagatcttcttcagaaaactattgtcatatactcctcagaccatggagagctggccatggaacatcgacagttttataaaatgagcatgtacgaggctagtgcacatgttccgcttttgatgatgggaccaggaattaaagccggcctacaagtatcaaatgtggtttctcttgtggatatttaccctaccatgcttgatattgctggaattcctctgcctcagaacctgagtggatactctttgttgccgttatcatcagaaacatttaagaatgaacataaagtcaaaaacctgcatccaccctggattctgagtgaattccatggatgtaatgtgaatgcctccacctacatgcttcgaactaaccactggaaatatatagcctattcggatggtgcatcaatattgcctcaactctttgatctttcctcggatccagatgaattaacaaatgttgctgtaaaatttccagaaattacttattctttggatcagaagcttcattccattataaactaccctaaagtttctgcttctgtccaccagtataataaagagcagtttatcaagtggaaacaaagtataggacagaattattcaaacgttatagcaaatcttaggtggcaccaagactggcagaaggaaccaaggaagtatgaaaatgcaattgatcagtggcttaaaacccatatgaatccaagagcagtttgaacaaaaagtttaaaaatagtgttctagagatacatataaatatattacaagatcataattatgtattttaaatgaaacagttttaataattaccaagttttggccgggcacagtggctcacacctgtaatcccaggactttgggaggctgaggaaagcagatcacaaggtcaagagattgagaccatcctggccaacatggtgaaaccctgtctctactaaaaatacaaaaattagctgggcgcggtggtgcacacctatagtctcagctactcagaggctgaggcaggaggatcgcttgaacccgggaggcagcagttgcagtgagctgagattgcgccactgtactccagcctggcaacagagtgagactgtgtcgcaaaaaaataaaaataaaataataataattaccaatttttcattattttgtaagaatgtagtgtattttaagataaaatgccaatgattataaaatcacatattttcaaaaatggttattatttaggcctttgtacaatttctaacaatttagtggaagtatcaaaagaattgaagcaaatactgtaacagttatgttcctttaaataatagagaatataaaatattgtaataatatgtatcataaaatagttgtatgtgagcatttgatggtgctcgatgagttacttgtatttgatgggattgtttggatgtatttaatgggagtatttggagtatttaacgggatgtaaaccctggatgtacctgattttgttactgttttattttaataggtaatatatatacagggtaaaagcttcaaatggtacaaaagggttaacagtgatcgtgaagtctctgtcctttccctcttccctgccatccagttccccctccaagaagcaagtaccgaaaccacctgcttacgcatttttagagattggccacaaatttataaacaaatgtatatattcctttccccctacacaaacggtaacatactgcacacattgttctgcatgttgcttctttttccttttttttttcacttaacagtagatatctagaggtgaaattactgagtcaagactatatttagcaaaattacactagatactacaaattacctctaaagaaggtatactaactgataatctcaccatcaatgcatgtcttcttatcctttgccaacctaacagataaaaatgttctatttttatttttctttttatgagtaacgtagagcatattttcatgtatttaacagccactggaatctgctttaccatggcctttcctatttctattctttgcctatttttctgttggttgttggtctttgttttgtattacaggtgtgctttagatattagctttttgtaagagatcctgcaaatatcttctttccagtttgtcattgtcatttgtcttttgactttgttctggtattttttgatatgtagaaatttttattttcatgtaagcaaatttatgaatctttgtacaccataagtatatacaattatgatttgtcaattaaaaatattagtacaaaatttacagatctttgcttttcatttattattttttgtccttttgataataaccattctaactgggtgagattacacctcattgtgattttatctttttctattaaaaaaaggctagatactaaatattttaggctttgtgagccatatggtctctttcacaactactcatctctacc

SEQ ID NO: 464592 - DNA, 2056 bp, Homo sapiens
tagattaaatgcgtttaatgtgatggggagaaggcgcgggaaggaaggaaggaggcgaagcggtgcgggagggaggcggccgttgccatggaaggagctgcaagcctccctgcagaccgcgagccggagcccccgcacccccggggctggccccctggcctcccgccccagcccgggccggcggcccctccctgctccgctgtccgccttgggtacagaagcggcgagtggcccctttccaggaggcctgtttaccagcacgacaacggcaaattagtgcgcttaagaggcattcggcgtttaccccggccaacatgcgcagcgtgaagggggcctgcgaggcctgctccccggaatctgctgaaatggcccccctcgtgcatcttaatcgacttacttccacccatcacattaaacgcatttaatctactcttgcaaatggctaattttgaaaatccgcttatcagaattagccgtgtctggggctgcaggcacagtggttccaacagagcagcgggagtggacagcggtcacagagggaagggaaaacagtcccagagagagggtggactctgttctcagactgaggaggccgggaagggaaaggcgggggcggggcgagggtctgcagcaacagagccggcaggaataccaggtcatcacggtattgtttgttgattttgaaagctgagttgcatttgagagatgaggttatgtgccagcggaaagaagcagctcccatctgcataacccagccacccacctcccaaggcagaagtgaaagcaccaggctccccctgctgcaccccagatgcagccagggtggaggtgtccagcctgagctctcccatctgatgcctgctcctgggacgcggactctggagtgggcatctcagggcccacagggacagcaggacggcctgccccacctctccccaccgtggccacaacaacgcccagacagggatgttctggtttcctctcactccctgcccatctccaggcctggtttctcagcttcctcctgatttagggaggccccaacaagcacccaagagtgtccttttcttccatttgcctcacagaatcctcttgacattcacaaaactcaggtttctgtccagccagggccagctcactcccagggcaccagccctgtcctctccaggcctgtctaagaggaggctacacccagccccagaggtgagagcatttcaccaccccttgcccgggcactcctggccctcacgggacccccgtggaggtgtccgctctcagacactgtgacgccctcacggccaaggtcagagagcctctttcaaggaccttcccctctctggaccttgccgacagtcctagtttctagtgataggctcgttcccgactcattggtgggaccctggcaaggtgctcggtgaacgagctcactcacgttgacgtttcaatcagcatgtttatctcccacccacccacccctgcactaaccgaattttttctcctgccccgagggtgtctttcctcttccagcctccacaccatgcatgactcacttgctgcggagtcgggcattcaggctgcagaggctcagcgtcaaggctccaaagcctctggaaggagatgccaatggatgtgggggggctcatgagcaccaccaggtggtcatctggaagctgagtctctctgagggcctctgtagtcaccaatggtcacaaacggccagcggtcactcatttcccatcagcgttctggataggagtgatgctgtccaagcccctggaatcaccagaagcttcctgtgcgtgctttatctcaccactggcagcccagggccccgcagagaactgccactcagtaggtcttcgttggtatttgctgaagaaacaagtctgcccctaaacagagaaggtggcaaggtagttactatctggcttggagattatgtatgagttgattggtcacgtcaaaagtcaaaattaaatctatccagatgccatagttaaaagggcccaatgatgtattggttgggtgatttcttttgtgaaaacagctctaaagc

SEQ ID NO: 464593 - DNA, 1227 bp, Homo sapiens
  misc_feature (1212)..(1214): n is a, c, g, or t
  misc_feature (1216)..(1217): n is a, c, g, or t
  misc_feature (1219)..(1219): n is a, c, g, or t
  misc_feature (1223)..(1223): n is a, c, g, or t
  misc_feature (1225)..(1225): n is a, c, g, or t
  misc_feature (1227)..(1227): n is a, c, g, or t
ctaagggatgcgtggggctggatgctgctgtttattattagatgcatattttgctactcctggtcttgggcattaggggccattatggacatgtttcagtgctgcagagattttgtttatggccagttttggggccagtttatggccagattttggggggccctgctcccaacatgtcccgcttctctgatttgcaaatcaacaaaagcaaaggcagctttgtcatggttttcttccgccatctatgacagcttcttgatctgtccccaggtgggtggctgtgttcaacgggtgttgctcgtgacaggttccagtcctcgagggttaactcctcctgtaaaagatgaagaatgtaccatttggcaagttgggcatcactggacaatagctttagcttctttccagaatgttgattgtcctgagttccagagcctcaaagagcacccagcataactgtgggagaatagtaagcattggacacaaaatggtttaggcaaataatgatgaacaaaaatggtcagtctgtgttcctgctgacccagcacagtggggacgctgtgtaggacatgacctttgggggaaaggacacaagaactcagcgtgggggatccagaaaagaagtcgcacgtattgaagccagtaacgccaagccagtgaattctccttgacgagaaagacccacttactctgcagaagagatatatgacagctgacaatccctggaggagaatctttctactaaattggtaagggatgctaagcaaatgatgtggactcaggaaacaacgcatttcatgatatacggttgcctctcaaggtgaattcgagacccctcttgaattacaaagagttgaaaacattcaagtacggaataaactattactgcgaatacgctcatatgacacaagaacaatctctgagcttctttgaggatgtccagatgactgctgactgcactaattgcatcaatcgtgtatccatacaggttctttctataaaatagtggtcgctagttatgaggcgttaagccttcatggatataaacagactattccacctaagtgatctggcagaagcttagttttctaccacaacatccaccgtcctccctccctcccttcctagctggtcagaaaagctactcagaataaagactacatttcccagccatctttgcagctaggtttatccacctgactaaattccaccggnnngnnanaagnanan

SEQ ID NO: 464594 - DNA, 887 bp, Homo sapiens
ctaagggatgcgtggggctggatgctgctgtttattattagatgcatattttgctactcctggtcttgggcattaggggccattatggacatgtttcagtgctgcagagattttgtttatggccagttttggggccagtttatggccagattttggggggccctgctcccaacatgtcccgcttctctgatttgcaaatcaacaaaagcaaaggcagctttgtcatggttttcttccgccatctatgacagcttcttgatctgtccccaggtgggtggctgtgttcaacgggtgttgctcgtgacaggttccagtcctcgagggttaactcctcctgtaaaagatgaagaatgtaccatttggcaagttgggcatcactggacaatagctttagcttctttccagaatgttgattgtcctgagttccagagcctcaaagagcacccagcataactgtgggagaatagtaagcattggacacaaaatggtttaggcaaataatgatgaacaaaaatggtcagtctgtgttcctgctgacccagcacagtggggacgctgtgtaggacatgacctttgggggaaaggacacaagaactcagcgtgggggatccagaaaagaagtcgcacgtattgaagccagtaacgccaagccagtgaattctccttgacgagaaagacccacttactctgcagaagagatatatgacagctgacaatccctggaggagaatctttctactaaattggtaagggatgctaagcaaatgatgtggactcaggaaacaacgcatttcatgatatacggttgcctctcaaggtgaattcgagacccctcttgaattacaaagaggtaagctgtctccaaaaggggagaaaatgaaagaatg

SEQ ID NO: 464595 - DNA, 953 bp, Homo sapiens
gagaaccggaggctggagagcaaaatccggtagcacttggagaagaagggaccccagattgacaatgcccgtcttgccgctgatgactttagagtcaagtatgagacagagctggccatgcgccagtctgtggagaacgacatccacgggctccgcaatgtcattgatgacactgtcactcggctgcagctggagacagagatcgaggctgtcaaggaggagctgctcttcatgaagaagaaccacaaagaggaagcaaaaagcctacaagcccagattgccagctctgggttgatggtggaggtagatgcccccaaatctcaggacctcgccaaggtcatggcagacatccgggcccaatatgacgagctggctcagaagaacggagaggagctggacaagcattggcctcagcagattgaagagagcaccacagtggtcaccactcagtccgccgaggttggagctgctgagacgacgctcacggagctgagacgtacagtgcagttcttggagatgacctggactccatgagaaatctgaaggccagcttggagaacagcctgagggaggtggaggccccgctacgccctacagatggagcagctcaacgggatcctgctgcaccttgagtcagagctggcacagacccgggcagagggacagcgccaggcccaggagtatgaggccctgctgaacatcaaggtcaagctggaggctgagatcgccacctaccgccgcctgctggaagatggcgaggactttaatcttggtgatgccttggacagcagcaactccatgcaaaccatccaaaagaccaccacccgccggatagtggatggcaaagtggtgtctgagaccaatgacaccaaagttctgaggcattaagccagcagaagcagggtaccctttggggagcaggaggccaataaaaagttcagagttcattggat

SEQ ID NO: 464596 - DNA, 575 bp, Homo sapiens
  misc_feature (563)..(563): n is a, c, g, or t
  misc_feature (565)..(567): n is a, c, g, or t
  misc_feature (569)..(569): n is a, c, g, or t
  misc_feature (571)..(571): n is a, c, g, or t
ggcgctttaaggtttcagactagtatggggtctactgttacaagaggagttgggataatagcagtagagaaagacggagtggtgaccaaggcgcaggtcacgaagttacctcttcatggagggaatctgtctttttctgatgagaaaggggacccagccatgcagaggagtgactggatcaggaaactgaagctggctcatggtcagcagccagcaagctacaaagggcttccaacagcccatgaagcactgagtcctgccaaaagccacgtgcatgagcttagaagagcttcatcctccaggctaggaaagagacagtcggtgtgcagcaagagaaaagagaggaggaaacatgtggaaagacccaaagagcaagcaaagagtgatgatgaagtgaagaagtcgaatagcaaccatttcaacagatttggctgtaaaagtgaaactggggatgaggtggaatggagagagagtggtagagacagcttgtgaccagtttactcccctgcaatggtatagatttgtggctgcaaagcagctgcttgtaaagatgagctgtaagntnnntncnttct

SEQ ID NO: 464597 - DNA, 1730 bp, Homo sapiens
gaagtgggtgtctgcctgcagtgaggctagcctgggctgctattttctgcagggcctgggcttcactctgctgctcctagcttgccttgttcttagtcaacagtgaaccacaggccagctgcagcttcctcatattgtgatgtaactcaggcaagggctggacacagagcttttaccacgccttctgtcactgagagcaaaacagagctgtgggggtctcggcttcccccactgcacagcagctcccgagctgcagggagagcgggagtgcacgggcaccaaactgcgcctcttgggggtgctgcagcggattttctaacagatattttcctctcctttattctaggatctggaagaactgtgcctcacctccgtctctctgcctctgactgctccctctactccccaggccttgctgtcagcacctgcaacagagctgtccctgctgtggtctggggaaagttccagccaggccctctgtggcgcatctatccctggggtggggcatccagggtattgaatctacaaaatgcatccatttcacctccaagtcagctctgtgcacaccaagccgtgtgcaggataggctaccctagagagcctgggtacccacgcagccttccacgaagccccacctacatggctgctgcaggttctcaccatcctgtgctcaccgggaaggctggcaggtccacaccggaaaccatgggctggggagaagcagggccttggtgctagagagacctgcccaagcattcttctgcaagccccgagacagaggagtgagcaagcctcaggggcgtgacaggtgctcaggagagagcaggacacatgcagaacctggagagagccagagagggaccggccacagagaagcccatcgcctgccagcactgacgtggacgttgggaaaaggtttctgctggtggcccagccctggctgggattcctcactcccacgcctcaagcctgagaatccttccggaaacacaaggctggacctgcacctgccaggtgaccatggcctcggtgtgggagcaacatggggagacctgggtccctgagtggccatgaccatcgacctggagcaatcagctcaggactgttagatcccctgtgggatggtgtattggtctgttctcacactgccaataaagacatacctgagactggagctcagtcactatcacgagaacagcatgaaggtaaccgcccccatgattcaattacctcccactgggtccctcccacgagacacagggattatgggaactacaattgaagactccacggacaccctgcgggaccagaggaggagcagtgggggctccccaagcctgccgctcccgggacagggctcctgccacagcagacatggaagcagggatggtccagggatcttggtcaccagagccccctgcccatgcgagtgggaaattgcgggagacgtgggctgggccagtccctgcacgctccggacacactgccaaggtgctggacctcaggtgggcagcaaggagcctttggaagagaatattgtaccctgaatcaaaacagagagtcaaattatcttaatggttgttatataaagtgatgcttagtcattttcttaaactatttgtctgaaatgggaaatttctctaaatcacatataagactgaaaccaactaaaattcatttttctctccaacaaaatcaacgctttaatttgcctgaagtttttctctgaa

SEQ ID NO: 464598 - DNA, 1522 bp, Homo sapiens
catctctccgcgagccgcgggtcaagtgccggcggctaatggtgcgcgaggagccgccacccattcggcgttggctctggcgtcggggtcgttgtgacaaccgctccagtagccgtttccgaggcagcaggtgcggccgctttagccctgagcgggctctgcggctgcctgcgagtctctgctgtgccgacccttctcttcgcggaccccacgccaagcagcgaccctgaggcgacagccggagcgcccggcaatggcggcctcgacggcctcccaccggcccatcaaggggatcttgaagaacaagacctctacgacttcctctatggtggcgtcggccgaacagccccgcaggagtgtcgacgaggagctgagcaaaaaatcccagaagtgggatgaaattaacatcttggcgacctatcatccagcagacaaaggctatggtttaatgaaaatagatgaaccaagccctccttaccatagtatgatgggtgatgatgaagatgcgtgtagggacaccgagaccactgaagccatggcgccagacatcctagccaagaaattagctgctgctgaaggcttggagccaaagtaccggattcaggaacaagaaagcagtggagaggaggatagtgacctctcacctgaagaacgagaaaaaaagcgacaatttgaaatgagaaggaagcttcactacaatgaaggactcaatatcaaactagccagacaattaatttcaaaagacctacatgatgatgatgaagatgaagaaatgttagagactgcagatggagaaagcatgaatacggaagaatcaaatcaaggatctactccaagtgaccaacagcaaaacaaattacgaagttcatagaagagatttgttcaacactgcaattgtttgttagatataaaccctgtgactataatacattgcttcttgttctccacaattcatgacttaagtaccaaaatgcataccagttattatatattgccaagaattaaatgataaacttagagactaattagactgaaaatgcctaattgatatatatattcttatgcctagtactttaccacaaatacagtgtaatatcatcagtccaaaactgcattactttcataagaacactggttaatttgtataagatattatagagctttttatgctttagaagttaagcaatatctttgggggggaactaatttattttcatcactcgaaatgtggtagctcttacaaagtttgttgatttgtttttttaaaaatcaaaagccagttgaacaacaggatatatagacttataaatattcaagctgaatcgtattttaacacttctcttcaacttgatttgtctgtttaattgaaaagaattgtaagagttactgttgcattttctgacctactacctttaaaattcctgttgagtttctttgtgtttacaaggaaaggactgaactttttctcatcaaaactagcttttttccccacaaataaattatcaggttaaactttcaccaa

SEQ ID NO: 464599 - DNA, 421 bp, Homo sapiens
  misc_feature (421)..(421): n is a, c, g, or t
cgaagtcatagccaagccatgctaaacaatgctcaaccagatcaatatgaagctccagataaagattttatgatagtggctcttgatttactgagtggcctggctgaaggacttggaggcaacattgaacagctggtagcccgaagtaacatcctgacactaatgtatcagtgcatgcaggataaaatgccagaaaggtgagacttgaaaggtgaaaatgaattgaagcctgtttctctgtgtcacattggggttaatttcttcttatttcttgtaggataaaatgccagaagttcgacagagttcttttgccctgttaggtgacctcacaaaagcttgctttcagcatgttaagccttgtataggtatgaatattttctactgctattgaaacttctaaaactaggggggatcctctagn

SEQ ID NO: 464600 - DNA, 3032 bp, Homo sapiens
accgccgccgaatgttcccgccgcgggctccgccccccggccaatcggaccggcgctcggtgaagcccagattctctttgttccgcagccatttcaggccccggacaggaggcagtgccgcttcggccgaaggcccgagcgcccgaggcgtctgggatggtgtgggaccggcaaaccaagatggagtatgagtggaaacctgacgagcaagggcttcagcaaatcctgcagctgttgaaggagtcccagtccccagacaccaccatccagagaaccgtgcaacaaaaactggaacaacttaatcagtatccagactttaacaactacttgatttttgttcttacaaaattaaaatctgaagatgaacccacaagatcattgagtggtcttatcttgaagaataatgtgaaagcacactttcagaacttcccaaatggtgtaacagactttattaaaagtgaatgtttaaataatattggtgactcctctcctctgattagagccactgttggtattttgatcacaactatagcctccaagggagaattgcagaattggcctgacctcttaccaaaactctgtagcctgttggattctgaagattataatacctgtgagggagcatttggtgcccttcagaagatttgtgaagattctgctgagattttagacagtgatgttttagatcgtcctctcaacatcatgattcccaaatttttacagttcttcaagcatagtagtccaaaaataaggtctcacgctgttgcatgtgtcaatcagtttatcatcagtaggactcaagctctaatgttgcacattgattcttttattgagaatctctttgcattagctggtgatgaagaaccagaggtacggaaaaatgtgtgccgagcacttgtgatgttgctcgaagttcgaatggatcgcctgcttcctcacatgcataatatagttgagtacatgctacagaggactcaagatcaagatgaaaatgtggctttagaagcctgtgaattttggctaactttagctgaacagccaatatgcaaagatgtactcgtaaggcatcttcctaagttgattcctgtgttagtgaatggcatgaagtactcagacatagatattatcctacttaagggtgatgttgaagaagacgaaacgattcctgatagtgaacaggatatacggccacgttttcaccgatcgaggacggtggctcagcagcatgatgaagatggaattgaagaggaagatgatgatgatgatgaaattgatgatgatgatacaatttctgactggaatctaagaaaatgttctgctgctgccctggatgttcttgcaaatgtgtatcgtgatgaactgctgccacatattttgccccttttgaaagaattactttttcatcatgaatgggttgttaaagaatcaggcattttggttttaggagcaattgctgaaggttgcatgcagggcatgattccatacttgcctgagcttattcctcaccttattcagtgcctctctgataaaaaggctcttgtgcgttccataacatgctggactcttagccgctatgcacactgggtggtcagccagccgccagacacgtacctgaagccattaatgacagaattgctaaagcgcatcctggatagcaacaagagagtacaagaagctgcctgcagtgcctttgctaccctagaagaggaggcttgtacagaacttgttccttaccttgcttatatacttgataccctggtctttgcatttagtaaataccagcataagaacctgctcattctttacgatgccataggaacattagcagattcagtaggacatcatttaaacaaaccagaatatattcagatgctaatgcctccactgatccagaaatggaacatgttaaaggatgaagataaagatctcttccctttacttgagtgcctatcttcagttgccacagcactgcagtctggattccttccgtactgtgaacctgtgtatcagcgttgtgtaaacctagtacagaagactcttgcacaagccatgctaaacaatgctcaaccagatcaatatgaagctccagataaagattttatgatagtggctcttgatttactgagtggcctggctgaaggacttggaggcaacattgaacagctggtagcccgaagtaacatcctgacactaatgtatcagtgcatgcaggataaaatgccagaagttcgacagagttcttttgccctgttaggtgacctcacaaaagcttgctttcagcatgttaagccttgtatagctgatttcatgccaatattgggaaccaacctaaatccagaattcatttcagtctgcaacaatgccacatgggcaattggagaaatctccattcaaatgggtatagagatgcagccttatattcctatggtgttgcaccagcttgtagaaatcattaacagacccaacacaccaaagacgttgttagagaatacagcaataacaattggtcgtcttggttacgtttgtcctcaagaggtggcccccatgctacagcagtttataagaccctggtgcacctctctgagaaacataagagacaatgaggaaaaggattcagcattccgtggaatttgtaccatgatcagtgtgaatcccagtggcgtaatccaagattttatatttttttgtgatgccgttgcatcatggattaacccaaaagatgatctcagagacatgttctgtaagatccttcatggatttaaaaatcaagttggcgatgaaaattggaggcgtttctctgaccagtttcctcttcccttaaaagagcgtcttgcagctttttatggtgtttaatctaatacacttaagctgcagtcccaaaattaggggtaagttataagaagtttggaaattttcaggatgaagaaaattttgttagggctgtcatttcaaactactaaatagaataaaaagctatttgttttctatagaggttgaataaaacatagcctcatatcattctatcttgggct

SEQ ID NO: 464601 - DNA, 3214 bp, Homo sapiens
accgccgccgaatgttcccgccgcgggctccgccccccggccaatcggaccggcgctcggtgaagcccagattctctttgttccgcagccatttcaggccccggacaggaggcagtgccgcttcggccgaaggcccgagcgcccgaggcgtctgggatggtgtgggaccggcaaaccaagatggagtatgagtggaaacctgacgagcaagggcttcagcaaatcctgcagctgttgaaggagtcccagtccccagacaccaccatccagagaaccgtgcaacaaaaactggaacaacttaatcagtatccagactttaacaactacttgatttttgttcttacaaaattaaaatctgaagatgaacccacaagatcattgagtggtcttatcttgaagaataatgtgaaagcacactttcagaacttcccaaatggtgtaacagactttattaaaagtgaatgtttaaataatattggtgactcctctcctctgattagagccactgttggtattttgatcacaactatagcctccaagggagaattgcagaattggcctgacctcttaccaaaactctgtagcctgttggattctgaagattataatacctgtgagggagcatttggtgcccttcagaagatttgtgaagattctgctgagattttagacagtgatgttttagatcgtcctctcaacatcatgattcccaaatttttacagttcttcaagcatagtagtccaaaaataaggtctcacgctgttgcatgtgtcaatcagtttatcatcagtaggactcaagctctaatgttgcacattgattcttttattgagaatctctttgcattagctggtgatgaagaaccagaggtacggaaaaatgtgtgccgagcacttgtgatgttgctcgaagttcgaatggatcgcctgcttcctcacatgcataatatagttgagtacatgctacagaggactcaagatcaagatgaaaatgtggctttagaagcctgtgaattttggctaactttagctgaacagccaatatgcaaagatgtactcgtaaggcatcttcctaagttgattcctgtgttagtgaatggcatgaagtactcagacatagatattatcctacttaagggtgatgttgaagaagacgaaacgattcctgatagtgaacaggatatacggccacgttttcaccgatcgaggacggtggctcagcagcatgatgaagatggaattgaagaggaagatgatgatgatgatgaaattgatgatgatgatacaatttctgactggaatctaagaaaatgttctgctgctgccctggatgttcttgcaaatgtgtatcgtgatgaactgctgccacatattttgccccttttgaaagaattactttttcatcatgaatgggttgttaaagaatcaggcattttggttttaggagcaattgctgaaggttgcatgcagggcatgattccatacttgcctgagcttattcctcaccttattcagtgcctctctgataaaaaggctcttgtgcgttccataacatgctggactcttagccgctatgcacactgggtggtcagccagccgccagacacgtacctgaagccattaatgacagaattgctaaagcgcatcctggatagcaacaagagagtacaagaagctgcctgcagtgcctttgctaccctagaagaggaggcttgtacagaacttgttccttaccttgcttatatacttgataccctggtctttgcatttagtaaataccagcataagaacctgctcattctttacgatgccataggaacattagcagattcagtaggacatcatttaaacaaaccagaatatattcagatgctaatgcctccactgatccagaaatggaacatgttaaaggatgaagataaagatctcttccctttacttgagtgcctatcttcagttgccacagcactgcagtctggattccttccgtactgtgaacctgtgtatcagcgttgtgtaaacctagtacagaagactcttgcacaagccatgctaaacaatgctcaaccagatcaatatgaagctccagataaagattttatgatagtggctcttgatttactgagtggcctggctgaaggacttggaggcaacattgaacagctggtagcccgaagtaacatcctgacactaatgtatcagtgcatgcaggataaaatgccagaagttcgacagagttcttttgccctgttaggtgacctcacaaaagcttgctttcagcatgttaagccttgtatagctgatttcatgccaatattgggaaccaacctaaatccagaattcatttcagtctgcaacaatgccacatgggcaattggagaaatctccattcaaatgggtatagagatgcagccttatattcctatggtgttgcaccagcttgtagaaatcattaacagacccaacacaccaaagacgttgttagagaatacagcaataacaattggtcgtcttggttacgtttgtcctcaagaggtggcccccatgctacagcagtttataagaccctggtgcacctctctgagaaacataagagacaatgaggaaaaggattcagcattccgtggaatttgtaccatgatcagtgtgaatcccagtggcgtaatccaagattttatatttttttgtgatgccgttgcatcatggattaacccaaaagatgatctcagagacatgttctgtaagatccttcatggatttaaaaatcaagttggcgatgaaaattggaggcgtttctctgaccagtttcctcttcccttaaaagagcgtcttgcagctttttatggtgtttaatctaatacacttaagctgcagtcccaaaattaggggtccttcagtcttggagactataagggagcctctgcacccagggaaaagggaggtgttgccgtcactgtattaagtcgatgttgggaaacgttttaacatctggagcctttgtgggtggaaatatgtctccagttacaactccgcagtggatgtgaagaagcaaaaaaaaaaaaatctattcagtctactcacaaaacagtacattgtggaatattatggggaattgtaccaaaacaagaaccatataaatgatgcctagggacaagaaagaggaacaattctatagcgcacaataaaggaaacctaagaatgggagttacaaata

SEQ ID NO: 464602 - DNA, 3005 bp, Homo sapiens
gcaaattcgcggtgactcagtctggtcggctccttgcgctcggcggccgcggcggcagcagcagcagacgttggcggccgggctgccaggagcagttccgccgggtttcactgtccgtgacttccttcggggcacctcaggcagcaaaccaagatggagtatgagtggaaacctgacgagcaagggcttcagcaaatcctgcagctgttgaaggagtcccagtccccagacaccaccatccagagaaccgtgcaacaaaaactggaacaacttaatcagtatccagactttaacaactacttgatttttgttcttacaaaattaaaatctgaagatgaacccacaagatcattgagtggtcttatcttgaagaataatgtgaaagcacactttcagaacttcccaaatggtgtaacagactttattaaaagtgaatgtttaaataatattggtgactcctctcctctgattagagccactgttggtattttgatcacaactatagcctccaagggagaattgcagaattggcctgacctcttaccaaaactctgtagcctgttggattctgaagattataatacctgtgagggagcatttggtgcccttcagaagatttgtgaagattctgctgagattttagacagtgatgttttagatcgtcctctcaacatcatgattcccaaatttttacagttcttcaagcatagtagtccaaaaataaggtctcacgctgttgcatgtgtcaatcagtttatcatcagtaggactcaagctctaatgttgcacattgattcttttattgagaatctctttgcattagctggtgatgaagaaccagaggtacggaaaaatgtgtgccgagcacttgtgatgttgctcgaagttcgaatggatcgcctgcttcctcacatgcataatatagttgagtacatgctacagaggactcaagatcaagatgaaaatgtggctttagaagcctgtgaattttggctaactttagctgaacagccaatatgcaaagatgtactcgtaaggcatcttcctaagttgattcctgtgttagtgaatggcatgaagtactcagacatagatattatcctacttaagggtgatgttgaagaagacgaaacgattcctgatagtgaacaggatatacggccacgttttcaccgatcgaggacggtggctcagcagcatgatgaagatggaattgaagaggaagatgatgatgatgatgaaattgatgatgatgatacaatttctgactggaatctaagaaaatgttctgctgctgccctggatgttcttgcaaatgtgtatcgtgatgaactgctgccacatattttgccccttttgaaagaattactttttcatcatgaatgggttgttaaagaatcaggcattttggttttaggagcaattgctgaaggttgcatgcagggcatgattccatacttgcctgagcttattcctcaccttattcagtgcctctctgataaaaaggctcttgtgcgttccataacatgctggactcttagccgctatgcacactgggtggtcagccagccgccagacacgtacctgaagccattaatgacagaattgctaaagcgcatcctggatagcaacaagagagtacaagaagctgcctgcagtgcctttgctaccctagaagaggaggcttgtacagaacttgttccttaccttgcttatatacttgataccctggtctttgcatttagtaaataccagcataagaacctgctcattctttacgatgccataggaacattagcagattcagtaggacatcatttaaacaaaccagaatatattcagatgctaatgcctccactgatccagaaatggaacatgttaaaggatgaagataaagatctcttccctttacttgagtgcctatcttcagttgccacagcactgcagtctggattccttccgtactgtgaacctgtgtatcagcgttgtgtaaacctagtacagaagactcttgcacaagccatgctaaacaatgctcaaccagatcaatatgaagctccagataaagattttatgatagtggctcttgatttactgagtggcctggctgaaggacttggaggcaacattgaacagctggtagcccgaagtaacatcctgacactaatgtatcagtgcatgcaggataaaatgccagaagttcgacagagttcttttgccctgttaggtgacctcacaaaagcttgctttcagcatgttaagccttgtatagctgatttcatgccaatattgggaaccaacctaaatccagaattcatttcagtctgcaacaatgccacatgggcaattggagaaatctccattcaaatgggtatagagatgcagccttatattcctatggtgttgcaccagcttgtagaaatcattaacagacccaacacaccaaagacgttgttagagaatacagcaataacaattggtcgtcttggttacgtttgtcctcaagaggtggcccccatgctacagcagtttataagaccctggtgcacctctctgagaaacataagagacaatgaggaaaaggattcagcattccgtggaatttgtaccatgatcagtgtgaatcccagtggcgtaatccaagattttatatttttttgtgatgccgttgcatcatggattaacccaaaagatgatctcagagacatgttctgtaagatccttcatggatttaaaaatcaagttggcgatgaaaattggaggcgtttctctgaccagtttcctcttcccttaaaagagcgtcttgcagctttttatggtgtttaatctaatacacttaagctgcagtcccaaaattaggggtaagttataagaagtttggaaattttcaggatgaagaaaattttgttagggctgtcatttcaaactactaaatagaataaaaagctatttgttttctatagaggttgaataaaacatagcctcatatcattctatcttgggct

SEQ ID NO: 464603 - DNA, 2452 bp, Homo sapiens
  misc_feature (2452)..(2452): n is a, c, g, or t
accgccgccgaatgttcccgccgcgggctccgccccccggccaatcggaccggcgctcggtgaagcccagattctctttgttccgcagccatttcaggccccggacaggaggcagtgccgcttcggccgaaggcccgagcgcccgaggcgtctgggatggtgtgggaccggcaaaccaagatggagtatgagtggaaacctgacgagcaagggcttcagcaaatcctgcagctgttgaaggagtcccagtccccagacaccaccatccagagaaccgtgcaacaaaaactggaacaacttaatcagtatccagactttaacaactacttgatttttgttcttacaaaattaaaatctgaagatgaacccacaagatcattgagtggtcttatcttgaagaataatgtgaaagcacactttcagaacttcccaaatggtgtaacagactttattaaaagtgaatgtttaaataatattggtgactcctctcctctgattagagccactgttggtattttgatcacaactatagcctccaagggagaattgcagaattggcctgacctcttaccaaaactctgtagcctgttggattctgaagattataatacctgtgagggagcatttggtgcccttcagaagatttgtgaagattctgctgagattttagacagtgatgttttagatcgtcctctcaacatcatgattcccaaatttttacagttcttcaagcatagtagtccaaaaataaggtctcacgctgttgcatgtgtcaatcagtttatcatcagtaggactcaagctctaatgttgcacattgattcttttattgagaatctctttgcattagctggtgatgaagaaccagaggtacggaaaaatgtgtgccgagcacttgtgatgttgctcgaagttcgaatggatcgcctgcttcctcacatgcataatatagttgagtacatgctacagaggactcaagatcaagatgaaaatgtggctttagaagcctgtgaattttggctaactttagctgaacagccaatatgcaaagatgtactcgtaaggcatcttcctaagttgattcctgtgttagtgaatggcatgaagtactcagacatagatattatcctacttaagggtgatgttgaagaagacgaaacgattcctgatagtgaacaggatatacggccacgttttcaccgatcgaggacggtggctcagcagcatgatgaagatggaattgaagaggaagatgatgatgatgatgaaattgatgatgatgatacaatttctgactggaatctaagaaaatgttctgctgctgccctggatgttcttgcaaatgtgtatcgtgatgaactgctgccacatattttgccccttttgaaagaattactttttcatcatgaatgggttgttaaagaatcaggcattttggttttaggagcaattgctgaaggttgcatgcagggcatgattccatacttgcctgagcttattcctcaccttattcagtgcctctctgataaaaaggctcttgtgcgttccataacatgctggactcttagccgctatgcacactgggtggtcagccagccgccagacacgtacctgaagccattaatgacagaattgctaaagcgcatcctggatagcaacaagagagtacaagaagctgcctgcagtgcctttgctaccctagaagaggaggcttgtacagaacttgttccttaccttgcttatatacttgataccctggtctttgcatttagtaaataccagcataagaacctgctcattctttacgatgccataggaacattagcagattcagtaggacatcatttaaacaaaccagaatatattcagatgctaatgcctccactgatccagaaatggaacatgttaaaggatgaagataaagatctcttccctttacttgagtgcctatcttcagttgccacagcactgcagtctggattccttccgtactgtgaacctgtgtatcagcgttgtgtaaacctagtacagaagactcttgcacaagccatgctaaacaatgctcaaccagatcaatatgaagctccagataaagattttatgatagtggctcttgatttactgagtggcctggctgaaggacttggaggcaacattgaacagctggtagcccgaagtaacatcctgacactaatgtatcagtgcatgcaggataaaatgccagaaaggtgagacttgaaaggtgaaaatgaattgaagcctgtttctctgtgtcacattggggttaatttcttcttatttcttgtaggataaaatgccagaagttcgacagagttcttttgccctgttaggtgacctcacaaaagcttgctttcagcatgttaagccttgtataggtatgaatattttctactgctattgaaacttctaaaactaggggggatcctctagn

SEQ ID NO: 464604 - DNA, 1925 bp, Homo sapiens
tgttgcgaactccttgtcacccaaggggtaagggaggagccacagtataaaggaatgtctaggcaagtagtcagcaaactatgtcccatggagccaaatttagcccatgacctgcaagctggtgatgaagaaccagaggtacggaaaaatgtgtgccgagcacttgtgatgttgctcgaagttcgaatggatcgcctgcttcctcacatgcataatatagttgagggtgatgttgaagaagacgaaacgattcctgatagtgaacaggatatacggccacgttttcaccgatcgaggacggtggctcagcagcatgatgaagatggaattgaagaggaagatgatgatgatgatgaaattgatgatgatgatacaatttctgactggaatctaagaaaatgttctgctgctgccctggatgttcttgcaaatgtgtatcgtgatgaactgctgccacatattttgccccttttgaaagaattactttttcatcatgaatgggttgttaaagaatcaggcattttggttttaggagcaattgctgaaggttgcatgcagggcatgattccatacttgcctgagcttattcctcaccttattcagtgcctctctgataaaaaggctcttgtgcgttccataacatgctggactcttagccgctatgcacactgggtggtcagccagccgccagacacgtacctgaagccattaatgacagaattgctaaagcgcatcctggatagcaacaagagagtacaagaagctgcctgcagtgcctttgctaccctagaagaggaggcttgtacagaacttgttccttaccttgcttatatacttgataccctggtctttgcatttagtaaataccagcataagaacctgctcattctttacgatgccataggaacattagcagattcagtaggacatcatttaaacaaaccactaaacaatgctcaaccagatcaatatgaagctccagataaagattttatgatagtggctcttgatttactgagtggcctggctgaaggacttggaggcaacattgaacagctggtagcccgaagtaacatcctgacactaatgtatcagtgcatgcaggataaaatgccagaagttcgacagagttcttttgccctgttaggtgacctcacaaaagcttgctttcagcatgttaagccttgtatagctgatttcatgccaatattgggaaccaacctaaatccagaattcatttcagtctgcaacaatgccacatgggcaattggagaaatctccattcaaatgggtatagagatgcagccttatattcctatggtgttgcaccagcttgtagaaatcattaacagacccaacacaccaaagacgttgttagagaatacagcaataacaattggtcgtcttggttacgtttgtcctcaagaggtggcccccatgctacagcagtttataagaccctggtgcacctctctgagaaacataagagacaatgaggaaaaggattcagcattccgtggaatttgtaccatgatcagtgtgaatcccagtggcgtaatccaagattttatatttttttgtgatgccgttgcatcatggattaacccaaaagatgatctcagagacatgttctgtaagatccttcatggatttaaaaatcaagttggcgatgaaaattggaggcgtttctctgaccagtttcctcttcccttaaaagagcgtcttgcagctttttatggtgtttaatctaatacacttaagctgcagtcccaaaattaggggtaagttataagaagtttggaaattttcaggatgaagaaaattttgttagggctgtcatttcaaactactaaatagaataaaaagctatttgttttctatagaggttgaataaaacatagcctcatatcattctatcttgggct

SEQ ID NO: 464605 - DNA, 922 bp, Homo sapiens
ggcactgatacattagtgcatgcaggataaaatgccagaactctgtcgaacttctggcattttatcctgcatgcactgatacattagtgtcaggatgttacttcgggctaccagctgttcgacagagttcttttgccctgttaggtgacctcacaaaagcttgctttcagcatgttaagccttgtatagctgatttcatgccaatattgggaaccaacctaaatccagaattcatttcagtctgcaacaatgccacatgggcaattggagaaatctccattcaaatgggtatagagatgcagccttatattcctatggtgttgcaccagcttgtagaaatcattaacagacccaacacaccaaagacgttgttagagaatacagcaataacaattggtcgtcttggttacgtttgtcctcaagaggtggcccccatgctacagcagtttataagaccctggtgcacctctctgagaaacataagagacaatgaggaaaaggattcagcattccgtggaatttgtaccatgatcagtgtgaatcccagtggcgtaatccaagattttatatttttttgtgatgccgttgcatcatggattaacccaaaagatgatctcagagacatgttctgtaagatccttcatggatttaaaaatcaagttggcgatgaaaattggaggcgtttctctgaccagtttcctcttcccttaaaagagcgtcttgcagctttttatggtgtttaatctaatacacttaagctgcagtcccaaaattaggggtaagttataagaagtttggaaattttcaggatgaagaaaattttgttagggctgtcatttcaaactactaaatagaataaaaagctatttgttttctatagaggttgaataaaacatagcctcatatcattctatcttgggct

SEQ ID NO: 464606 - DNA, 374 bp, Homo sapiens
atgccatatatgttgctgccccttattttagggggtggtaataaacagcactggtgaaatcttatgtttattatcatacacaaattctgttggtttctgtttctgagttatttgttgttttttctttattttttctccttccccctcatttgctcatgtcttggttggcgtttggtggtgtataaccgtgattgcgttaccttagcaataacaattggtcgtcttggttacgtttgtcctcaagaggtggcccccatgctacagcagtttataagaccctggtgtgtattattcaatctttttttttaattcatttttcttcactctttctttctctatctcacttttagatatattttcagttggttacaaaa

SEQ ID NO: 464607 - DNA, 690 bp, Homo sapiens
ataatcattatctatactgtggtgcttattccattaaatactgtccattagtattgtcattgaatctgcttgttacttaaatgctaaactcaattctgtaattcaataggtgcacctctctgagaaacataagagacaatgaggaaaaggattcagcattccgtggaatttgtaccatgatcagtgtgaatcccagtggcgtaatccaagtaagatgttcacaaagatttgtttttaatgtctaattaataaaattttaaaggaagaaacattctaatactttaattataaaaagttaactattttcaaaggtatcaaaatacagttaaacctttaaaatgtatatttcttaatatcttgaaattgtaatgccttttttttttcctaaattttttttgtcatgaaatgagatagtaacagcagattgggacaacaaggttatattcttgtcttgaatcaggccatggcttctttcatccaaatttcagacctcatttatttactttgtccctgcctcccatccctggatatcagtttgtggatatctacagttaatagagtgaccaaatagtaggaatactgtctctctattctgaataaaatactttgaatcagatttagaaataatgaataaaatacaaatcagccattgaaattgctctaattttgagagcttatgatttattcatc

SEQ ID NO: 464608 - DNA, 267 bp, Homo sapiens
gacagtgatgttttagatcgtcctctcaacatcatgattcccaaatttttacagttcttcaagcatagtagtccaaaaataaggtacttatattgccagtactaattgattaactgtgatataaacctgaccattatcttagttttcattacctaatatttttgacattagcaaaagatcaaaagatattggatgttccagagaggtgaacttatgtaattgaaattgactacttcagtaacaaaacctgtgaaatgttgactcttt

SEQ ID NO: 464609 - DNA, 320 bp, Homo sapiens
cataaggtcaaaagcttgcttgataataggactgaattgatactaatggtgtgatttttaaactgactaatattaaggatattgtgtttccagtacatgctacagaggactcaagatcaagatgaaaatgtggctttagaagcctgtgaattttggctaactttagctgaacagccaatatgcaaagatgtactcgtaaggcatcttcctaagtaagtgttccctcttataaatgctgccttgttctttaatttcttaagtgattcttcattttcatatttttataaaattcattcttttgccatcagggagtgagattc

SEQ ID NO: 464610 - DNA, 622 bp, Homo sapiens
gaaaatgttctgctgctgccctggatgttcttgcaaatgtgtatcgtgatgaactgctgccacatattttgccccttttgaaagaattactttttcatcatgaatgggttgttaaagaatcaggcattttggttttaggagcaattgctgaaggtaagcctaagtccagtttgaattatgtaagttggcttcttactactattaggtactaataaggctaggctactttaaggaatttctattttgaaccagataactagtattaaacagccataggccgtcttctaaccccagctagatattttgcaaaatgtttttgttataataaaggtaacagaggccaggcatggtggctcacgcctataatctcagcactttgggaggcttaggcgggtggattacctgagatggtttcaagaccagcctggttaacatggcgaaaccacgtctgctaaaaatacaaaaattagctgggcgtggtggcatgtgcctgtagtcccagctacttggaaggctgaggcaggagaattgcttggacctgggaagtggtagttgcagtgagctgaattcgtgcgattgcactccagcctgggtgacagagcaagactccatctcaataaaa

SEQ ID NO: 464611 - DNA, 903 bp, Homo sapiens
ggcactgatacattagtgcatgcaggataaaatgccagaactctgtcgaacttctggcattttatcctgcatgcactgatacattagtgtcaggatgttacttcgggctaccagctgttcgacagagttcttttgccctgttaggtgacctcacaaaagcttgctttcagcatgttaagccttgtatagctgatttcatgccaatattgggaaccaacctaaatccagaattcatttcagtctgcaacaatgccacatgggcaattggagaaatctccattcaaatgggtatagagatgcagccttatattcctatggtgttgcaccagcttgtagaaatcattaacagacccaacacaccaaagacgttgttagagaatacagcaataacaattggtcgtcttggttacgtttgtcctcaagaggtggcccccatgctacagcagtttataagaccctggtgcacctctctgagaaacataagagacaatgaggaaaaggattcagcattccgtggaatttgtaccatgatcagtgtgaatcccagtggcgtaatccaagattttatatttttttgtgatgccgttgcatcatggattaacccaaaagatgatctcagagacatgttctgtaagatccttcatggatttaaaaatcaagttggcgatgaaaattggaggcgtttctctgaccagtttcctcttcccttaaaagagcgtcttgcagctttttatggtgtttaatctaatacacttaagctgcagtcccaaaattaggggtccttcagtcttggagactataagggagcctctgcacccagggaaatgtacccttacaggggaaggtaacataggatacgtacatccacctactggaggcgagagttccgtccttatatcatgt

SEQ ID NO: 464612 - DNA, 3289 bp, Homo sapiens
  misc_feature (3005)..(3005): n is a, c, g, or t
accgccgccgaatgttcccgccgcgggctccgccccccggccaatcggaccggcgctcggtgaagcccagattctctttgttccgcagccatttcaggccccggacaggaggcagtgccgcttcggccgaaggcccgagcgcccgaggcgtctgggatggtgtgggaccggcaaaccaagatggagtatgagtggaaacctgacgagcaagggcttcagcaaatcctgcagctgttgaaggagtcccagtccccagacaccaccatccagagaaccgtgcaacaaaaactggaacaacttaatcagtatccagactttaacaactacttgatttttgttcttacaaaattaaaatctgaagatgaacccacaagatcattgagtggtcttatcttgaagaataatgtgaaagcacactttcagaacttcccaaatggtgtaacagactttattaaaagtgaatgtttaaataatattggtgactcctctcctctgattagagccactgttggtattttgatcacaactatagcctccaagggagaattgcagaattggcctgacctcttaccaaaactctgtagcctgttggattctgaagattataatacctgtgagggagcatttggtgcccttcagaagatttgtgaagattctgctgagattttagacagtgatgttttagatcgtcctctcaacatcatgattcccaaatttttacagttcttcaagcatagtagtccaaaaataaggtctcacgctgttgcatgtgtcaatcagtttatcatcagtaggactcaagctctaatgttgcacattgattcttttattgagaatctctttgcattagctggtgatgaagaaccagaggtacggaaaaatgtgtgccgagcacttgtgatgttgctcgaagttcgaatggatcgcctgcttcctcacatgcataatatagttgagtacatgctacagaggactcaagatcaagatgaaaatgtggctttagaagcctgtgaattttggctaactttagctgaacagccaatatgcaaagatgtactcgtaaggcatcttcctaagttgattcctgtgttagtgaatggcatgaagtactcagacatagatattatcctacttaagggtgatgttgaagaagacgaaacgattcctgatagtgaacaggatatacggccacgttttcaccgatcgaggacggtggctcagcagcatgatgaagatggaattgaagaggaagatgatgatgatgatgaaattgatgatgatgatacaatttctgactggaatctaagaaaatgttctgctgctgccctggatgttcttgcaaatgtgtatcgtgatgaactgctgccacatattttgccccttttgaaagaattactttttcatcatgaatgggttgttaaagaatcaggcattttggttttaggagcaattgctgaaggttgcatgcagggcatgattccatacttgcctgagcttattcctcaccttattcagtgcctctctgataaaaaggctcttgtgcgttccataacatgctggactcttagccgctatgcacactgggtggtcagccagccgccagacacgtacctgaagccattaatgacagaattgctaaagcgcatcctggatagcaacaagagagtacaagaagctgcctgcagtgcctttgctaccctagaagaggaggcttgtacagaacttgttccttaccttgcttatatacttgataccctggtctttgcatttagtaaataccagcataagaacctgctcattctttacgatgccataggaacattagcagattcagtaggacatcatttaaacaaaccagaatatattcagatgctaatgcctccactgatccagaaatggaacatgttaaaggatgaagataaagatctcttccctttacttgagtgcctatcttcagttgccacagcactgcagtctggattccttccgtactgtgaacctgtgtatcagcgttgtgtaaacctagtacagaagactcttgcacaagccatgctaaacaatgctcaaccagatcaatatgaagctccagataaagattttatgatagtggctcttgatttactgagtggcctggctgaaggacttggaggcaacattgaacagctggtagcccgaagtaacatcctgacactaatgtatcagtgcatgcaggataaaatgccagaagttcgacagagttcttttgccctgttaggtgacctcacaaaagcttgctttcagcatgttaagccttgtatagctgatttcatgccaatattgggaaccaacctaaatccagaattcatttcagtctgcaacaatgccacatgggcaattggagaaatctccattcaaatgggtatagagatgcagccttatattcctatggtgttgcaccagcttgtagaaatcattaacagacccaacacaccaaagacgttgttagagaatacagcaataacaattggtcgtcttggttacgtttgtcctcaagaggtggcccccatgctacagcagtttataagaccctggtgcacctctctgagaaacataagagacaatgaggaaaaggattcagcattccgtggaatttgtaccatgatcagtgtgaatcccagtggcgtaatccaagattttatatttttttgtgatgccgttgcatcatggattaacccaaaagatgatctcagagacatgttctgtaagatccttcatggatttaaaaatcaagttggcgatgaaaattggaggcgtttctctgaccagtttcctcttcccttaaaagagcgtcttgcagctttttatggtgtttaatctaatacacttaagctgcagtcccaaaattaggggtccttcagtcttggagactataagggagcctctgcacccagggaaaatgttaccctttacaggggggaagggtaaaccagtagggaatacagtacaatcccaaccctactgggagngcgggagggaggtgttgccgtcactgtattaagtcgatgttgggaaacgttttaacatctggagcctttgtgggtggaaatatgtctccagttacaactccgcagtggatgtgaagaagcaaaaaaaaaaaaatctattcagtctactcacaaaacagtacattgtggaatattatggggaattgtaccaaaacaagaaccatataaatgatgcctagggacaagaaagaggaacaattctatagcgcacaataaaggaaacctaagaatgggagttacaaata

SEQ ID NO: 464613 - DNA, 3013 bp, Homo sapiens
accgccgccgaatgttcccgccgcgggctccgccccccggccaatcggaccggcgctcggtgaagcccagattctctttgttccgcagccatttcaggccccggacaggaggcagtgccgcttcggccgaaggcccgagcgcccgaggcgtctgggatggtgtgggaccggcaaaccaagatggagtatgagtggaaacctgacgagcaagggcttcagcaaatcctgcagctgttgaaggagtcccagtccccagacaccaccatccagagaaccgtgcaacaaaaactggaacaacttaatcagtatccagactttaacaactacttgatttttgttcttacaaaattaaaatctgaagatgaacccacaagatcattgagtggtcttatcttgaagaataatgtgaaagcacactttcagaacttcccaaatggtgtaacagactttattaaaagtgaatgtttaaataatattggtgactcctctcctctgattagagccactgttggtattttgatcacaactatagcctccaagggagaattgcagaattggcctgacctcttaccaaaactctgtagcctgttggattctgaagattataatacctgtgagggagcatttggtgcccttcagaagatttgtgaagattctgctgagattttagacagtgatgttttagatcgtcctctcaacatcatgattcccaaatttttacagttcttcaagcatagtagtccaaaaataaggtctcacgctgttgcatgtgtcaatcagtttatcatcagtaggactcaagctctaatgttgcacattgattcttttattgagaatctctttgcattagctggtgatgaagaaccagaggtacggaaaaatgtgtgccgagcacttgtgatgttgctcgaagttcgaatggatcgcctgcttcctcacatgcataatatagttgagtacatgctacagaggactcaagatcaagatgaaaatgtggctttagaagcctgtgaattttggctaactttagctgaacagccaatatgcaaagatgtactcgtaaggcatcttcctaagttgattcctgtgttagtgaatggcatgaagtactcagacatagatattatcctacttaagggtgatgttgaagaagacgaaacgattcctgatagtgaacaggatatacggccacgttttcaccgatcgaggacggtggctcagcagcatgatgaagatggaattgaagaggaagatgatgatgatgatgaaattgatgatgatgatacaatttctgactggaatctaagaaaatgttctgctgctgccctggatgttcttgcaaatgtgtatcgtgatgaactgctgccacatattttgccccttttgaaagaattactttttcatcatgaatgggttgttaaagaatcaggcattttggttttaggagcaattgctgaaggttgcatgcagggcatgattccatacttgcctgagcttattcctcaccttattcagtgcctctctgataaaaaggctcttgtgcgttccataacatgctggactcttagccgctatgcacactgggtggtcagccagccgccagacacgtacctgaagccattaatgacagaattgctaaagcgcatcctggatagcaacaagagagtacaagaagctgcctgcagtgcctttgctaccctagaagaggaggcttgtacagaacttgttccttaccttgcttatatacttgataccctggtctttgcatttagtaaataccagcataagaacctgctcattctttacgatgccataggaacattagcagattcagtaggacatcatttaaacaaaccagaatatattcagatgctaatgcctccactgatccagaaatggaacatgttaaaggatgaagataaagatctcttccctttacttgagtgcctatcttcagttgccacagcactgcagtctggattccttccgtactgtgaacctgtgtatcagcgttgtgtaaacctagtacagaagactcttgcacaagccatgctaaacaatgctcaaccagatcaatatgaagctccagataaagattttatgatagtggctcttgatttactgagtggcctggctgaaggacttggaggcaacattgaacagctggtagcccgaagtaacatcctgacactaatgtatcagtgcatgcaggataaaatgccagaagttcgacagagttcttttgccctgttaggtgacctcacaaaagcttgctttcagcatgttaagccttgtatagctgatttcatgccaatattgggaaccaacctaaatccagaattcatttcagtctgcaacaatgccacatgggcaattggagaaatctccattcaaatgggtatagagatgcagccttatattcctatggtgttgcaccagcttgtagaaatcattaacagacccaacacaccaaagacgttgttagagaatacagcaataacaattggtcgtcttggttacgtttgtcctcaagaggtggcccccatgctacagcagtttataagaccctggtgcacctctctgagaaacataagagacaatgaggaaaaggattcagcattccgtggaatttgtaccatgatcagtgtgaatcccagtggcgtaatccaagattttatatttttttgtgatgccgttgcatcatggattaacccaaaagatgatctcagagacatgttctgtaagatccttcatggatttaaaaatcaagttggcgatgaaaattggaggcgtttctctgaccagtttcctcttcccttaaaagagcgtcttgcagctttttatggtgtttaatctaatacacttaagctgcagtcccaaaattaggggtccttcagtcttggagactataagggagcctctgcacccagggaaatgtacccttacaggggaaggtaacataggatacgtacatccacctactggaggcgagagttccgtccttatatcatgt

SEQ ID NO: 464614 - DNA, 2974 bp, Homo sapiens
gcaaattcgcggtgactcagtctggtcggctccttgcgctcggcggccgcggcggcagcagcagcagacgttggcggccgggctgccaggagcagttccgccgggtttcactgcaaaccaagatggagtatgagtggaaacctgacgagcaagggcttcagcaaatcctgcagctgttgaaggagtcccagtccccagacaccaccatccagagaaccgtgcaacaaaaactggaacaacttaatcagtatccagactttaacaactacttgatttttgttcttacaaaattaaaatctgaagatgaacccacaagatcattgagtggtcttatcttgaagaataatgtgaaagcacactttcagaacttcccaaatggtgtaacagactttattaaaagtgaatgtttaaataatattggtgactcctctcctctgattagagccactgttggtattttgatcacaactatagcctccaagggagaattgcagaattggcctgacctcttaccaaaactctgtagcctgttggattctgaagattataatacctgtgagggagcatttggtgcccttcagaagatttgtgaagattctgctgagattttagacagtgatgttttagatcgtcctctcaacatcatgattcccaaatttttacagttcttcaagcatagtagtccaaaaataaggtctcacgctgttgcatgtgtcaatcagtttatcatcagtaggactcaagctctaatgttgcacattgattcttttattgagaatctctttgcattagctggtgatgaagaaccagaggtacggaaaaatgtgtgccgagcacttgtgatgttgctcgaagttcgaatggatcgcctgcttcctcacatgcataatatagttgagtacatgctacagaggactcaagatcaagatgaaaatgtggctttagaagcctgtgaattttggctaactttagctgaacagccaatatgcaaagatgtactcgtaaggcatcttcctaagttgattcctgtgttagtgaatggcatgaagtactcagacatagatattatcctacttaagggtgatgttgaagaagacgaaacgattcctgatagtgaacaggatatacggccacgttttcaccgatcgaggacggtggctcagcagcatgatgaagatggaattgaagaggaagatgatgatgatgatgaaattgatgatgatgatacaatttctgactggaatctaagaaaatgttctgctgctgccctggatgttcttgcaaatgtgtatcgtgatgaactgctgccacatattttgccccttttgaaagaattactttttcatcatgaatgggttgttaaagaatcaggcattttggttttaggagcaattgctgaaggttgcatgcagggcatgattccatacttgcctgagcttattcctcaccttattcagtgcctctctgataaaaaggctcttgtgcgttccataacatgctggactcttagccgctatgcacactgggtggtcagccagccgccagacacgtacctgaagccattaatgacagaattgctaaagcgcatcctggatagcaacaagagagtacaagaagctgcctgcagtgcctttgctaccctagaagaggaggcttgtacagaacttgttccttaccttgcttatatacttgataccctggtctttgcatttagtaaataccagcataagaacctgctcattctttacgatgccataggaacattagcagattcagtaggacatcatttaaacaaaccagaatatattcagatgctaatgcctccactgatccagaaatggaacatgttaaaggatgaagataaagatctcttccctttacttgagtgcctatcttcagttgccacagcactgcagtctggattccttccgtactgtgaacctgtgtatcagcgttgtgtaaacctagtacagaagactcttgcacaagccatgctaaacaatgctcaaccagatcaatatgaagctccagataaagattttatgatagtggctcttgatttactgagtggcctggctgaaggacttggaggcaacattgaacagctggtagcccgaagtaacatcctgacactaatgtatcagtgcatgcaggataaaatgccagaagttcgacagagttcttttgccctgttaggtgacctcacaaaagcttgctttcagcatgttaagccttgtatagctgatttcatgccaatattgggaaccaacctaaatccagaattcatttcagtctgcaacaatgccacatgggcaattggagaaatctccattcaaatgggtatagagatgcagccttatattcctatggtgttgcaccagcttgtagaaatcattaacagacccaacacaccaaagacgttgttagagaatacagcaataacaattggtcgtcttggttacgtttgtcctcaagaggtggcccccatgctacagcagtttataagaccctggtgcacctctctgagaaacataagagacaatgaggaaaaggattcagcattccgtggaatttgtaccatgatcagtgtgaatcccagtggcgtaatccaagattttatatttttttgtgatgccgttgcatcatggattaacccaaaagatgatctcagagacatgttctgtaagatccttcatggatttaaaaatcaagttggcgatgaaaattggaggcgtttctctgaccagtttcctcttcccttaaaagagcgtcttgcagctttttatggtgtttaatctaatacacttaagctgcagtcccaaaattaggggtaagttataagaagtttggaaattttcaggatgaagaaaattttgttagggctgtcatttcaaactactaaatagaataaaaagctatttgttttctatagaggttgaataaaacatagcctcatatcattctatcttgggct

SEQ ID NO: 464615 - DNA, 1755 bp, Homo sapiens
  misc_feature (1565)..(1565): n is a, c, g, or t
accgccgccgaatgttcccgccgcgggctccgccccccggccaatcggaccggcgctcggtgaagcccagattctctttgttccgcagccatttcaggccccggacaggaggcagtgccgcttcggccgaaggcccgagcgcccgaggcgtctgggatggtgtgggaccggcaaaccaagatggagtatgagtggaaacctgacgagcaagggcttcagcaaatcctgcagctgttgaaggagtcccagtccccagacaccaccatccagagaaccgtgcaacaaaaactggaacaacttaatcagtatccagactttaacaactacttgatttttgttcttacaaaattaaaatctgaagatgaacccacaagatcattgagtggtcttatcttgaagaataatgtgaaagcacactttcagaacttcccaaatggtgtaacagactttattaaaagtgaatgtttaaataatattggtgactcctctcctctgattagagccactgttggtattttgatcacaactatagcctccaagggagaattgcagaattggcctgacctcttaccaaaactctgtagcctgttggattctgaagattataatacctgtgagggagcatttggtgcccttcagaagatttgtgaagattctgctgagattttagacagtgatgttttagatcgtcctctcaacatcatgattcccaaatttttacagttcttcaagcatagtagtccaaaaataaggtctcacgctgttgcatgtgtcaatcagtttatcatcagtaggactcaagctctaatgttgcacattgattcttttattgagaatctctttgcattagctggtgatgaagaaccagaggtacggaaaaatgtgtgccgagcacttgtgatgttgctcgaagttcgaatggatcgcctgcttcctcacatgcataatatagttgagtacatgctacagaggactcaagatcaagatgaaaatgtggctttagaagcctgtgaattttggctaactttagctgaacagccaatatgcaaagatgtactcgtaaggcatcttcctaagtaagtgttccctcttataaatgctgccttgttctttaatttcttaagtgattcttcattttcatatttttataaaattcattcttttgccatcagggagtgagattctaaagaagccagacttaattttattgttggtaaagagatttttcaaaaagcaattgcctattttaaaaaaaattatgtgagtatggtttgttctaaattataattgatttcggataatttacagcacagtatttttgtggggtttttttgttttttgttttgttttgtttttaaaaaacaatccttgttatttaaccacagactctattgtgaagttttgttttttttccaaaaaataatttcccactagttgtgatgcaacagaatttagttaacttaatgttaagcccatttttctaaaagtaaagtaatataagctcgtgggaaaaaactaaattgcgacattatatttcgatttcacactgagtatcacggagattnaggcacttaaggcttcgggaaacggataaagggttccgggggaagaaggtcaatttaatgagagatgcagaagcgacgatatcaaggggcaccgtagacggcgcccatctacaagggaggcgcaatacacatttcacaacaattttctttttcttctctctattctcactcccagcggcagagggcggca

SEQ ID NO: 464616 - DNA, 785 bp, Homo sapiens
ggcaatgagcttcggttggggtgttcaggaggggaggaaagaacattccaggccagtgagatgcctaacatgagctccagcgctggacaaactgaccatgggcctccacagcctgggcaggtgtctgtcatcgtggggcagagggaagatgggacaggactggacccgtgccctgggcccctgactccccgcccacagcttttccctcacagcgttttccacttgcactttgctcccgaggacttcctcaagctgagtttggtgcacacggccagtgctcctggcagctgtccagtcatctgcgtggccaagtgctacacacagcaggaaaatgtcaccagagacacgaatcccagcgtgacaaaacaagacacgatcaccatcaggcctgagcccactctacagatggacccggcgcagtggaaagcgggccaagaagcagaggtccaggttccaactcttgattctatcacaaaacactgcacccgaggcagccaggcagcttccgaagacctcattctcctaaacacatccattcctgtttctggcagaacttttgcaaacccatcccagttggatgcagcaacatcagaggggtgattacccccaattgccaaagaggtttccagcgctggaaggaaatttggagatcaaggccgagttggcctcagccaagtgaaatgggaatcaggaccattacaaagaaattcaattaaaataaaagacacatcataaactttgactggaaaactccaaatggaattaatattacgttggtcaaatta

SEQ ID NO: 464617 - DNA, 1914 bp, Homo sapiens
ctgatcattgtaaacttatagcagtttttcttttttttccagtatgaatggcccagatttccttcaggggattaaagagagaaatgaacaacataagaaggaaaggaagaaagaacaaaggccaaatgactgggatttcctggaggaaaggcggtctccaaatagacaaaaacacctgaaactggtaaacagctgcttccgaataagatctcagaggttggggaaaaacgcctcaagtgagcatgcgcacaacttccgtaaacacactgtgcatgtggcccctcccaagtgctggcaggccactgcacgtgcggacagcccaacccaaggaaaaatcagtggggaagaaaaaggggagaaggaatgcaacaccccggaaacatgccaacatataaaaccagcagctatgagtaccatcactgtgctaagaggaatgtgggttcgaatttcagcactagcacttcttcactggatgatattaggcaagaggtttcatctctttaagcctatgttgtagaaaaataccaagctaagatactgaattgtggtaccaagaaggacagagatgaaatcctggataaatggacactaaaataaagcagatctgggtttgaatcctgacttcaatactaccggtgatgtgatttatatgcctaggacttgtgcttctaaggctcaattttatgcctacaaaatctttattaaaatgcacaccttgaagatcactataattaaagaacatatataatgtatatgttatataataaataatttgtctaatctttgcccctgattcctggtagatgaccactaaactaagtctttggaatttctcaagtgatagtagtgtctttgttattcatggtgggaccgtcaagcatgaatggttatgataatagaggactcaggatgagagctgatcaccccagaaagaccaactttgtaatgagaggattgaggatttgagcgaagtgatatctccctgatcaccttcaggaagatgagacaagctgaagattaaattaaagcctgtgaccaatgatacaatcaatcatgcttacataatgaaacatcaataaaaattctggataccaaagttcggtggctcttcctggttggtgaaaacatcaatgtgctagaaggatgccaatgggtgctgcacctgattctacaatgtaagggtacagaagctctacatgtgaaaccctcccagactcctccctatgtgtgtcttcgtttgactagtcctgatttgaacttttatttaaaaaaaaaaagtaattgttagtagagcattttcctgaattctatgagtcattttagtgaattaccagacctgagagagatgtgggaatccctgaatttgtagacaattaatcagagaatgcgtggcccagggactcccaaatttgtggtggacatccaaagcgaggcagtcttactggggactgtgtgcttgtacagtgtctgcgctagctctgagtggttagtatcagaatcacattgcagcattgctgtatataacatgcctagcacagtgtgtggctcataggtaactgatgatgataagcataacattaatattagtattcttatgaatggagcaaaggtaatcaaatacaaaggcaggtaccttcctaacacagctccttaattgtaattgggtaaagttttcaaatattgtgttctttatatttgtttttaattcaagtgatgaatttttaagcatagataattttctcatataatcttatgcacaaaagtttttaaaccctctgcatttactttaattagcaaggttttctctaacagacaatccttgttcttcatgaggtacatcaaagtttactttacctgagaatgagaggtctaagtgatgaacgccttggtaacagaaaatattaacacctgaaa

SEQ ID NO: 464618 - DNA, 2077 bp, Homo sapiens
tcacacgcaggagctgcagatcatggcgtcgagttccactcccaggttgccccgtcagctagtcagtgatggctcttcctcctcctgcctttctgggatcaccaatcagagaagactgttcatggcaatatgacagtgccaccagctggtgctgcctgcaaggactcttttgctgtgctgactacagaatcctgtgtgcctatggtaagcctaggatctgtgaggttagggagctgctgtcctcaacaaatggttctctttggggattaactgggttggcaaagagtgagcaagctcaagaaaacttctgtggtatggtaaaacgtggctttcttggcaaggctacgctgtatatgtgtcaactacagaagtgctactccagtcaatccaacaaatacttccagcagcaattcccaaatggtttattaagagtacgtatttttcatttcaagggagaaccttatcttagaatgccatgagctcttcttctcatctcttctttttaattgctattctttcccctccctgaagccctacaaggaaatcccacctttgtaaagaagagtagccatagaattcaagtggttaatatttgcataatatatcattgcccactctttgaccttcaacttaaccacgtctttatatttgaaagtttcataagttattgtttatgctaagaaagcccattaaaaatttccaagtactgtcttcattttactatttttcaaaattattttgaacaccccaaaagtaagaaacatatataacctgaatatataaacaaggaagtaatttagaaattaaaaacttactatattttcctaattttacctaatttttaatgtaagtaaatttgaagcacattgagactcactggtttaaactgaaatgagaagatttcccttgctgatatagaaaaagaccatataactaggaagccattgatgtgaggaggtcattatattgccctcgagatttcaatttaaaagatactagaatgagtaacaaacatcatccagtttggataatttagaatcattacagaactgtgccttgccttttctgctgttttgtttactgacatttacactgatctttaaaacatcacaaagtatgctgcatgtactaatttgacctagaaatactttcatacaagtacttacatggatattaacattggaaacctaatatccctagatccactttcgtatttaaaacagtactcgtatttaataaacttttctgctcattaacagttgttccatttcacatatgctgttgcacattagacagaagagaacattgagttcttcacaagatactttcggttaagcatgccctgggatggagttaccatgctgacttgatttacttccatgcttctgcatcaatcaagccaggaggctataattagaaaacttccttaaatattaaaaatgtaatcattgcaaactgggtcgagaagtgattaatagggttggacagcttctctcacgcagccatcagggtaaattctcaagatgccaaacgatgaagcagaacttttatggagaccactaacatttactttcagttcttcctgagaaaagtaccaaggcataggttccttaagtgatcttaaattgtctcgtaagcattttatatgtgggaagcacttaggaaataaatgttcaatgaatgaattaatgaaggaatgaatgcaaaaacagctatgaaaaaaagcttaaaaagattctgcctgcttatgcaagatgctaatcatagcattccagaatgctaatggagaattagcccattttgaattttgggaagaggaccagtctgaccatacatacacacttttctcagcacatgacagacagtagcatcctagcagccatcctgtattttgaagatgaatgagtgacaccaaggatgagaaaccaagaagacctcatccttcaaagttcattcatttttattgaagagtaatagtttattgcaacacagtgaaaaggtaacctacagaaagagagaaaaatatttgcaaactatatatcctatgttgattaattcccaaaatatctaagtaatg

SEQ ID NO: 464619 - DNA, 2518 bp, Homo sapiens
tcacacgcaggagctgcagatcatggcgtcgagttccactcccaggttgccccgtcagctagtcagtgatggctcttcctcctcctgcctttctgggatcaccaatcagagaagactgttcatggcaatatgacagtgccaccagctggtgctgcctgcaaggactcttttgctgtgctgactacagaatcctgtgtgcctatggtaagcctaggatctgtgaggttagggagctgctgtcctcaacaaatggttctctttggggattaactgggttggcaaagagtgagcaagctcaagaaaacttctgtggtatggtaaaacgtggctttcttggcaaggctacgctgtatatgtgtcaactacagaagtgctactccagtcaatccaacaaatacttccagcagcaattcccaaatggtttattaagagtacgtatttttcatttcaagggagaaccttatcttagaatgccatgagctcttcttctcatctcttctttttaattgctattctttcccctccctgaagccctacaaggaaatcccacctttgtaaagaagagtagccatagaattcaagtggttaatatttgcataatatatcattgcccactctttgaccttcaacttaaccacgtctttatatttgaaagtttcataagttattgtttatgctaagaaagcccattaaaaatttccaagtactgtcttcattttactatttttcaaaattattttgaacaccccaaaagtaagaaacatatataacctgaatatataaacaaggaagtaatttagaaattaaaaacttactatattttcctaattttacctaatttttaatgtaagtaaatttgaagcacattgagactcactggtttaaactgaaatgagaagatttcccttgctgatatagaaaaagaccatataactaggaagccattgatgtgaggaggtcattatattgccctcgagatttcaatttaaaagatactagaatgagtaacaaacatcatccagtttggataatttagaatcattacagaactgtgccttgccttttctgctgttttgtttactgacatttacactgatctttaaaacatcacaaagtatgctgcatgtactaatttgacctagaaatactttcatacaagtacttacatggatattaacattggaaacctaatatccctagatccactttcgtatttaaaacagtactcgtatttaataaacttttctgctcattaacagttgttccatttcacatatgctgttgcacattagacagaagagaacattgagttcttcacaagatactttcggttaagcatgccctgggatggagttaccatgctgacttgatttacttccatgcttctgcatcaatcaagccaggaggctataattagaaaacttccttaaatattaaaaatgtaatcattgcaaactgggtcgagaagtgattaatagggttggacagcttctctcacgcagccatcagggtaaattctcaagatgccaaacgatgaagcagaacttttatggagaccactaacatttactttcagttcttcctgagaaaagtaccaaggcataggttccttaagtgatcttaaattgtctcgtaagcattttatatgtgggaagcacttaggaaataaatgttcaatgaatgaattaatgaaggaatgaatgcaaaaacagctatgaaaaaaagcttaaaaagattctgcctgcttatgcaagatgctaatcatagcattccagaatgctaatggagaattagcccattttgaattttgggaagaggaccagtctgaccatacatacacacttttctcagcacatgacagacagtagcatcctagcagccatcctgtattttgaagatgaatgagtgacaccaaggatgagaaagtgagtgtggagtcctggacttcccatctccagacctcttacaggaaagaggaaaaggaaacctgtgtcttcttaatgtcatgattatttgggttttttgttcagagaattctgccaaacctaacactcatttaaaagcttatcaagcaattattataaatttattgagtgagcactttctattcttaaaatttgggatttgccctttcattaatagtagaaatataagaaattatccttgctcttttttgaaaatttactttaagaaataaggctgaccttgagcacaatgctgtgtcaaaactctgtcagaaatacacataaacttacataacactccatacttcttttgtggtgaccctttccacatgacttttccttcttaatagtactgtaaggttcttgaaaaagaagctgggtctaattcgtacatcgagtaatcaataaaagcattacagctgtgacacaatgaaaatgatattttttgtctccatggcagtaagatggaatcagtaataacaagtccaatgtaagaattatttgtgataaaaaaaattgtctaccgagtgctttaagttcctaggaaactgtgc

SEQ ID NO: 464620 - DNA, 1461 bp, Homo sapiens
  misc_feature (3)..(5): n is a, c, g, or t
  misc_feature (9)..(11): n is a, c, g, or t
gtnnnattnnnagaatggctaaaggagagtacttccgatgtcacgtaaaaggtgatcaagactgaatatagatcttgacattccatctcggagctagttgctgcttccattccttaccttctgctactgtagccggctaagatgccagcaggttggggaggacaaccaatgatgtttgttgcatcctccatttcagataaagatgattcagttgatgctcaaaatatttgtcatgtgtggcacatgaatgtagaagcccttccagaatggataagctgcctaatccaaaaagcccagtggacagttggaaaactgaattgtcctttctgtggggcccgtttagggggctttaattttgtcagcactccaaaatgttcctgtggccagcttgcagctgtacatctctccaagagccggactgattatcagccaacacaggcaggcagactaatgagaccatcagtgaaatacttgtcacatcctagagttcagtcaggttgtgacaaggaagctctgctgacaggtggtggctctgaaaacagaaatcacaggcttttaaacatggcccgaaataataatgaccctggaagattaacagaagcactctgcctggaggtgcgaccaacatattttgagatgaagaacgaaaaactgctgtccaaagcatcagaaccaaaataccagctttttgttccccagcttgtgactggcagatgcgctacaagagcttttcatagaaaatcacatagtttggatctgaacatcagtgagaaactgactttattacccactttatatgaaatacatagtaagactactgcctattccagactaaatgaaacacagcctattgacctttcaggcttgcctttacaatctagtaaaaatagctattcctttcagaatccatccagttttgatcctagtatgctgctgcaaagattttcagtggccccccatgagacccagacacaaagaggaggagaatttcagtgtggtctagaagctgcttcagtgtattctggaccatactaatactaacaatctgactttcctgatggacctgccctcagctggcaggagcatgccggaggcctcagaccaggaagagcacctctcccctctggacttcctgcactcagccaatttttcattgggcagcattaatcagaggcttaataagagagaaaggagcaagttgaagaatctaagaaggaaacaacgaaggcgtgaaagatggctacagaagcagttattttgtaaaaggcccctcaactgagatttgtctgatgttttccccatgattagactgggcttatcggttgtgtcatgggttcccaaaactactgtatttgatgattcgctaagaggactcatagaactaagcatgaattcatacttccagctatgtttttttttaattatactttaagttttagggtacatgtgcacaatgtgcac

SEQ ID NO: 464621 - DNA, 577 bp, Homo sapiens
gtaaagccggagaaggggcggggtctcagctcctacttcattctacggccgagaccggaggatgttccctgctcaggaggaggccgacaggaccgtgtttgttgggaatttagaggcccgagttcgggaagagattctgtacgagctgttccttcagataggcggggccactaaccaaagtgactatatgcaaagacagagaaggaaagccaaagtcttttggatttgtctgctttaaacacccagaatcggtgtcttatgccatagctttgctgaatggaattcgtttatatggaagaccaattaacgtgcagtatcgatttgggagttctcgctcttctgaaccagctaaccaaagttttgagagctgtgttaagataaattcacacaactacaggtaattttaaaaatatttctcatcaaaggtaaagcaaatatatttttatgccaagaggagtttttatatattttgggctattgtaaaaccttactttttaggcctaggataaaattaaggaatatcttttttttccgagcccatgaaaagtgatagaaaatattttcatttaaaattcag

SEQ ID NO: 464622 - DNA, 2056 bp, Homo sapiens
gtaaagccggagaaggggcggggtctcagctcctacttcattctacggccgagaccggaggatgttccctgctcaggaggaggccgacaggaccgtgtttgttgggaatttagaggcccgagttcgggaagagattctgtacgagctgttccttcagataggcggggccactaaccaaagtgactatatgcaaagacagagaaggaaagccaaagtcttttggatttgtctgctttaaacacccagaatcggtgtcttatgccatagctttgctgaatggaattcgtttatatggaagaccaattaacgtgcagtatcgatttgggagttctcgctcttctgaaccagctaaccaaagttttgagagctgtgttaagataaattcacacaactacaggaatgaagaaatgttggtgggcagatcttcctttcccatgcagtattttccaattaataatacttctttacctcaagaatattttctctttcagaagatgcagtggcatgtgtataatccagtgctgcagcttccttactatgaaatgacagctccacttcctaatagtgcatccgtgtcttcctcactgaatcatgttccagatcttgaggctggacccagctcatataaatggactcaccaacaaccaagtgactctgacctttatcagatgacagctccacttcctaatagtgcatccgtgtcttcctcactgaatcatgttccagatcttgaggctggacccagctcatataaatggactcaccaacaaccaagtgactctgacctttatcagatgaataaacgaaagagacaaaagcaaacaagtgatagtgatagtagcacagacaacaacagaggcaacgaatgtagccaaaagttccgaaagtctaagaagaagaaaagatactagtattacctacaaatgaaacttacctacactgatcttagttctcttatgaaaaaaataagatgttatcccatcaaataaacaatgtcatggctatcttgtcttttgaaatatgtagtaataagacttatctctggtttgctgttcaatttttgccttgaacgacaaaagctttctaaaaatagtataatgtaccactttttgtatttgtcatgatatttttgacccattggcaacaaatagactattgtcattttattagtaccaatgatgaaatttcaccaaactattaatcaaaagtcacttattgaacacattgataaagcatcatgttccctttgattatcccctataaccaacactcaactacaaataggctgggattcaatgtggagtggtggatttcctgaaagaaagtagtgcagatatttaaggattgcatattgttcctaatgaggatgtaataaacaggcattagtacccctttcttttagtacctaaatatgttgtttctgagccatattcttcttcaggtttattttataaagtgaggacatatgataatgataccaaaggaaagataattatcatgaaaccaacttttggatcattccctttttatacaattgtgtatttatagggataccttcctcttctcacatattaattgtatgtcattaaaatcagttggctatgtcagtgtgtattattcacctcttttgctagcaaggtttgagatgctatattaacatttaaatcatgaaaatgagcaagtaaatagaataatattttattaatgtatgatatgtaatacttattgtctaaatcaagtttcctatttttggtttatttattttagaagaaaaataaaattatttgggcatttttgtttatagctcattacaaactagagtgatgaatatatatatttactaaagctaattgaaagagtcatgcaactcagttgggaattaaccactcaattcaatagtaaaagccatgcttggatgtttcttttgcatgttgcctagcattttatagatatttattatttaaaaaaataaagatatgtttttaatgaagagagtaactgaattttaatcttggttacaaatatataatatagtgaagtttgaaacataaatatt

SEQ ID NO: 464623 - DNA, 1043 bp, Homo sapiens
gtaaagccggagaaggggcggggtctcagctcctacttcattctacggccgagaccggaggatgttccctgctcaggaggaggccgacaggaccgtgtttgttgggaatttagaggcccgagttcgggaagagattctgtacgagctgttccttcagataggcggggccactaaccaaagtgactatatgcaaagacagagaaggaaagccaaagtcttttggatttgtctgctttaaacacccagaatcggtgtcttatgccatagctttgctgaatggaattcgtttatatggaagaccaattaacgtgcagtatcgatttgggagttctcgctcttctgaaccagctaaccaaagttttgagagctgtgttaagataaattcacacaactacaggaatgaagaaatgttggtgggcagatcttcctttcccatgcagtattttccaattaataatacttctttacctcaagaatattttctctttcagaagatgcagtggcatgtgtataatccagtgctgcagcttccttactatgaaatgacagctccacttcctaatagtgcatccgtgtcttcctcactgaatcatgttccagatcttgaggctggacccagctcatataaatggactcaccaacaaccaagtgactctgacctttatcagatgacagctccacttcctaatagtgcatccgtgtcttcctcactgaatcatgttccagatcttgaggctggacccagctcatataaatggactcaccaacaaccaagtgactctgacctttatcagatgaataaacgaaagagacaaaagcaaacaagtgatagtgatagtagcacagacaacaacagaggcaacgaatgtagccaaaagttccgaaagtctaagaagaagaaaagatactagtattacctacaaatgaaacttacctacactgatcttagttctcttatgaaaaaaataagatgttatcccatcaaataaacaatgtcatggctaaaaaaaaagtcgacgcagccgcgaatttagtagtagtag

SEQ ID NO: 464624 - DNA, 1889 bp, Homo sapiens
gtaaagccggagaaggggcggggtctcagctcctacttcattctacggccgagaccggaggatgttccctgctcaggaggaggccgacaggaccgtgtttgttgggaatttagaggcccgagttcgggaagagattctgtacgagctgttccttcagggagttctcgctcttctgaaccagctaaccaaagttttgagagctgtgttaagataaattcacacaactacaggaatgaagaaatgttggtgggcagatcttcctttcccatgcagtattttccaattaataatacttctttacctcaagaatattttctctttcagaagatgcagtggcatgtgtataatccagtgctgcagcttccttactatgaaatgacagctccacttcctaatagtgcatccgtgtcttcctcactgaatcatgttccagatcttgaggctggacccagctcatataaatggactcaccaacaaccaagtgactctgacctttatcagatgacagctccacttcctaatagtgcatccgtgtcttcctcactgaatcatgttccagatcttgaggctggacccagctcatataaatggactcaccaacaaccaagtgactctgacctttatcagatgaataaacgaaagagacaaaagcaaacaagtgatagtgatagtagcacagacaacaacagaggcaacgaatgtagccaaaagttccgaaagtctaagaagaagaaaagatactagtattacctacaaatgaaacttacctacactgatcttagttctcttatgaaaaaaataagatgttatcccatcaaataaacaatgtcatggctatcttgtcttttgaaatatgtagtaataagacttatctctggtttgctgttcaatttttgccttgaacgacaaaagctttctaaaaatagtataatgtaccactttttgtatttgtcatgatatttttgacccattggcaacaaatagactattgtcattttattagtaccaatgatgaaatttcaccaaactattaatcaaaagtcacttattgaacacattgataaagcatcatgttccctttgattatcccctataaccaacactcaactacaaataggctgggattcaatgtggagtggtggatttcctgaaagaaagtagtgcagatatttaaggattgcatattgttcctaatgaggatgtaataaacaggcattagtacccctttcttttagtacctaaatatgttgtttctgagccatattcttcttcaggtttattttataaagtgaggacatatgataatgataccaaaggaaagataattatcatgaaaccaacttttggatcattccctttttatacaattgtgtatttatagggataccttcctcttctcacatattaattgtatgtcattaaaatcagttggctatgtcagtgtgtattattcacctcttttgctagcaaggtttgagatgctatattaacatttaaatcatgaaaatgagcaagtaaatagaataatattttattaatgtatgatatgtaatacttattgtctaaatcaagtttcctatttttggtttatttattttagaagaaaaataaaattatttgggcatttttgtttatagctcattacaaactagagtgatgaatatatatatttactaaagctaattgaaagagtcatgcaactcagttgggaattaaccactcaattcaatagtaaaagccatgcttggatgtttcttttgcatgttgcctagcattttatagatatttattatttaaaaaaataaagatatgtttttaatgaagagagtaactgaattttaatcttggttacaaatatataatatagtgaagtttgaaacataaatatt

SEQ ID NO: 464625 - DNA, 3759 bp, Homo sapiens
gaatttgggaagtgggcagagggctctggtcttgccagctgcatggctttctgtgacctgcttgccctccagagcaaggagacttcgtggtgctggagctgggggccacaggggcctcactgcgtgttttgtgggtgactctaactggcattgaggggcatagggtggagcccagaagccaggagtttgtgatcccccaagaggtgatgctgggtgctggccagcagctctttgactttgctgcccactgcctgtctgagttcctggatgcgcagcctgtgaacaaacagggtctgcagcttggcttcagcttctctttcccttgtcaccagacgggcttggacaggagcaccctcatttcctggaccaaaggttttaggtgcagtggtgtggaaggccaggatgtggtccagctgctgagagatgccattcggaggcagggggcctacaacatcgacgtggttgctgtggtgaacgacacagtgggcaccatgatgggctgtgagccgggggtcaggccgtgtgaggttgggctagttgtagacacgggcaccaacgcgtgttacatggaggaggcacggcatgtggcagtgctggacgaagaccggggccgcgtctgcgtcagcgtcgagtggggctccttcagcgatgatggggcgctgggaccagtgctgaccaccttcgaccataccctggaccatgagtccctgaatcctggtgctgtttgagaagatgatcggaggcctgtacctgggtgagctggtgcggctggtgctggctcacttggcccggtgtggggtcctctttggtggctgcacctcccctgccctgctgagccaaggcagcatcctcctggaacacgtggctgagatggaggacccctctactggggcagcccgtgtccatgctatcctgcaggacttgggcctgagccctggggcttcggatgttgagcttgtgcagcacgtctgtgcggccgtgtgcacgcgggctgcccagctctgtgctgccgccctggccgctgttctctcctgcctccagcacagccgggagcaacaaacactccaggttgctgtggccaccggaggccgagtgtgtgagcggcaccccaggttctgcagcgtcctgcaggggacagtgatgctcctggccccggaatgcgatgtctccttaatcccctctgtggatggtggtggccggggagtggcgatggtgactgccgtggctgcccgtctggctgcccaccggcgcctgctggaggagaccctggccccattccggttgaaccatgatcaactggctgcggttcaggcacagatgcggaaggccatggccaaggggctccgaggggaggcctcctcccttcgcatgctgcccactttcgtccgggccacccctgacggcagcgagcgaggggatttcctggccctggacctcgggggcacgaacttccgtgtcctcctggtacgtgtgaccacaggcgtgcagatcaccagcgagatctactccattcccgagactgtggcccagggttctgggcagcagctctttgaccacatcgtggactgcatcgtggacttccagcagaagcagggcctgagcgggcagagcctcccactgggttttaccttctccttcccatgtaggcagcttggcctagaccagggcatcctcctgaactggaccaagggtttcaaggcatcagactgcgagggccaagatgtcgtgagtctgttgcgggaagccatcactcgcagacaggcagtggagctgaatgtggttgccattgtcaatgacacggtggggaccatgatgtcctgtggctatgaggacccccgttgcgagataggcctcattgtcggaaccggcaccaatgcctgctacatggaggagctccggaatgtggcgggcgtgcctggggactcaggccgcatgtgcatcaacatggagtggggcgcctttggggacgatggctctctggccatgctcagcacccgctttgatgcaagtgtggaccaggcgtccatcaaccccggcaagcagaggtttgaaaagatgatcagcggcatgtacctgggggagatcgtccgccacatccttttacatttaaccagccttggcgttctcttccggggccagcagatccagcgccttcagaccagggacatcttcaagaccaagttcctctctgagatcgaaagtgacagcctggccctgcggcaggtccgagccatcctagaggatctggggctacccctgacctcagatgacgccctgatggtgctagaggtgtgccaggctgtgtcccagagggctgcccagctctgtggggcgggtgtagctgccgtggtggagaagatccgggagaaccggggcctggaagagctggcagtgtctgtgggggtggatggaacgctctacaagctgcacccgcgcttctccagcctggtggcggccacagtgcgggagctggcccctcgctgtgtggtcacgttcctgcagtcagaggatgggtccggcaaaggtgcggccctggtcaccgctgttgcctgccgccttgcgcagttgactcgtgtctgaggaaacctccaggctgaggaggtctccgccgcagccttgctggagccgggtcggggtctgcctgtttcccagccaggcccagccacccaggactcctgggacatcccatgtgtgacccctctgcggccatttggccttgctccctggctttccctgagagaagtagcactcaggttagcaatatatatatataatttatttacattcacgcccgataaaacccctatgtgccccggcggccgggcaaggctgtgtacataaggccaagagtaagtgcgtgaatgcacttaagacaaagtcaggacacgagcttcacatgacaggccccgcgtggggcaccagccagccctggggacgggcacgccacgccacacacacactcaccactgtacagcctgggactcccattgcatattcacaggccccgccgggcagggcacctcaaggctgggggaggggcaggggcagggaggagccgtggggtgtccctgggtgggtggagagggcagcatgtgagaggcaaatgtgcaccaacactgggcgtgagacgtgagcagcctcaggtgtacggcatgagatgtgtgtggttggggggtgtctgcgtgacccgggaggggggtgtgtgtgagatgagcacacgaggcatgcgtggcacgtgctcgtgtggtggtcgtgtgcctgaatccaggggctaccccctgtccggctgtggccctcggtcctgcaggcttggagcagggcccctcagacgtgcccctacccagcaggcacagaaatgtttgcataaggtccagctcaggcaggagctctggggccctggcccaggcccagtgtgtgcgtgcatggccgtgtgtatgcggggcccctggagagggacgggaggagaggtagcatcacacgcacatacacacacacagatgggctgggcctggcccaggctccaggcactgtccctcctgggccctggggccgagtggcccgcggccacacctcacgtcttccggcttgtgcagcgtgaggtagatctcatagatcttccctcggggtatggcatctggggggatgaggaggctgattcctggaacggcaggaagagggccagggcttacccactgccaaagcacccaacaccccaccacacagcccctccaggagccttcctgtgaggactgactggtg

SEQ ID NO: 464626 - DNA, 1556 bp, Homo sapiens
gagacgtggcaaaaaagctgggtgagatgtggaataattgaaatgacagtgaaaagcagccttacatcactaaggcggcaaagctgaaggagaagtatgagaaggatgttgctgactataagtcgaaaggaaagtttgatggtgcaaagtcggtcccgggggagaaccggggcctggaagagctggcagtgtctgtgggggtggatggaacgctctacaagctgcacccgcgcttctccagcctggtggcggccacagtgcgggagctggcccctcgctgtgtggtcacgttcctgcagtcagaggatgggtccggcaaaggtgcggccctggtcaccgctgttgcctgccgccttgcgcagttgactcgtgtctgaggaaacctccaggctgaggaggtctccgccgcagccttgctggagccgggtcggggtctgcctgtttcccagccaggcccagccacccaggactcctgggacatcccatgtgtgacccctctgcggccatttggccttgctccctggctttccctgagagaagtagcactcaggttagcaatatatatatataatttatttacattcacgcccgataaaacccctatgtgccccggcggccgggcaaggctgtgtacataaggccaagagtaagtgcgtgaatgcacttaagacaaagtcaggacacgagcttcacatgacaggccccgcgtggggcaccagccagccctggggacgggcacgccacgccacacacacactcaccactgtacagcctgggactcccattgcatattcacaggccccgccgggcagggcacctcaaggctgggggaggggcaggggcagggaggagccgtggggtgtccctgggtgggtggagagggcagcatgtgagaggcaaatgtgcaccaacactgggcgtgagacgtgagcagcctcaggtgtacggcatgagatgtgtgtggttggggggtgtctgcgtgacccgggaggggggtgtgtgtgagatgagcacacgaggcatgcgtggcacgtgctcgtgtggtggtcgtgtgcctgaatccaggggctaccccctgtccggctgtggccctcggtcctgcaggcttggagcagggcccctcagacgtgcccctacccagcaggcacagaaatgtttgcataaggtccagctcaggcaggagctctggggccctggcccaggcccagtgtgtgcgtgcatggccgtgtgtatgcggggcccctggagagggacgggaggagaggtagcatcacacgcacatacacacacacagatgggctgggcctggcccaggctccaggcactgtccctcctgggccctggggccgagtggcccgcggccacacctcacgtcttccggcttgtgcagcgtgaggtagatctcatagatcttccctcggggtatggcatctggggggatgaggaggctgattcctggaacggcaggaagagggccagggcttacccactgccaaagcacccaacaccccaccacacagcccctccaggagccttcctgtgaggactgactggtg

SEQ ID NO: 464627 - DNA, 436 bp, Homo sapiens
tgtaggttagatggttattaataggtttttgcacaccgaaagcctcctggggagtagggagcgggcagagggcaaggccttcaaccatacagcaaagtaggcaaggaattgtgcttggggagggtggaaagcctaggcttgtgatggatgcaggttttgcagaggcagagtgagcctgaaggggcctccagcttcctgccacttcctctcggtctcaccccagggcatcctcctgaactggaccaagggtttcaaggcatcagactgcgagggccaagatgtcgtgagtctgttgcgggaagccatcactcgcagacaggtaggagcctgttctaggggtgctttggggctgtggcaggccttgaggggagcaaagagtctcctactttctgaggggggagccctctgcggtagagacctctgggtccagtgctgg

SEQ ID NO: 464628 - DNA, 3674 bp, Homo sapiens
gaatttgggaagtgggcagagggctctggtcttgccagctgcatggctttctgtgacctgcttgccctccagagcaaggagacttcgtggtgctggagctgggggccacaggggcctcactgcgtgttttgtgggtgactctaactggcattgaggggcatagggtggagcccagaagccaggagtttgtgatcccccaagaggtgatgctgggtgctggccagcagctctttgactttgctgcccactgcctgtctgagttcctggatgcgcagcctgtgaacaaacagggtctgcagcttggcttcagcttctctttcccttgtcaccagacgggcttggacaggagcaccctcatttcctggaccaaaggttttaggtgcagtggtgtggaaggccaggatgtggtccagctgctgagagatgccattcggaggcagggggcctacaacatcgacgtggttgctgtggtgaacgacacagtgggcaccatgatgggctgtgagccgggggtcaggccgtgtgaggttgggctagttgtagacacgggcaccaacgcgtgttacatggaggaggcacggcatgtggcagtgctggacgaagaccggggccgcgtctgcgtcagcgtcgagtggggctccttcagcgatgatggggcgctgggaccagtgctgaccaccttcgaccataccctggaccatgagtccctgaatcctggtgctgtagccatggggctttagtgggatggggagcttctgggctgagccccaaaccacttccctttcccctccagcccctctactggggcagcccgtgtccatgctatcctgcaggacttgggcctgagccctggggcttcggatgttgagcttgtgcagcacgtctgtgcggccgtgtgcacgcgggctgcccagctctgtgctgccgccctggccgctgttctctcctgcctccagcacagccgggagcaacaaacactccaggttgctgtggccaccggaggccgagtgtgtgagcggcaccccaggttctgcagcgtcctgcaggggacagtgatgctcctggccccggaatgcgatgtctccttaatcccctctgtggatggtggtggccggggagtggcgatggtgactgccgtggctgcccgtctggctgcccaccggcgcctgctggaggagaccctggccccattccggttgaaccatgatcaactggctgcggttcaggcacagatgcggaaggccatggccaaggggctccgaggggaggcctcctcccttcgcatgctgcccactttcgtccgggccacccctgacggcagcgagcgaggggatttcctggccctggacctcgggggcacgaacttccgtgtcctcctggtacgtgtgaccacaggcgtgcagatcaccagcgagatctactccattcccgagactgtggcccagggttctgggcagcagctctttgaccacatcgtggactgcatcgtggacttccagcagaagcagggcctgagcgggcagagcctcccactgggttttaccttctccttcccatgtaggcagcttggcctagaccagggcatcctcctgaactggaccaagggtttcaaggcatcagactgcgagggccaagatgtcgtgagtctgttgcgggaagccatcactcgcagacaggcagtggagctgaatgtggttgccattgtcaatgacacggtggggaccatgatgtcctgtggctatgaggacccccgttgcgagataggcctcattgtcggaaccggcaccaatgcctgctacatggaggagctccggaatgtggcgggcgtgcctggggactcaggccgcatgtgcatcaacatggagtggggcgcctttggggacgatggctctctggccatgctcagcacccgctttgatgcaagtgtggaccaggcgtccatcaaccccggcaagcagaggtttgaaaagatgatcagcggcatgtacctgggggagatcgtccgccacatccttttacatttaaccagccttggcgttctcttccggggccagcagatccagcgccttcagaccagggacatcttcaagaccaagttcctctctgagatcgaaagtgacagcctggccctgcggcaggtccgagccatcctagaggatctggggctacccctgacctcagatgacgccctgatggtgctagaggtgtgccaggctgtgtcccagagggctgcccagctctgtggggcgggtgtagctgccgtggtggagaagatccgggagaaccggggcctggaagagctggcagtgtctgtgggggtggatggaacgctctacaagctgcacccgcgcttctccagcctggtggcggccacagtgcgggagctggcccctcgctgtgtggtcacgttcctgcagtcagaggatgggtccggcaaaggtgcggccctggtcaccgctgttgcctgccgccttgcgcagttgactcgtgtctgaggaaacctccaggctgaggaggtctccgccgcagccttgctggagccgggtcggggtctgcctgtttcccagccaggcccagccacccaggactcctgggacatcccatgtgtgacccctctgcggccatttggccttgctccctggctttccctgagagaagtagcactcaggttagcaatatatatatataatttatttacattcacgcccgataaaacccctatgtgccccggcggccgggcaaggctgtgtacataaggccaagagtaagtgcgtgaatgcacttaagacaaagtcaggacacgagcttcacatgacaggccccgcgtggggcaccagccagccctggggacgggcacgccacgccacacacacactcaccactgtacagcctgggactcccattgcatattcacaggccccgccgggcagggcacctcaaggctgggggaggggcaggggcagggaggagccgtggggtgtccctgggtgggtggagagggcagcatgtgagaggcaaatgtgcaccaacactgggcgtgagacgtgagcagcctcaggtgtacggcatgagatgtgtgtggttggggggtgtctgcgtgacccgggaggggggtgtgtgtgagatgagcacacgaggcatgcgtggcacgtgctcgtgtggtggtcgtgtgcctgaatccaggggctaccccctgtccggctgtggccctcggtcctgcaggcttggagcagggcccctcagacgtgcccctacccagcaggcacagaaatgtttgcataaggtccagctcaggcaggagctctggggccctggcccaggcccagtgtgtgcgtgcatggccgtgtgtatgcggggcccctggagagggacgggaggagaggtagcatcacacgcacatacacacacacagatgggctgggcctggcccaggctccaggcactgtccctcctgggccctggggccgagtggcccgcggccacacctcacgtcttccggcttgtgcagcgtgaggtagatctcatagatcttccctcggggtatggcatctggggggatgaggaggctgattcctggaacggcaggaagagggccagggcttacccactgccaaagcacccaacaccccaccacacagcccctccaggagccttcctgtgaggactgactggtg

SEQ ID NO: 464629 - DNA, 1740 bp, Homo sapiens
aggagattaacgggagaagtcctgtagggagatgggcagttaccttctctccgtctctctctcggggactctatttgtggctggtggagctgtcttaaacgaagagaaccatgagcaatgaatcttgtttaccttattacacagcccacagctactcttcaatgagtgcgttcaaaacctccatgggggacctgcaacgacaattgtacaacagaggagagtacaacattttcaagtatgcaccaatgttcgagagtaattttattcagataaacaaaaagggagaggtgattgatgtacacaaccgtgtccgaatggtgacagtgggcatcgtctgcaccagccccatcctcccactgcctgacgtcatggttctggcccaaccaactaaaatctgtgaacagcatgtcagatggggccggtttgccaaggggagaggtcgcaggcccgtcaagactctagagctcacgagactgcttcccttgaaatttgtgaagatctccatccacgatcatgagaaacagcagctgcgcctgaaactcgccactggccgtactttttatctgcagttgtgtccctcttctgacacacgggaagatctcttttgctattgggaaaaacttgtctatctcctgaggccaccagtagagagttactgcagtaccccaacacttctatctggggacgcaccacccgaagacaacaaaagcctagtggctgcagagctccacagagaaggggatcagagtgagactgggctctacaagccttgtgatgtatctgcagccacctcttctgcttatgctgggggagagggaatccaacatgcctcccacggaacggctagtgcggcttctccatccacgagcactccaggggctgctgaaggaggagcagcaaggacagcaggtggcatggcagtggcaggaacagcaacaggacctagaacagatgtggcaatagcaggggcagcaatgagtcctgcaacaggtgctatgagcatagcaacaaccaaatctgcaggcccaggtcaagtgaccacagcgctggcgggagcagctatcaaaaatccaggagaaaatgaatccagcaagtccatggcaggtgctgccaacatatcctcagagggtattagcttggccttggtgggtgctgcaagcacctccttggaaggtacttccacctcgatggcgggggccgccagtctctcccaagacagcagcttgagtgcggcgtttgcaggcagtattacgaccagcaagtgtgcagcagaaagaactgaaggaccagcagtgggacccctcatctccaccttgcaaagcgaaggctacatgagtgaacgagatggaagccagaaagtttcccagcccagtgctgaagtctggaatgaaaacaaggaaagaagagaaaagaaggacagacatcccagtaggaaaagttctcatcaccgcaaggcaggtgaaagtcaccgcaggagagcgggggacaagaatcagaaagcgtcttcccaccggtccgcatctggccataaaaacacgagagatgacaaaaaagaaaaagggtacagcaacgtaaggggcaagcgacatggctcctctcgcaagagctccacccacagctccaccaaaaaggacagcagtaccttggaggacagaagttgggtttccggcaaaacttagggaccttttctgaacaccaaatatgtgtagccaagatggaggaggtgagaagcgacgtatt

SEQ ID NO: 464630 - DNA, 2266 bp, Homo sapiens
ggcaaatgagagccaagcaagttggagctgcccgggaactggatgtgcttgcttagaaaacatttcaacatttccaagggtatagtttctcacacatactctggaacgcttggaaaccactttaattagcattgttggcctgtctggctgccttgggtctttggttcgctgagggctgcatggaggctacaccctcctctccagcacctgcgatgggaagtcacaggagaccggaggtgcgcacgacatcacagagccgagttctgacccaatctgaatcaaatgtcacccataccctatcttcaacaaacaaaagagcaacgaagccagagacaccatcttcagatgccttggcctgtaaggaattcattctgacttgcgatgtgctttaacactttcacatgtaattgtgtccggaattggtgggttcttggtctcaccgacttcaagaatgaagccgcggaccctcgcggtgagtgttacagctcctaaggtggcgcgtctggagtttgttccttctgatgttcagatatgtttggagtttcttccttctggtgagttcgtggtctcactcgctcaggaatgcagctgcagaccttcacgctcccctaatcctatggaataattcaactcgtgaatgcatctggagccctagatgaccgctttataaggcagccctcggagttgggaggctgcagtctacctgggacactcgaggaggcacacgaggcggaaaagtggacgggtgccccgcgccaccgcctctcccgagggcgcgtactgaccaggatgtcagacaagctcaaggaacgcaaaagaacccccgtttctcataaagtgatagaaaagcggaggagggacaggatcaaccgctgcttgaacgagctgggcaagacagtgcccatggccttggcgaagcaggaggctctggcgcagatccgcagccgcgtccgctcgctggtcctctccagcgccacagtgcccgaccagcaggcgctgggccgctgcgaggggcccttcctccttttgcagagttccgggaagctggagaaggcggagatcctcgagatgaccgagggcaggggtcctgcgaaggcgcctctccctgctcggcgacagcaaggcggcgagggagaactggttcccagggaggctgcagaacttctagcggagtttgccaactacttccactatggctaccacgagtgcatgaagaacctggtgcattacctcaccacggtggagcggatggagaccaaggacacgaagtacgcgcgcatcctcgccttcttgcagtccaaggcccgcctgggcgcggagcccgcctttccgccgctgggttcgctcccggagccggatttctcctatcagctgcaccctgcggggcccgaattcgctggtcacagcccgggcgaggccgctgtgttcccgcagggctctggtgccgggcctttcccctggccgcctggcgcggcccgcagccccgcgctgccctacctgcccagcgcgccagtgccgctcgctagcccagcgcagcagcacagccccttcctgacaccggtgcagggcctggaccggcattacctcaacctgatcggccacgcgcaccccaacgcccttaacctgcacacgccccagcaccccccggtgctctgacgcccactcgcccgccagatttctcctcgctttgggcgcttttaggagaaatgctgtatatattgtacacataatgtgtaaatattgtaccccaaaaatctgggctgggggaggcaaagagcgaatgagtcttctgaaggatctccccctggtaataaacgttttctgataaagacccaaagagagggatttatgtattaccttctgctcatccacacccgtcccctccgcggtgcccagggcgcaaggctgacagggttcaaggtaacagccctcagtaacttggtgaggggcccgctgtggagtctgagggagggggacgttaaatggaggttcaggcagatattctaggcatcgcttaagggcgggattcgcggcttcctgcacccgccccatcttgagcattagcctcagagaaacaggggaggcgaagaacactgcccttggctctcaggaaaatgcaaattgaaggacctgccccaaactgacttaggcggaccgttgccagctgcgacccgggcgcccgtcctacccggagccaagtgcccgacgcgcgcgcaccgcacgcccgcgggtctggaatgcggcgaaacccgggccagcggggcgc

SEQ ID NO: 464631 - DNA, 495 bp, Homo sapiens
aggcgcttgctcgcccgccggccccagtttaccgcctccttttcccgcccgagctgttgccatgcaaatgttattcctgggccgatcacgtgtcctttgaagggccacgtggattaacaaagctgatctgcccccagctcgcccccctcggctgctaattttttttttttcttaacttctttaaaactgatcttgaatgcatacatcctccaaacgcagctcccctaatcctatggaataattcaactcgtgaatgcatctggagccctagatgaccgctttataaggcagccctcggagttgggaggctgcagtctacctgggacactcgaggaggcacacgaggcggaaaagtggacgggtgccccgcgccaccgcctctcccgagggcgcgtactgaccaggatgtcagacaagctcaaggaacgcaaagtgagtcggctgagcccaaatggcacttgcgccctggtggtggaggcatctgactcaccgacc

SEQ ID NO: 464632 - DNA, 948 bp, Homo sapiens
ggcactaataaatttagtatcaaatgtataagtcaatgtttttgaatgacttaagagtgaaggttatagcattaataaaagacaatgtttatggaattgaattcagagacaaaagacagtttgttgctcatggcaatagtggtagccacaataccattgttttcacactgactctctatggcccaattcccacagggcagaagcaaatgggccaggaacacatgattctgtgcagatttgcagaccagacagctgtccagctcccaccccaacgaaggctcataggaaaacagtgcatgtgcttggtggatctggatcgagcaagagctgcagaagaatgtggatactccgttcaagtgatatccatggagccagagagctgctctcccaaaaataacatgattgtgggagtccccatttaaaatgagatattcacatttgatattttgccatccgtcttcacgttggatgcccagtggcattcaggaggttcttggcataactaggaaacagcattagccatcttgaacctattgtgctcaggaaggaaagcaacagggaaatcttggaagtaaaggctccctgcaaagcatcacaaatgctttacaatgtgtgattaaaggactgctggtttttatagtgagaatcccctgaagtctcagctgccaaaagaataatactagtggaggttccatcacaggaataacaatttccttctcacttcacaagctcctctgatcttgccaatgtgatgtttaattcaaaacagcgcacttacagcctttattttatacttatttagatattcacatgggaactgaaagtagactcagtggagttttttgttttttatatttttaacaattgtactttttctatcactttaaaaaaatctagtcagctattgatacttgtgtatgcttcacgaagttcttgtgttgtgttttt

SEQ ID NO: 464633 - DNA, 786 bp, Homo sapiens
  misc_feature (14)..(14): n is a, c, g, or t
  misc_feature (28)..(28): n is a, c, g, or t
  misc_feature (53)..(53): n is a, c, g, or t
caaagttcaatttnccaaaaagtgaacnattcaagaaaactttatcatactangaacacatgattctgtgcagatttgcagaccagacagctgtccagctcccaccccaacgaaggctcataggaaaacagtgcatgtgcttggtggatctggatcgagcaagagctgcagaagaatgtggatactccgttcaagtgatatccatggagccagagagctgctctcccaaaaataacatgattgtgggagtccccatttaaaatgagatattcacatttgatattttgccatccgtcttcacgttggatgcccagtggcattcaggaggttcttggcataactaggaaacagcattagccatcttgaacctattgtgctcaggaaggaaagcaacagggaaatcttggaagtaaaggctccctgcaaagcatcacaaatgctttacaatgtgtgattaaaggactgctggtttttatagtgagaatcccctgaagtctcagctgccaaaagaataatactagtggaggttccatcacaggaataacaatttccttctcacttcacaagctcctctgatcttgccaatgtgatgtttaattcaaaacagcgcacttacagcctttattttatacttatttagatattcacatgggaactgaaagtagactcagtggagttttttgttttttatatttttaacaattgtactttttctatcactttaaaaaaatctagtcagctattgatacttgtgtatgcttcacgaagttcttgtgttgtgttttt

SEQ ID NO: 464634 - DNA, 368 bp, Homo sapiens
ggctaaacgcaaccaggaacacattggcaaacttttgcgcctgcgcccaccgggcgtgcacctgtaggctgaagtcgcgcatgcgctagatgggaacgttgtttcttctcccctaccccttttctgtggggctgttttagggacagactgcttccgggtcgaagggcttgcttccggagagcgggaaggctaaaacgcggtagctaaactgcagccaactttggttgtgtgtggaaaaggctttagccatggacaggtcagtactgatggtggcagctgagcccgaagtcttgcccgtctcgcctgttggcgaaacgaaataggtgaaactagactcccagaagaagccaaggaggtcccgggtgctt

SEQ ID NO: 464635 - DNA, 443 bp, Homo sapiens
cagcagggaaagcagtgactcagcgcacttcaagtatggtgggctgggggaggcactgccctcaggctcataccccaggtccagatccgagcgcctcggagtggccgtcgaagtctcacctttaatgccaacacctttcaagaagcaggaactggccagttcctgcattcttggaacaggagggaagtcgccccgacttacgcagtcttcagggttctttggaaatctctccatggttactaatctggatgacagtaactgggcagctgcattttcatcacagcgttccgggctgttcacaaacacagagccccacagtataacagaagatgtaactatcagtgctgttatgttacgtgaggatgatcctggagaagctggtaaaatggcattgagctttgtgacaagtagcttttcactttagcaagatgaaggaaaccatt

SEQ ID NO: 464636 - DNA, 2721 bp, Homo sapiens
ggctaaacgcaaccaggaacacattggcaaacttttgcgcctgcgcccaccgggcgtgcacctgtaggctgaagtcgcgcatgcgctagatgggaacgttgtttcttctcccctaccccttttctgtggggctgttttagggacagactgcttccgggtcgaagggcttgcttccggagagcgggaaggctaaaacgcggtagctaaactgcagccaactttggttgtgtgtggaaaaggctttagccatggacaggagtggctttggagagatatcatcccctgtaatccgggaggcagaggtgacacggactgcacgaaaacagagtgctcagaaaagagttttacttcaggcatctcaagatgaaaattttggtaatactacaccaagaaaccaggttatccctcgaactcctagctcatttcgacagccttttaccccaacaagccgaagcttactaaggcagccagatatttcctgcattcttggaacaggagggaagtcgccccgacttacgcagtcttcagggttctttggaaatctctccatgcatccatgagtatgttttctgatttcctgcagtcttttctgaagcactcttcgagtacagtttttgatcttgtggaagagtatgaaaacatctgtggtagtcaggtgaatatactgagtaaaatagtgagtcgagcaacacctggacttcaaaaattttcaaaaacagccagtatgctctggcttcttcaacaggagatggtcacatggaggctgctggcttctttgtatagagacagaatacagtctgcattagaagaggaaagtgtattcgcagttactgctgttaatgccagtgaaaaaacagttgtggaagcgttatttcagagggattcacttgttcgacaaagtcagctggtggtagattggttagagagtattgccaaagatgaaattggagaattttctgataatattgagttttatgcaaaatcagtatattgggaaaatactctgcataccttaaaacaacggcagctgacttcttacgttggaagtgttcgtccgcttgtcactgaattggtaaatgttctttgaaatgaaagttgccttcaaagttaactgattttttttttcaggctgagaattttttctcgtggatctttgttttgctcttctaaaggtttgcacacactaacattttactctaaaacaactaagttgcattggaatctgatggaatatattgaaacatatccgtgacctttgaattgtaagtaataagttgtggaaagtatacttaacttgacagcattaaaaacaaattaattttggtcttatcttaagatttgactgcctatataaggtagtgactgacctatgaaagctcttttatgttgaaagcaagtgaaaaaaaactaaagccttattggtttgaggttagaacggttatttgaaaagtggatttgaaaagaactgaagctgaattattctaaaaacaaaggaatgaagctttatgacagggcacgtgaaatgtttatagtgaaaagagagaaataagtaacaattgaaaaaaacttctagaattccatttagtaacaaagaggtttttgatgaaaattgtttgggaaaaagaaaaagaaaattgtttggaaactactcttaacagcttaaaattgattatagctaaattacattgtagcaggcaacagctgaaaatcgtttaatcttaccagctggaaagtggtgatttccttttgccagaaagagaccatgttccaaaattgaattatgtgtttgcaaaatatttatgaaagtagtgaattgatctattatgtattccattttctgaattgatattcatattaccatacactaagtaacatgtggagtaagaattacttcctttcttgagtcacattaaaattgttttccattggaagtccatcatgtagatcatgtgtgctgtttgctgctaaagtgagaacaatatattatcctaaatgcttagaagcacatggaaaaaaggtaggtagaaataactgttttgggagatttgtacttatttattagaaatctgtttaaatttttttattaggcattggtgttttttatgtggcattaatcccaaaataggtcttaataggccctcttcccatatgttctcaaaaagtaccagaagcctaaatttaaccagttggaattctttttttaggtgttattctattcaacctttaaaaatgaaggatctgattttaatgtgaaatctgcatttcatcaaagatgggacacagtgtccttgcttaattattctttggaaattgaacacctttactactgcattcttagcaggtagcaacaacacaaattgaagaaaatgtgattcaggtttgaagcactgagttcattgatttcaaccatattgataagcatagagaatacaccttgcattgatactgctcacatgctcaactagcagatggtgtagtagtcaatgataatgtcactaaatgcctacacatataaggagaatttagagtgtgaatgaggaaaatcataacatttcacaattgtgtgacactttctaaagtcttatctattatgccatcttattcttttgtcatccatgggagagagacagccaggaggcctcaggtaagcagaccatccagctcacagatgttgaagccaaacttgaatctcacctttccaaagcactgttctttctgtca

SEQ ID NO: 464637 - DNA, 440 bp, Homo sapiens
aaaattttcaaaaacagccagtatgctctggcttcttcaacaggagatggtcacatggaggctgctggcttctttgtataggtaatggcgtctagaattcataagtgaaataaacataaggtaataaaccaacaggcaaattaatttaaaagttagggtaggtcgtgcttggaaataggttttgctatttttgatgcttatcatttcgaataccttagttgtcaagagtgagtcaagagggaagaggaagatatcagatcataaggctggtagttaccaaaattggatgtgtgtaaagacttaaggaaagtactaaaaatagtgcaatacttaggctaaattaagaaaagagctgaaagttagacttcatgtaatatggaagtttgaaagaagttaaccaaattttccagaaggcgaagattataccatgtacatatcct

SEQ ID NO: 464638 - DNA, 2866 bp, Homo sapiens
ggctaaacgcaaccaggaacacattggcaaacttttgcgcctgcgcccaccgggcgtgcacctgtaggctgaagtcgcgcatgcgctagatgggaacgttgtttcttctcccctaccccttttctgtggggctgttttagggacagactgcttccgggtcgaagggcttgcttccggagagcgggaaggctaaaacgcggtagctaaactgcagccaactttggttgtgtgtggaaaaggctttagccatggacaggagtggctttggagagatatcatcccctgtaatccgggaggcagaggtgacacggactgcacgaaaacagagtgctcagaaaagagttttacttcaggcatctcaagatgaaaattttggtaatactacaccaagaaaccaggttatccctcgaactcctagctcatttcgacagccttttaccccaacaagccgaagcttactaaggcagccagatatttcctgcattcttggaacaggagggaagtcgccccgacttacgcagtcttcagggttctttggaaatctctccatggttactaatctggatgacagtaactgggcagctgcattttcatcacagcgttccgggctgttcacaaacacagagccccacagtataacagaagatgtaactatcagtgctgttatgttacgtgaggatgatcctggagaagctgcatccatgagtatgttttctgatttcctgcagtcttttctgaagcactcttcgagtacagtttttgatcttgtggaagagtatgaaaacatctgtggtagtcaggtgaatatactgagtaaaatagtgagtcgagcaacacctggacttcaaaaattttcaaaaacagccagtatgctctggcttcttcaacaggagatggtcacatggaggctgctggcttctttgtatagagacagaatacagtctgcattagaagaggaaagtgtattcgcagttactgctgttaatgccagtgaaaaaacagttgtggaagcgttatttcagagggattcacttgttcgacaaagtcagctggtggtagattggttagagagtattgccaaagatgaaattggagaattttctgataatattgagttttatgcaaaatcagtatattgggaaaatactctgcataccttaaaacaacggcagctgacttcttacgttggaagtgttcgtccgcttgtcactgaattggtaaatgttctttgaaatgaaagttgccttcaaagttaactgattttttttttcaggctgagaattttttctcgtggatctttgttttgctcttctaaaggtttgcacacactaacattttactctaaaacaactaagttgcattggaatctgatggaatatattgaaacatatccgtgacctttgaattgtaagtaataagttgtggaaagtatacttaacttgacagcattaaaaacaaattaattttggtcttatcttaagatttgactgcctatataaggtagtgactgacctatgaaagctcttttatgttgaaagcaagtgaaaaaaaactaaagccttattggtttgaggttagaacggttatttgaaaagtggatttgaaaagaactgaagctgaattattctaaaaacaaaggaatgaagctttatgacagggcacgtgaaatgtttatagtgaaaagagagaaataagtaacaattgaaaaaaacttctagaattccatttagtaacaaagaggtttttgatgaaaattgtttgggaaaaagaaaaagaaaattgtttggaaactactcttaacagcttaaaattgattatagctaaattacattgtagcaggcaacagctgaaaatcgtttaatcttaccagctggaaagtggtgatttccttttgccagaaagagaccatgttccaaaattgaattatgtgtttgcaaaatatttatgaaagtagtgaattgatctattatgtattccattttctgaattgatattcatattaccatacactaagtaacatgtggagtaagaattacttcctttcttgagtcacattaaaattgttttccattggaagtccatcatgtagatcatgtgtgctgtttgctgctaaagtgagaacaatatattatcctaaatgcttagaagcacatggaaaaaaggtaggtagaaataactgttttgggagatttgtacttatttattagaaatctgtttaaatttttttattaggcattggtgttttttatgtggcattaatcccaaaataggtcttaataggccctcttcccatatgttctcaaaaagtaccagaagcctaaatttaaccagttggaattctttttttaggtgttattctattcaacctttaaaaatgaaggatctgattttaatgtgaaatctgcatttcatcaaagatgggacacagtgtccttgcttaattattctttggaaattgaacacctttactactgcattcttagcaggtagcaacaacacaaattgaagaaaatgtgattcaggtttgaagcactgagttcattgatttcaaccatattgataagcatagagaatacaccttgcattgatactgctcacatgctcaactagcagatggtgtagtagtcaatgataatgtcactaaatgcctacacatataaggagaatttagagtgtgaatgaggaaaatcataacatttcacaattgtgtgacactttctaaagtcttatctattatgccatcttattcttttgtcatccatgggagagagacagccaggaggcctcaggtaagcagaccatccagctcacagatgttgaagccaaacttgaatctcacctttccaaagcactgttctttctgtca

SEQ ID NO: 464639 - DNA, 2596 bp, Homo sapiens
taaatccttgtatcatggaaatgttaacatttaaagtatttatttggttagagtctaaataatggaaaactgaaaaatttattcttcattgtttgtttgcttactttgttttgataatgaatgctcacgcactttaggttctttctaccaaccttttgtttatagttaccccaacaagccgaagcttactaaggcagccagatatttcctgcattcttggaacaggagggaagtcgccccgacttacgcagtcttcagggttctttggaaatctctccatggttactaatctggatgacagtaactgggcagctgcattttcatcacagcgttccgggctgttcacaaacacagagccccacagtataacagaagatgtaactatcagtgctgttatgttacgtgaggatgatcctggagaagctgcatccatgagtatgttttctgatttcctgcagtcttttctgaagcactcttcgagtacagtttttgatcttgtggaagagtatgaaaacatctgtggtagtcaggtgaatatactgagtaaaatagtgagtcgagcaacacctggacttcaaaaattttcaaaaacagccagtatgctctggcttcttcaacaggagatggtcacatggaggctgctggcttctttgtatagagacagaatacagtctgcattagaagaggaaagtgtattcgcagttactgctgttaatgccagtgaaaaaacagttgtggaagcgttatttcagagggattcacttgttcgacaaagtcagctggtggtagattggttagagagtattgccaaagatgaaattggagaattttctgataatattgagttttatgcaaaatcagtatattgggaaaatactctgcataccttaaaacaacggcagctgacttcttacgttggaagtgttcgtccgcttgtcactgaattggtaaatgttctttgaaatgaaagttgccttcaaagttaactgattttttttttcaggctgagaattttttctcgtggatctttgttttgctcttctaaaggtttgcacacactaacattttactctaaaacaactaagttgcattggaatctgatggaatatattgaaacatatccgtgacctttgaattgtaagtaataagttgtggaaagtatacttaacttgacagcattaaaaacaaattaattttggtcttatcttaagatttgactgcctatataaggtagtgactgacctatgaaagctcttttatgttgaaagcaagtgaaaaaaaactaaagccttattggtttgaggttagaacggttatttgaaaagtggatttgaaaagaactgaagctgaattattctaaaaacaaaggaatgaagctttatgacagggcacgtgaaatgtttatagtgaaaagagagaaataagtaacaattgaaaaaaacttctagaattccatttagtaacaaagaggtttttgatgaaaattgtttgggaaaaagaaaaagaaaattgtttggaaactactcttaacagcttaaaattgattatagctaaattacattgtagcaggcaacagctgaaaatcgtttaatcttaccagctggaaagtggtgatttccttttgccagaaagagaccatgttccaaaattgaattatgtgtttgcaaaatatttatgaaagtagtgaattgatctattatgtattccattttctgaattgatattcatattaccatacactaagtaacatgtggagtaagaattacttcctttcttgagtcacattaaaattgttttccattggaagtccatcatgtagatcatgtgtgctgtttgctgctaaagtgagaacaatatattatcctaaatgcttagaagcacatggaaaaaaggtaggtagaaataactgttttgggagatttgtacttatttattagaaatctgtttaaatttttttattaggcattggtgttttttatgtggcattaatcccaaaataggtcttaataggccctcttcccatatgttctcaaaaagtaccagaagcctaaatttaaccagttggaattctttttttaggtgttattctattcaacctttaaaaatgaaggatctgattttaatgtgaaatctgcatttcatcaaagatgggacacagtgtccttgcttaattattctttggaaattgaacacctttactactgcattcttagcaggtagcaacaacacaaattgaagaaaatgtgattcaggtttgaagcactgagttcattgatttcaaccatattgataagcatagagaatacaccttgcattgatactgctcacatgctcaactagcagatggtgtagtagtcaatgataatgtcactaaatgcctacacatataaggagaatttagagtgtgaatgaggaaaatcataacatttcacaattgtgtgacactttctaaagtcttatctattatgccatcttattcttttgtcatccatgggagagagacagccaggaggcctcaggtaagcagaccatccagctcacagatgttgaagccaaacttgaatctcacctttccaaagcactgttctttctgtca

SEQ ID NO: 464640 - DNA, 1495 bp, Homo sapiens
ccccaccttaggagccctttgtgagggggaggccccagctctgtgatgtggacctgggccccaataacttgtcccagaggggatgcccagggctcagttgcctgaggacagcagtgcagttgacatggatattctctttcctctggacagtgttatcggtacagagctgtgccccagccccattccccagatcatccatttcgtcctctttgttgtgttcagcctggtgatcctgattatcttacgcctctacattcccagggagccgtcctcagtgcctcccagagaggaggacagcgagaatagaaggaaaccagaaaaaggttattacgcactttagaaaccagtgaaagagaagcacacaggctccatgagctgggcggagaaagtgtgtcattcacgagcactgggtctgcagctgtggggacaggagactgagacccggcctgcaccctctttcttgtctctcaggatcaagctgaagtgggggaatggctcaggatcggaaataaatatatcactttgaaagattacagaattctcttgaaagaactggagaaccttgagatctacactttcctgtcgaaaaagtgcctgaagaagctctctagggagggcagctcccatcaccttccacgccaagtccgcccagggccagtgtacaaaccagcacctgctaggaaccaccggccacgtggggggcgtgggaaagcttctcccaccagcttccatgtgtccccacgggctcccctggctcctctggcctccatgccgtcatcagtcccgaagacctccgtagagtccttggggtctccatcatccctgagctcctccaagccacgagagcctctgtgtcccctgaagcacccttcacaccagccacctgcgagcaccctatcaccaaacccgaccagctccacagaatccttggggtatctgtcatccctgagctcctcccagccaccagagcctttgcgtcccctgaagcacccttcacacaagccacatgggcgttcccctccccgacgacggaatcctggctgggtgtcctggtccgactccatgcaggctgattccgaaactgacgccataatatgcccaatgtgcaaggcccctgagcgctcctgtccacacacctggtgggtgccttctagccctcgagtgatccgaggcgttggtcgctgcagtgatcccaacctgggcctctcctggaggcaggaggctgctagagcctggtgccactgcacctcctcacagtacccattcgagcaccctaatcttcccacccacctaccaaaggcttccttctagggagaccccacatgcaggcagatggaggcagggctcacactggcctccagggctgtgcaactggcatattattttgcacataacttggctcaggtttgtgaggtctgatttttaaaatgaagcaacaatcacataaagattttcaaacaaataagtcaaatgtatggcagtatttctattttat

SEQ ID NO: 464641 - DNA, 1328 bp, Homo sapiens
ccccaccttaggagccctttgtgagggggaggccccagctctgtgatgtggacctgggccccaataacttgtcccagaggggatgcccagggctcagttgcctgaggacagcagtgcagttgacatggatattctctttcctctggacagtgttatcggtacagagctgtgccccagccccattccccagatcatccatttcgtcctctttgttgtgttcagcctggtgatcctgattatcttacgcctctacattcccagggagccgtcctcagtgcctcccagagaggaggacagcgagaatgatcaagctgaagtgggggaatggctcaggatcggaaataaatatatcactttgaaagattacagaattctcttgaaagaactggagaaccttgagatctacactttcctgtcgaaaaagtgcctgaagaagctctctagggagggcagctcccatcaccttccacgccaagtccgcccagggccagtgtacaaaccagcacctgctaggaaccaccggccacgtggggggcgtgggaaagcttctcccaccagcttccatgtgtccccacgggctcccctggctcctctggcctccatgccgtcatcagtcccgaagacctccgtagagtccttggggtctccatcatccctgagctcctccaagccacgagagcctctgtgtcccctgaagcacccttcacaccagccacctgcgagcaccctatcaccaaacccgaccagctccacagaatccttggggtatctgtcatccctgagctcctcccagccaccagagcctttgcgtcccctgaagcacccttcacacaagccacatgggcgttcccctccccgacgacggaatcctggctgggtgtcctggtccgactccatgcaggctgattccgaaactgacgccataatatgcccaatgtgcaaggcccctgagcgctcctgtccacacacctggtgggtgccttctagccctcgagtgatccgaggcgttggtcgctgcagtgatcccaacctgggcctctcctggaggcaggaggctgctagagcctggtgccactgcacctcctcacagtacccattcgagcaccctaatcttcccacccacctaccaaaggcttccttctagggagaccccacatgcaggcagatggaggcagggctcacactggcctccagggctgtgcaactggcatattattttgcacataacttggctcaggtttgtgaggtctgatttttaaaatgaagcaacaatcacataaagattttcaaacaaataagtcaaatgtatggcagtatttctattttat

SEQ ID NO: 464642 - DNA, 452 bp, Homo sapiens
ggctcagttgcctgaggacagcagtgcagttgacatggatattctctttcctctggacagtgttatcggtacagagctgtgccccagccccattccccagatcatccatttcgtcctctttgttgtgttcagcctggtgatcctgattatcttacgcctctacattcccagggagccgtcctcagtgcctcccagagaggaggacagcgagaatgtaaggagccctcagcccacacccagcagagaatgcttctatttttcctgctctcttttccacttttccacatcagccagaggcgctcctgtgatgggaactctcatcatccctctagggacagcagggcaggcaggggttggagtgggcataggatttccaacccaagcccccagaccatctgtggaggtgcacgggaggcgtcagagcaaaaccaaaccccaggactcagcggcga

SEQ ID NO: 464643 - DNA, 1051 bp, Homo sapiens
ccccaccttaggagccctttgtgagggggaggccccagctctgtgatgtggacctgggccccaataacttgtcccagaggggatgcccagggctcagttgcctgaggacagcagtgcagttgacatggatattctctttcctctggacagtgttatcggtacagagctgtgccccagccccattccccagatcatccatttcgtcctctttgttgtgttcagcctggtgatcctgattatcttacgcctctacattcccagggagccgtcctcagtgcctcccagagaggaggacagcgagaatgatcaagctgaagtgggggaatggctcaggatcggaaataaatatatcactttgaaagattacagaattctcttgaaagaactggagaaccttgagatctacactttcctgtcgaaaaagtgcctgaagaagctctctagggagggcagctcccatcaccttccacgccaagtccgcccagggccagtgtacaaaccagcacctgctaggaaccaccggccacgtggggggcgtgggaaagcttctcccaccagcttccatgtgtccccacgggctcccctggctcctctggcctccatgccgtcatcagtcccgaagacctccgtagagtccttggggtctccatcatccctgagctcctccaagccacgagagcctctgtgtcccctgaagcacccttcacaccagccacctgcgagcaccctatcaccaaacccgaccagctccacagaatccttgggggagaccccacatgcaggcaggtggaggcaggggtcccgctttcctcagcctggatgtgccaacgctgctggacgcataagacaccaaaatcccagacactcccatggacaccgaatatccgacatccacgaacaatgggaatctcctgaggacaacttggagatggagtctcactctgttgcctcaggctggagtgcagtggaccatcttgggtcaccaaacttcgctccggattcaagccattctcctgctcagctctgagtaccggattcaggcttgtgcacg

SEQ ID NO: 464644 - DNA, 1230 bp, Homo sapiens
cctcagtttccttgtttgtaaaatagttgaactaaatcttgaccctttaatgcttgttttgaaatccaaggcaaaaaacaattgcaagcgcccttacttccgtgttgcttcatactcctcttgcgcctgcgctgtctccttggagcagaggcggggccaacaagcctgttttagaaaccctccagtccttagctcgtttagaacacaagactccaagcttattggagggctatcttgccttacggctccaagccgctttttacggcgtttttcagctcgccattcacttcgctgtgaagatggcgtcgggcagcggggtaggtgttgtgtctgaggaggaggttttgcggggtggggaatggtttttcagacctgaatagagacaaactcctgcacccgactggcttcccgatatctcctcgagatcccagggttcaggttcaagaactccccagtaataggccttggcagagggtcagtagaatcgcggaggtttctcgggttggggtcttgaggctacctcagtcttctcgtacagtccaaagaggctttgctttcaaaacgtcctgtagacacctggaccgcgagggcgcggttccctgcttctctaggggcccagacacggcgacggatcttgacgctttttcctccccacagacaaaaaacttggactttcgccgaaagtgggacaaagatgaatatgagaaactcgccgagaagaggctcacggaagagagagaaaagaaagatggaaaaccagtgcagcctgtcaagcgagagcttttacggcatagggactacaaggtggacttggaatccaagcttgggaagacaattgtcattaccaagacaacccctcaatctgagatgggaggatcagagaaacctgggcatgtctatgcgtgtggaacgttccaccctggatcaggtgaagaaacgttttgaggtcaacaagaagaagatggaagagaagcagaaggattatgattttgaggaaaggatgaaggagctcagagaagaggtgactgctgagaaggagacagtaaaccggggacacacctgcggaagagctcttcagggattaggaaaggctacgtccttgtcactgctgtgtgtccccagatggacaactcctcaattgtctggaggtccatttgatccagtgctgagttcaggtcctgaatagctttgttaattttctgacttgatgcttagtctagtactgtcagc

SEQ ID NO: 464645 - DNA, 2424 bp, Homo sapiens
ccccacttttgctcacagctcattggccagagctagtcacatgctcttcctggtcatgatgggaacaggaagtgcacctccccttgccctcctccagcttcctctgacggtgggactatgcgaggccttagatgacgtagagcttggcttctgcatctcacctgaaaactgcggtgactttgtgtggaaactcacgcagtccatgagcctcatcgagatcgggaacccctctcagagcctggagaatgtctgccgctgggcctacctccagcagaagccagacacgggccacgatgaataccacgatcacgccatcttcctcacacggcaggactttgggccttccggcatgcaaggctatgctcctgtcaccggcatgtgccatccggtccgcagctgcaccctgaaccatgaggacggcttctcctcagcgtttgtggtggcccatgagactggccacgtgctgggcatggagcacgacgggcagggcaaccgctgtggcgacgaggtgcggctgggcagcatcatggcgcccctggtgcaggccgccttccaccgcttccactggtcccgctgcagccagcaggagctgagccgctacctgcactcctatgactgcctgctggatgaccccttcgcccacgactggccggcgctgccccagctcccgggactgcactactccatgaacgagcaatgccgctttgacttcggcctgggctacatgatgtgcacggcgttccggacctttgacccctgcaagcagctgtggtgcagccatcctgacaacccctacttttgcaagaccaagaaggggccccccttggacgggactatgtgtgcacctggcaagttcaggccgggcgcggtggctcatgcctgttatcccagcactttgggaggccaaggtaggtggatcgcctgaggtcagaagttcaagacaagtctggttaacatggcaaaatcccgtctctactaaaaatacaaaaattagctgggcgcggtggtgggtgcctgtaatcccagctactccggaggctgaggcatgaaaatcgtttgagcccaggaggcggaggttgcggtgagccaagatcgcgtcgctgctctccagtctggatcacacagcaagaccctgtctcaaaaaataaaaataaaagtgaagtgcaccattcggtggcatttagtacatttgcaatattgggcaaccatcgccactacccggtcccagagcttttcatccctgcaaaaaggaagcgccatttatcagtcacctctcccctccctcctcgccccatcccctggctagcaccaacctgctttctgtctctatagagttgcctattccggaatttcatataaatggaatcatatatatgtggccttttgtgtctgactcacttcattcagcagaatgtttccaagggccatcctgtgtggcatctatccacattccatttctctcgatcgctgaataacctcccgtcgtgtgggtgtgccacatttggtgtatccgtttctccacggagggacatttggttggtttccaccttttggccgtcgtgagtcacgccgctgtgaacatttgtgtataaggttttgttcgaagacctgggaattggtgtttttaagatgtgcccagacttaatgaagggttagaagtccgaagtgagttgttggtaagttgctgggggcccagtgaggccagaaccacccagctattccccttcccacaggccctcagcagaaggagcggggcagaacatctgccgtggccccagggggagcttcggaaaagctgagttggagaacaaggccagctaagcatggctccccgcccgccgcacccaccccaggcagggaggaggcagagggaatgggaggcaggccctgcacaggcatgctggttcagggagcaggagcaggagcaggagctggtggggcccccatatgtgtgtgtgtggctggcctgcaccccagctgattgccccctgcttttcctgcaaggtagaagtggggcagagggaggtctggtaaggacagtgagcagatgcaaccgaagtgtccccacctcacagagaccacccacctggccgcagcccttcactcattttggtggtaggatcctctgcatttagcccagtaagtgaaattgccttttatgtattaaagatagttgtgctgactgaggggcagagctggggctctgctcagcctcccctggttcccgaggagcacaggctggaaccgacctagatcaggattcggtgtggggatgttgggggaacgtggaagacgggctcctcccgggctgctgtcagaatccctgaatgtgggtctgtatgtttccctgtcctgtgcatcactgttctctcacgctgtgattttacatctggaaagcaatcatcttctctcccaccctttccc

SEQ ID NO: 464646 - DNA, 1466 bp, Homo sapiens
gatagggaaatgagacttaaccccaaaatccacagtggtcttacactttaccaagacacagggtacaaaattccccctgggaatgacaaatatcaaaaaccaggatcaaaagtcctcaacatcaacgggcccttggtggagaggaaaaaaaacaccgtggtgttattcaacagtacctccagaccagtccctggggaaattgttccaagttcctcaaacagtggagccagtaaaattgaaagagtaagactacctcttgggggcctaaaatatctgtggccactatgcgaaaatatcaggtcagaccacccaagatttccagagtggtattcattttcattgatggcttcttcaaccaggagcaggccacaggctagagtggtagcgatggagagcagagaggtggttcccagagcagcagtcatgagaggagacgggccagtgagcagcctgaaagcagaacacacaacaacagcaggaaagctacaacagctgcagaggaccatgtggaaagggagatgcctcaatggtttagaattctatattaaaaacagtggtggtttggaagaagccccaagataactgctaccaaacctgtgaaatataatttaggtgcctcaaacatgcctctgtgacctgaggctcttcctgctgcctggaacgttcctcttgggctgaagtgagaccaacttcttattcttcaggtgatgatggacaagtcccttaagccttctgatcagcagcttcttgaactctaaaatgggaaatctaatattaatgatatcctacaacatggactgttgtgaaaactaataaagacaaagccttctcaagcactatgaagcattcagtgctaagtacaatgaaaataatgtggccagaggcctcgggcctgtgccagatggaaccagctttggccactctttcccatactgctgctcccagctgacagaggtttggctgaagattctgcaaggacccgtgcatcagtattcccacaaggagctgcagggcacacacaagtgtgtgctgagaaagcccccaagaaagatggaacccacgtgggggcattgctaatgctgtcccagaaaacaagcccagggattttcccagctctatacattgctttgtgtttatcagtgctttgaccagcagctattcatttgtgatatgaaactcttaaaataaaatcttttttattttagcaagttttattgagggaacctggctgcaggcaggatttcagtcttatatctgcataaagcctaaattgttggcatgttgaaatatttccttagaaaaaccaaggtgtttgatgttgcttagccacaccaattgactggacttctcacttcctaaccagttgccttggtgttgcttagatgaagcccagattaatttttttctcggtcacttcttataaaatctgaaatctgaaagttcagccctaaccacctcacaaaatg

SEQ ID NO: 464647 - DNA, 1180 bp, Homo sapiens
ttaccctggagcgcagtggagcatcactgccaacggacttaccctcaacatgccagcacaaattctgtcttctctgctgccatataagatatgacctgctcctccttgtcttctaccatcgttgtaagtcctccccagccacatgaaactgtgagtccattaaacctctctctttataaattacccattatcagagacttggagtgctcagaagacaggcagatgtgggagagtttggaacttcctagagacttgttgaatggctttgtccaaaatgctgatagtgatgtgaacaataaagtccaaaatgatgtgatctcagatggagatgaggaacttgttgggaactggagcaaaagtgactcctcttatggagagaataatggattcctgggccaggtccagggcccccctaaggacttggtatcctgtgtcccagccactccagctgtagctaaaaggggccaaagtacagcttggctgtggcttcagggaatgcaagctccaagctttgtcagctcctacatcgtgttgagtctgcaggcacacaaaagtcaagaattgagatttggaaacctccacttagatttcagaggatgtatggagatacctggatgtccaggcagaagtttgctacagggggtccaggttgttctctggattatcgctaaagaaatctattacactgagagtgaatcaggtatgtttctcacagaaaggcagcatggcactgagagaggctatgaggaaaactgccctggccttcctagagatctggacatccaaatacaagaagctcaaagaacacctgagaaattcattgcaaaaaggtaatcacccaggtacacagtcatcaagttacctaaagtcagacaaaggaaataatcttaagaactgtgcagcaaaagcatcaggtccacattttcaagttgttttaagataatactatttattttcataaaacaggaggttcctttgtcaacgaattcacaaagctgtaagcaaagccaatggaagaatatgtcagatactgagtttatgacagacaggagtcttgctctgttgcccaggctggagtgcagtggtgcgatatcggccaataaaccacatttttgcattcaactacatgaaatgttgattaaagtcttcgagaataaacaatagcatcagcagcaacaac

SEQ ID NO: 464648 - DNA, 2192 bp, Homo sapiens
ttaccctggagcgcagtggagcatcactgccaacggacttaccctcaacatgccagcacaaattctgtcttctctgctgccatataagatatgacctgctcctccttgtcttctaccatcgttgtaagtcctccccagccacatgaaactgtgagtccattaaacctctctctttataaattacccattatcagagacttggagtgctcagaagacaggcagatgtgggagagtttggaacttcctagagacttgttgaatggctttgtccaaaatgctgatagtgatgtgaacaataaagtccaaaatgatgtgatctcagatggagatgaggaacttgttgggaactggagcaaaagtgactcctcttatggagagaataatggattcctgggccaggtccagggcccccctaaggacttggtatcctgtgtcccagccactccagctgtagctaaaaggggccaaagtacagcttggctgtggcttcagggaatgcaagctccaagctttgtcagctcctacatcgtgttgagtctgcaggcacacaaaagtcaagaattgagatttggaaacctccacttagatttcagaggatgtatggagatacctggatgtccaggcagaagtttgctacagggggtccaggttgttctctggattatcgctaaagaaatctattacactgagagtgaatcaggtatgtttctcacagaaaggcagcatggcactgagagaggctatgaggaaaactgccctggccttcctagagatctggacatccaaatacaagaagctcaaagaacacctgagaaattcattgcaaaaaggtaatcacccaggtacacagtcatcaagttacctaaagtcagacaaaggaaataatcttaagaactgtgcagcaaaagcatcaggtccacattttcaagttgttttaagataatactatttattttcataaaacaggaggttcctttgtcaacgaattcacaaagctgtaagcaaagccaatggaagaatatgtcagatactgagtttatgacagggccttgccattgttcatatcataaagctggtctatcatgcccagtgcttggacagaagaagaagagagcaatggagacagcccacctgctgggttaaaggcttgagcattacagcagcacattcagctctcattttattaaaaagaatttggtcaaatgaccacactgactgcaagagaggctagtaaagtagttttgctgtgcatccaggaagaggagcagaaatgattttgtgctacagtcatctacatgtaatacacatcaacaaacaaaaacatgtatgtttccaacatatatgtttggagacagagtctcgctctgtcccccaggctggagtgcactggcacaatctcagctcactgcaaccttcccctcccgagttcaagtgattctcatgcctcagcctcccaagtggctgggactgcaggcacgcgccaccacacctggctaatttttgtatttttagtaaagatagggtttcgccatgttggccaggctgatcttgaactcctgacctcaaaaaacaaaacaaagcaaaacaaaacaaaacaaaacctcagaactaattggattaggatcccaccataataggctcattttaaattaatcacattaatcacttctttaaacacaattaccgtatttccaaatagggttacaatctggagtactggctgttgggactcgaacatatgaattttggggtgacacaagtcaactgagtacattctgtactctccctaaaataaaagaagtttaaaaacaattgctgtcagtcatttggctgtgtcatcatctaagctatctaatgataagagaaacagcagtaactgttagcataccgattgtataaacttgggggatatttatgaatacaacatcagtgtgaattaccagtttaaggactttacagagaaaaaagaggaaggaaatttatgtcttcaagtccggatatttagatgtgtgcttgaaagtttttggtccataatggatcagggtttaaacaaagaaaacaacgggtctttcatcacactatgttgagaagtaacaacctaatctaactgtgggtagaatatagctatccaggaggagagaacagcttggatggctcttgaatcataagaacttacatccccttcaatgaaa

SEQ ID NO: 464649 - DNA, 1205 bp, Homo sapiens
gcagtctgcaggctgctgcagcaaagcgggcctggagcttaagaaaagagccaaggcaagagagagagacttgggagtctcccccagaggtgaggccatgaaggggagagtgcagagatgaagggaggaggcgaggggtcttgcttgggcttagtctatgagtcatcggctgtgtggcaatgaagagccatctgctgggtggccaccacttccaggaggggccaggctaccctccatccctgtgcccccagctaccagccagaggaggctccgttttgagggtagcttactcaagggtgttccttgctctggcctcagtttccccacccttacactgaggacatttggaggagtctcacgctggtcactgtgccatgtggccttgacttccagtcacatactggccaccttcaggctctcagaagctcccttggccagactgaaatttccagatataatgaacatgggggagcctgtgcctgatgtctttttacctcatgtgccctgtgagacaggccagcaggcacagcagatgctcaaaggtagtgccagagcttgcttgtccatggggctttgtggttccagccagcttctcccttccagggtggtgtcctcagggggctctgacccagggtgcagtgactgccacgacatccaggtctgaggcctcctccacctcctctgttgagcccccggtggactctatacaaagacaaggttttactgccccttcttattttttcatccgtaggagagtgtgggctgggagtggggcaggagtgtacaggagattttaaaggttctggacatgaagagcttgctcaatgaatacagtgtgagctctcctgtctcatctccctagaataaaactctttgtcactgatactcgcatcccgggtagggaaaggaaaggcaaagagtatgttgaaaacatctctcactcttttctggcccacgtgggtgatttcagtcactcagccgtttcccaagacatgggaggtccctggtttgcctaggatgcaatgagggagatttaagctcagccctgataaacagcaaagccaaataaaagcaaaaccacccatcatttgttgaatccttaatttgacacaagccctacactaaacacttttaagtgcgttactttaataaacctgtggtattggcattattgcacacattttacagaaaaggaggctaggctc

SEQ ID NO: 464650 - DNA, 390 bp, Homo sapiens
ccgcacccgggccctcgggcaggactcgtcgccgcccggacgcgcccgccccggaccccgagcgcatccagcgcctccgccgtctcatggtggccaaagaggaaggggacggggccgcaggagcgggccggaggggtccgggtcggagcaggaaggcgccacgcaacgtgctcacgcgaatgccctgtgagtccgcgggccgggcgggaagcggggcagccgccgtccggaagctggctgccgagggggcgtctgcggggcggcggtggccgggcgcgggtctgcacgtattgcgggagcgccttggtgaaaatttgcggggatcatcagtgactatggggtggatctgcttgagtaatgtgggtaatgagggcgtggggagggtcaccc

SEQ ID NO: 464651 - DNA, 1272 bp, Homo sapiens
cgtggcggagtacgagagcttcctcaggaccggagtccggggcggcgggcgcgggcgcgggcgggctcggggcgcggccgcgggctctggggttcccgccgcacccgggccctcgggcaggactcgtcgccgcccggacgcgcccgccccggaccccgagcgcatccagcgcctccgccgtctcatggtggccaaagaggaaggggacggggccgcaggagcgggccggaggggtccgggtcggagcaggaaggcgccacgcaacgtgctcacgcgaatgcccttgcacgaaggcagccctctgggtgaactccatcgctgtatccgtgagggggtgaaggtgaatgttcacatccgcactttcaagggacttcggggcgtctgtacaggcttccttgttgcattcgacaagttctggaatatggcacttactgatgtggatgagacctaccgaaaacctgtcctaggcaaagcatatgaacgggattcttcactgactctcactaggctatttgatcggctgaaacttcaagattcctccaagaaggaagcagattctaagtctgcagttgaagattccactctgtctagatactcacagacatccacttggaagttggcttcagtgtggggaagagcagacactggccggggctcacacaagcgttcccgctctgtcccttcttccctgcaggcctctgcaagggaggagtccaggtcagagctgtcagggaggactacacggacagacggctccagtgtgggaggtaccttttccagggctaccaccctttccagaggccagtcccgtaagaaaaagcgaaagcccaaagtggattaccagcaggtattcactcgacacataaatcagattttcattcgaggcgagaatgtcctgctggttcatcttgcacagtgaccagctcagcctgagctttggtttttagaaataaagtgcatgaattgctgctatgctgtatcctagtatcccagtgaaactctgagttggaatgattccctctggtcctgcatatgcagaggacggagcaggctcagccccctggaagatgagctcaaggggaggacaggccttgggagggcaggcggagaattgctgctagtaaggtcagtttgcaatgttcagctttagatatgtgtcgtaatgggagtctgaaaactgtaataaactgtattcatatcctggctgctttgtctctgttgatttaggggggtgggagagaggaggcaggggagtctgttaccaagtgaaga

SEQ ID NO: 464652 - DNA, 705 bp, Homo sapiens
aaacgacaggttcccggcgggctgtgccggggcttcgctgtgtgaccttgggctggcgtctgggctctctgggcccttgtttccgcgagttaaacgtaggggcgggggagtttctctggccctgccgcctgtgacctaaggagccccgtgacctctccgacccgagcccacccccggcccagtctgcgagcagctccgggacaagcactcccggcgaagacatgtaggctctcagagcctgcgtttccctctgtagagcaggcctagttactgtcttcagggtgcacgcgtctccgtccccgacccgcaccctcaccgccggggtaagctgagccaggcccaagcgacagctggggttgtccgtggggctgcaacccaggaggaggccccaacaatagagccccagaggacggagacaatgggcctctctgtcggcccagccgtccccgccatccaaacagaagcagctgacggaggactgccgggctgggatccctgggctccgcgggggcggctgtgtgccagggcggggcacaagggaagcgcacagacgtttgaagaggggcccccgtgtgcctgccatgattgcatgatggcatctgagcctcacaacctaatcctgagaaaggtgccataatcaccccaactttatcttgagggaactgaggttcgggcctggattaaacccaaactcggccacccgcc

SEQ ID NO: 464653 - DNA, 1854 bp, Homo sapiens
gagatcacgctactgcgctccagcctgggcaacaagagcaagactgtcacacaaaaaaagaaaaatacaggcacgcaaaggatattacagaaatgcaccaaacatgaattattggcacagatacaatatttcaaaacactaactaatattagattgagacatcctattacaacattaaaaccatgcccctttcaattcaagtgagcacctctatttccattccaagaccctgtgatttcatacacatttaacacaacggtaacaataacagtaatgctagctagtatttgttatgcccttaatgagtgccaagctcagctaaatatgtaaaacatgttttgtttgttttattggtgaagagatgagttcttaaacaaccagaagatactgcaggttcaaagtcccggaggccagaaggagcttgcattcaaataagaaaatatattttctcaaggaaatataagttgtatttctatgtaactctatgcaccaggagggccctagcaagaaagagaggtctcactccacagggatttctgaaaaaagtttaatgaacaggccatttacctgagatgtggggtccaggagagggagtggtttcctggaaccagtgagaatagctagttatgggccacggggaagcctgagaggaggtttgaggccacacagtcgctgccaaaactaggggtacatggggaaaataccccaaattagctcttctcccagcctctgatgccctgctggcacttcccattggctggatcgaactggaaccccaagatcaaggaatcctctgtgatggcatccatgagggtccactttgtcagggagcaccgagcagggtgggaaaccctgcctcctcctccaaaacactggatttaggaccctgggggctcactcagtgcaaaggggccagccagtccaggttgctaacgtcaggcggaggggcccaccctcaaagtctacagccttgctactgccacaagagggcgctgcagaacaccggcgctgggaagtctgggggaccttcctcctctgccaaggtgactcccgctggcgggaggcccgaacagctctaggaagcttgcagggaggtgtggagggagaggcacgagcgggaaccggggctgcgtgcggcgcttgcgggccagctggagttccgggtgggtgtgggcttggtgggccccgcacttggagcagccagccagccctgctggccccgggcaatgagggacttagcacccgggccagtggctgtggagggtgtactgggtcccccagcagtgccggcccaccggcactgcgctcgatttctcactgagccttagctgccttcccgcagggcagggttcgggacctgcagcccgccatgcctgagcctcccacccactccatgggctcctgtgtggcccgagcctccccgacgagcaccaccccctgctccacagcgcccagtcccatcgaccacccaagggctgaggaatgcgagcgcacggcgcaggactggcaggcagctccacctgcagccccactcagggattgtaaatacaccaatcagcaccctgtgtttagctcgtttgtgaatgcaccaatcgacactctgtatctagctgctctggccattgtccatggctggctccctgcatctcagataaacactgacacccaaagaaggggcccaatgccagggagtggaaacagcccacagagaaggtgggggtggcccctacacatggacccctggcttggccccaaataccatctcataccaggtttgtaggcaagtgaaatggggtctgggggcaagtttaaggacaacgtaaagggataaaatctcagatggaaaatgtttta

SEQ ID NO: 464654 - DNA, 1818 bp, Homo sapiens
aaacgacaggttcccggcgggctgtgccggggcttcgctgtgtgaccttgggctggcgtctgggctctctgggcccttgtttccgcgagttaaacgtaggggcgggggagtttctctggccctgccgcctgtgacctaaggagccccgtgacctctccgacccgagcccacccccggcccagtctgcgagcagctccgggacaagcactcccggcgaagacatgtaggctctcagagcctgcgtttccctctgtagagcaggcctagttactgtcttcagggtgcacgcgtctccgtccccgacccgcaccctcaccgccgggagatgagttcttaaacaaccagaagatactgcaggttcaaagtcccggaggccagaaggagcttgcattcaaataagaaaatatattttctcaaggaaatataagttgtatttctatgtaactctatgcaccaggagggccctagcaagaaagagaggtctcactccacagggatttctgaaaaaagtttaatgaacaggccatttacctgagatgtggggtccaggagagggagtggtttcctggaaccagtgagaatagctagttatgggccacggggaagcctgagaggaggtttgaggccacacagtcgctgccaaaactaggggtacatggggaaaataccccaaattagctcttctcccagcctctgatgccctgctggcacttcccattggctggatcgaactggaaccccaagatcaaggaatcctctgtgatggcatccatgagggtccactttgtcagggagcaccgagcagggtgggaaaccctgcctcctcctccaaaacactggatttaggaccctgggggctcactcagtgcaaaggggccagccagtccaggttgctaacgtcaggcggaggggcccaccctcaaagtctacagccttgctactgccacaagagggcgctgcagaacaccggcgctgggaagtctgggggaccttcctcctctgccaaggtgactcccgctggcgggaggcccgaacagctctaggaagcttgcagggaggtgtggagggagaggcacgagcgggaaccggggctgcgtgcggcgcttgcgggccagctggagttccgggtgggtgtgggcttggtgggccccgcacttggagcagccagccagccctgctggccccgggcaatgagggacttagcacccgggccagtggctgtggagggtgtactgggtcccccagcagtgccggcccaccggcactgcgctcgatttctcactgagccttagctgccttcccgcagggcagggttcgggacctgcagcccgccatgcctgagcctcccacccactccatgggctcctgtgtggcccgagcctccccgacgagcaccaccccctgctccacagcgcccagtcccatcgaccacccaagggctgaggaatgcgagcgcacggcgcaggactggcaggcagctccacctgcagccccactcagggattgtaaatacaccaatcagcaccctgtgtttagctcgtttgtgaatgcaccaatcgacactctgtatctagctgctctggccattgtccatggctggctccctgcatctcagataaacactgacacccaaagaaggggcccaatgccagggagtggaaacagcccacagagaaggtgggggtggcccctacacatggacccctggcttggccccaaataccatctcataccaggtttgtaggcaagtgaaatggggtctgggggcaagtttaaggacaacgtaaagggataaaatctcagatggaaaatgtttta

SEQ ID NO: 464655 - DNA, 1660 bp, Homo sapiens
gtgtcactggcctgactggtccctgggtattggggcgtatgcgcatgctccgctcacagggtcgggctctgggcggcggagaccagccgcctgtgctccagttcccggtgagcctcggtactgtggcagcagtcagtgtgtctggcgggtgtcggcgtgaagcggggctgggccagcgggaggtagctctgtgggagtggaaggcctgtatttctctacctggaccgcacgctcctcgcgcaaggagggtagagctcaagatgcttgggatttgctttacattctaagtggatttggagaagagacaataaagaataagcagtcaattctataatatatttagaaggagaaaagtgccaaggaggaatgaaaaagtagagcaaggcaaatgtggatatatgtttataactgcacaaatgaattctgaagggacgcataagacattggtattggttgcctatggggaatataattgatatgggggagacttggttttccttgtatgctcttctatatggtttaaaaaattatttatgaaaattaaatatatactaaaaaagagggaaattgctgagtttttccttttagctgcactattaactcttttaggaaaaagcagtgatctatcaaatttgcctctgattggccgaaatgggccagaaatggattcacaagggatcctgggaaatgctgtttgcagagatcagctctgtatggttgtcccatacacagcagagcaaaggagagagggggatgattttgaaatcaaacatggacataaactgcattgcactgaaaacttaccacaatatacaatagcaccttcctgtggccagaaaggtggccgccccctcgcccgtcacgcaatgcatgttcgtggggaacctggtgctaaactattcatagatgacctgcttctggagtctttaagagtttataacatcaggaaagatatggacttggaaacttacattattaaaatagactgcagtggatttaattggacaattcaagacatccattttattgtccaaaatattacataaaagtgtacagtttttagcctaaatgcaaacaaagttgcttgaaaatggcatgggtaaaattcttacggaaacctggtggcaatcttggaaaagtttatcagcctggaagtatgctatcactagcccctaccaaaggcttgttaaatgaaccaggacaaaacagctgctttcttaatagcgctgtacaggttttatggcaattggatatattccgacgaagcttgcgggttttgactggacatgtttgtcagggagatgcctgtatattttgtgcattgaagacgatatttgcacagttccaacacagtcgagaaaaagcacttccctcagataacataaggcatgctcttgcagaaagtttcaaagatgagcagcgatttcaacttggccttatggatgatgctgcggagtgctttgtacaccaatcaaacatagatttggtcttttcacatagtcccatatttcttggaggcttcgttagtttcttttcagtcttttttgtctaatcttgtcttcttgctttatttcattaattagatctccaatcactgatatactttcttctgcatgattgaatcggctactgaagcttgtgtatgcttcacgaagttctc

SEQ ID NO: 464656 - DNA, 1813 bp, Homo sapiens
gtgtcactggcctgactggtccctgggtattggggcgtatgcgcatgctccgctcacagggtcgggctctgggcggcggagaccagccgcctgtgctccagttcccggtgagcctcggtactgtggcagcagtcagtgtgtctggcgggtgtcggcgtgaagcggggctgggccagcgggaggtagctctgtgggagtggaaggcctgtatttctctacctggaccgcacgctcctcgcgcaaggagggtagagctcaagttccgtgatgatggtctaagcaaagacccttcgtcctgttaaagataaattaaaaaaaaaaaaaaaaaaccaaagggaacaaaacttactctgcaaaagtaatatatgatttacctgctgttgtcataagaattccaaatagacaaactcggtatgcttgggatttgctttacattctaagtggatttggagaagagacaataaagaataagcagtcaattctataatatatttagaaggagaaaagtgccaaggaggaatgaaaaagtagagcaaggcaaatgtggatatatgtttataactgcacaaatgaattctgaagggacgcataagacattggtattggttgcctatggggaatataattgatatgggggagacttggttttccttgtatgctcttctatatggtttaaaaaattatttatgaaaattaaatatatactaaaaaagagggaaattgctgagtttttccttttagctgcactattaactcttttaggaaaaagcagtgatctatcaaatttgcctctgattggccgaaatgggccagaaatggattcacaagggatcctgggaaatgctgtttgcagagatcagctctgtatggttgtcccatacacagcagagcaaaggagagagggggatgattttgaaatcaaacatggacataaactgcattgcactgaaaacttaccacaatatacaatagcaccttcctgtggccagaaaggtggccgccccctcgcccgtcacgcaatgcatgttcgtggggaacctggtgctaaactattcatagatgacctgcttctggagtctttaagagtttataacatcaggaaagatatggacttggaaacttacattattaaaatagactgcagtggatttaattggacaattcaagacatccattttattgtccaaaatattacataaaagtgtacagtttttagcctaaatgcaaacaaagttgcttgaaaatggcatgggtaaaattcttacggaaacctggtggcaatcttggaaaagtttatcagcctggaagtatgctatcactagcccctaccaaaggcttgttaaatgaaccaggacaaaacagctgctttcttaatagcgctgtacaggttttatggcaattggatatattccgacgaagcttgcgggttttgactggacatgtttgtcagggagatgcctgtatattttgtgcattgaagacgatatttgcacagttccaacacagtcgagaaaaagcacttccctcagataacataaggcatgctcttgcagaaagtttcaaagatgagcagcgatttcaacttggccttatggatgatgctgcggagtgctttgtacaccaatcaaacatagatttggtcttttcacatagtcccatatttcttggaggcttcgttagtttcttttcagtcttttttgtctaatcttgtcttcttgctttatttcattaattagatctccaatcactgatatactttcttctgcatgattgaatcggctactgaagcttgtgtatgcttcacgaagttctc

SEQ ID NO: 464657 - DNA, 847 bp, Homo sapiens
gtggttcccatggaaaccttcaccactggtgactccaagctgaacacaggggatggcaaaggcctagtgaagagtccagatgtagacttaaagagctctggaatctcctccaagggttcagccagaagccatctgactggctatgaccagtattggggactttattcttccaaaggcagtctatccaatttttggaccactctgatggtgtcagaggccttctgtagattgagctcaaataactcacttctagttgtcttaggtcaacaatgtgtggccacagagattaagtcaaactcctcttcatatgtggttgtggtatgtgcccaggctggtcttgagttcctgagctcaagcagtcctccctccttggcctcccaaagtgctgggattacaggcgtgagccaccatgctcagtacttgagatatctgaggcaacactggggattctcctgtaccctgctccagttgattagtctacacacccagagatgtcaagcatcatttcactgtgataccaaccaggtacccaaaggtggagtaccaccttctacggtggagcccataggaagtacataggaagtactagttacttcctaagtaactagttgagtgtcccatgggtctttaatcccctcattcagaacagaaattgcaatgtgagatggaataaaatttctgttggaaacagaaacctaaacacatattatgttcaggtttaactcaaacccacatgtatttggttgcttaaaattttcatctgttaagccatgttttccaatcctttccctttgcatttgtttggaactatatataaatttttaatctgcattcctgcctatttaaa

SEQ ID NO: 464658 - DNA, 3062 bp, Homo sapiens
tacaacagagactgacaaataaaggccatttctcaggacaaatttggccgctgcctgtttttgtaataaagttttatcggaagtcctgccatttagtttttttacatatcgtctgtggttactttcatagtatcatggcagaggttattattacaccagccatattttcatcattttggatgtcttttttaggaattgcatgagtgtgtacatgcatataactaggtacaatgccaacacactgaagatcctgaacactcaggctttggctcccccacctacattccaccatattgaagggcttacctgtctggtgccagcaaagtggaaacattcgcatgctacaattggagaatgtgattctgccagctggtcatattggggctgtgtcctgacctatggacctcatgagaactgcaatccaagcaaatgtggtgggtgtgaagctttcaagaagttgggtcaagaacaaggactgaaagaggagcatcaatttatgggggccactgaggctttcagagattttgtgacctaccaaactggcacagctagtaaatggatgacaagtgtaaagaatactacatgtgaagtcatggagtcgatctgctagttatttttttttttgtcctaattcacatgaaaatagttggaggactgttaacatataatctaaactatctaacaggacctcatataacactcatgaatactatgcttgggaaacaaaagcttattctactcattttgtaaaatgaattttattgtgtatattgaaggaacaacatgatatgggatacaaacacatagtaaaaaagataccacagtgaagcaaattaacatagccatcatctcataagtatccatttttccttgattttttttttttttttttttttttttttggtggcaagagcagctgaaatctactcctgtagcatgaatcccaaatatagcacagttttcttacccatagtcttccggttgtacattaggtctccagacctggccaccctccctacttaatacagacctccatctcccatctcctccctagctatcccctgcctggtaatcactgttttgttctctatttctgtacagttgggtttttgtttgtttgtttgtttttagattccacatatacttgaaacaatgcaatctttttctttctttgtctggtttatttcacttaacacagtgcactccaggctcgtctatgttgtggcaaaggcaagatcttttttagggctgaataatattccaatctagacatataccacagtgtattcatttgtctgtcaccggacacttaggttgttgcctatgttcactgtcacaacgctgcagtgaacacaggcatgcaggtctctttatgaggcggtgatttcatttcctttgggtatgtgcccagaagagagattgttaggtcatctggtaattttatttttaatttccttaggaatatccatactattttacataacagctggaccaatctacattcccagcaacaatgtacaagggttctcttttcttcataccctcaccaacatttgttatcttgtgacttgatagttgccatccaaatgggtgtaaggtggtatctcatctggttttgattaataattaattaatgatgaatgatgttgagcaccttttcatatacctgtgggccatttttgcatattctctgtagaaatgcctattcaggtcttttgcccatttttaaattgggttatgtggtttttccactattgtatgatttttttttttttttttttttgagatggagtctcactctgtcaccaggctggagtgcatgagactgcatctggaaaaaaaaaaaaaaaaaaaagaattacctcatttactcttcacaacaagactacaaagtgagtaccacgataatctatttccaagatgaggcatctgaggcccagagaggtacagtcacttgcccaaggtcacacagtactaagtagtaaatctggaatgagaggctccttgaaagcaatcctaaatttctatcctttcttgatggttttctacttgaaacagttaatatcgtagagtcttgaatcctgttacatcaactccagcatctcctttctctgagcctttttattagacttctttccccatccctaattttacagacgagcacattttattgatgtgaaaatgaagacttataaagactgtcctatttcccaggtcatataaccaactccatgtgtggtcctgtgaaagtgccctaacttctttcaaatatgttttttctcatttgagttgcaaaaataaacccatctgctttgtagccattaacatggaaagaagaagaggcatccaaagtgttgggtccgcatcgcccttgccttggaggaagctccaaatagagggaaggatggtttccagcagtccctgaagtgcctttcctccttcgtgggatccagttacacccagcagacttcagtttgaataaacagaactagatgaatacacctagggaatctgtgaggccagcctcagcttttaacatccagctacagggaggctctcgctcaccgggagattaacccgccaggctgctgagtgagaggggacagagtaggccctgacgggaggcctgggacgcaggggaaatcaaaacaagtccacctgcttaaggagactgccgcactgtgacctcgtcctccggacatctgtggcaagtgttaccgcagccactgatgtggcgcactgggccatttacagctgcctcatgatattctttttcacgactgtgtttacactattgtttaacaactttgtataacaatctcttttcactccaaataaaccttagtgcctggaaggccaagagtatcttcagtatgtgtctatcctagtaagcttctcaaatgatacagaatttttcgttttttttaaaaatttccaacctctcatgtgccaatacttttgtataatcaaaatgattagaaaaatgaacatggactaggatgccttagtagtgtcaaatgactataaatgtgtctaaatgcttaatgtaaatttcttgtcat

SEQ ID NO: 464659 - DNA, 1064 bp, Homo sapiens
aggactgaaaggcagggactaaggtgacagctgactctgccggggcggagtgcgtgtcctcccaccgtgctggcgctgaactgactgtccgctgccaagggaagtgacagccgcagccgggctctcagccagcggccaggcgccccgcggaccatgctctccagtacgcagaacgcgggcggctcctatcagcgggtccgcggggcgcttgatacacagaaatgcagtccagagaaaagtgcctcatttttcagtaaagtgacatattcctggtttagcagagtaattacttttaggctataagagacctttggaaagagaggatcttttttgaactaaaggaaagtgattccttctgcactgcgtgtcccatctttgaaaaacaatggagaaaggaagttttaaggaatcaagagaggcaaaaagtaaaggtatcttgttataaagaggcacatatcaagaaaccatctctactctatgcattgtggaacacctttaaatccatcctgattcaagttgccttattcaaagtgtttgctgatattttgtccttcactagcccactcataatgaattataccagaaaagttaattatttgatgggcctgccatgtgaaaaccagaaaataacctcgtactcacaagccagtggaagggattcctgattttactaaaaaaaaaaaaaaaaaagagagggcggggacaaatatcaaattaagcaagtaaagaaaaagaacaggcaaattatcattttctgtgaacacagctcagattttggctggaatggctatggctatgcagtggcacttcttgttgtagtctttttgcaaactctgattcttcagcaatatcaacgttttaacatgctcacctcagcaaaagttaagacagctgtaaatggactgatctacaaaaagaaatgtaaaggcttatttggcagaaaaaaatattgaagaaaaaaaacccaaaaatttgaaaaaattcccctagtgttagaaatgccatacaaacaaccttcaattatataatacctttcagtattttctctaatagtctaaaagcaa

SEQ ID NO: 464660 - DNA, 1362 bp, Homo sapiens
ccaccatactcagttggtcaaagcagtcacaggatcaaactgcatcacggaagctgcacacgatgacaccctgtctggaaagtttttgccagagggcaaaagactgcaagcagaatatccctttgccatttctcattcaggactggccgttgtctgaaagcaaacctcaaggacaggacttctggactccgcagccacttcaggctgctgctccatcgcatgaattccagcaggtggcgctgcaccccgcgcggacccggcttgcctctcggccccagggaggtcggttgatgagcagtcgggaagtgggtctgcgcgcaccccgctgcagctgtggcaaacgcaaacgatgacacacaggcttgacgagggcctttgtcagaagcaatggggatctggcgtcaccgcacaatggaaaacaaagtgcttctgcctggctggccagaatgcacgtttgctcactattgatgctggggcatttacaggcagaatgagttcatgtgaaatttcaggatctgccatgactcagattcactttctgtaaaccagagtcaacattacatttccctttactctgggccattccttgaatttttaggtcaccagttgtttttgtactaactgaagggatttgagtatttcacaagcaccttatttttattagcatttttagggcattaccaatttgggacggatctgtagtgtctattgcattttaatatccgccgaataggtagcatgaattcacatcatttcagcgatggggaaatggaaactcgcagagagcttaactgaatttcctgagaccatgggatgtcagaagggccactaaatctttcaacttccaactcatactttaaactcctgcctcttatcctttttgaagtgactggggaagaccaggtacagatctgtaaaatgcttcattccattttcagaggagctgaggtcaggtgcttcctacagtcgaggtctcgccaagaagacggtggccacgttcctcaattctcaggcgagtgttttgatgcctgggtgcttctgcctgatgagcccagcattcatgaagtacatgtgacaagaggacggctggaatattgctcaatattttcaggccgacggcactggctgcatctgaatctccctaaaccccacgtctgcggcaaagtcttcgtggtgaaacaggtgagtcacacttttctgcttctctgcaattacaaatgttatcacctcatctgacacagagagggtgttggttggaaatacgcattaggaataagctctttggaaacagcaaaactgccttcatgaaatgaagacttttttttagaaagtctggagctaaagttataaaaataaagaggc

SEQ ID NO: 464661 - DNA, 1767 bp, Homo sapiens
  misc_feature (1607)..(1607): n is a, c, g, or t
  misc_feature (1613)..(1613): n is a, c, g, or t
  misc_feature (1621)..(1621): n is a, c, g, or t
  misc_feature (1624)..(1624): n is a, c, g, or t
  misc_feature (1628)..(1628): n is a, c, g, or t
  misc_feature (1630)..(1630): n is a, c, g, or t
  misc_feature (1632)..(1634): n is a, c, g, or t
  misc_feature (1640)..(1640): n is a, c, g, or t
  misc_feature (1650)..(1651): n is a, c, g, or t
  misc_feature (1653)..(1654): n is a, c, g, or t
  misc_feature (1663)..(1663): n is a, c, g, or t
  misc_feature (1673)..(1673): n is a, c, g, or t
  misc_feature (1678)..(1678): n is a, c, g, or t
  misc_feature (1683)..(1683): n is a, c, g, or t
  misc_feature (1699)..(1699): n is a, c, g, or t
  misc_feature (1704)..(1704): n is a, c, g, or t
  misc_feature (1765)..(1765): n is a, c, g, or t
gttccctttgctcgttatctggccatgaataaggtgaagaagatgaaacgttatcatgttggaaaggtgtggcggcgagagagcccaaccatagtccaaggccgttatagggagttctgccagtgtgattttgacattgctggtcagtttgaccctatgatccccgatgcagagtgtttgaagatcatgtgtgaaatcctaagtggattgcagttgggagactttctcattaaggtaaatgaccggcggattgtggatgggatgtttgctgtctgtggtgttcctgaaagcaagttccgtgccatctgctcctccatagataaactagacaagtttgagaaagaaagatcttggggctgggctaatgtttgggtgtttatgcagatggcttggaaagatgtgagacatgagatggtggtgaagaaaggcctggctcctgaggtggctgatcgaattggggactatgtccagtgtcatggtggggtatccctagtagagcaaatgtttcaggatcccagactatcccagaacaagcaggcaggcctggagggcctgggagacctaaagctgctatttgaatacctgactttatttggaattgctgataagatctcctttgacctcagcctggctcggggcctagactactatacaggagtgatctatgaagcagtgctgctgcagaccccaactcaggctggggaggagcccctgaatgtgggcagtgtggctgctggtgggcgctatgatgggctggtgggcatgtttgaccccaagggccacaaggtgccatgtgtgggactcagcattggggttgagcgaatcttctacattgtggagcagaggatgaagaccaaaggtgagaaggtgcggactacagagactcaagtgtttgtggccacaccacagaagaactttctccaagaacggttgaagcttattgcagagctttgggattctggaatcaaggcagagatgctatacaagaacaaccccaaactattaacccagctgcactattgtgagagcacaggcattccactggtggtcattattggtgagcaagaactgaaagaaggggtcatcaagatccgttcagtggccagcagagaggaggtggccattaaacgggaaaattttgtggctgaaattcagaagcgactgtctgagtcttgatccttgcctgattcccatctgctgctctttgtagaaaaggtttcctctagaactgaattcctctggaattgagtgatggacttcacaacaactagccaggaagggtgacaagtaccttctgcctcctccattcttcctgggtgcagaactgtagaagaccctgaggactcctgggctagtgtgagcagctattctgcatgggtgcagatggctggatgtgaaagagacatgctctagctgcagaggcaaatttgaagtgccacggaacgttgtcaagaggtagtgagattgttgctgtgagcaaggctctgggagagtcacctcaggctcaggattctgaaccattgagatcagaaaccagatacttagccttctactgtagctacggaaccagattctggtgaatttgtccacaatcagccagttagcgnaaaaancggggagnttnccgnancnnnaaacancggggcaaannanngccctcacncatgtatggngagancacgncgcctactcgcatgcngggancagtagagcgagtgcccacaatagtatgaatttgaacgatctcctactagcgccaatccantg

SEQ ID NO: 464662 - DNA, 2797 bp, Homo sapiens
gaaggagttgctgagaaggagctgtggttctgaccttcaggggaattcccacgtctgtatggtggctcgtgaagagcatggttccttttctcagccctcttgaggggcgaggatgctgaggactgaagtcggtggggcttgatgcatgtggtcactgagaggctgccagagggccattttcatgaccagagggatctgttcaacaccctgtgggtcccagcacctatctcaggaagcagggtgcatctgtccaccaccaagtctcagggtggctgggtgagcgctcatcagtcccagacagcaggttggcacaaaacgacactgcccacaaaaccacaggaagaagagaaactccgactgtctttcagcacacagaagacactgtactggacccggacattaggcagacacccacgcctgactttcaggagaaaagagaacatgactaacggatattcttagtagatggtttattagaaaagagaacatcttccagcatgtgtcctggggtgatgggtgtgggaagcactcagtccatagtcctggtccctggcttccccaagcccagcaccatgaatgtacagtggaaagcagagggtgcagcgtctcagaaagatgcttccactcacaaggattggagctcacaagtgagctccataacctgcaaaccagagaaacctgagacactgccccttggccattttatcaacggagactttattgtgattatcccggcagggggccgagctctcctctctgcaacaggaaatgctctttagtgaaaatgcagcatttctccaagggtaacaaagctgaacgcctgcttagcttatgaaccctcagttggcctaggtggtgcaaagaccctgctgttactgctttgatcatcagtactgtggactgtaccaggagatccctgggaatgtgctctgggcggaagcagcttttatctttggccctcacccatgctttatatggtgaggttgggaaaatggcacaaggcttctcctgaacctcaaatcaacacccttgccccatttagatcctatctggctgtttcttgctaatattactgcatcactgcaccatctttcctatttcagcaaagtggagtcatgtgtggtttatggggtagatggaccccaaaactgataatatgaatcaagctatggtgtttactccctaggaaatgcacaatttttctggaaacctacagaagcttcaaatgcattcgccatgcaaagctaagtcagcagaacaacccgtttggctttggaggctagttcagttccgcggacagggagaaagatgaggcagactgtggtttttcagttcctggagcttacggagctccaaagctccctctcttcccaccctggctgcactgttcttaattttagataataccctgccttctcgtattgctgctgagctcctagcatcctcagtttatctgtctgtgaaatgaaaaatctaatgttaaattttttacctatggcatgagagagatggctatggctcttgtgagcctctctgcagcccctcttttccttcaatcaccctctgtctctcctgccttctgcttattctctctctcccctcatccccactttcccagtgggtcctctgttctcttttttttttttctttttaaatctctctatgcctccagccgagaagataaagagtgtacatctttctggttaaaaagttttgctttgcagaaacacagccaatttatgattctggccttcccagctagggacagtgttcatttacatttaggaccatgaggagagaggcttagctgtgtgtttctgaggccggagaaaattacagtgatatataacagtgctgcactcatagaggtgctgagccggggttgggctcaggcggccgctaagctcagagtggaaagtttcagaggggaggcagaaaggagaggtctatagctcctccagattctaggtattaatttactaagatattcctaagccagaaaacagagacagaagacaaagagaaagagggaagaagagcaagacagagagttagagagagacaaagagagagagttagagacaaagagagagtggagaggagagagagcaaatattgaaaggaaaaggaaaaagaaagaaacctgacagctcatgaactttttaaaaagttacaaattagatttgaagagatgggcagaggtgaatccactgttgtgtgaacatcacagagtgcacgtatgcacacctagatggcatattcgacaacacacctgggctctctggtacagcctgttgctcctgcgctacaaacctgcacagcatgggactgtcctgaatactgcagatggctgtaacacaacgcagagcctggctcccctccgccaccatgagcggctgctccaaaagatgcaaaagcttgggttcgtgaaatttgcccagaccatctttaagctcatcactgggaccctcagcaaagcagtgaccagccagaacgacctggatgagacaagggtcagtgcaaacaagaccaaaggcctgttcctgcccccattccgctctcatgctctgctgggggactgcccctgggtgcaggcccacactgcctatgcatcacagctggccaggtgctcagacgggggaccggcctgcttggagtcacacagccagcatgaagcatagccacaactggaagcctaggcggtctggccccaagccctgggttttacttccctccccagcccatccccagtacactctttccatttctgaaaatcagatccagggtaagaagcaac

SEQ ID NO: 464663 - DNA, 576 bp, Homo sapiens
acatcacactctggggcctgttgtggggttgctaacgtccagacacataggctgcggtgtctgctgctactctccgagcttcgcaatgccgcccaaggacgacgagaagaaggacgctggaaagtcagccaagaaagacaaagacccagtgaacaaatccgggggcaaggccaaaaagaagaagtggtccaaaggcaaagttcgggacaagctcaataacttagtcttgtttgacaaagctacctatgacaaactctgtaaggaagttcccaactataaacttataaccccagctgtggtctctgagagactgaagattcgaggctccctggccagggcagcccttcaggagctccttagtaaaggacttatcaaactggtttcaaagcacagagctcaagtaatttacaccagaaataccaagggtggagatgctccagctgctgaacactgggctaaaaatcagggtacacaggaggtggagaggagatgtgtgaggcgagagcagcccgcagcgagcagtggggaggagggaaagctctatcagcctgggcggcagagctcctccctgtgagg

SEQ ID NO: 464664 - DNA, 459 bp, Homo sapiens
acatcacactctggggcctgttgtggggttgctaacgtccagacacataggctgcggtgtctgctgctactctccgagcttcgcaatgccgcccaaggacgacgagaagaaggacgctggaaagtcagccaagaaagacaaagacccagtgaacaaatccgggggcaaggccaaaaagaagaagtggtccaaaggcaaagttcgggacaagctcaataacttagtcttgtttgacaaagctacctatgacaaactctgtaaggaagttcccaactataaacttataaccccagctgtggtctctgagagactgaagattcgaggctccctggccagggcagcccttcaggagctccttagtaaaggacttatcaaactggtttcaaagcacagagcacacagtgagcacacaggatagggagtggagcacactaggtggggattggggtacgcgagctc

SEQ ID NO: 464665 - DNA, 509 bp, Homo sapiens
acatcacactctggggcctgttgtggggttgctaacgtccagacacataggctgcggtgtctgctgctactctccgagcttcgcaatgccgcccaaggacgacgagaagaaggacgctggaaagtcagccaagaaagacaaagacccagtgaacaaatccgggggcaaggccaaaaagaagaagtggtccaaaggcaaagttcgggacaagctcaataacttagtcttgtttgacaaagctacctatgacaaactctgtaaggaagttcccaactataaacttataaccccagctgtggtctctgagagactgaagattcgaggctccctggccagggcagcccttcaggagctccttagtaaaggacttatcaaactggtttcaaagcacagagctcaagtaatttacaccagaaataccaagggtggagatgctccagctgctggtgaagatgcatgaataggtccaaccagctgtacatttggaaaaataaaactttattaaatca

SEQ ID NO: 464666 - DNA, 3807 bp, Homo sapiens
  misc_feature (3802)..(3802): n is a, c, g, or t
tgtcagaggctgcctggcagtggggacatgagcctttcccttagagggaaacatgagattgggcaacaagggggtgagcacattgcaaatgttccgccggcgaatcagcacctgcctggaggtgttcttggtgtctgcgtcctgcctccagtacagaggacctcaaatccatgatacttcacctggtgctccccaggaaagcctggcagaggacctgacgattcccagcaagaccaagcactgctgtccagggtcagccacggtcacttctctgcagctgtcatccgggcacaatctccaaatatttctagccattcagacgttcactataatcagaattaacgcatgtagaaccaaagagccagacacatgggttcaaacctgccccaccatttacagtgagagcttaacctgccagtccagggcactaaatcacaagaacaccaaggccaaacaggcttgaagtctccaggctcctcactggcaaactctacttcctgatcccttagtgggttgaggtgccaacagccccctggggaggagggggttgcattatggccgtggagagactctgagccttatcaacggtgtggggatgacacccttttcggagcactttgtgaggctttgtgccatgctgggcgcttggcgtcagagacaaatagaatcaataactgtgcaaaaaaagttgccagataatttatcccattggcaccgagcctagaattataatcagatcttgacttcttcaaagccttcttgctttggattttccaaatcgaaaataaatattgggggcaattacctttccttagttctctgatgtatgaaggggagttttcatctattaatttaagaaccctctcatttcattcggaaggtattagcccatggaacttgttaacttaatatcaacacagtctgtctaggttttgactgaaaagagaaaggggttgttatgctctaggttaatattttcctctctttaagaagtcttgggtatgccagacacttctcggacaaaaacagctgttttcttcccattgctgaacgcattgtttgtgcgagttcacttacttgctatactcagaatatcctccaggagtcagcaaatcccaacctctggacgtggctcagggccgccctgcccattgctgagctgatttggaatttgggcctgagagaggaagtgattattggatgacaggctgcctcctagggggcttctctgggcttgccatgaaagcacttccggaggaaaagcagagctccatcagtctcttttggagagctgtgaacgtgaccagacctattaattacttaactgaggtgctgaactttgaaaatgaaagttccggtggggagttctgtcctttccagcctggggagctctgtcagggctctcctgagcgtctctttcagcttatcaagctcgctcggggaccgtctctgccgccatgtaggaagtgcctttagccttctgccatgattgtgaggcctccccagccatgtgcaactactgggaaagtgaggtgcagaggtattttgcaacgtgcccacagaaccccagcgagcccgtgttggagttacaactgtgcctcagggagcattctcaggcagcattctcttatgcttcaccgtctcacagatgataaggtttcattcaaggacttacaacagcaacccggagggagcattctcagtggctggtagatgccatttgtactgagcaggacaattaagcccaattctggaaaaattctgctttctctattcaatgcattttataaatgtcttcactcagcacatttaccctactaattatattttgctttgtgatcatggtatgtcatttgcattccttcagcacacactgactgatggggaagagatgttgggtgacccaggcaagccaaacaggattaaagcctgctgtctcaccaggtggataatccactttgaacacttgagaggggagtgttgagatcacaccccttcccatgggacatttttctgggaaataaaatcggtgacaaacaccacgcttgaacactcacattgactctagggtgcaggctgagctcatctggtgcaggggagtaatgcagaggcgaggcctgagtcagcgccaggcacaggaaggggatgcaggatgcaccacagcccatgcctcttaggagaaaatctgggccttctccatggctgtgtctctattaatttgctaaggctgcccaaataaagcaccacacatgggcagcttacataacaggaatttattctcagttctggaggccggcagtctgagatcaaggtgtcagcacagctggttccttctgaggactgtgcaggagaatctgttccaggcctctccctgaacttctgggggtcactggccatatttggcattccttggcttatagaagcaataccccaatttctgccttcatccgcatgtggcattctccctgtgtgcgtgtttctgtgtccacatttttcctttttataaggataccagtcatgttggaggtctaccctactccttgatgaccttatcttaactagttatatctgcaacaaacctatttccaaattaggtcacattctgaggtcctgggggttaggactttaacatatgaattttaagaggacacagtccaacccataatagtaactttgtccctctctctcttttgacacaataatgaccctatgcagggatatttctaggtggctactgtctgtgtgtgtgtggtagggggacttctagtactgttttggattactgttgacagacagcagcctgaggctaggaagcactttggggccatgacttagagcaaagctagtaagttttctcaggaatttgaacccagaatttcatccccatggcactttaatccagtacatttaatggctcagatgaccctggccttatcagcctggtgctctaagcagctgacctaacagtgtgtgcatgcgtgtatgcacatgtgtatgttatgtgcatatataagtgcatacacataatgttggacacagaaatatctctgagaactgtccctttatcacccttcagataaaattattctcagcttgcttagttgcagtgtttcttactttgcatctcctaacactttcatacatttctcccgaagtgcataggcaaggagcttcaacggaattcaatgtcaacctggtcatcttaccatgatttctaggaaaaaatgtgtgtaattggttcatgccctccttctgtacagattacaattctccttttttggcatgaaaacctccatctgtcttttgaaagcacatgtcacttatttattaaagtcctccccaacttgttcaggttgagtttcactagtacctttctggagtattttatacctatgttatagccccatatgttatactttggatgtctgtttacctgtctgtaagactgtctgcataattcatgggccttgtacaaaataagaattcagggactcttgttacaagaaactattaagaatttcaagatgggtcaggcgcggtggctcacgcctgtaatcccaacactttgggaggctgaggcgggcagatcacgaggtcaggagttcgagaccagcctggccaacatggcgaaaccctgtctctactaaaaatacaaaaatgagctgggcgtggtggtgtctgcctgtaattccagctactcaggaggctgaggcaggagaatcacttgaacctgggaggtggaggttgcagtgagccaagatcgcacggttgcacttcagcctgggaaatggaatgagactcnatctc

SEQ ID NO: 464667 - DNA, 2441 bp, Homo sapiens
tgtcagaggctgcctggcagtggggacatgagcctttcccttagagggaaacatgagattgggcaacaagggggtgagcacattgcaaatgttccgccggcgaatcagcacctgcctggaggtgttcttggtgtctgcgtcctgcctccagtacagaggacctcaaatccatgatacttcacctggtgctccccaggaaagcctggcagaggacctgacgattcccagcaagaccaagcactgctgtccagggtcagccacggtcacttctctgcagctgtcatccgggcacaatctccaaatatttctagccattcagacgttcactataatcagaattaacgcatgtagaaccaaagagccagacacatgggttcaaacctgccccaccatttacagtgagagcttaacctgccagtccagggcactaaatcacaagaacaccaaggccaaacaggcttgaagtctccaggctcctcactggcaaactctacttcctgatcccttagtgggttgaggtgccaacagccccctggggaggagggggttgcattatggccgtggagagactctgagccttatcaacggtgtggggatgacacccttttcggagcactttgtgaggctttgtgccatgctgggcgcttggcgtcagagacaaatagaatcaataactgtgcaaaaaaagttgccagataatttatcccattggcaccgagcctagaattataatcagatcttgacttcttcaaagccttcttgctttggattttccaaatcgaaaataaatattgggggcaattacctttccttagttctctgatgtatgaaggggagttttcatctattaatttaagaaccctctcatttcattcggaaggtattagcccatggaacttgttaacttaatatcaacacagtctgtctaggttttgactgaaaagagaaaggggttgttatgctctaggttaatattttcctctctttaagaagtcttgggtatgccagacacttctcggacaaaaacagctgttttcttcccattgctgaacgcattgtttgtgcgagttcacttacttgctatactcagaatatcctccaggagtcagcaaatcccaacctctggacgtggctcagggccgccctgcccattgctgagctgatttggaatttgggcctgagagaggaagtgattattggatgacaggctgcctcctagggggcttctctgggcttgccatgaaagcacttccggaggaaaagcagagctccatcagtctcttttggagagctgtgaacgtgaccagacctattaattacttaactgaggtgctgaactttgaaaatgaaagttccggtggggagttctgtcctttccagcctggggagctctgtcagggctctcctgagcgtctctttcagcttatcaagctcgctcggggaccgtctctgagagagagtctcactctgtcacccaggctggagtgcagtggcatgatctcggctcactgcaacctccgcctcctgggttcaagtgattctcctgccacagccccttgagtagttgacgttacaggcacccaccaccgcacccagatacttttcgtatttttagtggagacgctgtttcaccatgttggccagttggtctcgaactcctgacctcaagtgatctgcctgccttggcctccctatgtgctgggttataggcgtaagccactgtgccctgcttcatgtcatttttaaagagcccacacaactcctgtagctgcattacgacaacctcaacggcaagacctcgacgtgatattactccacgtgaaagtctaaaaggcgctgagcacagtgctctgccaatggtgtgtcttccagcctcgcttgctgagagaacagatgtgccggggaagaaatggacaaagctgggaaaggagtctaacttcttcaaagcggttgggcaccggtgaggctcttttggttacaaaccacagaaatggattctggtttatcagtttaatctcggtgtaactaaaagtgggaagtactggaaggagacgcatttcatgggctcagagctaatgtcccccgatcaaaagtaatctctattctaggctttttcaccttggaacagtcttgcctttttctgaccctcatataagtggaaatgtacaatatctgctgttttgtgtctggcttcttttgccctgtgtgatgtctgtgagattcacctgtgttggtgtgtattggtatttttctcattctcatcgctgggtatacctcactgcatggataaaccattcctctgtggaaagatattttggttgtctcagtgtggggctattatgcacattcttgtaatgtcatttggtagacatgaacacccacatccaaggaatatgtgcctaggagaggaggggttgagtcagattgtatatttagttttc

SEQ ID NO: 464668 - DNA, 2078 bp, Homo sapiens
gcgctatgtctctagcactatacaaagcactgaatatataccatgggcacaagagactatagtccccggcagatggcagttcgcgagaaggtgtttgacgtaatcatccgttgcttcaagcgccacggtgcagaagtcattgatacacctgtatttgaactaaaggaaacactgatgggaaagtatggggaagactccaagcttatctatgacctgaaggaccagggcggggagctcctgtcccttcgctatgacctcactgttccttttgctcggtatttggcaatgaataaactgaccaacattaaacgctaccacatagcaaaggtatatcggcgggataacccagccatgacccgtggccgataccgggaattctaccagtgtgattttgacattgctgggaactttgatcccatgatccctgatgcagagtgcctgaagatcatgtgcgagatcctgagttcacttcagataggcgacttcctggtcaaggtaaacgatcgacgcattctagatgggatgtttgctatctgtggtgtttctgacagcaagttccgtaccatctgctcctcagtagacaagctggacaaggtgtcctgggaagaggtgaagaatgagatggtgggagagaagggccttgcacctgaggtggctgaccgcattggggactatgtccagcaacatggtgaggaacagaaccaagcctccccagcagccgtcccactgccctcagtcctaaagttgaaactgttctgtgttatgtatgtaggggacctcactcacaagtctgtctccccaggtggggtatccctggtggaacagctgctccaggatcctaaactatcccaaaacaagcaggccttggagggcctgggagacctgaagttgctctttgagtacctgaccctatttggcattgatgacaaaatctcctttgacctgagccttgctcgagggctggattactacactggggtgatctatgaggcagtgctgctacagaccccagcccaggcaggggaagagcccctgggtgtgggcagtgtggctgctggaggacgctatgatgggctagtgggcatgttcgaccccaaagggcgcaaggtgccatgtgtggggctcagcattggggtggagcggattttctccatcgtggaacagagactagaggctttggaggagaagatacggaccacggagacacaggtgcttgtggcatctgcacagaagaagctgctagaggaaagactaaagcttgtctcagaactgtgggatgctgggatcaaggctgagctgctgtacaagaagaacccaaagctactgaaccagttacagtactgtgaggaggcaggcatcccactggtggctatcatcggcgagcaggaactcaaggatggggtcatcaagctccgttcagtgacgagcagggaagaggtggatgtccgaagagaagaccttgtggaggaaatcaaaaggagaacaggccagcccctctgcatctgctgaactgaacaaactatcagaggaaaggaagtgggactggcactatttgaggttaagacaaactgcatatgtacttcaattgctttgcacttttccgtttcagcggaagacctgaagagtggtcagaacagagcctttgatttttattatggttattttattgattattactggcaaaaacggccaggtacaacacctttttcatacaaggcccaggaggcttagtccagtctgtgctcctgggctacaaggacccagcctgagatggtcccatctgcagggccccgcaccagttggagcagatgcctccccaccaccaattgccaaaggtccaataaaatgcctcaaccacggagtctgcgtgtgtcagtgatgcctagccccgccttccccagcagaccaatgtagggatggaaaagggagaaaaacagtaaacttgtgaccctgaggttcttgtctccagcgtccaccctgcggcttgggagctcctcctcgggaggcagcccccgtacatacgcacccgcgactttgcagctttcacctgaaggtctgagcgaacgccggcggcgcac

SEQ ID NO: 464669 - DNA, 881 bp, Homo sapiens
gcgagggctaattaagctggatttataaataggttatttatttttgtcttgtaaatagaattatagattgaatagagcctctacctcggccaagggtcttcaaactcttttttaaagcaggggaaccttctgttgaatggagctgtgtgcagaaccacagcataaaaatggaagcaaaagttctctggtcaggttggaaaggaaggcctggggtcctgctcaggcctggagggcacccatttccagcggccatctgtccccctgccccagtccctgatgtgttctgtggaacctcagggttccaagggacagagtctgaaagacattgctctaaatgaatctgtgctgcatggaatgtattttccagtcgctgcctccaggattactgaacatggagggggcgctgtggtctcaaatcccaggtgcattagcatttccgttttcatgtaggttgacacagtgttcccttgtactagaaaatgccagtgggtgttagcaaaggccctttacacgcagaacaatgagcccagagcgaggcgcaagcttcaaagccgtctcttcactggaaagggtgacgcggcgcaagatttacccctgaacctctctgggagtgtgagcttcatgggcctcagtaggtaggtgtttgggtcggctcttttcagttccgaaatgaaaatatcctatgggcttatcggaagcctcaggtctgacatttagaggtgtgtcttccttcccaaactgaaaacacacatttcctctccttctcctaagagactgaggaatcccgagatgtcagccaagcgcagaatagccaggtgctcgaggcgctgctgacaggctgctgtgagggtcagggctctgcactctcaggggggctccgg

SEQ ID NO: 464670 - DNA, 935 bp, Homo sapiens
gcgagggctaattaagctggatttataaataggttatttatttttgtcttgtaaatagaattatagattgaatagagcctctacctcggccaagggtcttcaaactcttttttaaagcaggggaaccttctgttgaatggagctgtgtgcagaaccacagcataaaaatggaagcaaaagttctctggtcaggttggaaaggaaggcctggggtcctgctcaggcctggagggcacccatttccagcggccatctgtccccctgccccagtccctgatgtgttctgtggaacctcagggttccaagggacagagtctgaaagacattgctctaaatgaatctgtgctgcatggaatgtattttccagtcgctgcctccaggattactgaacatggagggggcgctgtggtctcaaatcccaggtgcattagcatttccgttttcatgtaggttgacacagtgttcccttgtactagaaaatgccagtgggtgttagcaaaggccctttacacgcagaacaatgagcccagagcgaggcgcaagcttcaaagccgtctcttcactggaaagggtgacgcggcgcaagatttacccctgaacctctctgggagtgtgagcttcatgggcctcagtaggaggagacggtggagaagaaaaagactttaccaggctgtctgcagacacccttgtcctagaggccctggagtgggacagctgggtggctcctcggaagactccacaaccccttggtactcaatgattaagtgatgaaagaaagtgcttttaattgtgttcgttggtatgaggggaaaaacccaaaaccttgggtaatctactgtcagaaaactgagaatcatcagtatcaagaaggttcttctcctgaaaggagccccttgacacatttgcaaaataaacggttttcattggtcagacga

SEQ ID NO: 464671 - DNA, 295 bp, Homo sapiens
agcagaagaatgttcacaaaggagctgtttaaggctggtctacaaagggggtagtgtggagtagaacagggaagaattagccacttagatcatccaacaggatggacatgccaaaagtcactttgattctgccaccaaattaagaacatgattttaataaacgattacatttagtatctattcctcattgtaataccttagtcatgcttgcacaagctaattctaaatctagtttgtcttccccaggtactcaatgattaagtgatgaaagaaagtgcttttaattgtgttcgtt

SEQ ID NO: 464672 - DNA, 1804 bp, Homo sapiens
gcgagggctaattaagctggatttataaataggttatttatttttgtcttgtaaatagaattatagattgaatagagcctctacctcggccaagggtcttcaaactcttttttaaagcaggggaaccttctgttgaatggagctgtgtgcagaaccacagcataaaaatggaagcaaaagttctctggtcaggttggaaaggaaggcctggggtcctgctcaggcctggagggcacccatttccagcggccatctgtccccctgccccagtccctgatgtgttctgtggaacctcagggttccaagggacagagtctgaaagacattgctctaaatgaatctgtgctgcatggaatgtattttccagtcgctgcctccaggattactgaacatggagggggcgctgtggtctcaaatcccaggtgcattagcatttccgttttcatgtaggttgacacagtgttcccttgtactagaaaatgccagtgggtgttagcaaaggccctttacacgcagaacaatgagcccagagcgaggcgcaagcttcaaagccgtctcttcactggaaagggtgacgcggcgcaagatttacccctgaacctctctgggagtgtgagcttcatgggcctcagtaggaggagacggtggagaagaaaaagactttaccaggctgtctgcagacacccttgtcctagaggccctggagtgggacagctgggtggctcctcggaagactccacaaccccttggtactcaatgattaagtgatgaaagaaagtgcttttaattgtgttcgttggtatgaggggaaaaacccaaaaccttgggtaatctactgtcagaaaactgagaatcatcagtatcaagaaggttcttctcctgaaaggagccccttgacacatttgcaaaataaacggttttcattggtcagacgaaaacagtttccaaggattgggaacttgtggtctccgatggcagcttcccctgctccctctgcttccctgtctcctttctggcgtaattgctcacctggcaaaccagcaccaagctgggaccccaaccctgcacacagcccaactcctcagtggcaaggccagcagccttggacatctgggcctctgttctcatacaaagcttcagcaccatgtttgatttccctgagaaggttggcaattgtggccaattcccaaagcactggtattctttctggttcctcttgaccaaccaggaggcacacagcccaagtccctgcctcacactgtcaaagccgaggaatgtggacagaggatatgcagccacgggactcacaaaggcagccctggcttcaccatggagggccggccctggggctgcaggtacagagtggacgcccacctgggagcttttgcacgggaagacccatgcaaaagtggacctgctggactgctcagtcattcctcttgagctcgatggccttgtggctcatggcttggaaaattaccttcacacaaacagcaacagaaagaaagatacacggctgacagttattagagctctgagcatacagtaagcatctgataaatactgatgggctggctattcaattacaactgacccgacaacctattcttgaagcattatttaatttatactagatgttcttttttggggttttcagttctaaaatctctctcaaataacttttcctgccaagcggttatttgagttgcgtcggaaagctttcttagtgaattctgcactgaatggctcccctggaagaagtttattactttgtcatcttatttgttaggaaagttgtgatatg

SEQ ID NO: 464673 - DNA, 2472 bp, Homo sapiens
agccacagaactcggccgagggttcagcggactgcggctgcgcggcgccggcgacagcgtcaactgcttttgtgtcaaaaggaaaccaacagccggctccatagctcagggggggagacgatggcactaccgcgccccttcccgccatgcgtttgtttgcggcgttccccgacgcgcgcgctgaggctctggtctgcggctctgcgcttggcggctgcgcgccctcggccttcgggtccccgccgcctccgtgctgcaaggtctgatttcttcctgtggagttaacacggaaaagcgcagacggccacattcatgacccgggagtaacggctctacctgtcacattcgctttcagcctaaaacaaaattttagtttattttagacaaaatatataactaaggtatgctggccttctgactgatttattcttgctgttaacggaagtgtagaaagtgagcccaagtcctcagtgaacagtgggggcgctgcccaggtgcaggactggccccctgggggtctcgggacggctcccgcctccgtcttccccgcaccgcgcactttggaggcctgggcacaggtggaggcggcgctgggtcccgccgtacactcccctgtcgcaggcgccctctctccagccggagggaacctcaaaaaagctctgagcgagtccccgtcccaggtggggccgcggcttataccgggaccactccagggtagctcaaggttcgaaaacggaatccctgtccggtgaaccagagaagagaaaatcgctcggggccacctgggtagagaccggaggggtgactgccttgactgggaggcgtggaggagcgagcggggtctgcggctccggccgggaggtatgcgcttccctctctcacccatgcctgctccggtccaaagagccgagaccgtgggtcaagaccgggatggattcgctcgggagaggccaggagcctgccagcacgttcgggcactagcgctcccggggctcctcggactcgtggaccccgaaacgcctgccccacaggaagatcaccccactgtagaagtcgggtcacggggaccagtggcgagctacctgacggcttaactacagataccctcccgacgaaagccgtggactcccagggtgcgtgcgtctgcttgtgtgtgggggtgttggcaggcggtccccataatcatcgaagagacaggtggatgaacctcaggcctcgcactcgggggctctcagagtctgggcgttacagccgctcccgtacactcacgggtcacctggctgaatcaggtgggatctgggtgaggtgccgggaggtctcccaggctggcgctcctgtccagctgctgggggaggcgtgggtgcgaggcttgggacaagggagagctatgccgggtggggaggacccttggggcgggtccgttcacctgaaatgttcactgctggaagagccgaaagccagccacggcacccaggggagtccagcgtggagaggcagagaggaggggcgaggacagtggcggtcgcagacggcggagcaagatcgccgagcgtgcgaatggaaaaatgagcattgtttcctcggagtagcttaaccaccatcccacgctgttttacagcagtgtaggaaatgtctctgctggtgacacaaaaataaacctgtgcatcagctctgagtagattatcgcgaattttacagcaggaaaccgcatcactatttttactactaaataaaccagtgcaattaaagtgcgcagggcgagagtaggtctgaggcgagaaaagaggagcgcgcccgcccagctcgagcctcaggcttgccctgtgctggaggcggcccgggggcaatcccgggagaatgctgcgagggctgtgagccaggaccccgactctgcaccgcgggagcgcgcgcgcgtgggtcccagcctccgagctgtgcaacaaccccgtggctagagtctccacgagaagacagagttcctggtcatcggtcgtttccgccttacactttcctacatttcctgaagattttgcaaatgggtatgcactgtttattatcttttcataaaacggtaagagcggcttctgggggctcctcacccagccggtccggcgttccttccctctcagcactgcgctctctcccgagccctccggctctaccaacctctgtgtcctgcccctgggcctcaagatttgcgcctttcttggactcgcttgggaaggggcgcccaggctgcagaacggatggacgctcctgcctgctactcgagtggatcgagcagggaggcgctcattcggattccaggagaccagaggacacaggacatagggagcgtttaccctgtgtggagctacctgcggctgagaattagtggcagacgcggagatgggcagcggggacaagttgggcttgggagactataagaccttgagaatgggttcaagctgccagacggaaatccgccttttc

SEQ ID NO: 464674 - DNA, 731 bp, Homo sapiens
gcagtcaccaccgcgaacgcagccgcctctccttagtcgccgccatgacgaccgcgtccacctcacaggccgccatcaaccgccagatcaacctggagctctacgcctcctgcgtttacctgtccatgtcttactactttgaccgcgatgatgtggctttgaagaactttgccaaatactttcttcaccaatctcatgaggagagggaacatgctgagaaactgatgaagctgcagaaccaaggaggtggccgaatcttccttcaggatatcaagaaaccggactgtgatgactgggagagcgggctgaatgcgatggagtgtgcattacatttggaaaaaaatgtgaatcagtcactactggaactgcacaaactggccactgacaaaaatgacccccatttgtgtgacttcattgagacacattacctgaatgagcaggtgaaagccatcaaagaattgggtgaccacgtgaccaacttgcgcaagatgggagcgcccgaatctggcttggcggaatatctctttgacaagcacaccctgggagacagtgataatgaaagctaagcctcgggctaatttccccatagccgtggggtgacttccctggtcaccaaggcagtgcatgcatgttggggtttcctttaccttttctataagttgtaccaaaacatccacttaagttctttgatttgtaccattccttcaaataaagaaatttggtacccaaaa

SEQ ID NO: 464675 - DNA, 1561 bp, Homo sapiens
tttttttttttttttttttttttgagacggatttaagtattatatttgacaaagtcctaaattatgtttaaactatggttatgaattttactaggaaaggaagaatttttatagcaaacaaattacaggaatttcaaagaccaaaaagaaaaaaaagaaaatgtaagccgcgaagccgcatcaacgccttcctgacagcggtgtctgttagtccacggcgtcccctcctaaggggagctgcgaaagacccattccggaggcatttcacggggccccgtaacacccgggcgagtgagctactgagaactgcatggctccttctggggccaggcggtcctaggagagccggctgggaggcggattgcttggacgtcccccgcccgcccccgcaactctgcgtgcggcgacgttgggaggtcccattagaagctccttgggcgggatctgtccaccatgccgcggcgcggagtgggagaggtttcggtctctgccaagggaagttgctgttgagtgcatcgccgtgaacacgacgcagcacatcctacagcccctgtggatatgtggatgctgtgggggcctgttggtctctttcttaaactttcaactgtattcttctggttactcaatcccagttcatcctagggcagaaacataaattaagtccacttttatacttggtattacgcactgaatgtttttgtctctttcaaattcatatgttgaaatcgaatccctaatgtgatggtatttggagatcagtgtggaaatggatgtggacgcggtgctgctgcctgagattagcaggaagcaattcttttcccatttggagagaccccgatattacctatattgccttgatctgctgtctgaaggctttgttgggccaggagatggttttgcagcagcagaagactatgaactgggctttgggagataggatctctggttgtattctggctatccacactctgaaagaggaccgtgacagagaatttgagtatcctaccaatatacctacaaaaggatgaaagaagatttggagtcaagggaaaacaagggcaataaaatagaagcttaccacctgctctcatacagttgctagaagaggactgcatatttggttctaagtttctggaagataaagccaaaatagaaacacaactcattataaaattttggtgtatccataaaataaaaacaaatgacctgtttgagaaaactctttctgagtttgagctctaaaaggaacttctctatggaatccttagaatatgagaaggctgtgatataggggagaaaccccttgacattcctatattgggtttaggtctaatttcactcagtagtttttaaatgttactccttgtagacagatgatgagacgccaaagtacagctgagtgaaagcggttcctttgaaaactaaaggctgtaaaaacaaggctgtggatcatgttgtttcagttctttatagattttttaaactgaattttgcatctgtgtacatgaagaataaattgtagaatatctaaggaaatggatgggctgcttatcttttagaa

SEQ ID NO: 464676 - DNA, 947 bp, Homo sapiens
gttgaagatgactcactaccaccacgtccaacctccaatttgaaggaaaatggaaaggggaaagttgaaccaacagtacctttatgaaggcatggcctgaaaatggaagattatcacttctctttgcatcacactggcagatcagtgtggaaatggatgtggacgcggtgctgctgcctgagattagcaggaagcaattcttttcccatttggagagaccccgatattacctatattgccttgatctgctgtctgaaggctttgttgggccaggagatggttttgcagcagcagaagactatgaactgggctttgggagataggatctctggttgtattctggctatccacactctgaaagaggaccgtgacagagaatttgagtatcctaccaatatacctacaaaaggatgaaagaagatttggagtcaagggaaaacaagggcaataaaatagaagcttaccacctgctctcatacagttgctagaagaggactgcatatttggttctaagtttctggaagataaagccaaaatagaaacacaactcattataaaattttggtgtatccataaaataaaaacaaatgacctgtttgagaaaactctttctgagtttgagctctaaaaggaacttctctatggaatccttagaatatgagaaggctgtgatataggggagaaaccccttgacattcctatattgggtttaggtctaatttcactcagtagtttttaaatgttactccttgtagacagatgatgagacgccaaagtacagctgagtgaaagcggttcctttgaaaactaaaggctgtaaaaacaaggctgtggatcatgttgtttcagttctttatagattttttaaactgaattttgcatctgtgtacatgaagaataaattgtagaatatctaaggaaatggatgggctgcttatcttttagaa

SEQ ID NO: 464677 - DNA, 556 bp, Homo sapiens
gagctgtacaaagtagttgccaagatcagtgtggaaatggatgtggacgcggtgctgctgcctgagattagcaggaagcaattcttttcccatttggagagaccccggtgagacctgatcaactagcaacatgcggaagtcacaccattaagtcttccaatttgctagcagcaaatcaatgaactctgatagctgctgccctaagctagcatccagggaactgtggacaagctatttgatacctgaattttagtgaaggaaagttaaattttttcttaaagcagggtgggagtggggttgtgtggggaagattatattaagcagtgagagaagacagatggagttttgtagaaagagagctggttgttttaaattgtatcttaaatttattgtagagctattggtaattagtgttttgttgttgtgtgtttataccaaccaattaataagaaaggcttttatttttatttcatcagttggagctgaactttattttttattataaatataaggcattattctagggcctggcaaacataggcagccactttttttt

SEQ ID NO: 464678 - DNA, 891 bp, Homo sapiens
gggagagggaagcgctcgtgcccaccttgctcgcaggtgcccttgctgacctgggtgatggccttctccccgcggctctcggccctctggctggcggcgcgcagctggcagccgctcggatcagtgtggaaatggatgtggacgcggtgctgctgcctgagattagcaggaagcaattcttttcccatttggagagaccccggctttgttgggccaggagatggttttgcagcagcagaagactatgaactgggctttgggagataggatctctggttgtattctggctatccacactctgaaagaggaccgtgacagagaatttgagtatcctaccaatatacctacaaaaggatgaaagaagatttggagtcaagggaaaacaagggcaataaaatagaagcttaccacctgctctcatacagttgctagaagaggactgcatatttggttctaagtttctggaagataaagccaaaatagaaacacaactcattataaaattttggtgtatccataaaataaaaacaaatgacctgtttgagaaaactctttctgagtttgagctctaaaaggaacttctctatggaatccttagaatatgagaaggctgtgatataggggagaaaccccttgacattcctatattgggtttaggtctaatttcactcagtagtttttaaatgttactccttgtagacagatgatgagacgccaaagtacagctgagtgaaagcggttcctttgaaaactaaaggctgtaaaaacaaggctgtggatcatgttgtttcagttctttatagattttttaaactgaattttgcatctgtgtacatgaagaataaattgtagaatatctaaggaaatggatgggctgcttatcttttagaa

SEQ ID NO: 464679 - DNA, 3726 bp, Homo sapiens
  misc_feature (3)..(3): n is a, c, g, or t
  misc_feature (5)..(6): n is a, c, g, or t
ccncnnagggttgtgagtcccggcccagcccctccacccccctgcccccccgatgcgaccatgggctctggcagtgactaggtggccaccctccgcccccgtgggccagcggcgattctctgcgggacctggcagcaccccgggccagctctggggaagtcctatcggggcctcctctctgtggtgcagccctggcctcgagggccccctggccagcccgcctgcccgggatgagcgcttaccctcccagcagccgccgtcccgacctccacacctccccgtagaggagcgccgagcctcggctcctgccggcgggagcccccgaatgctgcacccagccacccagcagagcccgttcatggttgatctccacgagcaggtgcaccagggacctgtccctctgtcctacacggtcaccacagtgacgacccaaggcttccccttgcctacaggccagcacatccctggctgcagtgcccagcagctcccagcatgctccgtgatgttcagtgggcagcattaccccctctgctgcctcccgcccccgcttatccaggcgtgcaccatgcagcagctgcctgtgccctatcaggcctacccccacctcatctccagtgaccactacatcctgcaccccccaccaccggccccacccccccagcccacccacatggcgcccctggggcagtttgtgtctctgcagacccagcaccctcggatgcggctcgacaacgacgtggacctgcgtggggaccagccctccctgggcagcttcacctactccacctctgcgcctggcccagccctttccccgtcggtgcccctgcactacctgccccacgatccgctgcaccaggagctgtcctttggtgtgccatattctcacatgatgccacggagactgagcacccagagataccgcctgcagcagccactgcccccgccgcccccacccccacccccaccaccctactaccccagcttcctgccctacttcctctcgatgctgccaatgtcaccaacagcaatggggcccaccatcagcctggacctggacgtggatgatgtggagatggagaactatgaggccctcctgaacctggccgagcggctgggagatgccaagccccggggtctcaccaaagcagacatagagcagctcccgtcgtaccgctttaacccggacagccatcagtcggagcagacgctgtgtgtggtctgcttcagtgacttcgaggcgcggcagctgctccgagtcctcccctgcaaccatgagttccacaccaagtgtgttgacaagtggttgaaggccaaccggacgtgtcccatctgccgggccgacgcctccgaggtgcccagggaggctgagtgaggccacgcagccgcctgcccgggagaaccctgcctgaagctctggaaacttgtgggtggggcccagggaggatggggagggagtggcccaggcctgccccttcgctcctgcctgcatttccagagctggtgccagggtcagcccagcgaggagtccctgcaataagcccctgcatttgccaagctccaaagactccctccctagtctgcctgcctgcccgcccgccacggagctgcctgagtgtccctgatcgggtctccctcctgtgcaccctcaggtccctccttttcctgctggcactgagtgccaggggtccgctccctcagtggggccggtggagatccttggccccaggatgggcagacagagcaccatcctgggtcagaaggtctcatgctctgaaatggcgtgccctctgcccaggtggcactgccaggtgcgtagacagacggtgtcacgagccatttcctgagccccagggctgaatcccccctccttgaccccgaacagtgaactcaggcagctggctctgtgttggctgctgtgagggctgagtctggttccctaggggaccctcatcccaggaacaacattccagccccaccctcaggctggagggcgtcccagcctaatcccgagctggggcacacgtatcctgaggggcttgggccatacggggagagggagccctgtgttcccggtggttgtccctcccagggatgcagccagacccgtgcccaatctcctctccctctgttgttttgcatgaacgtgaggagcagcagtttttgttcattcatttggcccaaaatcacgtgtaggatttggggatgtggatatttaagacaatttcttttttcttttggtttaataggggcgggtatagggaccaactgggaccgagtgcccagggggccgagcacggtcatgctggccggcctgcatgcatgcgtgtgccgggctgggctgggcggccggcggtcgtggggcagggttgggggtctgtgctcagctgataactgccatgcactgtactgcacacgtccctagagcctaccgggacccgacgcttttcagggcatttctccctccagccagggcccaactcccacctgcctgggcgaatctcctccaaggaagtcccaggaggatggggaccaggaaggctgtggacccccatctccagggggccttcccagcctgatccctgtcctccaagttctggaggaggccgctgtagggtctggctgagcttcccacccactttccctggtcccaatcctttcttgtcctatacccagctggggttgctgccctgaacgaactgcgtgtggggccggcacatcctagcaggcagcccctggcgcctgctgcctcagggatgctccaaccaccctcgttctcctcgcagtggccctggctcccacctcccgccccagcctgccgtggggcccgtcagcctggtcccacccccatggagaacccaaagtcttactgtatataactccaggtgacgtttctatatttatagcagtgttgaaaacccacgtgttttacacagaaccaccctctccaacccctcccttcccgaccccaacaaaacgttttcaaaccccttacagttcctggggcaggcggaaacaggctcacagattgtgtgtcggctgcagcagtgattccaacaagcagctattgggggggaaacacagcatttaaaaagatcatcattaaaaaacaagatttatacaacaattacttaggatgtttgtgatctgccgaccttgctatagatgccatgttaccaatgatttcctgtggtgggggcttgccattgtttactctcttatttaccaacttctggcctaggcatgacagtgggcaccttcccccagccctggctgggcccagcgcctgtgttctgtgttagaaaggttttatatatatataaaattacatatatatgtagaaatatatgtaattttgggggccctgttccttgcacattttacagttacctcatttttcccatgtatgtatttgagaaaatgctaatatatagagaaaaaaatggttcttaaagcttaaatgtgtggttttttccattccatgggattcacattggtttgtagcatttaacataactagtatgttgtattatatatatgtgtatactgattgaaatttttaacagatttgtactttttttaaaatgaaagttgctagttctgcttgaccaagtagtgcaatcattattttttttaatattgttgctgatttcagagggatattcactaataaatgtatgatgtataccaacgaccgcccacgctgcctttggctgcccgtgtcttttt

SEQ ID NO: 464680 - DNA, 2802 bp, Homo sapiens
  misc_feature (92)..(92): n is a, c, g, or t
gcgtggttcttgcagaaccagcacctcggatgccctccagggctcgaagagagtgtactgcgtgggacagcctccctgggcagttcagctancccagttccgtgcctacttcctctcgatgctgccaatgtcaccaacagcaatggggcccaccatcagcctggacctggacgtggatgatgtggagatggagaactatgaggccctcctgaacctggccgagcggctgggagatgccaagccccggggtctcaccaaagcagacatagagcagctcccgtcgtaccgctttaacccggacagccatcagtcggagcagacgctgtgtgtggtctgcttcagtgacttcgaggcgcggcagctgctccgagtcctcccctgcaaccatgagttccacaccaagtgtgttgacaagtggttgaaggccaaccggacgtgtcccatctgccgggccgacgcctccgaggtgcccagggaggctgagtgaggccacgcagccgcctgcccgggagaaccctgcctgaagctctggaaacttgtgggtggggcccagggaggatggggagggagtggcccaggcctgccccttcgctcctgcctgcatttccagagctggtgccagggtcagcccagcgaggagtccctgcaataagcccctgcatttgccaagctccaaagactccctccctagtctgcctgcctgcccgcccgccacggagctgcctgagtgtccctgatcgggtctccctcctgtgcaccctcaggtccctccttttcctgctggcactgagtgccaggggtccgctccctcagtggggccggtggagatccttggccccaggatgggcagacagagcaccatcctgggtcagaaggtctcatgctctgaaatggcgtgccctctgcccaggtggcactgccaggtgcgtagacagacggtgtcacgagccatttcctgagccccagggctgaatcccccctccttgaccccgaacagtgaactcaggcagctggctctgtgttggctgctgtgagggctgagtctggttccctaggggaccctcatcccaggaacaacattccagccccaccctcaggctggagggcgtcccagcctaatcccgagctggggcacacgtatcctgaggggcttgggccatacggggagagggagccctgtgttcccggtggttgtccctcccagggatgcagccagacccgtgcccaatctcctctccctctgttgttttgcatgaacgtgaggagcagcagtttttgttcattcatttggcccaaaatcacgtgtaggatttggggatgtggatatttaagacaatttcttttttcttttggtttaataggggcgggtatagggaccaactgggaccgagtgcccagggggccgagcacggtcatgctggccggcctgcatgcatgcgtgtgccgggctgggctgggcggccggcggtcgtggggcagggttgggggtctgtgctcagctgataactgccatgcactgtactgcacacgtccctagagcctaccgggacccgacgcttttcagggcatttctccctccagccagggcccaactcccacctgcctgggcgaatctcctccaaggaagtcccaggaggatggggaccaggaaggctgtggacccccatctccagggggccttcccagcctgatccctgtcctccaagttctggaggaggccgctgtagggtctggctgagcttcccacccactttccctggtcccaatcctttcttgtcctatacccagctggggttgctgccctgaacgaactgcgtgtggggccggcacatcctagcaggcagcccctggcgcctgctgcctcagggatgctccaaccaccctcgttctcctcgcagtggccctggctcccacctcccgccccagcctgccgtggggcccgtcagcctggtcccacccccatggagaacccaaagtcttactgtatataactccaggtgacgtttctatatttatagcagtgttgaaaacccacgtgttttacacagaaccaccctctccaacccctcccttcccgaccccaacaaaacgttttcaaaccccttacagttcctggggcaggcggaaacaggctcacagattgtgtgtcggctgcagcagtgattccaacaagcagctattgggggggaaacacagcatttaaaaagatcatcattaaaaaacaagatttatacaacaattacttaggatgtttgtgatctgccgaccttgctatagatgccatgttaccaatgatttcctgtggtgggggcttgccattgtttactctcttatttaccaacttctggcctaggcatgacagtgggcaccttcccccagccctggctgggcccagcgcctgtgttctgtgttagaaaggttttatatatatataaaattacatatatatgtagaaatatatgtaattttgggggccctgttccttgcacattttacagttacctcatttttcccatgtatgtatttgagaaaatgctaatatatagagaaaaaaatggttcttaaagcttaaatgtgtggttttttccattccatgggattcacattggtttgtagcatttaacataactagtatgttgtattatatatatgtgtatactgattgaaatttttaacagatttgtactttttttaaaatgaaagttgctagttctgcttgaccaagtagtgcaatcattattttttttaatattgttgctgatttcagagggatattcactaataaatgtatgatgtatacca

SEQ ID NO: 464681 - DNA, 1610 bp, Homo sapiens
  misc_feature (31)..(32): n is a, c, g, or t
aaactacggctaggtagcaggcctgggtggnnccaatctcctctccctctgttgttttgcatgaacgtgaggagcagcagtttttgttcattcatttggcccaaaatcacgtgtaggatttggggatgtggatatttaagacaatttcttttttcttttggtttaataggggcgggtatagggaccaactgggaccgagtgcccagggggccgagcacggtcatgctggccggcctgcatgcatgcgtgtgccgggctgggctgggcggccggcggtcgtggggcagggttgggggtctgtgctcagctgataactgccatgcactgtactgcacacgtccctagagcctaccgggacccgacgcttttcagggcatttctccctccagccagggcccaactcccacctgcctgggcgaatctcctccaaggaagtcccaggaggatggggaccaggaaggctgtggacccccatctccagggggccttcccagcctgatccctgtcctccaagttctggaggaggccgctgtagggtctggctgagcttcccacccactttccctggtcccaatcctttcttgtcctatacccagctggggttgctgccctgaacgaactgcgtgtggggccggcacatcctagcaggcagcccctggcgcctgctgcctcagggatgctccaaccaccctcgttctcctcgcagtggccctggctcccacctcccgccccagcctgccgtggggcccgtcagcctggtcccacccccatggagaacccaaagtcttactgtatataactccaggtgacgtttctatatttatagcagtgttgaaaacccacgtgttttacacagaaccaccctctccaacccctcccttcccgaccccaacaaaacgttttcaaaccccttacagttcctggggcaggcggaaacaggctcacagattgtgtgtcggctgcagcagtgattccaacaagcagctattgggggggaaacacagcatttaaaaagatcatcattaaaaaacaagatttatacaacaattacttaggatgtttgtgatctgccgaccttgctatagatgccatgttaccaatgatttcctgtggtgggggcttgccattgtttactctcttatttaccaacttctggcctaggcatgacagtgggcaccttcccccagccctggctgggcccagcgcctgtgttctgtgttagaaaggttttatatatatataaaattacatatatatgtagaaatatatgtaattttgggggccctgttccttgcacattttacagttacctcatttttcccatgtatgtatttgagaaaatgctaatatatagagaaaaaaatggttcttaaagcttaaatgtgtggttttttccattccatgggattcacattggtttgtagcatttaacataactagtatgttgtattatatatatgtgtatactgattgaaatttttaacagatttgtactttttttaaaatgaaagttgctagttctgcttgaccaagtagtgcaatcattattttttttaatattgttgctgatttcagagggatattcactaataaatgtatgatgtatacca

SEQ ID NO: 464682 - DNA, 3575 bp, Homo sapiens
  misc_feature (3)..(3): n is a, c, g, or t
  misc_feature (5)..(6): n is a, c, g, or t
ccncnnagggttgtgagtcccggcccagcccctccacccccctgcccccccgatgcgaccatgggctctggcagtgactaggtggccaccctccgcccccgtgggccagcggcgattctctgcgggacctggcagcaccccgggccagctctggggaagtcctatcggggcctcctctctgtggtgcagccctggcctcgagggccccctggccagcccgcctgcccgggatgagcgcttaccctcccagcagccgccgtcccgacctccacacctccccgtagaggagcgccgagcctcggctcctgccggcgggagcccccgaatgctgcacccagccacccagcagagcccgttcatggttgatctccacgagcaggtgcaccagggacctgtccctctgtcctacacggtcaccacagtgacgacccaaggcttccccttgcctacaggccagcacatccctggctgcagtgcccagcagctcccagcatgctccgtgatgttcagtgggcagcattaccccctctgctgcctcccgcccccgcttatccaggcgtgcaccatgcagcagctgcctgtgccctatcaggcctacccccacctcatctccagtgaccactacatcctgcaccccccaccaccggccccacccccccagcccacccacatggcgcccctggggcagtttgtgtctctgcagacccagcaccctcggatgcggctcgacaacgacgtggacctgcgtggggaccagccctccctgggcagcttcacctactccacctctgcgcctggcccagccctttccccgtcggtgcccctgcactacctgccccacgatccgctgcaccaggagctgtcctttggtgtgccatattctcacatgatgccacggagactgagcacccagagataccgcctgcagcagccactgcccccgccgcccccacccccacccccaccaccctactaccccagcttcctgccctacttcctctcgatgctgccaatgtcaccaacagcaatggggcccaccatcagcctggacctggacgtggatgatgtggagatggagaactatgaggccctcctgaacctggccgagcggctgggagatgccaagccccggggtctcaccaaagcagacatagagcagctcccgtcgtaccgctttaacccggacagccatcagtcggagcagacgctgtgtgtggtctgcttcagtgacttcgaggcgcggcagctgctccgagtcctcccctgcaaccatgagttccacaccaagtgtgttgacaagtggttgaaggccaaccggacgtgtcccatctgccgggccgacgcctccgaggtgcccagggaggctgagtgaggccacgcagccgcctgcccgggagaaccctgcctgaagctctggaaacttgtgggtggggcccagggaggatggggagggagtggcccaggcctgccccttcgctcctgcctgcatttccagagctggtgccagggtcagcccagcgaggagtccctgcaataagcccctgcatttgccaagctccaaagactccctccctagtctgcctgcctgcccgcccgccacggagctgcctgagtgtccctgatcgggtctccctcctgtgcaccctcaggtccctccttttcctgctggcactgagtgccaggggtccgctccctcagtggggccggtggagatccttggccccaggatgggcagacagagcaccatcctgggtcagaaggtctcatgctctgaaatggcgtgccctctgcccaggtggcactgccaggtgcgtagacagacggtgtcacgagccatttcctgagccccagggctgaatcccccctccttgaccccgaacagtgaactcaggcagctggctctgtgttggctgctgtgagggctgagtctggttccctaggggaccctcatcccaggaacaacattccagccccaccctcaggctggagggcgtcccagcctaatcccgagctggggcacacgtatcctgaggggcttgggccatacggggagagggagccctgtgttcccggtggttgtccctcccagggatgcagccagacccgtgcccaatctcctctccctctgttgttttgcatgaacgtgaggagcagcagtttttgttcattcatttggcccaaaatcacgtgtaggatttggggatgtggatatttaagacaatttcttttttcttttggtttaataggggcgggtatagggaccaactgggaccgagtgcccagggggccgagcacggtcatgctggccggcctgcatgcatgcgtgtgccgggctgggctgggcggccggcggtcgtggggcagggttgggggtctgtgctcagctgataactgccatgcactgtactgcacacgtccctagagcctaccgggacccgacgcttttcagggcatttctccctccagccagggcccaactcccacctgcctgggcgaatctcctccaaggaagtcccaggaggatggggaccaggaaggctgtggacccccatctccagggggccttcccagcctgatccctgtcctccaagttctggaggaggccgctgtagggtctggctgagcttcccacccactttccctggtcccaatcctttcttgtcctatacccagctggggttgctgccctgaacgaactgcgtgtggggccggcacatcctagcaggcagcccctggcgcctgctgcctcagggatgctccaaccaccctcgttctcctcgcagtggccctggctcccacctcccgccccagcctgccgtggggcccgtcagcctggtcccacccccatggagaacccaaagtcttactgtatataactccagttcctggggcaggcggaaacaggctcacagattgtgtgtcggctgcagcagtgattccaacaagcagctattgggggggaaacacagcatttaaaaagatcatcattaaaaaacaagatttatacaacaattacttaggatgtttgtgatctgccgaccttgctatagatgccatgttaccaatgatttcctgtggtgggggcttgccattgtttactctcttatttaccaacttctggcctaggcatgacagtgggcaccttcccccagccctggctgggcccagcgcctgtgttctgtgttagaaaggttttatatatatataaaattacatatatatgtagaaatatatgtaattttgggggccctgttccttgcacattttacagttacctcatttttcccatgtatgtatttgagaaaatgctaatatatagagaaaaaaatggttcttaaagcttaaatgtgtggttttttccattccatgggattcacattggtttgtagcatttaacataactagtatgttgtattatatatatgtgtatactgattgaaatttttaacagatttgtactttttttaaaatgaaagttgctagttctgcttgaccaagtagtgcaatcattattttttttaatattgttgctgatttcagagggatattcactaataaatgtatgatgtatacca

SEQ ID NO: 464683 - DNA, 2423 bp, Homo sapiens
  misc_feature (3)..(3): n is a, c, g, or t
  misc_feature (5)..(6): n is a, c, g, or t
ccncnnagggttgtgagtcccggcccagcccctccacccccctgcccccccgatgcgaccatgggctctggcagtgactaggtggccaccctccgcccccgtgggccagcggcgattctctgcgggacctggcagcaccccgggccagctctggggaagtcctatcggggcctcctctctgtggtgcagccctggcctcgagggccccctggccagcccgcctgcccgggatgagcgcttaccctcccagcagccgccgtcccgacctccacacctccccgtagaggagcgccgagcctcggctcctgccggcgggagcccccgaatgctgcacccagccacccagcagagcccgttcatggttgatctccacgagcaggtgcaccagggacctgtccctctgtcctacacggtcaccacagtgacgacccaaggcttccccttgcctacaggccagcacatccctggctgcagtgcccagcagctcccagcatgctccgtgatgttcagtgggcagcattaccccctctgctgcctcccgcccccgcttatccaggcgtgcaccatgcagcagctgcctgtgccctatcaggcctacccccacctcatctccagtgaccactacatcctgcaccccccaccaccggccccacccccccagcccacccacatggcgcccctggggcagtttgtgtctctgcagacccagcaccctcggatgcggctcgacaacgacgtggacctgcgtggggaccagccctccctgggcagcttcacctactccacctctgcgcctggcccagccctttccccgtcggtgcccctgcactacctgccccacgatccgctgcaccaggagctgtcctttggtgtgccatattctcacatgatgccacggagactgagcacccagagataccgcctgcagcagccactgcccccgccgcccccacccccacccccaccaccctactaccccagcttcctgccctacttcctctcgatgctgccaatgtcaccaacagcaatggggcccaccatcagcctggacctggacgtggatgatgtggagatggagaactatgaggccctcctgaacctggccgagcggctgggagatgccaagccccggggtctcaccaaagcagacatagagcagctcccgtcgtaccgctttaacccggacagccatcagtcggagcagacgctgtgtgtggtctgcttcagtgacttcgaggcgcggcagctgctccgagtcctcccctgcaaccatgagttccacaccaagtgtgttgacaagtggttgaaggccaaccggacgtgtcccatctgccgggccgacgcctccgaggtgcccagggaggctgagtgaggccacgcagccgcctgcccgggagaaccctgcctgaagctctggaaacttgtgggtggggcccagggaggatggggagggagtggcccaggcctgccccttcgctcctgcctgcatttccagagctggtgccagggtcagcccagcgaggagtccctgcaataagcccctgcatttgccaagctccaaagactccctccctagtctgcctgcctgcccgcccgccacggagctgcctgagtgtccctgatcgggtctccctcctgtgcaccctcaggtccctccttttcctgctggcactgagtgccaggggtccgctccctcagtggggccggtggagatccttggccccaggatgggcagacagagcaccatcctgggtcagaaggtctcatgctctgaaatggcgtgccctctgcccaggtggcactgccaggtgcgtagacagacggtgtcacgagccatttcctgagccccagggctgaatcccccctccttgaccccgaacagtgaactcaggcagctggctctgtgttggctgctgtgagggctgagtctggttccctaggggaccctcatcccaggaacaacattccagccccaccctcaggctggagggcgtcccagcctaatcccgagctggggcacacgtatcctgaggggcttgggccatacggggagagggagccctgtgttcccggtggttgtccctcccagggatgcagccagacccgtgcccaatctcctctccctctgttgttttgcatgaacgtgaggagcagcagtttttgttcattcatttggcccaaaatcacgtgtaggatttggggatgtggatatttaagtcctttccttttgccctagtgcctcctcttgctgatgtagtctcctctttcgtcttatgatcacacgagtctacactggctacatcaccctatccctctctcatccttgtcggcctctacacactttaaccgccttcctacttgcgatcgtaaatgctttcctgattggttaaatgccttaggtctgttgcatcctcttaatcacg

SEQ ID NO: 464684 - DNA, 3687 bp, Homo sapiens
  misc_feature (3)..(3): n is a, c, g, or t
  misc_feature (5)..(6): n is a, c, g, or t
ccncnnagggttgtgagtcccggcccagcccctccacccccctgcccccccgatgcgaccatgggctctggcagtgactaggtggccaccctccgcccccgtgggccagcggcgattctctgcgggacctggcagcaccccgggccagctctggggaagtcctatcggggcctcctctctgtggtgcagccctggcctcgagggccccctggccagcccgcctgcccgggatgagcgcttaccctcccagcagccgccgtcccgacctccacacctccccgtagaggagcgccgagcctcggctcctgccggcgggagcccccgaatgctgcacccagccacccagcagagcccgttcatggttgatctccacgagcaggtgcaccagggacctgtccctctgtcctacacggtcaccacagtgacgacccaaggcttccccttgcctacaggccagcacatccctggctgcagtgcccagcagctcccagcatgctccgtgatgttcagtgggcagcattaccccctctgctgcctcccgcccccgcttatccaggcgtgcaccatgcagcagctgcctgtgccctatcaggcctacccccacctcatctccagtgaccactacatcctgcaccccccaccaccggccccacccccccagcccacccacatggcgcccctggggcagtttgtgtctctgcagacccagcaccctcggatgcggctcgacaacgacgtggacctgcgtggggaccagccctccctgggcagcttcacctactccacctctgcgcctggcccagccctttccccgtcggtgcccctgcactacctgccccacgatccgctgcaccaggagctgtcctttggtgtgccatattctcacatgatgccacggagactgagcacccagagataccgcctgcagcagccactgcccccgccgcccccacccccacccccaccaccctactaccccagcttcctgccctacttcctctcgatgctgccaatgtcaccaacagcaatggggcccaccatcagcctggacctggacgtggatgatgtggagatggagaactatgaggccctcctgaacctggccgagcggctgggagatgccaagccccggggtctcaccaaagcagacatagagcagctcccgtcgtaccgctttaacccggacagccatcagtcggagcagacgctgtgtgtggtctgcttcagtgacttcgaggcgcggcagctgctccgagtcctcccctgcaaccatgagttccacaccaagtgtgttgacaagtggttgaaggccaaccggacgtgtcccatctgccgggccgacgcctccgaggtgcccagggaggctgagtgaggccacgcagccgcctgcccgggagaaccctgcctgaagctctggaaacttgtgggtggggcccagggaggatggggagggagtggcccaggcctgccccttcgctcctgcctgcatttccagagctggtgccagggtcagcccagcgaggagtccctgcaataagcccctgcatttgccaagctccaaagactccctccctagtctgcctgcctgcccgcccgccacggagctgcctgagtgtccctgatcgggtctccctcctgtgcaccctcaggtccctccttttcctgctggcactgagtgccaggggtccgctccctcagtggggccggtggagatccttggccccaggatgggcagacagagcaccatcctgggtcagaaggtctcatgctctgaaatggcgtgccctctgcccaggtggcactgccaggtgcgtagacagacggtgtcacgagccatttcctgagccccagggctgaatcccccctccttgaccccgaacagtgaactcaggcagctggctctgtgttggctgctgtgagggctgagtctggttccctaggggaccctcatcccaggaacaacattccagccccaccctcaggctggagggcgtcccagcctaatcccgagctggggcacacgtatcctgaggggcttgggccatacggggagagggagccctgtgttcccggtggttgtccctcccagggatgcagccagacccgtgcccaatctcctctccctctgttgttttgcatgaacgtgaggagcagcagtttttgttcattcatttggcccaaaatcacgtgtaggatttggggatgtggatatttaagacaatttcttttttcttttggtttaataggggcgggtatagggaccaactgggaccgagtgcccagggggccgagcacggtcatgctggccggcctgcatgcatgcgtgtgccgggctgggctgggcggccggcggtcgtggggcagggttgggggtctgtgctcagctgataactgccatgcactgtactgcacacgtccctagagcctaccgggacccgacgcttttcagggcatttctccctccagccagggcccaactcccacctgcctgggcgaatctcctccaaggaagtcccaggaggatggggaccaggaaggctgtggacccccatctccagggggccttcccagcctgatccctgtcctccaagttctggaggaggccgctgtagggtctggctgagcttcccacccactttccctggtcccaatcctttcttgtcctatacccagctggggttgctgccctgaacgaactgcgtgtggggccggcacatcctagcaggcagcccctggcgcctgctgcctcagggatgctccaaccaccctcgttctcctcgcagtggccctggctcccacctcccgccccagcctgccgtggggcccgtcagcctggtcccacccccatggagaacccaaagtcttactgtatataactccaggtgacgtttctatatttatagcagtgttgaaaacccacgtgttttacacagaaccaccctctccaacccctcccttcccgaccccaacaaaacgttttcaaaccccttacagttcctggggcaggcggaaacaggctcacagattgtgtgtcggctgcagcagtgattccaacaagcagctattgggggggaaacacagcatttaaaaagatcatcattaaaaaacaagatttatacaacaattacttaggatgtttgtgatctgccgaccttgctatagatgccatgttaccaatgatttcctgtggtgggggcttgccattgtttactctcttatttaccaacttctggcctaggcatgacagtgggcaccttcccccagccctggctgggcccagcgcctgtgttctgtgttagaaaggttttatatatatataaaattacatatatatgtagaaatatatgtaattttgggggccctgttccttgcacattttacagttacctcatttttcccatgtatgtatttgagaaaatgctaatatatagagaaaaaaatggttcttaaagcttaaatgtgtggttttttccattccatgggattcacattggtttgtagcatttaacataactagtatgttgtattatatatatgtgtatactgattgaaatttttaacagatttgtactttttttaaaatgaaagttgctagttctgcttgaccaagtagtgcaatcattattttttttaatattgttgctgatttcagagggatattcactaataaatgtatgatgtatacca

SEQ ID NO: 464685 - DNA, 3535 bp, Homo sapiens
  misc_feature (3)..(3): n is a, c, g, or t
  misc_feature (5)..(6): n is a, c, g, or t
ccncnnagggttgtgagtcccggcccagcccctccacccccctgcccccccgatgcgaccatgggctctggcagtgactaggtggccaccctccgcccccgtgggccagcggcgattctctgcgggacctggcagcaccccgggccagctctggggaagtcctatcggggcctcctctctgtggtgcagccctggcctcgagggccccctggccagcccgcctgcccgggatgagcgcttaccctcccagcagccgccgtcccgacctccacacctccccgtagaggagcgccgagcctcggctcctgccggcgggagcccccgaatgctgcacccagccacccagcagagcccgttcatggttgatctccacgagcaggtgcaccagggacctgtccctctgtcctacacggtcaccacagtgacgacccaaggcttccccttgcctacaggccagcacatccctggctgcagtgcccagcagctcccagcatgctccgtgatgttcagtgggcagcattaccccctctgctgcctcccgcccccgcttatccaggcgtgcaccatgcagcagctgcctgtgccctatcaggcctacccccacctcatctccagtgaccactacatcctgcaccccccaccaccggccccacccccccagcccacccacatggcgcccctggggcagtttgtgtctctgcagacccagcaccctcggatgcggctcgacaacgacgtggacctgcgtggggaccagccctccctgggcagcttcacctactccacctctgcgcctggcccagccctttccccgtcggtgcccctgcactacctgccccacgatccgctgcaccaggagctgtcctttggtgtgccatattctcacatgatgccacggagactgagcacccagagataccgcctgcagcagccactgcccccgccgcccccacccccacccccaccaccctactaccccagcttcctgccctacttcctctcgatgctgccaatgtcaccaacagcaatggggcccaccatcagcctggacctggacgtggatgatgtggagatggagaactatgaggccctcctgaacctggccgagcggctgggagatgccaagccccggggtctcaccaaagcagacatagagcagctcccgtcgtaccgctttaacccgggccgacgcctccgaggtgcccagggaggctgagtgaggccacgcagccgcctgcccgggagaaccctgcctgaagctctggaaacttgtgggtggggcccagggaggatggggagggagtggcccaggcctgccccttcgctcctgcctgcatttccagagctggtgccagggtcagcccagcgaggagtccctgcaataagcccctgcatttgccaagctccaaagactccctccctagtctgcctgcctgcccgcccgccacggagctgcctgagtgtccctgatcgggtctccctcctgtgcaccctcaggtccctccttttcctgctggcactgagtgccaggggtccgctccctcagtggggccggtggagatccttggccccaggatgggcagacagagcaccatcctgggtcagaaggtctcatgctctgaaatggcgtgccctctgcccaggtggcactgccaggtgcgtagacagacggtgtcacgagccatttcctgagccccagggctgaatcccccctccttgaccccgaacagtgaactcaggcagctggctctgtgttggctgctgtgagggctgagtctggttccctaggggaccctcatcccaggaacaacattccagccccaccctcaggctggagggcgtcccagcctaatcccgagctggggcacacgtatcctgaggggcttgggccatacggggagagggagccctgtgttcccggtggttgtccctcccagggatgcagccagacccgtgcccaatctcctctccctctgttgttttgcatgaacgtgaggagcagcagtttttgttcattcatttggcccaaaatcacgtgtaggatttggggatgtggatatttaagacaatttcttttttcttttggtttaataggggcgggtatagggaccaactgggaccgagtgcccagggggccgagcacggtcatgctggccggcctgcatgcatgcgtgtgccgggctgggctgggcggccggcggtcgtggggcagggttgggggtctgtgctcagctgataactgccatgcactgtactgcacacgtccctagagcctaccgggacccgacgcttttcagggcatttctccctccagccagggcccaactcccacctgcctgggcgaatctcctccaaggaagtcccaggaggatggggaccaggaaggctgtggacccccatctccagggggccttcccagcctgatccctgtcctccaagttctggaggaggccgctgtagggtctggctgagcttcccacccactttccctggtcccaatcctttcttgtcctatacccagctggggttgctgccctgaacgaactgcgtgtggggccggcacatcctagcaggcagcccctggcgcctgctgcctcagggatgctccaaccaccctcgttctcctcgcagtggccctggctcccacctcccgccccagcctgccgtggggcccgtcagcctggtcccacccccatggagaacccaaagtcttactgtatataactccaggtgacgtttctatatttatagcagtgttgaaaacccacgtgttttacacagaaccaccctctccaacccctcccttcccgaccccaacaaaacgttttcaaaccccttacagttcctggggcaggcggaaacaggctcacagattgtgtgtcggctgcagcagtgattccaacaagcagctattgggggggaaacacagcatttaaaaagatcatcattaaaaaacaagatttatacaacaattacttaggatgtttgtgatctgccgaccttgctatagatgccatgttaccaatgatttcctgtggtgggggcttgccattgtttactctcttatttaccaacttctggcctaggcatgacagtgggcaccttcccccagccctggctgggcccagcgcctgtgttctgtgttagaaaggttttatatatatataaaattacatatatatgtagaaatatatgtaattttgggggccctgttccttgcacattttacagttacctcatttttcccatgtatgtatttgagaaaatgctaatatatagagaaaaaaatggttcttaaagcttaaatgtgtggttttttccattccatgggattcacattggtttgtagcatttaacataactagtatgttgtattatatatatgtgtatactgattgaaatttttaacagatttgtactttttttaaaatgaaagttgctagttctgcttgaccaagtagtgcaatcattattttttttaatattgttgctgatttcagagggatattcactaataaatgtatgatgtatacca

SEQ ID NO: 464686 - DNA, 2582 bp, Homo sapiens
cttttcaatgcccagacaccagtgaacatctacaagcataaagaccatccaggaaactgtgacttcagcaaacaaactaaataagttaccaaggacaaattctgaagaaacagagtaggggatgttactgacatctagtgggcagaggccagagctattgctaaatgtctcacaagaagtaaaagatttctgcaatgaacactataaaacactgatgaaagaaattgaaaaagacacaaaaaatgaaaagatatttcatgttcatggattggaagaattaatattgttaaaacatccatactacccaaagcagtctacagatcagtgcaatccctatgagtataccaatgacattcttcacagaaatatgaaaaaaaattctaaagtttatatagaatcacaaagtcccagaatagccaaagccatcctgagcaaaaggaacaaaactcgaggaataacattacctgacttcaaattatactacagagctatagtaaccaaaaaagcatggtactgtcataaaaacaaacagaccaatggaacagagtagagagcccagaaacaaatccacatagctacagtgaactcattttcaataaagatgccaggaatacaagttttggggaatcatccaatataccaccacatattccagattgaggtttctactatcattctcttctaaaagaaatcaaggctccatggacagtgtctatatcatggacttcttgccttcagaaagtaaggccttcatcggaagaaattgcaatagaactaagacaagaaagttagctaaagaaaaggttatggtagccaaataattaaaagggaacatccttctgtatcagaaattcccatgtttccatatccagatttcttcaccaaggcagataaagagttggcaaaaatcattgaccatcactggcaggaagagctaaagatccgagaaaaagaagatgcaatatgcaaggcccaagaacttaaagataaaaagttagcagagaaaaatcactttcaagaagttatgaagaaaagagaagagaaactacataagcaaaccaagccctatgaacttccttataggaaggaagtaatttaattagaaaagaaaatgtcacctcccaaaattgaggactacatggcagaaatacataggatgaaaaataccaagatagctacatagtgttagaaactgaataaatggaaagggaacatagaaataacactgaaacagtagctgctggaaactgctaccacatttggagccatggaatcagagagaagaggtttgcattgttaaaatcgaagggatgtagaaggcacttcacacagccggactcggatccttgacagggagacattgcccagttattgctggtacttttgagggggcacaatacaactggttctgggagtgcagaaaaaagtgaaaactgaaacaacttgtatcttgctgaaaccacactatcagaaagagtgagaaaactggaagaatcaggtattttcttccctctcatcctgaaactcttcctgatgtgcttcctgttctccggcatcacaaagcagagaaaacaagggtggacttggagatgaaagacactagttaaataaatgaacattgtatggcttagaaggttatcagaccattcaataaaagttaactctcctttcttttcttttgcatctttggccttgttttctgcttatttattttaccccggacaaaaaaaaaaaaaaaaaaaagaaaaagaaaaaagtttgaaagaaagcatcaccttttaagtttatataaatggcttaaaaataaactttactatactttaataactaattcttaattcttccaaaaagttcatttaacacaaattcagttggattctttgtaatttatgtttagtattcactttgcttcaaaactcacaaaggattctgagtcatagactggcctctttggtttctcctttcggtttccacctctgatagagacatgtgccaaagacatattgctccactaaggaaaacaccagtgccagtgcaatgacaggtaacaactgaaactcgccattgttctcaaagaaacaatagaaatcatgaggactcagagctgaagaatatatgccctttaaatgaggcaacactcctcagctctggacaatcaccgcttgtcagacggctggctcagtattgcctatatcttctgatgttttctaaagtagtcagaaatattaatgtttttattaaatgtataataatctatttattacatattggcagttaattcaattaaaagtatattgggtgagcccaggaaaaaaaatatacattctgctcttgacctacatgagaagctgggctgtgatatttgatatggatttgaggcatggcaaacacttattaagcacaccacttcagcaaaggaaaatttatttaaaaaatcaaactcttaagccagaacaagctaccacagcataaaataaattcccaggggtggcctaatgggatcctgcaggacccagcaagtgatggaagataagttagagaaggaaaactcttgtgttgccagtagctcaggagggtatgtc

SEQ ID NO: 464687 - DNA, 1598 bp, Homo sapiens
cttttcaatgcccagacaccagtgaacatctacaagcataaagaccatccaggaaactgtgacttcagcaaacaaactaaataagttaccaaggacaaattctgaagaaacagagtaggggatgttactgacatctagtgggcagaggccagagctattgctaaatgtctcacaagaagtaaaagatttctgcaatgaacactataaaacactgatgaaagaaattgaaaaagacacaaaaaatgaaaagatatttcatgttcatggattggaagaattaatattgttaaaacatccatactacccaaagcagtctacagatcagtgcaatccctatgagtataccaatgacattcttcacagaaatatgaaaaaaaattctaaagtttatatagaatcacaaagtcccagaatagccaaagccatcctgagcaaaaggaacaaaactcgaggaataacattacctgacttcaaattatactacagagctatagtaaccaaaaaagcatggtactgtcataaaaacaaacagaccaatggaacagagtagagagcccagaaacaaatccacatagctacagtgaactcattttcaataaagatgccaggaatacaagttttggggaatcatccaatataccaccacatattccagattgaggtttctactatcattctcttctaaaagaaatcaaggctccatggacagtgtctatatcatggacttcttgccttcagaaagtaaggccttcatcggaagaaattgcaatagaactaagacaagaaagttagctaaagaaaaggttatggtagccaaataattaaaagggaacatccttctgtatcagaaattcccatgtttccatatccagatttcttcaccaaggcagataaagagttggcaaaaatcattgaccatcactggcaggaagagctaaagatccgagaaaaagaagatgcaatatgcaaggcccaagaacttaaagataaaaagttagcagagaaaaatcactttcaagaagttatgaagaaaagagaagagaaactacataagcaaaccaagccctatgaacttccttataggaaggaagtaatttaattagaaaagaaaatgtcacctcccaaaattgaggactacatggcagaaatacataggatgaaaaataccaagatagctacatagtaagagaactttcttgtcattaaatggaggtattgtttagaaagaatttgttttcctgatacaagctgtttgtttaatagttatttcttagttctaaattaatgaccaacttttaatcacacttgaatgaagtgatttcactagtcaaaaatttccaagactacatctagtatttttctcaattgacctttatctcatgattgtacagcatacttgataactgattctcagaacattgatattcatcaaacaaacagtttgatggaaattcattacaaattaattaatgggtcaccagataagaattatttcttgaaaacagaatgaacataaactaacaatcctgtaattactattattcaaataaaaaatgcggccgacattcaaacaacatcctcgctcacaggagacaagt

SEQ ID NO: 464688 - DNA, 1611 bp, Homo sapiens
cttttcaatgcccagacaccagtgaacatctacaagcataaagaccatccaggaaactgtgacttcagcaaacaaactaaataagttaccaaggacaaattctgaagaaacagagtaggggatgttactgacatctagtgggcagaggccagagctattgctaaatgtctcacaagaagtaaaagatttctgcaatgaacactataaaacactgatgaaagaaattgaaaaagacacaaaaaatgaaaagatatttcatgttcatggattggaagaattaatattgttaaaacatccatactacccaaagcagtctacagatcagtgcaatccctatgagtataccaatgacattcttcacagaaatatgaaaaaaaattctaaagtttatatagaatcacaaagtcccagaatagccaaagccatcctgagcaaaaggaacaaaactcgaggaataacattacctgacttcaaattatactacagagctatagtaaccaaaaaagcatggtactgtcataaaaacaaacagaccaatggaacagagtagagagcccagaaacaaatccacatagctacagtgaactcattttcaataaagatgccaggaatacaagttttggggaatcatccaatataccaccacatattccagattgaggtttctactatcattctcttctaaaagaaatcaaggctccatggacagtgtctatatcatggacttcttgccttcagaaagtaaggccttcatcggaagaaattgcaatagaactaagacaagaaagttagctaaagaaaaggttatggtagccaaataattaaaagggaacatccttctgtatcagaaattcccatgtttccatatccagatttcttcaccaaggcagataaagagttggcaaaaatcattgaccatcactggcaggaagagctaaagatccgagaaaaagaagatgcaatatgcaaggcccaagaacttaaagataaaaagttagcagagaaaaatcactttcaagaagttatgaagaaaagagaagagaaactacataagcaaaccaagccctatgaacttccttataggaaggaagtaatttaattagaaaagaaaatgtcacctcccaaaattgaggactacatggcagaaatacataggatgaaaaataccaagatagctacatagtaagagaactttcttgtcattaaatggaggtattgtttagaaagaatttgttttcctgatacaagctgtttgtttaatagttatttcttagttctaaattaatgaccaacttttaatcacacttgaatgaagtgatttcactagtcaaaaatttccaagactacatctagtatttttctcaattgacctttatctcatgattgtacagcatacttgataactgattctcagaacattgatattcatcaaacaaacagtttgatggaaattcattacaaattaattaatgggtcaccagataagaattatttcttgaaaacagaatgaacataaactaacaatcctgtaattactattattcaaataaaaagccagatgcgaaaggtctctgttgggtgagagaaatgaaatattttagacattagcac

SEQ ID NO: 464689 - DNA, 1577 bp, Homo sapiens
cttttcaatgcccagacaccagtgaacatctacaagcataaagaccatccaggaaactgtgacttcagcaaacaaactaaataagttaccaaggacaaattctgaagaaacagagtaggggatgttactgacatctagtgggcagaggccagagctattgctaaatgtctcacaagaagtaaaagatttctgcaatgaacactataaaacactgatgaaagaaattgaaaaagacacaaaaaatgaaaagatatttcatgttcatggattggaagaattaatattgttaaaacatccatactacccaaagcagtctacagatcagtgcaatccctatgagtataccaatgacattcttcacagaaatatgaaaaaaaattctaaagtttatatagaatcacaaagtcccagaatagccaaagccatcctgagcaaaaggaacaaaactcgaggaataacattacctgacttcaaattatactacagagctatagtaaccaaaaaagcatggtactgtcataaaaacaaacagaccaatggaacagagtagagagcccagaaacaaatccacatagctacagtgaactcattttcaataaagatgccaggaatacaagttttggggaatcatccaatataccaccacatattccagattgaggtttctactatcattctcttctaaaagaaatcaaggctccatggacagtgtctatatcatggacttcttgccttcagaaagtaaggccttcatcggaagaaattgcaatagaactaagacaagaaagttagctaaagaaaaggttatggtagccaaataattaaaagggaacatccttctgtatcagaaattcccatgtttccatatccagatttcttcaccaaggcagataaagagttggcaaaaatcattgaccatcactggcaggaagagctaaagatccgagaaaaagaagatgcaatatgcaaggcccaagaacttaaagataaaaagttagcagagaaaaatcactttcaagaagttatgaagaaaagagaagagaaactacataagcaaaccaagccctatgaacttccttataggaaggaagtaatttaattagaaaagaaaatgtcacctcccaaaattgaggactacatggcagaaatacataggatgaaaaataccaagatagctacatagtaagagaactttcttgtcattaaatggaggtattgtttagaaagaatttgttttcctgatacaagctgtttgtttaatagttatttcttagttctaaattaatgaccaacttttaatcacacttgaatgaagtgatttcactagtcaaaaatttccaagactacatctagtatttttctcaattgacctttatctcatgattgtacagcatacttgataactgattctcagaacattgatattcatcaaacaaacagtttgatggaaattcattacaaattaattaatgggtcaccagataagaattatttcttgaaaacagaatgaacataaactaacaatcctgtaattactattattcaaataaaaacagtatggcatcttaaaaaaaaaa

SEQ ID NO: 464690 - DNA, 1608 bp, Homo sapiens
cttttcaatgcccagacaccagtgaacatctacaagcataaagaccatccaggaaactgtgacttcagcaaacaaactaaataagttaccaaggacaaattctgaagaaacagagtaggggatgttactgacatctagtgggcagaggccagagctattgctaaatgtctcacaagaagtaaaagatttctgcaatgaacactataaaacactgatgaaagaaattgaaaaagacacaaaaaatgaaaagatatttcatgttcatggattggaagaattaatattgttaaaacatccatactacccaaagcagtctacagatcagtgcaatccctatgagtataccaatgacattcttcacagaaatatgaaaaaaaattctaaagtttatatagaatcacaaagtcccagaatagccaaagccatcctgagcaaaaggaacaaaactcgaggaataacattacctgacttcaaattatactacagagctatagtaaccaaaaaagcatggtactgtcataaaaacaaacagaccaatggaacagagtagagagcccagaaacaaatccacatagctacagtgaactcattttcaataaagatgccaggaatacaagttttggggaatcatccaatataccaccacatattccagattgaggtttctactatcattctcttctaaaagaaatcaaggctccatggacagtgtctatatcatggacttcttgccttcagaaagtaaggccttcatcggaagaaattgcaatagaactaagacaagaaagttagctaaagaaaaggttatggtagccaaataattaaaagggaacatccttctgtatcagaaattcccatgtttccatatccagatttcttcaccaaggcagataaagagttggcaaaaatcattgaccatcactggcaggaagagctaaagatccgagaaaaagaagatgcaatatgcaaggcccaagaacttaaagataaaaagttagcagagaaaaatcactttcaagaagttatgaagaaaagagaagagaaactacataagcaaaccaagccctatgaacttccttataggaaggaagtaatttaattagaaaagaaaatgtcacctcccaaaattgaggactacatggcagaaatacataggatgaaaaataccaagatagctacatagtaagagaactttcttgtcattaaatggaggtattgtttagaaagaatttgttttcctgatacaagctgtttgtttaatagttatttcttagttctaaattaatgaccaacttttaatcacacttgaatgaagtgatttcactagtcaaaaatttccaagactacatctagtatttttctcaattgacctttatctcatgattgtacagcatacttgataactgattctcagaacattgatattcatcaaacaaacagtttgatggaaattcattacaaattaattaatgggtcaccagataagaattatttcttgaaaacagaatgaacataaactaacaatcctgtaattactattattcaaataaaaacgatggcctcgttggcctaagcggtggagctctgctgtcggttgcctttagtgag

SEQ ID NO: 464691 - DNA, 1000 bp, Homo sapiens
gaaaagagagtcaaggaagggagatggggtggggcccttttataggatttggggctgcttcgagcgggattggggcagcgtgggaacctagagtgggagagattaaactgaaggaagatttgtgggcctctaaaagtattagggcggcagcagctgctgcacggagacatgatgaccaacctaaaacagtaaggtcaagttgtttggacaaaaaggctacaggatgcgatcccggtccttgtgtaagaattctgactgcacagccctgcacttcggctgtgtgtaatgaaaacgattggcatgagttagggagagctagagtgggggcagtctctaaagctgtcttcaaggaatggaaagagaactggggaaaggatttaggatctatggggtcagctaggtttccttttgtgaatttatataatgattttgtcaggatggcaaaaccaggacaggaaaaatgggggaattgtaaggagagtttacaggctttaaaaggccatggtgtggcaggcagtgttagtcttcagccgctaagccaagaagatttgggaaggagtcagagagccttgggccagagttccaggggccctgggagtggctaccagcaacttacaagaaggctttcgcaagaaatgaggctttcacaagaagacccttgtcaagtatctgagagatttcacttctatagcaattacatcgtgagagcactggccctataaagccaagaaggaatgaaaagaggctaagacaaaaaataaacttcagattttgtaacatgatagtctgaaagacaggccaacacaggcagctctttggaaacaagagacctggtacttccaacagccaaaaagctggccaaacatcaggaacaagggaaagacacatcaggtctgagcaagcaggaaatcaactctacaaactttgaaacttggtaaatatgaaaacattctcaataccatttgtcatttaataaatacaaattatactattttactgc

SEQ ID NO: 464692 - DNA, 596 bp, Homo sapiens
cagccattctgctgatagcctgatggcgcccaagtcggtcaagaggaaaggcctgcccctccaaggccaccttctaatctctagcccctttcctaagcaagatgagacagtgtgcagggccaggaaaaaggactgctgcatggataatatttacagacagaaaaagaaaagtgacgtacacaaaatagaagtgggtacagaaacagctgaattggtgatagctcagtctccagccaattacttgagacctaaaacaacagttagtgcagatggaagggtgcggattatgatgcggactacaatggaaacccaaaccttctcttgcagagcgagcccggcacccagctgtcgtccacttgcatttagtgtagctgccacccagcaattaacgcgcctgggctctcctttggaaaccgagcagagaagaacaataccacagcgagttcgcctggacccgaaagcaggtccttgaaaaggatgcaagaaaaaaggaaaaaaaaaaaatccacagcagcctgcagtgattgaagttcaatggcgtactctattatcttctcctgtatgtttaaataaacccccaaagctttctgtttctt

SEQ ID NO: 464693 - DNA, 1553 bp, Homo sapiens
tttcctggactccggttcttgcctctgcccacagtgactgtcgggagctctgctcatcttctgggatttttaaccccacttgctgttgatgaatgcttctaaaatgtgctcctgtgtttcttccacatccaggtgacacacaactcccagctgatggaagacatccccaggcagaggagggagggcaggtaagactcatttcaggaacacattgtattcctaaaatgtgtagttgtttccagaggactcttgagaagggattttgactaggaaacaatgtttgaccacaacaaacatagcagagagctcaaggaaaaccatttgaatatgtatattctgcctgtctagagagattcatcttttttttttctaaaattaaaactatgagcagccaaacagggttatagttttaacctcagggtttaggttccaggtaaatgtgtaaaatgagtgaaacgtgcagagattaagaaagataagtcaaaggacaagaaaactcaacaaatctgaaacattaccctgcccctcttttccccattcactgttgtaagtatctatcttatcattcaataccaaattcctaaaatactgttccacatcttctgcccccattttctcattgttcagtccttttgcaactatttgcaaaaaaaaaaaaaaaagaaatgcatctgattagaattaattttgattaattcgtgttaagttatcaaataaagactcaatagcctctccattaatcccattagagtggggtttcacacctcccatcatgcagccctttttattctcattttcctactgttttactccaggccgtaactcagaaaaacactgtttagtgaagactagttccttaggaagacagacatgcttggctggactccttttttataaccgtatttcccccactggggagaagaccctcaacttttcacctcagaaacattgtttttcaccacaataaaagggttacttttctttcaggaagagattttgtgaaaacgaatgtttcatcaaagagcaaagatagccaggaccagctgattcctctgcttctcttcagctgatccctctgcttctctccagctgatctctctgcttctctccagctgatccctctgcttctctccagctgatctctctgcttctctccagctgatccctctgcttctctccagctgatctctctgcttctctccagctgatccctctgcttctctccagctgattcctctgcttctctccagctgatctctctgcttctctccagctgattcctctgcttctctccagctgatccctctgcttctctccagctgatctctctgcttctctccagctgatctctctgcttctctccagctgattcctctgcttctctccagctgatccctctgcttctctccagctgatctctctgcttctctccagctgatccctctgcttctctccagctgatccctctgcttctctccagctgattcctctgcttctctccagctgttccctctgcttctctccagctgatctctctgcttctctccagctga

SEQ ID NO: 464694 - DNA, 2122 bp, Homo sapiens
ttaatccaatccagtggtgtccttagaagaaaggagaaattaggacacagacatgcagggacaacactgctgtgaggacccaggacgacagatgcagtccacaagcccaggagagaggccgctggaggaaccagccctgcagacaccttaccccggggttgcagcttccagaactgtgagagaagaaaggtcttatgtaaggccccatctgcggcgttttgtcctggcagcccaagcacaggaatgcagccaccaaatgtccacaagcacatttatgtatccagggcctgggtgtttgcagcccccgaggcaaagagaagaaacagccggtgtcaccctgagccactcgcacacaggggcacggacaccccctctcattaaaaacgggttggattgcattccaggcccagcctgcaaagttaatgacgagctcgcaataaagcacccgcgtggatgtgagccttgtactgccccgcgatggccggcgtttttattagtgggcctgggcagcgggcccggcaggctggtatttgacacgcagacaaggatgttcccgggcgcgctgcgcggctgactcacttcaaagtcccagccctgctggcttggtttacacctgagccaattagctccggagatcagaagaggcctgaaaacggagccgagcccttattctcgggatggagaaagtcacttgatcccaggtgacacacaactcccagctgatggaagacatccccaggcagaggagggagggcaggtaagactcatttcaggaacacattgtattcctaaaatgtgtagttgtttccagaggactcttgagaagggattttgactaggaaacaatgtttgaccacaacaaacatagcagagagctcaaggaaaaccatttgaatatgtatattctgcctgtctagagagattcatcttttttttttctaaaattaaaactatgagcagccaaacagggttatagttttaacctcagggtttaggttccaggtaaatgtgtaaaatgagtgaaacgtgcagagattaagaaagataagtcaaaggacaagaaaactcaacaaatctgaaacattaccctgcccctcttttccccattcactgttgtaagtatctatcttatcattcaataccaaattcctaaaatactgttccacatcttctgcccccattttctcattgttcagtccttttgcaactatttgcaaaaaaaaaaaaaaaagaaatgcatctgattagaattaattttgattaattcgtgttaagttatcaaataaagactcaatagcctctccattaatcccattagagtggggtttcacacctcccatcatgcagccctttttattctcattttcctactgttttactccaggccgtaactcagaaaaacactgtttagtgaagactagttccttaggaagacagacatgcttggctggactccttttttataaccgtatttcccccactggggagaagaccctcaacttttcacctcagaaacattgtttttcaccacaataaaagggttacttttctttcaggaagagattttgtgaaaacgaatgtttcatcaaagagcaaagatagccaggaccagctgattcctctgcttctcttcagctgatccctctgcttctctccagctgatctctctgcttctctccagctgatccctctgcttctctccagctgatctctctgcttctctccagctgatccctctgcttctctccagctgatctctctgcttctctccagctgatccctctgcttctctccagctgattcctctgcttctctccagctgatctctctgcttctctccagctgattcctctgcttctctccagctgatccctctgcttctctccagctgatctctctgcttctctccagctgatctctctgcttctctccagctgattcctctgcttctctccagctgatccctctgcttctctccagctgatctctctgcttctctccagctgatccctctgcttctctccagctgatccctctgcttctctccagctgattcctctgcttctctccagctgttccctctgcttctctccagctgatctctctgcttctctccagctga

SEQ ID NO: 464695 - DNA, 1156 bp, Homo sapiens
aaaatacgctgaggcgcaccccacgcggtaaaaaaaacaaagaccctggttgaaaacaatgttagtagagatccctctaggctttacaaacccaccaaaggttgggaagaacgaaccaaaaagataggaccaacaggctctgggccacttctacatatcccacatagggctattccaacctggagacaaggaatacagagaagagtatgagataatcaaattgctactcagttgataagaatgttaacatactaagttataccagggagagagtgactaaccacattctttaaatatcaatagcttagtcagattgattattgtgctatattgtgaattgagaggtattaagtttcatgaggctttgtcattagtattcctgcttctaccaagaaggtatttaatatatgtgttggcctattattgatgtaaaagttatttaaataagttaatgttagaaacattattcaatttaaatactgaaaacatttcaaagagattttgtttttgttatagcatagcaaagtaaattggaacaatcatacaatgacattttttaaaccaaaattttgtaacttttataacttggagttaagttagcttgagtaacaaaaaggtaaagtggtttttgtttagagttacgaaatgttagtactttttctatgtttaacaaattggcagtttgtcagttatgacatttttgtgtaataaatattttgtatttgtttgaagcatgctttgttttatatagagaatatttattttaaaaatatgtctctcatataccctattaattgtattattgatataatctttttggtttccttcagcaattccaaattttccttcagcctttctggatttcacagatttataaaatctttgtgtctttcacatcttcctggctaatgcagttttcttttctgcttctgtttgcctcaaaataggaaaattctttgttctgaaacatcatctgaaataagccagctttaaaatactgtgatttctcttgatggcacttaaaatgttttaggtggggcatggtggctcatgcttgtaatcccagcactttcagaggtcaaggtaggagaattgaggcctggagtttgacactagcctgggcaacacagggagaccctgtctctacagaaaaaaa

SEQ ID NO: 464696 - DNA, 1157 bp, Homo sapiens
ccacaattataacacacaatgcacacgaaaaagacacacaccccctgaggttgaaaacaatgttagtagagatccctctaggctttacaaacccaccaaaggttgggaagaacgaaccaaaaagataggaccaacaggctctgggccacttctacatatcccacatagggctattccaacctggagacaaggaatacagagaagagtatgagataatcaaattgctactcagttgataagaatgttaacatactaagttataccagggagagagtgactaaccacattctttaaatatcaatagcttagtcagattgattattgtgctatattgtgaattgagaggtattaagtttcatgaggctttgtcattagtattcctgcttctaccaagaaggtatttaatatatgtgttggcctattattgatgtaaaagttatttaaataagttaatgttagaaacattattcaatttaaatactgaaaacatttcaaagagattttgtttttgttatagcatagcaaagtaaattggaacaatcatacaatgacattttttaaaccaaaattttgtaacttttataacttggagttaagttagcttgagtaacaaaaaggtaaagtggtttttgtttagagttacgaaatgttagtactttttctatgtttaacaaattggcagtttgtcagttatgacatttttgtgtaataaatattttgtatttgtttgaagcatgctttgttttatatagagaatatttattttaaaaatatgtctctcatataccctattaattgtattattgatataatctttttggtttccttcagcaattccaaattttccttcagcctttctggatttcacagatttataaaatctttgtgtctttcacatcttcctggctaatgcagttttcttttctgcttctgtttgcctcaaaataggaaaattctttgttctgaaacatcatctgaaataagccagctttaaaatactgtgatttctcttgatggcacttaaaatgttttaggtggggcatggtggctcatgcttgtaatcccagcactttcagaggtcaaggtaggagaattgaggcctggagtttgacactagcctgggcaacacagggagaccctgtctctacagaaaaaaa

SEQ ID NO: 464697 - DNA, 3136 bp, Homo sapiens
tgtctgcagaggccagggtgcgcctgccacgaatccccaggcaccggtggccgccgcggcccgagtagctcggcgggtaaacatggccgcactgacgacggttgtggtagcggctgcggccaccgcggtagccggggctgtggcaggggcgggcgcggccaccgggaccggcgtgggagcgacgccagcgcctcaacaggtaaatccgggagaaccgagagctgctctggcggcaggcgaggggctgcaggccctggctgaacaggtgccctctgcagcgccggcgggaggcgcggcgttcgcctcccctgctcggggcctggcacgcgctgggcgttgctctttgttggcttgtgcgtttaacagcttttgcagagccgcctccatgtggtttcggagtcgaggaagacctgggtgggaacccggctctgccgcttcctagccgcgtgataagaacatatgctgtcggcgactcactttcttctctaaaaattgggaatagtaacatgcacctcccgagctttggactaacgttatgtctggggagcccctggcacagtgcttgattggagggggactctgtgctcagtaattggtggcagctctgttactgtaccggcgctgggaacacaaggagaaagacaatatgggatggtcggaggcagaggtgtttccagtgatcggcttaggaccgctttctaggtggtgaggacaagagtgatggctgttttagtacttcaggtggaattcgtccttttcatcttcagaactggaagcagaaagttaatcagactaagaaagcagaatttgtacgcacagcagaaaaatttaaaaatcaagtaattaacatggaaaaagataaacacagtcatttctacaaccaaaaaagtgacttcagaattgagcatagtatgctagaagaattggaaaataaattgattcacagcaggaaaacagaaagagcaaaaatccagcaacaattggccaaaatacataataatgtaaagaaacttcagcatcaattaaaagatgtgaagcctacacctgattttgttgagaagctcagagaaatgatggaagaaattgaaaatgcaattaacacttttaaagaagagcagaggttgatatatgaagagctaattaaagaagagaagacaactaataatgagttgagtgccatatcaagaaaaattgacacatgggctttgggtaattcagaaacagagaaagctttcagagcaatctcaagcaaagttcctgtagacaaagtaacaccaagtactcttccagaagaggtactagattttgaaaaattccttcagcaaacaggagggcgacaaggtgcctgggatgattatgatcaccagaactttgtaaaggtgagaaacaaacataaagggaagccaacatttatggaagaagttctagaacaccttcctggaaaaacacaagatgaagttcaacagcatgaaaaatggtatcaaaagtttctggctctagaagaaagaaaaaaagagtcaattcagatttggaaaactaaaaagcagcaaaaaagggaggaaattttcaagttaaaggaaaaggcagacaacacacctgtgctttttcataataaacaagaggataatcaaaagcaaaaagaggaacaaagaaagaaacagaaattggcagttgaagcttggaagaaacagaaaagtatagaaatgtcaatgaaatgtgcttcccagttaaaagaagaagaagagaaagagaaaaaacatcagaaagaacgccagcgccagtttaagttaaaattactactagaaagttatacccagcagaagaaagaacaggaagaatttttgaggcttgaaaaggagataagggaaaaggcagaaaaggcagaaaaaaggaaaaatgctgctgatgaaatttccagatttcaagaaagagatttacataaacttgaactgaaaattctagatagacaggcaaaggaagatgaaaagtcacaaaaacaaagaagactggcaaaattaaaagaaaagggttgaaaacaatgttagtagagatccctctaggctttacaaacccaccaaaggttgggaagaacgaaccaaaaagataggaccaacaggctctgggccacttctacatatcccacatagggctattccaacctggagacaaggaatacagagaagagtatgagataatcaaattgctactcagttgataagaatgttaacatactaagttataccagggagagagtgactaaccacattctttaaatatcaatagcttagtcagattgattattgtgctatattgtgaattgagaggtattaagtttcatgaggctttgtcattagtattcctgcttctaccaagaaggtatttaatatatgtgttggcctattattgatgtaaaagttatttaaataagttaatgttagaaacattattcaatttaaatactgaaaacatttcaaagagattttgtttttgttatagcatagcaaagtaaattggaacaatcatacaatgacattttttaaaccaaaattttgtaacttttataacttggagttaagttagcttgagtaacaaaaaggtaaagtggtttttgtttagagttacgaaatgttagtactttttctatgtttaacaaattggcagtttgtcagttatgacatttttgtgtaataaatattttgtatttgtttgaagcatgctttgttttatatagagaatatttattttaaaaatatgtctctcatataccctattaattgtattattgatataatctttttggtttccttcagcaattccaaattttccttcagcctttctggatttcacagatttataaaatctttgtgtctttcacatcttcctggctaatgcagttttcttttctgcttctgtttgcctcaaaataggaaaattctttgttctgaaacatcatctgaaataagccagctttaaaatactgtgatttctcttgatggcacttaaaatgttttaggtggggcatggtggctcatgcttgtaatcccagcactttcagaggtcaaggtaggagaattgaggcctggagtttgacactagcctgggcaacacagggagaccctgtctctacagaaaaaaa

SEQ ID NO: 464698 - DNA, 3040 bp, Homo sapiens
tgtctgcagaggccagggtgcgcctgccacgaatccccaggcaccggtggccgccgcggcccgagtagctcggcgggtaaacatggccgcactgacgacggttgtggtagcggctgcggccaccgcggtagccggggctgtggcaggggcgggcgcggccaccgggaccggcgtgggagcgacgccagcgcctcaacaggtaaatccgggagaaccgagagctgctctggcggcaggcgaggggctgcaggccctggctgaacaggtgccctctgcagcgccggcgggaggcgcggcgttcgcctcccctgctcggggcctggcacgcgctgggcgttgctctttgttggcttgtgcgtttaacagcttttgcagagccgcctccatgtggtttcggagtcgaggaagacctgggtgggaacccggctctgccgcttcctagccgcgtgataagaacatatgctgtcggcgactcactttcttctctaaaaattgggaatagtaacatgcacctcccgagctttggactaacgttatgtctggggagcccctggcacagtgcttgattggagggggactctgtgctcagtaattggtggcagctctgttactgtaccggcgctgggaacacaaggagaaagacaatatgggatggtcggaggcagaggtgtttccagtgatcggcttaggaccgctttctaggtggtgaggacaagagtgatggctgttttagtacttcaggtggaattcgtccttttcatcttcagaactggaagcagaaagttaatcagactaagaaagcagaatttgtacgcacagcagaaaaatttaaaaatcaagtaattaacatggaaaaagataaacacagtcatttctacaaccaaaaaagtgacttcagaattgagcatagtatgctagaagaattggaaaataaattgattcacagcaggaaaacagaaagagcaaaaatccagcaacaattggccaaaatacataataatgtaaagaaacttcagcatcaattaaaagatgtgaagcctacacctgattttgttgagaagctcagagaaatgatggaagaaattgaaaatgcaattaacacttttaaagaagagcagaggttgatatatgaagagctaattaaagaagagaagacaactaataatgagttgagtgccatatcaagaaaaattgacacatgggctttgggtaattcagaaacagagaaagctttcagagcaatctcaagcaaagttcctgtagacaaagtaacaccaagtactcttccagaagaggtactagattttgaaaaattccttcagcaaacaggagggcgacaaggtgcctgggatgattatgatcaccagaactttgtaaaggtgagaaacaaacataaagggaagccaacatttatggaagaagttctagaacaccttcctggaaaaacacaagatgaagttcaacagcatgaaaaatggtatcaaaagtttctggctctagaagaaagaaaaaaagagtcaattcagatttggaaaactaaaaagcagcaaaaaagggaggaaattttcaagttaaaggaaaaggcagacaacacacctgtgctttttcataataaacaagaggataatcaaaagcaaaaagaggaacaaagaaagaaacagaaattggcagttgaagcttggaagaaacagaaaagtatagaaatgtcaatgaaatgtgcttcccagttaaaagaagaagaagagaaagagaaaaaacatcagaaagaacgccagcgccagtttaagttaaaattactactagaaagttatacccagcagaagaaagaacaggaagaatttttgaggcttgaaaaggagataagggaaaaggcagaaaaggcagaaaaaaggaaaaatgctgctgatgaaatttccagatttcaagaaagaggttgaaaacaatgttagtagagatccctctaggctttacaaacccaccaaaggttgggaagaacgaaccaaaaagataggaccaacaggctctgggccacttctacatatcccacatagggctattccaacctggagacaaggaatacagagaagagtatgagataatcaaattgctactcagttgataagaatgttaacatactaagttataccagggagagagtgactaaccacattctttaaatatcaatagcttagtcagattgattattgtgctatattgtgaattgagaggtattaagtttcatgaggctttgtcattagtattcctgcttctaccaagaaggtatttaatatatgtgttggcctattattgatgtaaaagttatttaaataagttaatgttagaaacattattcaatttaaatactgaaaacatttcaaagagattttgtttttgttatagcatagcaaagtaaattggaacaatcatacaatgacattttttaaaccaaaattttgtaacttttataacttggagttaagttagcttgagtaacaaaaaggtaaagtggtttttgtttagagttacgaaatgttagtactttttctatgtttaacaaattggcagtttgtcagttatgacatttttgtgtaataaatattttgtatttgtttgaagcatgctttgttttatatagagaatatttattttaaaaatatgtctctcatataccctattaattgtattattgatataatctttttggtttccttcagcaattccaaattttccttcagcctttctggatttcacagatttataaaatctttgtgtctttcacatcttcctggctaatgcagttttcttttctgcttctgtttgcctcaaaataggaaaattctttgttctgaaacatcatctgaaataagccagctttaaaatactgtgatttctcttgatggcacttaaaatgttttaggtggggcatggtggctcatgcttgtaatcccagcactttcagaggtcaaggtaggagaattgaggcctggagtttgacactagcctgggcaacacagggagaccctgtctctacagaaaaaaa

SEQ ID NO: 464699 - DNA, 1668 bp, Homo sapiens
tcaggagatcgagaccatcctggctaacacggtgaaaccccgtctctactaaaaatacaaaaaattagctgggcgaggtggcgggcgcctgtagtcccagctactcgggaggctgaggcaggagaatggcgtgaaccccagggggcggagcctgcagtgagccgagattgcgccactgcactccagcctgggctgtctcccccacaaaaaaagaaaagaaagaaaagaaagaaagaaaggaaggaaggaaggaaggaaggaaggaaggaagaaagaaagaaatgaggtatcgaaccatgaaaagacataaaggaaacttaaatgcatattactagaaagttatacccagcagaagaaagaacaggaagaatttttgaggcttgaaaaggagataagggaaaaggcagaaaaggcagaaaaaaggaaaaatgctgctgatgaaatttccagatttcaagaaagagatttacataaacttgaactgaaaattctagatagacaggcaaaggaagatgaaaagtcacaaaaacaaagaagactggcaaaattaaaagaaaagggttgaaaacaatgttagtagagatccctctaggctttacaaacccaccaaaggttgggaagaacgaaccaaaaagataggaccaacaggctctgggccacttctacatatcccacatagggctattccaacctggagacaaggaatacagagaagagtatgagataatcaaattgctactcagttgataagaatgttaacatactaagttataccagggagagagtgactaaccacattctttaaatatcaatagcttagtcagattgattattgtgctatattgtgaattgagaggtattaagtttcatgaggctttgtcattagtattcctgcttctaccaagaaggtatttaatatatgtgttggcctattattgatgtaaaagttatttaaataagttaatgttagaaacattattcaatttaaatactgaaaacatttcaaagagattttgtttttgttatagcatagcaaagtaaattggaacaatcatacaatgacattttttaaaccaaaattttgtaacttttataacttggagttaagttagcttgagtaacaaaaaggtaaagtggtttttgtttagagttacgaaatgttagtactttttctatgtttaacaaattggcagtttgtcagttatgacatttttgtgtaataaatattttgtatttgtttgaagcatgctttgttttatatagagaatatttattttaaaaatatgtctctcatataccctattaattgtattattgatataatctttttggtttccttcagcaattccaaattttccttcagcctttctggatttcacagatttataaaatctttgtgtctttcacatcttcctggctaatgcagttttcttttctgcttctgtttgcctcaaaataggaaaattctttgttctgaaacatcatctgaaataagccagctttaaaatactgtgatttctcttgatggcacttaaaatgttttaggtggggcatggtggctcatgcttgtaatcccagcactttcagaggtcaaggtaggagaattgaggcctggagtttgacactagcctgggcaacacagggagaccctgtctctacagaaaaaaa

SEQ ID NO: 464700 - DNA, 3016 bp, Homo sapiens
tgtctgcagaggccagggtgcgcctgccacgaatccccaggcaccggtggccgccgcggcccgagtagctcggcgggtaaacatggccgcactgacgacggttgtggtagcggctgcggccaccgcggtagccggggctgtggcaggggcgggcgcggccaccgggaccggcgtgggagcgacgccagcgcctcaacaggtaaatccgggagaaccgagagctgctctggcggcaggcgaggggctgcaggccctggctgaacaggtgccctctgcagcgccggcgggaggcgcggcgttcgcctcccctgctcggggcctggcacgcgctgggcgttgctctttgttggcttgtgcgtttaacagcttttgcagagccgcctccatgtggtttcggagtcgaggaagacctgggtgggaacccggctctgccgcttcctagccgcgtgataagaacatatgctgtcggcgactcactttcttctctaaaaattgggaatagtaacatgcacctcccgagctttggactaacgttatgtctggggagcccctggcacagtgcttgattggagggggactctgtgctcagtaattggtggcagctctgttactgtaccggcgctgggaacacaaggagaaagacaatatgggatggtcggaggcagaggtgtttccagtgatcggcttaggaccgctttctaggtggtgaggacaagagtgatggctgttttagtacttcaggtggaattcgtccttttcatcttcagaactggaagcagaaagttaatcagactaagaaagcagaatttgtacgcacagcagaaaaatttaaaaatcaagtaattaacatggaaaaagataaacacagtcatttctacaaccaaaaaagtgacttcagaattgagcatagtatgctagaagaattggaaaataaattgattcacagcaggaaaacagaaagagcaaaaatccagcaacaattggccaaaatacataataatgtaaagaaacttcagcatcaattaaaagatgtgaagcctacacctgattttgttgagaagctcagagaaatgatggaagaaattgaaaatgcaattaacacttttaaagaagagcagaggttgatatatgaagagctaattaaagaagagaagacaactaataatgagttgagtgccatatcaagaaaaattgacacatgggctttgggtaattcagaaacagagaaagctttcagagcaatctcaagcaaagttcctgtagacaaagtaacaccaagtactcttccagaagaggtactagattttgaaaaattccttcagcaaacaggagggcgacaaggtgcctgggatgattatgatcaccagaactttgtaaaggtgagaaacaaacataaagggaagccaacatttatggaagaagttctagaacaccttcctggaaaaacacaagatgaagttcaacagcatgaaaaatggtatcaaaagtttctggctctagaagaaagaaaaaaagagtcaattcagatttggaaaactaaaaagcagcaaaaaagggaggaaattttcaagttaaaggaaaaggcagacaacacacctgtgctttttcataataaacaagaggataatcaaaagcaaaaagaggaacaaagaaagaaacagaaattggcagttgaagcttggaagaaacagaaaagtatagaaatgtcaatgaaatgtgcttcccagttaaaagaagaagaagagaaagagaaaaaacatcagaaagaacgccagcgccagtttaagttaaaattactactagaaagttatacccagcagaagaaagaacaggaagaatttttgaggcttgaaaaggagataagggaaaaggcagaaaaggcagaaaaaaggaaaaatgctgctgatgaaatttccagatttcaagaaagagatttacataaacttgaactgaaaattctagatagacaggcaaaggaagatgaaaagtcacaaaaacaaagaagactggcaaaattaaaagaaaagggctattccaacctggagacaaggaatacagagaagagtatgagataatcaaattgctactcagttgataagaatgttaacatactaagttataccagggagagagtgactaaccacattctttaaatatcaatagcttagtcagattgattattgtgctatattgtgaattgagaggtattaagtttcatgaggctttgtcattagtattcctgcttctaccaagaaggtatttaatatatgtgttggcctattattgatgtaaaagttatttaaataagttaatgttagaaacattattcaatttaaatactgaaaacatttcaaagagattttgtttttgttatagcatagcaaagtaaattggaacaatcatacaatgacattttttaaaccaaaattttgtaacttttataacttggagttaagttagcttgagtaacaaaaaggtaaagtggtttttgtttagagttacgaaatgttagtactttttctatgtttaacaaattggcagtttgtcagttatgacatttttgtgtaataaatattttgtatttgtttgaagcatgctttgttttatatagagaatatttattttaaaaatatgtctctcatataccctattaattgtattattgatataatctttttggtttccttcagcaattccaaattttccttcagcctttctggatttcacagatttataaaatctttgtgtctttcacatcttcctggctaatgcagttttcttttctgcttctgtttgcctcaaaataggaaaattctttgttctgaaacatcatctgaaataagccagctttaaaatactgtgatttctcttgatggcacttaaaatgttttaggtggggcatggtggctcatgcttgtaatcccagcactttcagaggtcaaggtaggagaattgaggcctggagtttgacactagcctgggcaacacagggagaccctgtctctacagaaaaaaa

SEQ ID NO: 464701 - DNA, 2619 bp, Homo sapiens
tgtctgcagaggccagggtgcgcctgccacgaatccccaggcaccggtggccgccgcggcccgagtagctcggcgggtaaacatggccgcactgacgacggttgtggtagcggctgcggccaccgcggtagccggggctgtggcaggggcgggcgcggccaccgggaccggcgtgggagcgacgccagcgcctcaacagagtgatggctgttttagtacttcaggtggaattcgtccttttcatcttcagaactggaagcagaaagttaatcagactaagaaagcagaatttgtacgcacagcagaaaaatttaaaaatcaagtaattaacatggaaaaagataaacacagtcatttctacaaccaaaaaagtgacttcagaattgagcatagtatgctagaagaattggaaaataaattgattcacagcaggaaaacagaaagagcaaaaatccagcaacaattggccaaaatacataataatgtaaagaaacttcagcatcaattaaaagatgtgaagcctacacctgattttgttgagaagctcagagaaatgatggaagaaattgaaaatgcaattaacacttttaaagaagagcagaggttgatatatgaagagctaattaaagaagagaagacaactaataatgagttgagtgccatatcaagaaaaattgacacatgggctttgggtaattcagaaacagagaaagctttcagagcaatctcaagcaaagttcctgtagacaaagtaacaccaagtactcttccagaagaggtactagattttgaaaaattccttcagcaaacaggagggcgacaaggtgcctgggatgattatgatcaccagaactttgtaaaggtgagaaacaaacataaagggaagccaacatttatggaagaagttctagaacaccttcctggaaaaacacaagatgaagttcaacagcatgaaaaatggtatcaaaagtttctggctctagaagaaagaaaaaaagagtcaattcagatttggaaaactaaaaagcagcaaaaaagggaggaaattttcaagttaaaggaaaaggcagacaacacacctgtgctttttcataataaacaagaggataatcaaaagcaaaaagaggaacaaagaaagaaacagaaattggcagttgaagcttggaagaaacagaaaagtatagaaatgtcaatgaaatgtgcttcccagttaaaagaagaagaagagaaagagaaaaaacatcagaaagaacgccagcgccagtttaagttaaaattactactagaaagttatacccagcagaagaaagaacaggaagaatttttgaggcttgaaaaggagataagggaaaaggcagaaaaggcagaaaaaaggaaaaatgctgctgatgaaatttccagatttcaagaaagagatttacataaacttgaactgaaaattctagatagacaggcaaaggaagatgaaaagtcacaaaaacaaagaagactggcaaaattaaaagaaaagggttgaaaacaatgttagtagagatccctctaggctttacaaacccaccaaaggttgggaagaacgaaccaaaaagataggaccaacaggctctgggccacttctacatatcccacatagggctattccaacctggagacaaggaatacagagaagagtatgagataatcaaattgctactcagttgataagaatgttaacatactaagttataccagggagagagtgactaaccacattctttaaatatcaatagcttagtcagattgattattgtgctatattgtgaattgagaggtattaagtttcatgaggctttgtcattagtattcctgcttctaccaagaaggtatttaatatatgtgttggcctattattgatgtaaaagttatttaaataagttaatgttagaaacattattcaatttaaatactgaaaacatttcaaagagattttgtttttgttatagcatagcaaagtaaattggaacaatcatacaatgacattttttaaaccaaaattttgtaacttttataacttggagttaagttagcttgagtaacaaaaaggtaaagtggtttttgtttagagttacgaaatgttagtactttttctatgtttaacaaattggcagtttgtcagttatgacatttttgtgtaataaatattttgtatttgtttgaagcatgctttgttttatatagagaatatttattttaaaaatatgtctctcatataccctattaattgtattattgatataatctttttggtttccttcagcaattccaaattttccttcagcctttctggatttcacagatttataaaatctttgtgtctttcacatcttcctggctaatgcagttttcttttctgcttctgtttgcctcaaaataggaaaattctttgttctgaaacatcatctgaaataagccagctttaaaatactgtgatttctcttgatggcacttaaaatgttttaggtggggcatggtggctcatgcttgtaatcccagcactttcagaggtcaaggtaggagaattgaggcctggagtttgacactagcctgggcaacacagggagaccctgtctctacagaaaaaaa

SEQ ID NO: 464702 - DNA, 1608 bp, Homo sapiens
tgtctgcagaggccagggtgcgcctgccacgaatccccaggcaccggtggccgccgcggcccgagtagctcggcgggtaaacatggccgcactgacgacggttgtggtagcggctgcggccaccgcggtagccggggctgtggcaggggcgggcgcggccaccgggaccggcgtgggagcgacgccagcgcctcaacaggtaaatccgggagaaccgagagctgctctggcggcaggcgaggggctgcaggccctggctgaacaggtgccctctgcagcgccggcgggaggcgcggcgttcgcctcccctgctcggggcctggcacgcgctgggcgttgctctttgttggcttgtgcgtttaacagcttttgcagagccgcctccatgtggtttcggagtcgaggaagacctgggtgggaacccggctctgccgcttcctagccgcgtgataagaacatatgctgtcggcgactcactttcttctctaaaaattgggaatagtaacatgcacctcccgagctttggactaacgttatgtctggggagcccctggcacagtgcttgattggagggggactctgtgctcagtaattggtggcagctctgttactgtaccggcgctgggaacacaaggagaaagacaatatgggatggtcggaggcagaggtgtttccagtgatcggcttaggaccgctttctaggtggtgaggacaagagtgatggctgttttagtacttcaggtggaattcgtccttttcatcttcagaactggaagcagaaagttaatcagactaagaaagcagaatttgtacgcacagcagaaaaatttaaaaatcaagtaattaacatggaaaaagataaacacagtcatttctacaaccaaaaaagtgacttcagaattgagcatagtatgctagaagaattggaaaataaattgattcacagcaggaaaacagaaagagcaaaaatccagcaacaattggccaaaatacataataatgtaaagaaacttcagcatcaattaaaagatgtgaagcctacacctgattttgttgagaagctcagagaaatgatggaagaaattgaaaatgcaattaacacttttaaagaagagcagaggttgatatatgaagagctaattaaagaagagaagacaactaataatgagttgagtgccatatcaagaaaaattgacacatgggctttgggtaattcagaaacagagaaagctttcagagcaatctcaagcaaagttcctgtagacaaagtaacaccaagtactcttccagaagaggtactagattttgaaaaattccttcagcaaacaggagggcgacaaggtgcctgggatgattatgatcaccagaactttgtaaaggtgagaaacaaacataaagggaagccaacatttatggaagaagttctagaacaccttcctggaaaaacacaagatgaagttcaacagcatgaaaaatggtatcaaaagtttctggctctagaagaaagaaaaaaagagtcacttcagagtggaaaagagctcctgaagatgaaaagcatcagacacaatcaaagctcaagataacaaccaggaaagttccgttgagccg

SEQ ID NO: 464703 - DNA, 1150 bp, Homo sapiens
  misc_feature (170)..(170): n is a, c, g, or t
  misc_feature (172)..(173): n is a, c, g, or t
  misc_feature (176)..(176): n is a, c, g, or t
  misc_feature (178)..(179): n is a, c, g, or t
  misc_feature (184)..(184): n is a, c, g, or t
agacatgcagacatcagctccagaatgtgctatggttgagttctgcataagtctcacctgatgggagtatcctcagagaagagctggctgttgcacaggaggcaatgctccctggaaaggaacccagctcctatgcctgggaaacagtcacattgcttcagggtcacaananntcntnncttcncaggcccagccggaagacgcaaggccacttgcgtcagcagcgtgcgtcagcaaggtagcagaagcaggaagagagccagcaagaagacacctaccctggcaggaagacacgtacccgtgaagatagagaaagaggccatccagttcagtctcattgaaaagaaagatgtctacatcattgagaacaaaaagaagcccaatgtggattcagcacaattaacacggagtacttgtcaaggcacagacactgcaggaataaattgtaggctgcatttctggtcttaggactcagtcaaatgggacatacaagccatgcaagccaacagcataattgaagacaaggtgttggaaaaacaatatgaacaagtttttataggatcaaaggaaagaaagaattcgactggatctgaggagtacaagaatattccagaattggggaataaataggagagatcaacagaaaggccatttgaatcagaaccagcaggcaggaagtatgaaaccatctagcagcctgttctgtaaggacaaaagatcattaaataggcaaatagcaagctttattgcagaaagccagggatagtatggtttagctttctttaattcctctttgttgagtttcccattgtcttagaaattattcaggaggtaagacctactggtgtatggcacagcaggaatatcaggcctattaatcgcaatcaagtctctaatgcttgtattaataaatcatgtttaatgtagaataatttctgaaaataatgccacagatcaataaataaatctctaagaaaagctgaagttcccagggtcatatctgagaacttgaggccaggggagtttagacactctaagtagaagacacccaggcaagacttttgtggataaggacaattatacaagttcatagccttctgaaataagcttagttctaataatctcaggaaaaacacaaaataatttagct

SEQ ID NO: 464704 - DNA, 936 bp, Homo sapiens
ctctctgagggagccctgggttgggactgtgtctcaatcggccatgacagctgagcaggggagcactgccttccgccccgaagcactgaggctagggaaggcagcaaagccagaaaagactcagggatcttgcctaagagggagcaaggaagggcttgactttccaatcaggaaagggaaagagccagggagtggacatgaggcgaccctgctaacattcaccatacctgcctcctattgggtaagggttaggcagattgaccttcagcttggatgggccatggttggtctacagctaatatgtgattttgtgcaagaagatgagcaaaacaaagacatgttgcaggccgtgttttctggacggttgttgagtcaagaaggattcagccctgttaggagtatggactctggagtcatagggctggaatgcaaatctcagctctatcgtttaccagctgtgcaacttgggcaagttactctctattactctgtttccacatcgtagaatgaaaggattgcttctgctttaacctctgatgctttatcaaggccgagctgagggctgcactatcgggagcttgatgaggaaactgaggcacagagagatgaaggaacttgcccaaggtcacacagctgaggaacccaggcactcagattctggggcctgctctcataaccacaatgctacatccctgcctctaacatcgggacaaccaggccttcctcacaggcattatcgggactataagataagatgcataaggttttatctccagagagaaggcagctatggtccaaggtcaaacacagaggctacaactagaaacctctagaccaagtttggtccatgtggtgttctctatagagtttctttctttttaatttggattttcaatactttaaaattaagagcacacacataacagtatccttttt

SEQ ID NO: 464705 - DNA, 470 bp, Homo sapiens
gcagaaccgctctgagaccagggggagcttttccagtagaatgaaaggattgcttctgctttaacctctgatgctttatcaaggccgagctgagggctgcactatcgggagcttgatgaggaaactgaggcacagagagatgaaggaacttgcccaaggtcacacagctgaggaacccaggcactcagattctggggcctgctctcataaccacaatgctacatccctgcctctaacatcgggacaaccaggccttcctcacaggcattatcgggactataagataagatgcataaggttttatctccagagagaaggcagctatggtccaaggtcaaacacagaggctacaactagaaacctctagaccaagtttggtccatgtggtgttctctatagagtttctttctttttaatttggattttcaatactttaaaattaagagcacacacataacagtatccttttt

SEQ ID NO: 464706 - DNA, 759 bp, Homo sapiens
tttgtgtcaggcttcttttattccacatcatatttatgagctatatctgcattgagaagaactataggagtaattttcttcactttatactagttcatcagaggaaaatatcacaatatatttattctacagttgatagacacgtgaatttgtctgggatccagttcctggaccatttcagactcgtgttctagcctggcttcctagctgaggtgtcttaggaatggtggtactgttcctagctgctgctacagatgggaagccttctgtgctatgctgcctggtgagaaagatgctgtagctatgccccagccagattggtcctgtaaggctttggcctttccagttgttgcttggagaaattgctgactcaccttggaaaaaggaggagttaacagctcatggtggattttgaccaatggaagatggagaagaggaagaagctgaggataaattattttcttttccaatcaccaataaacagatacatgtgaaatgaggtacttagatggcctcttagaaaacatcctgggagatcaaggcatcagttgcaattgctgtcaaataaaggccagttctgttccacttcccctgtgttttctcctcttctttccatacctaatttgggattccttttcgactcactcctgtgtctctggagtcatactcctcaataaaatgggagcacgtacacttttgactaaggctctgttttctagaaagcccagaaaatccctcccaggaccagctacatagttg

SEQ ID NO: 464707 - DNA, 1366 bp, Homo sapiens
ttaggtaaaattcacgctttgaaaaacattggactaagttcctgggtaatggtgggcgcccctcccctagcctcgctgccaccttgcagtttgatctcagactgctgtgctagcaatgagcgaggctccgtgggcataggaccctccaagtcatgtgcaggatataatctcctggaaagggaattccctgaccccttgcacttcctgggtgaggcgatgcttcaccctgcttcggctcacgcttggtgcactgcacccactgtcctgcacccagtgtccctcaatccccagtgtgatgaacccagtacctcagttggaaatgcagaaatcacctgtcttctgtgtcgctcacgctgggagctgcagactggagctgttcctattcggccatcttatattagtgaatttttaaactcatacttccgagagaataggccttcctctttggcagccaacatggaaacaggatgaacaagaccaggaggaggttttcctctgtttcacaggagcacggactattctctcatgttgaatgtggcactttttacatacaagcaggagagcaactacaccaagattttggaaaacatgttatgtaaggttaattgtgacctctatgatggggatatgataaagaagaaaagtacctcacagcgatgattggcatgtgatcacttagccaatgagataagaggctgtagaaacgatgtgataatgacatctcctgagttgcaggtccatattagaagtggatatgaagtaaacattgagctttcctcacatttaattaacaagctttattatagatacagctcaaattagttaattcaggaagcttattttgtagaaattaaaacattaataaacacatacatttagaaataaagaactcggctgaccctttgactctttgaaacaagcattattctttctgatcagtttcaaacatttcaaatgattcttataaagaagggtaggagtggggtggatctatgtaacgaatgctttttttttttggtcttagttcaggctgctatagcagaagactgagtggctaataaataacagaaatgtattctccacagttctggaggctggaaagtccaagataagggtgtcagcatggccagattctgtgaatatttgaagagaaaacgaagaggttattaaatgtgtttgggaatatcataattataataggtaagcaatattcatgttgttactattgtgtcttttcctttgtaattattaggaaagctagtggaaaaaataaaatagaagtatttgccttctctatgcctttttggaatgaaaaataattggcacttgacatgaaatagaatacagaaaccgtatcctgaagcac

SEQ ID NO: 464708 - DNA, 916 bp, Homo sapiens
gtgtgctcttgtgattgtgactgacacaggcagcaccctttgcagaagtagatgtgcgtgctgagaaattttctgcctaagttctggttttctttgcagcacccagcattgtttctaacacagggaaagagtgagctgtaaaaacctctcaaattcaagaaagcgtaaagcaaattgaacaatacgggtgaggagcacggactattctctcatgttgaatgtggcactttttacatacaagcaggagagcaactacaccaagattttggaaaacatgttatgtaagtttttatttttaaaatcaggagagaatttctgcaacatcctatgaccacagatccctacccatctgcattggggcacttacagatcaccttctcttctgaactttgtatgaagtgaccatgtccctcctatccctttccatgtgcacaagatcatgtcatctctagcttattcaaagacattgccttagcaatctgcccttgccttctgtttcatcattgttgcttggagaaattgctgactcaccttggaaaaaggaggagttaacagctcatggtggattttgaccaatggaagatggagaagaggaagaagctgaggataaattattttcttttccaatcaccaataaacagatacatgtgaaatgaggtacttagatggcctcttagaaaacatcctgggagatcaaggcatcagttgcaattgctgtcaaataaaggccagttctgttccacttcccctgtgttttctcctcttctttccatacctaatttgggattccttttcgactcactcctgtgtctctggagtcatactcctcaataaaatgggagcacgtacacttttgactaaggctctgttttctagaaagcccagaaaatccctcccaggaccagctacatagttg

SEQ ID NO: 464709 - DNA, 1052 bp, Homo sapiens
gtgtgctcttgtgattgtgactgacacaggcagcaccctttgcagaagtagatgtgcgtgctgagaaattttctgcctaagttctggttttctttgcagcacccagcattgtttctaacacagggaaagagtgagctgtaaaaacctctcaaattcaagaaagcgtaaagcaaattgaacaatacgggtgaggagcacggactattctctcatgttgaatgtggcactttttacatacaagcaggagagcaactacaccaagattttggaaaacatgttatgtaaggttaattgtgacctctatgatggggatatgataaagaagaaaagtacctcacagcgatgattggcatgtgatcacttagccaatgagataagaggctgtagaaacgatgtgataatgacatctcctgagttgcaggtccatattagaagtggatatgaagtaaacattgagctttcctcacatttaattaacaagctttattatagatacagctcaaattagttaattcaggaagcttattttgtagaaattaaaacattaataaacacatacatttagaaataaagaactcggctgaccctttgactctttgaaacaagcattattctttctgatcagtttcaaacatttcaaatgattcttataaagaagggtaggagtggggtggatctatgtaacgaatgctttttttttttggtcttagttcaggctgctatagcagaagactgagtggctaataaataacagaaatgtattctccacagttctggaggctggaaagtccaagataagggtgtcagcatggccagattctgtgaatatttgaagagaaaacgaagaggttattaaatgtgtttgggaatatcataattataataggtaagcaatattcatgttgttactattgtgtcttttcctttgtaattattaggaaagctagtggaaaaaataaaatagaagtatttgccttctctatgcctttttggaatgaaaaataattggcacttgacatgaaatagaatacagaaaccgtatcctgaagcac

SEQ ID NO: 464710 - DNA, 2089 bp, Homo sapiens
gctagcacctcagacagtcaggcagtgatgaacattatgaacacagaacaaagccaaaatagtattgtttccagaattaaagtgtttgagggtcagacaaacatagaaacctcaggactgcccaagaaaccagaaattactccacgttcacttcctccaaagcctactgtttcctcagggaaaccttctgtagctcccaaaccagctgctaacagagcttctggagagtgggactctgggactgagaacagactcaaggtgacctccaaggaaggactcaccccataccctcccctgcaagaagcgggaagcatcccagtaaccaaacctgaattgccaaagaaaccaaaccctggccttatacgaagtgttaatcctgagattccgggaagagggcccctggctgagagctctgatagtgggaagaaagtgccaactcctgccccgcggcctttgctgctgaagaaatctgtttcctcagaaaaccccacctacccttcagctccactgaaacctgtcactgttcctccccgactcgcaggggcatcacaagccaaagcatacaagtcactgggagaagggcccccagccaaccccccagttccagttctgcagagcaagcccttggtggacatcgatctcatcagctttgatgatgatgttttgcccaccccatcggggaacctggctgaagaatctgttggttcagagatggttctagaagcaagagcagtctgtgatagaattatggcagcaagttcttaaccctttccagattaccaaactctgagaatctgacatagcctgagagtcttttctctcccttgaaaatagccattaattcagtgactgtttggagctgtgaggaaaaaaaaaaaaagaaaatagccattagctcatgtgtacacaattcaaggtacaatatccagagcttagagggcccattttgggctctagattaaggacttctactacagaatattggaaataaatgtcaatggactgcttaaataaattatagtacatccataacaatggagtattgtgtgataattaaaagggagggagacctattatcccctactttggaccaacctccaagatattattaggtgaaaaatgcaagatacaggatactttttatgttattttagctattgtttgtgttaaatgtcaaatgcaatgtacagtaatgtatgaaaaggtggtacaaagtgtgtcttttatgaaggaactggataggagagaacagggaacctggttttcactgtatgcattttgctcccttttgaatttcagaccatgtggaggcattacctttaacaagagagttaatcaataatctttttaaaagagctgaacataagcataattaggctgaaagaaactgggagaattatctcttgtcgtctttgccacttctgaagaactgcttcccccaatgaccctcagattctgataagtaaaaatttttaaaataataaaatagtgatttatctaaatggttatattattcaaggttacaaatagaagctacttgttatgaactaaatatgcctaaattagataaattcaaaattttatatctgcattatttccttttaaattgaaccccagaaaaagagtttttatttttctagttactttatggaaaattttatggccattattgccttgaaaaagcaacaaaagaaaccagaagtttcttttgttctcttatttttaagtggttttgttctggtttgtttggcagaggtgttaactcagcttaatcttgtaactttttccttatgattgaatttattttattggatttgtttctgttagaaaagtaaaatatattcgttgtaacaagtcaaacaattcagagattttggattaaaaaaaaatgtaaactccccacggtaaccaatgtggaacaaagtatggcagccttctgtgcctttgggcatggccaaacccaaaggctttacacatatacacataatggactttttccagaaatttttaccatacgatacctgttactcagcagagtgctttaaaaaacaatgacatttatgacttctcttcaggataataggtctaa

SEQ ID NO: 464711 - DNA, 1087 bp, Homo sapiens
agatttcaacatatgaattttgggaaaacacaaacactcagatcacacaattgaggagaaaccagtgaaaactaactttcatgagaatgaaaaggaagaggaatctgtccgagaaacaagccttgaggtcttaaaaaccctggacccactggtcattggaatgcctcaggtgctatggccaaggatcctgacttttgtggtacctgcagaatacacagaagctctggagcccctgtttagtatcatcagaattctgattatggcagaggagaagaagcagcacagtgccaaggagtcgacagcacttgtcatctctacgggagctggtctgtacattcataaacacagaaaagcttttctattatgagggatccatttccaggaaggctacagtgctttgaccttaaacccaaccccaatctctaacccctgcagtgatgatgaaaattgctttctctttctagtgaaacttccttcaccacagcagctactggccagacttctggtaatatctatgcctgccagtttaggggagttacgtggggctggtgcaatagggcttttgaagatactgcctgagataattcacccaaaattggtagacctatggaaaacacgtttacctgagcttctgcagcctctggaaggaaagaacatcagtaccgttctatgggaaaccatgctgcttcagttgctcaaagaatccttatggaagatcagtgatgtggcctggaccattcagctgactcaggatttcaaacagcaaatgggcagttacagcaataactccactgagaagagccttttttctgggaaaaagagcctgaccaagacagatgtcatggtcatctatggagcagtggccctccatgctcccaagaagcaacttctctccagacttaatcaagatatcatatcccaagtcctgtctcttcatggccagtgctctcagccattctgacccatataagacaatatttcattgtgggtttgatttgcatttctttgatgagcctttaccctttttccttaccaaagtctgttgagcctctttaaaatgattgtgaaggctgaaaacacaagactc

SEQ ID NO: 464712 - DNA, 1883 bp, Homo sapiens
aggaaaaccagagacctttgttcacttgtttatctgctgaccttccctccactattgtcctatgaccctgccaaatccccctctggaatttcatcagcagaaagaattacgtacagatactgataccatgtgtttccaaccaacagctcagccagatcatcctacagtgaagctctcaggaaacaagtaccatctacaagcttcccattgggcctttcaagcgagcaggggcgtgactccgggggctccgccccgagccttggcccagtcttggggtccaaggctgagggagcgggacggaagtgagcgggtcccgccccttccccttctcgtctccgttggagtcgtctctgccgcggcttcctcggctgccagctctccggcgagccggagtcctagtgccgtaccgtcagtccccggccgcgcggagccgggatgcactgttcctgctgtgggtcctcatcatggagaccaaacgggtggagattcccggcagcgtcctggacgatctctgcaggtactactagttcaggggtacctagcaaaatcaggctggggatttccaaaaggaaaagtaaataaagaagaagctcctcatgattgtgctgctagagaggtctttgaagaaactggttttgatatcaaagactatatttgtaaggatgattacattgaacttcgaatcaatgaccagcttgctcgtttgtacatcattccaggaattccaaaagacacaaaatttaacccaaaaactagaagagaaattcggaacattgagtggttctctattgagaaattgccttgtcatagaaatgatatgacccccaaatccaaacttggtttggcacctaacaaattttttatggccattccctttatcagaccattaagggactggctttctcgaagatttggcgattcctcagacagtgacaatggattttcctcaactggtagcacgccggctaaacccactgtggaaaaattgagtcgaaccaaattccgccacagtcagcagttatttcctgacggttctcctggtgaccagtgggtaaagcacaggcaaccactgcagcaaaagccatataataatcattctgaaatgtctgaccttttaaaaggaaagaatcaaagtatgaggggaaatggcagaaaacagtatcaagattcacctaatcaaaagaaaagaacaaatgggcttcagccagcaaagcagcagaattctttgatgaagtgtgaaaagaaacttcatccacggaaacttcaggataattttgaaacagatgctgtatatgacttgcctagctccagtgaagaccagttgctagaacatgccgagggacagcccgtggcatgtaatggacattgcaagttccccttttcatccagagcctttttgagtttcaagtttgaccataatgctataatgaaaatcttggacctttgatagcagcacatgtattgtaaatgtcccaggatcagagacctgttgaatttgagtgggtgtctcctcaagccttacctttctcaggtgttttaaagaaatgcagggaggcaatgtttctgaagacattttctgtttataagagagtagaaagaaacacgagtttgcactgtaaatgcagttataaccttttatacagatttaccttttcagtgttcagtacaagtttaagttgctttctttgagggcatttattctgtgtgactgtgggttttattttgtattctggttaagaaaataatgtattgagttactgtcaagtagccaagttaatgggaatgctccatctacctgttacagtgattgcaataatagtatattggagtttttcaaagaaacttaaagtaatgcccaattattaaatgaacacaagagctga

SEQ ID NO: 464713 - DNA, 1747 bp, Homo sapiens
aggaaaaccagagacctttgttcacttgtttatctgctgaccttccctccactattgtcctatgaccctgccaaatccccctctggaatttcatcagcagaaagaattacgtacagatactgataccatgtgtttccaaccaacagctcagccagatcatcctacagtgaagctctcaggaaacaagtaccatctacaagcttcccattgggcctttcaagcgagcaggggcgtgactccgggggctccgccccgagccttggcccagtcttggggtccaaggctgagggagcgggacggaagtgagcgggtcccgccccttccccttctcgtctccgttggagtcgtctctgccgcggcttcctcggctgccagctctccggcgagccggagtcctagtgccgtaccgtcagtccccggccgcgcggagccgggatgcactgttcctgctgtgggtcctcatcatggagaccaaacgggtggagattcccggcagcgtcctggacgatctctgcaggtactactagttcaggggtacctagcaaaatcaggctggggatttccaaaaggaaaagtaaataaagaagaagctcctcatgattgtgctgctagagaggtctttgaagaaactggttttgatatcaaagactatatttgtaaggatgattacattgaacttcgaatcaatgaccagcttgctcgtttgtacatcattccaggaattccaaaagacacaaaatttaacccaaaaactagaagagaaattcggaacattgagtggttctctattgagaaattgccttgtcatagaaatgatatgacccccaaatccaaacttggtttggcacctaacaaattttttatggccattccctttatcagaccattaagggactggctttctcgaagatttggcgattcctcagacagtgacaatggattttcctcaactggtagcacgccggctaaacccactgtggaaaaattgagaatcaaagtatgaggggaaatggcagaaaacagtatcaagattcacctaatcaaaagaaaagaacaaatgggcttcagccagcaaagcagcagaattctttgatgaagtgtgaaaagaaacttcatccacggaaacttcaggataattttgaaacagatgctgtatatgacttgcctagctccagtgaagaccagttgctagaacatgccgagggacagcccgtggcatgtaatggacattgcaagttccccttttcatccagagcctttttgagtttcaagtttgaccataatgctataatgaaaatcttggacctttgatagcagcacatgtattgtaaatgtcccaggatcagagacctgttgaatttgagtgggtgtctcctcaagccttacctttctcaggtgttttaaagaaatgcagggaggcaatgtttctgaagacattttctgtttataagagagtagaaagaaacacgagtttgcactgtaaatgcagttataaccttttatacagatttaccttttcagtgttcagtacaagtttaagttgctttctttgagggcatttattctgtgtgactgtgggttttattttgtattctggttaagaaaataatgtattgagttactgtcaagtagccaagttaatgggaatgctccatctacctgttacagtgattgcaataatagtatattggagtttttcaaagaaacttaaagtaatgcccaattattaaatgaacacaagagctga

SEQ ID NO: 464714 - DNA, 431 bp, Homo sapiens
gtaaataagaaaatatgtagtctataaatttaactattaaggtgttaaaaagaactataagtgaacattttcctgatttgattattttttaaatccttggtgtagtcgaaccaaattccgccacagtcagcagttatttcctgacggttctcctggtgaccagtgggtaaagcacaggcaaccactgcagcaaaagccatataataatcattctgaaatgtctgaccttttaaaaggaaaggtgagtgatacacaattacagtcttttcagaaatttagatcatttggctttgaaatttttctcaattggagaattacatcttaatagttacagagagctctgagttactgatcaaagcctgtatgttccttacttatgatttgaagcagggctgaggcttcttaatgtttacagttccggtgtaaatcca

SEQ ID NO: 464715 - DNA, 1850 bp, Homo sapiens
aggaaaaccagagacctttgttcacttgtttatctgctgaccttccctccactattgtcctatgaccctgccaaatccccctctggaatttcatcagcagaaagaattacgtacagatactgataccatgtgtttccaaccaacagctcagccagatcatcctacagtgaagctctcaggaaacaagtaccatctacaagcttcccattgggcctttcaagcgagcaggggcgtgactccgggggctccgccccgagccttggcccagtcttggggtccaaggctgagggagcgggacggaagtgagcgggtcccgccccttccccttctcgtctccgttggagtcgtctctgccgcggcttcctcggctgccagctctccggcgagccggagtcctagtgccgtaccgtcagtccccggccgcgcggagccgggatgcactgttcctgctgtgggtcctcatcatggagaccaaacgggtggagattcccggcagcgtcctggacgatctctgcaggtactactagttcaggggtacctagcaaaatcaggctggggatttccaaaaggaaaagtaaataaagaagaagctcctcatgattgtgctgctagagaggtctttgaagaaactggttttgatatcaaagactatatttgtaaggatgattacattgaacttcgaatcaatgaccagcttgctcgtttgtacatcattccaggaattccaaaagacacaaaatttaacccaaaaactagaagagaaattcggaacattgagtggttctctattgagaaattgccttgtcatagaaatgatatgacccccaaatccaaacttggtttggcacctaacaaattttttatggccattccctttatcagaccattaagggactggctttctcgaagatttggcgattcctcagacagtgacaatggattttcctcaactggtagcacgccggctaaacccactgtggaaaaattgagtcgaaccaaattccgccacagtcagcagttatttcctgacggttctcctggtgaccagtgggtaaagcacaggcaaccactgcagcaaaagccatataataatcattctgaaatgtctgaccttttaaaaggaaagaatcaaagtatgaggggaaatggcagaaaacagtatcaagattcacctaatcaaaagaaaagaacaaatgggcttcagccagcaaagcagcagaattctttgatggtaagagttatagctgtcacactaagtaggcagttcatcctctgaagagtgaaacaagggcattgccaaagcacaggaatgttacttgttttgttcttattttaattgatatactagtaggatttttgtgtagctgacttgtgcactattcacactaaaaatctctggctgctcttaattacaaatgtataatgttgatgcaattgtacatctaattttttatgtggctgtttattttaatatcaatgtgtactcaaacctgttctctagagcaattatttggctattgctccatgtttttctaaatattatttcagtgagggtaaaagtttggggggatttgactatttttttcttcaagttgatagagtttagaaaataaaaaaaacacagccagtgctattgtcattagattttgcttgatgacaaataacaaagcagttttctttcattcttttgtttagtcagtcctccaaaagttaattcataactcacagtctcctgcgttatcttttctgtaagttctgatatttgtatattaggttttcttattgtagcttcacctgtttttcatttattgactgttttgattgacatcttttgtgtttctatattttcc

SEQ ID NO: 464716 - DNA, 2593 bp, Homo sapiens
aggaaaaccagagacctttgttcacttgtttatctgctgaccttccctccactattgtcctatgaccctgccaaatccccctctggaatttcatcagcagaaagaattacgtacagatactgataccatgtgtttccaaccaacagctcagccagatcatcctacagtgaagctctcaggaaacaagtaccatctacaagcttcccattgggcctttcaagcgagcaggggcgtgactccgggggctccgccccgagccttggcccagtcttggggtccaaggctgagggagcgggacggaagtgagcgggtcccgccccttccccttctcgtctccgttggagtcgtctctgccgcggcttcctcggctgccagctctccggcgagccggagtcctagtgccgtaccgtcagtccccggccgcgcggagccgggatgcactgttcctgctgtgggtcctcatcatggagaccaaacgggtggagattcccggcagcgtcctggacgatctctgcaggtactactagttcaggggtacctagcaaaatcaggctggggatttccaaaaggaaaagtaaataaagaagaagctcctcatgattgtgctgctagagaggtctttgaagaaactggttttgatatcaaagactatatttgtaaggatgattacattgaacttcgaatcaatgaccagcttgctcgtttgtacatcattccaggaattccaaaagacacaaaatttaacccaaaaactagaagagaaattcggaacattgagtggttctctattgagaaattgccttgtcatagaaatgatatgacccccaaatccaaacttggtttggcacctaacaaattttttatggccattccctttatcagaccattaagggactggctttctcgaagatttggcgattcctcagacagtgacaatggattttcctcaactggtagcacgccggctaaacccactgtggaaaaattgagtcgaaccaaattccgccacagtcagcagttatttcctgacggttctcctggtgaccagtgggtaaagcacaggcaaccactgcagcaaaagccatataataatcattctgaaatgtctgaccttttaaaaggaaagaatcaaagtatgaggggaaatggcagaaaacagtatcaagattcacctaatcaaaagaaaagaacaaatgggcttcagccagcaaagcagcagaattctttgatgaagtgtgaaaagaaacttcatccacggaaacttcaggataattttgaaacagatgctgtatatgacttgcctagctccagtgaagaccagttgctagaacatgccgagggacagcccgtggcatgtaatggacattgcaagttccccttttcatccagagcctttttgagtttcaagtttgaccataatgctataatgaaaatcttggacctttgatagcagcacatgtattgtaaatgtcccaggatcagagacctgttgaatttgagtgggtgtctcctcaagccttacctttctcaggtgttttaaagaaatgcagggaggcaatgtttctgaagacattttctgtttataagagagtagaaagaaacacgagtttgcactgtaaatgcagttataaccttttatacagatttaccttttcagtgttcagtacaagtttaagttgctttctttgagggcatttattctgtgtgactgtgggttttattttgtattctggttaagaaaataatgtattgagttactgtcaagtagccaagttaatgggaatgctccatctacctgttacagtgattgcaataatagtatattggagtttttcaaagaaacttaaagtaatgcccaattattaaatgaacacaagagctgagatgtcacattcgtcagcattacaggtgatctattttggtggcattttgtacttctctctgcttctaaccactgaggctctctaatcttcctctggagttttagtgaaaggatttattgagcagcttctggaatataatgtgcatgtccaaaatgaactcagcgcttcaaaaggacaaagtctgtagcctggaggggcttgagtggatgggagctgatgctgtgattttgagctgtggttacatgcagtcagtaaacctgtgagactgctggaggaaatgtagcagacagcatggaggctgggacccagcagctactttgggtcatgtctttactgtcctgcctccaaccctttagtctcgtagacttttgttcttgtggaaatttcttctgtattccagttgtgtaaatatgtatggaaaactgatattactaggttttacgttgcatctccagtattgatctttggaaactgatgttacattaggttccaattcgcaatagtagcagagactgacatgcttttattgacctgctaagcccctggatgatggagcgagaagggaaggggtatgcagtttacccaagtccaaataaagcatttcactaggttacacgttatgtatatgtgttacataacagtaacatacataactcactcctaggaatgtattttgcttcaggatttttaaattcaaataaggatggcag

SEQ ID NO: 464717 - DNA, 1202 bp, Homo sapiens
aggaaaaccagagacctttgttcacttgtttatctgctgaccttccctccactattgtcctatgaccctgccaaatccccctctggaatttcatcagcagaaagaattacgtacagatactgataccatgtgtttccaaccaacagctcagccagatcatcctacagtgaagctctcaggaaacaagtaccatctacaagcttcccattgggcctttcaagcgagcaggggcgtgactccgggggctccgccccgagccttggcccagtcttggggtccaaggctgagggagcgggacggaagtgagcgggtcccgccccttccccttctcgtctccgttggagtcgtctctgccgcggcttcctcggctgccagctctccggcgagccggagtcctagtgccgtaccgtcagtccccggccgcgcggagccgggatgcactgttcctgctgtgggtcctcatcatggagaccaaacgggtggagattcccggcagcgtcctggacgatctctgcaggatatgtgaggattacttcatgaaaacaaggaagtgaattaaggaggatgaaaacaaaaagacaagacacatgacctctgtgggataaaggcacagggaactataggatgcttgtgaaagggcagtgtagagttgacagatgtgtaccaggtgtagaggacagctgatccagactagaacagatcagaagactagaagtcttaaagatgaaactgatgaatctgaattgtggggaaaaaaaatccaaaatgaaactgatggatctgaaaagaaaattcacaatggagatgattatgtcagaatatccaaaaaggagccaggagggcataaggagttggatcctggtcacatacacatctagatggagtttcacctgctgaactgggccaaagtgtaaaactagctgcatttgacttgagttgtatatactgggcctgatcaaccgcctggagagataaccatacccaactatattgatcattgactagagacatcctgagctgacaaccagccatcatttatcatggactgtgctaaaaccttccagatacgtaaatttacagtagcccttaaaagctctgcctaaccttgcctgaatgcaacatgatttagctgcttgctagacttgtgtctcccaaattgcaatctctaaaaacctgattaaaatgccttttgctactccagt

SEQ ID NO: 464718 - DNA, 2339 bp, Homo sapiens
tgggtggagccctcgccagggaccccacccttctctacccagcactcccctgccccccttccatgtcaacatgaaagctgacattggctcctgggaaccaacgtcctcctgtccccaaacccatggaggagtggtgggttcctgggcctctagtaactcgactgaatattttccaggttacctaaccaaactcctgcaaaaccacaccacctatgcctgtgatggggactatttgaatctacagtgccctcggcattctacgataagtgtccaatcggcattttatgggcaagattaccaaatgtgtagttcccagaagcctgcctcccagagggaagacagcttaacctgtgtggcagccaccaccttccaggatggctccttgaacactacatcctctagggggttggagaacgctggtactcatgtggcagaagaatggaaggggcaagagaaggagagagggccaacttgccttttataacaagcctagtgccactctaacaacctactcctgaaaaaaaacaaaaaacaaacaaacaaacaaaaacagtattaatccattcataagggtgaagacctgatggtctaatcacctcttaaagactccacctgttaacactgttactgttaaagcagcaattacatttcaatgataagaagatccagccaggtgccatggccctaatgtgtacagctcatgcctttctgcagggattaaggtgggcgttttcaaattgtgattgcagcccatggtaggaaaagattttcactttttggcccagtggaacacatactcatatacacacaactgaaaaagaaatgtttaaattacaaaacagtgtttatactttcttcatgtgatgccctttgttgttttctaaactactctatgctttattttcaaaaattgctggttacaactcactaatgatttcaagactcatgaatgaacctcaaatcacaatttggaaaactctggcttgaggtgtgtttgggacctggaatcagcctgcacttccaatccaggaaagaaaagtggaagaacatgagcacgtgagaggagtgagaggctggggtggaagaggttctctctggacagtcttcccacccaccccaggccagcccatgacagcccaagcagttcttgccatttaactcttgtttgcagttaacgccaatgcttgtttggctgaaaaatgcacctgtccgctatgtggttgccatttcaaagtagaaaactccagaacagtggtgatagggtagagctagcatttttaaaagaattttctttacaaaatgttggcaaggataagaaccacatatgcaaataaatgaccgtgtcccagctacttgggaggctgaggcaagagaatggcatgaacctgggaggcagagcttgcagtgagcagagatcgtgccactgcactccagcctgggcgacagagcgagattccgtctcaaaaaaaaaaaaaaaaaattcaaatcattattaaacatttttactaattaaatggttttggagtacattctttaaaaaaaaaaataaactgtgttttcttcaacaatgaattaaaaaacaaaaccgtgtgtgaagaccaggagctgaaactgcactgccatgaatccaagttcctcaacatctactctgcgacctacggcaggaggacccaggaaagggacatctgctcctccaaggcagagcggctcccccctttcggtatgtgcttttgtgtgtgtattagccagggttctctagagggacagaattaatagaatatatatatatatatcctatatatatcctatatgattgtgaaagtcaatacttaacacaatcacgatcttgtgatcgtttcttctaaaatatcatcatcatcatcatcatcatcatcatttttattgttctgcacaaacaccatcataatatttaacagaaatgagaaaaggattcagccacaaatgttactcatcagctaaaaagttcttactttttttttttttttttttggatttctctccaagtcgagtatgagctgaggactgttttacgtaatggcagttctaagcagatccatttgcagactgccttattttcctttgctttatatcatgtgtgtttttccacgtggccaaaaaaaatcctaacaatgccgagcacttcctaatatcttgttaaaaagacacatcaaataatttacgtaactgttccctggtggccagatatttttcattttttctgactttcaagtattgtaaataatgtataatgagcttgtgcttgtagctttccctttcttccggctgacttccagctgacttccttggaataaattccc

SEQ ID NO: 464719 - DNA, 1280 bp, Homo sapiens
tgggtggagccctcgccagggaccccacccttctctacccagcactcccctgccccccttccatgtcaacatgaaagctgacattggctcctgggaaccaacgtcctcctgtccccaaacccatggaggagtggtgggttcctgggcctctagtaactcgactgaatattttccaggttacctaaccaaactcctgcaaaaccacaccacctatgcctgtgatggggactatttgaatctacagtgccctcggcattctacgataagtgtccaatcggcattttatgggcaagattaccaaatgtgtagttcccagaagcctgcctcccagagggaagacagcttaacctgtgtggcagccaccaccttccaggatggctccttgaacactacatcctctagggggttggagaacgctggtactcatgtggcagaagaatggaaggggcaagagaaggagagagggccaacttgccttttataacaagcctagtgccactctaacaacctactcctgaaaaaaaacaaaaaacaaacaaacaaacaaaaacagtattaatccattcataagggtgaagacctgatggtctaatcacctcttaaagactccacctgttaacactgttactgttaaagcagcaattacatttcaatgataagaagatccagccaggtgccatggccctaatgtgtacagctcatgcctttctgcagggattaaggtgggcgttttcaaattgtgattgcagcccatggtaggaaaagattttcactttttggcccagtggaacacatactcatatacacacaactgaaaaagaaatgtttaaattacaaaacagtgtttatactttcttcatgtgatgccctttgttgttttctaaactactctatgctttattttcaaaaattgctggttacaactcactaatgatttcaagactcatgaatgaacctcaaatcacaatttggaaaactctggcttgaggtgtgtttgggacctggaatcagcctgcacttccaatccaggaaagaaaagtggaagaacatgagcacgtgagaggagtgagaggctggggtggaagaggttctctctggacagtcttcccacccaccccaggccagcccatgacagcccaagcagttcttgccatttaactcttgtttgcagttaacgccaatgcttgtttggctgaaaaatgcacctgtccgctatgtggttgccatttcaaagtagaaaaactccagcctgggcaacaagagtgaaactccatctcaaa

SEQ ID NO: 464720 - DNA, 2099 bp, Homo sapiens
agtggtggtggtaatgatgaaggtggtggtggtgacagtggtggtggtgttggttatggtggaggtggtagtggtgatcgatggaggtagtggtggtgatggtggtgctgatgatgatggtgaaggtggtggtgatgaaggtggtggtagagtggtgataatggtggtggtggtcatcaaaatcgtgttggtggatgtagtggtgatggtggaggtagtggtggtaattaaggtggtggaggtagtggtgacggtggatgtagtggtggtaatcaaggtggtggtggtggtggtggtggaggtggtggtggtaatcaagttggtgcttgtggtggtggtattggtgatggtggtggtgacggtggaggttgtggtggtgatgatgctggtggtggtgttggtggaggtagtggtgacggtggaggtagtggtggtaatgaaggtggtggtggtggtggtggtggaggtggtggtggtaatgaagttggtgcttgtggtggtggtattggtgatggtggtggtgacggtggaggttgtggtggtgatggtggtggtagtggtggtaatgaaggtgctggtggtgatgatggaggtggtggtgataatggtgatggtggtagtgatggtggtgatggtggaggtcgttggttgtggtattggtggaggtagtggtggtaacaaaggtggtggtggtggtgacggtggaggtggtggtggtgatgatgctggtggtggtgttggtggaggtagtggtgacggtggaggtagtggtggtagtgaaggtggtggtggtgacggtggaggtgatggtggtgatgatggtggtggtgttggtggaggtagtggtgatggtggaggcagtggtggtaatgaaggtgatggtggaggtggtggtgataatgatggtggtgatagcggtagtgatgaagttggtgatggtggtgatgatggagacagtggtggtggaagtagcgaagggccctatggtagagagaattttggattcagggtggtgatgggagggtttattaagaaaacatcaggaaacagagagggtatttctggtatctctgaaatagtaataataatttcctaggtctgtaacaatgcaaaagtcagaactggttgaaatgtaaaattcaggcaaaaggaataatgaagctttcaaccatgatacaactgagaagatttcagcatccacatagaaagaaaagcagggcaatgcaccctccaagcttaggaaggaggcagccagagaactcctggctcctttgtggggtgagagagctgccctaaggaactccaggcccaaagagagagcaagtgggattagctgcttattgtgtaaacttagaaagggaaaacagaattaaagcttcactgagaagatgaacctgccgatgaggtgtgcagagaactttggctgcacaagttaagaggaagaggctgagtctcagctcagagagtgctggtaatgccaagcacagcagagctgccagagggatctacttggaatctggggaggccctggggagactaactggtacaatttaaagagatgcaaagcaaatgatatgcggggcaatcatgtgaaaagcctgctgccttacaggatggactccagctgctcagtgggacgggctgttgggggctgggttttggtagggcaagagggccccggatggagtgatggacactctaactcactactccgccgtccaatacagtccagattgttcaacaactctgagaataaatggtcttttttaaaaaattggtgtcaaacctactgtactgggttgatgtgaaattgaaattgaaataagttgtatataaaatgtctggcacatagtagtgatcaataaatattaatcccttccccagaccaatgctgtatttccatttctggggcacatgccacattgtctaaatcaatgttttattcactcatacatcaaagataatggaaacacttatattttagaaagaacttactgtacattttatattctttttggtaaattgaataaacactcttcagagatatataaacctagatttcctgatagactttgcattagaacattggtggaagagaa

SEQ ID NO: 464721 - DNA, 3670 bp, Homo sapiens
ggggcgcacccgccgattgtggccatggcggccgcagtctctagtgtggtgagacgagtggaagagctcggggatctggctcaggcccacatacagcaacttagcgaagctgccggtgaagatgatcactttttaattcgggcctctgcagcattagaaaaattgaaactcctgtgtggagaagagaaagaatgttcaaatccatcaaatcttctagaactttacacacaggctattttggacatgacatattttgaggagaacaagctagtagatgaagattttcctgaagactcttcttcacagaaagtaaaagagctgattagttttctttcagaaccagaaattttagtaaaggaaaataatatgcatccaaaacactgcaatttgcttggggatgagctactggaatgtctctcttggagacgaggagccctgctgtatatgtattgtcattctcttaccaaaagaagagagtggctcttaagaaaatccagtttgcttaaaaaggtaagaagacattccttacacatttttcattgttgacatttagaggtttcaaaaagctgtctttgttgtactactaagagtagtggatcaaagggtctgagtttgtattctgtgtcttttatttactagctgggtaatcataaataaattgggcttgttgtgaagactaaatcagataacatgtgaaagcactttgtaatctgcgaagttctttttttaaggatttgtattgttttaaatataagataaactatattaatttctaaacttttaaaaaatttttgtcctgaaagaaacacttgactgtgagcctgtcagcagatcacttctaaggaactcacatgaccctgcttctagaaaattgtggccctctgattcacttgaccattatgactgaatcattaaatccaaaatatgagtcttggtattgtatcactaaggattctaacttgggttaaatgtacacacaatttaggtgggcttgaaatgcgaggccacacttgcagatataaaagtttgatcataatatttctaaattataaccacatacatgtttttaatacattgttgttgagcacatctttattatctttattcttttcttcctctgataacatctttaacaagtatattactgaaatgtgtttctggttaatgtcttctttttttttagtactcttttttactactagagcatttcaaggggtatatttatattagcagagtcttgggatggtgggtctttataccattgaaatagaatagctgtaagctatgcctatatattaaccaattttctcttgagtaaagaatggaaaatattagtatttgaagtttatatatctctgcatataatactttcaattctttggctctgacttttatttagtaccttcttgatggaatcagttacttgctacagatgctaaattatcgatgtcctatccagttaaatgaaggagtttctttccaagatctagacacagctaaattactgagtgcaggtaatgtgatctctcattaaattttctaagtgttttaaagcttcttaagattttaggaagtttgttagatttcactctgatttaaataaatgtcaagattatttttaaatctcactaccttgaagtttgccatgcttcagaaattaaagtcaagttacttcactgctttgaatacatactatggatataaatgtaggcaaaatgaaagattatgactaatattcagattccattttcaataaggcattttataaaaatttaaaaattatttttctattttgtttaaaagacaatgcatggcttttcaagtgagtaatgaagataaaaaccaagctaggttagtctaccattagttcatatgtttttgtagcacatcttttcataacatactgaaattttaatgttttttgcctttaataatagggagcttatattctagtggaggaagttagacaagcattttaagtaataaatgtatagagagtgtcaagtgatgagtaccatgaagaagaataaatgagggtaaggggctagtgtgatagggagaggggtgggatgccatcatatttaggggtggttgggaactgtctactgctttagcatttgtgtcttcaaatttctctcctttggttatataccttgcttatttaatcttcctgtgctgccttatcttatttttaaggcagtaatagtacctacctcaaggatattgaagataaataagttaatattcagagtgctttagttcagtgtgtagtatataagagcacaagagaattagctatttctagactgtttcccttaatgtctagttctgtatataggcatacctcatttagcatgctgactcattagccagacaattgaatgacaaacttgttggccaggaaagcactgccttttccttagttcaagtcatgccggtctttctaggtgggaagcagacttcagagaagaaatcaggacttggataggcatctcaaatgttttttgtggatatgactggaagaaaacatccaattaattttcaaaacattttcagccctccctcaaaatatatataaaacccactgtattgagatgtactagtcatctaaatatgttatacatatcctatttaaaactggattttttaatcagcctgattgccttggcttctgataccttttggtctaattcttaactcacaagtcagaagcattcaatgaaatactggttatttaaatttaaatactatacttaaaaataggttattctaaatccttgtatagccacatgattgagtagtatgtacctgtaaaaatccatgaggtatatttctgtttaacgctacagagtggtcttattaagtaaaaacaaaatggagaaggtatatatatatatgtgtgtgtgtgtgtgtgtgtatgtatcatatttaagaaagggaatataaaagtgcgtgtgtgtgtgtagttaaaaaaaagaaacaatggacccataaccaaaactttaaaaaatggttacttatggtggaggcaggaggagaggaaccagatggaaaggaccaggatggaagctagatttctcagaatatatcttgaattttcaacatttgactttggtacatatgttattctaaaacgagatttaagcaaagttaagaaaagccctacaagtccaaagcaaaatgaaacagacgacctgcattgcatatcaagttgatggcttgaatacacaggtatgtttcagttatctttaaagcatagtaatttgtatgtccattcttaatgggatatatccaagggcaaaaagaaatgtgaagaaatcttaaactcttcagtaattaaattgttaatcataactatgttaatataattagaaatgaggatttttagtgtatgagaaaagatacatacaaaatcaaagagtaaaaacaatctgtaatcctaaatttgaatgggaaataacacgaagttatgttttctctatataaaagacactagaaaggcctggaaaccatgttcaaataccattcccgtcaaaatgagccagagttttctggaaatatagctaattctggcttgagcaggacaatcaaatgactgacggaaaatttttctttaattcagctaataaaaggaattatagaactagaatactaacattttataacttgt

SEQ ID NO: 464722 - DNA, 676 bp, Homo sapiens
ggggcgcacccgccgattgtggccatggcggccgcagtctctagtgtggtgagacgagtggaagagctcggggatctggctcaggcccacatacagcaacttagcgaagctgccggtgaagatgatcactttttaattcgggcctctgcagcattagaaaaattgaaactcctgtgtggagaagagaaagaatgttcaaatccatcaaatcttctagaactttacacacaggctattttggacatgacatattttgaggagaacaagctagtagatgaagattttcctgaagactcttcttcacagaaagtaaaagagctgattagttttctttcagaaccagaaattttagtaaaggaaaataatatgcatccaaaacactgcaatttgcttggggatgagctactggaatgtctctcttggagacgaggagccctgctgtatatgtattgtcattctcttaccaaaagaagagagtggctcttaagaaaatccagtttgcttaaaaagtaccttcttgatggaatcagttacttgctacagatgctaaattatcgatgtcctatccagttaaatgaaggagtttctttccaagatctagacacagctaaattactgagtgcaggaatatttagtgacattcatctgctggctatgatgtacagtggagaaatgt

SEQ ID NO: 464723 - DNA, 1430 bp, Homo sapiens
  misc_feature (1)..(2): n is a, c, g, or t
  misc_feature (6)..(6): n is a, c, g, or t
  misc_feature (8)..(9): n is a, c, g, or t
  misc_feature (12)..(12): n is a, c, g, or t
  misc_feature (14)..(14): n is a, c, g, or t
nnctananntcntnaggccggaatgggtagccacagcaagttctccattgctactgctgctgctgctggagaaggctacaacaatcaatggatactgaaaccatcaggagaaaggttgatggagaacttaaaagtggaaggctcaagctgccaccacctgaatccactgatcaatgctgccatctctaaaagtgactcaagacattgcatgcctcctgctataatgcaatgtgagccatatcctaaaggcagatatgctaaagacaagtctggtttcttcaacgacttaatgacaaagaaatggaggggagtaaaggagcagtccactttcttcagatgttctgtgggtcctctctggatttctggtttgttctcgcagtcgttctggagcaaaattcatgatgagagcctctgcatgctgctctgagtattatattataggtggtacaagtgaatagtaacaatagaggattcattgagtctttagtctgtgttggctacaattctaagctgtttacatatattaactcatttaatccttataacagctctctgagtcaatactgttattgggtccatttttacagatgagtaaactgagacagtagccaacactatactaattactacctcctaatataccctatctcctcactcactgcccctaaaaggaatactcgaactgaatctgagatcctataaattatccctcttcctctctctagcttgcctccctctacacccacataacaagcaatcttctaaaataaataaagaacaacaggatgatagctcttagggtcagcctaataagaaacctcattatttctggtttagaacatttcaaagcaacacccaggaaccttcagaatggtaaaaaaacattgatgcttagctatgaggcatgaggcaggaggagtaatacaaagtggacctttgccccaggatgatgactgaggtatgactagaaggttcttcatcctctcaaagagcaaacttttgtggcagtaacacaaccaggcaagatgcgagaagcagatcaaagaaactaaaaacagagaaagaaatggtgtatcatttcactgtgtaccctgcagggaaataaaggttctgccctacctaccaagatcatattgccgtagcatcaaaaagccccatacaaaataaaagctttcaaaacacagcatggtattaaaaggacatctgtattttaaaagtctcgtttattttgtttactgctgaatctccattgccagacactgccaggcacacagtaggtgcctgtgtactttttatatttacattgtaagtactttacaataagtccattgtaaagtaagtatatttattcattaagtattaaatataagtacttacttatatttaatggactatttaatgaatgaataatattggcacattgcgattcc

SEQ ID NO: 464724 - DNA, 1708 bp, Homo sapiens
  misc_feature (1)..(2): n is a, c, g, or t
  misc_feature (6)..(6): n is a, c, g, or t
  misc_feature (8)..(9): n is a, c, g, or t
  misc_feature (12)..(12): n is a, c, g, or t
  misc_feature (14)..(14): n is a, c, g, or t
nnctananntcntnaggccggaatgggtagccacagcaagttctccattgctactgctgctgctgctggagaaggctacaacaatcaatggatactgaaaccatcaggagaaaggttgatggagaacttaaaagtggaaggctcaagctgccaccacctgaatccactgatcaatgctgccatctctaaaagtgactcaagacattgcatgcctcctgctataatgcaatgtgagccatatcctaaaggcagatatgctaaagacaagtctggtttcttcaacgacttaatgacaaagaaatggaggggagtaaaggagcagtccactttcttcagatgttctgtgggtcctctctggatttctggtttgttctcgcagtcgttctggagcaaaattcatgatgagagcctctgcatgctgctctgagtattatattataggtggtacaagtgaatagtaacaatagaggattcattgagtctttagtctgtgttggctacaattctaagctgtttacatatattaactcatttaatccttataacagctctctgagtcaatactgttattgggtccatttttacagatgagtaaactgagacagtagccaacactatactaattactacctcctaatataccctatctcctcactcactgcccctaaaaggaatactcgaactgaatctgagatcctataaattatccctcttcctctctctagcttgcctccctctacacccacataacaagcaatcttctaaaataaataaagaacaacaggatgatagctcttagggtcagcctaataagaaacctcattatttctggtttagaacatttcaaagcaacacccaggaaccttcagaatggtaaaaaaacattgatgcttagctatgaggcatgaggcaggaggagtaatacaaagtggacctttgccccaggatgatgactgaggtatgactagaaggttcttcatcctctcaaagagcaaacttttgtggcagtaacacaaccaggcaagatgcgagaagcagatcaaagaaactaaaaacagagtaagtggttaaattatttatgatgatgctgcagctgtattgatcagaggcagatttctctcttaaccctactttccttgtacctatagaagttgtcatcgcccaaagaatttttgacctaatgtgaaagtgtgggggttgatggagagagaagtggggggagggagtgggtgaatagctagtcaggaccttagttaagagaacactggttatccaatatggttctaccatatctaatgacaaactaactgatgatctccacatatctcatttcctaggaaagaaatggtgtatcatttcactgtgtaccctgcagggaaataaaggttctgccctacctaccaagatcatattgccgtagcatcaaaaagccccatacaaaataaaagctttcaaaacacagcatggtattaaaaggacatctgtattttaaaagtctcgtttattttgtttactgctgaatctccattgccagacactgccaggcacacagtaggtgcctgtgtactttttatatttacattgtaagtactttacaataagtccattgtaaagtaagtatatttattcattaagtattaaatataagtacttacttatatttaatggactatttaatgaatgaataatattggcacattgcgattcc

SEQ ID NO: 464725 - DNA, 747 bp, Homo sapiens
ctgactctaagcacctctgattagatgtcattctatgtctgggatgatctcaggactatggtattgtcctcttgtgctatcaattttaactcacaaatggatgtcgatgtcatttattctcttattctacagaccttcattggctacatgggtagtatgggcaagagataggtggtcctgacggaggagtgggaagagccagtgctctggagtgggattactttctggctgcctgctcaggaaagttgtttcaccattctcaacctcagtttccacatctgtaatatatggaaattaatttctacctcataggattgttgtaagtattaaatgagatattattgtaatgcttaattaaatgagataatatatttaaaaatataattcccctagatataatacatatgtatacataatatatacatataatacatatgtatacataacatatacgtataatacgtatgtatacataatctatgcatataatacatatgtatacataatctgtgcgtatataatacatatgtatacataatctgtgcgtatataatacatatgtatacataagctgtgcatatataatacatatgtatacataagctgtgcgtatataatacatatgtatacataagctgtgcgtatagaatacatatgtatacataagctgtgcgtatagaatacatatgtatacataatctgtgcgtatagaatacatatgtatacataatctgtgcgtatagaata

SEQ ID NO: 464726 - DNA, 1546 bp, Homo sapiens
  misc_feature (2)..(2): n is a, c, g, or t
  misc_feature (5)..(5): n is a, c, g, or t
  misc_feature (7)..(8): n is a, c, g, or t
  misc_feature (12)..(14): n is a, c, g, or t
tnctncnntccnnngagaggggcagggagaggagaaatggtgcaagattccaacagctctctggagacattgtctctctacctcttccacctctccagcatcaaaggctggtggtggccaccgactgtcctgggtaatcctggtggacagcagagggctgcggtccaacaagaaattctatggaacccctgtacagaggagagtgctagggagcaggagtttcagagtgacccgctcaaggccatcagtggaagagccaggcgtggaactctggtttcccatcttgagggccttgagcgtccctttgcaccagaattttccaaagtgggatccacactgtgccctcggggcaggtgtaccgggggaactgactcagctgcaggaggacagcttcaattccctatgagttcatctcggacccaaccaatcagagctcttgactcactggcttccccctacccaccaagttgtccttaaaaactttgatccccgaatgcttggggaaaccaatctgagtaataataaaactcaagtcacctgcacagctggctctgtgtgaattactctctctattgcaattcccctgtcttgataaaatggctctatctaggcagctggcaaggtgaatccattgggtggttacaatacctcccttagtagactaaagaacaacttggataaaaccagcaagaaatggattatatcgagggaaattgtcatgcccatccaagaccatgataaggaatgaggaagtaacataatggaaggattctgtctcttctcattgggactgactctaagcacctctgattagatgtcattctatgtctgggatgatctcaggactatggtattgtcctcttgtgctatcaattttaactcacaaatggatgtcgatgtcatttattctcttattctacagaccttcattggctacatgggtagtatgggcaagagataggtggtcctgacggaggagtgggaagagccagtgctctggagtgggattactttctggctgcctgctcaggaaagttgtttcaccattctcaacctcagtttccacatctgtaatatatggaaattaatttctacctcataggattgttacctaagtgagaagatgcgctcctgttttcaagcctgaatgttgcattttccaagaccactgtggcctgccacactccccatcctgtgtccatacaaacctgagaccttagagggcacacccacaagtggctgcacattgagaccagcagaccagcagaccagcagactagaagaccagcagaccagcagaccagcagactagcagaccagcagaccagtgatggtggaacaatgcagcagaaaaagagagaaaaggagagacgtctggacaccgaggggagttcagcctgaggtggttggagaagagtccgctcactgggcccaactccagaggaaaccacattcccactccatccccctttctggctccccatccatcttgctgagagccacctccatcactcaataaaaccttgctctcatccttcaagcccgc

SEQ ID NO: 464727 - DNA, 1720 bp, Homo sapiens
gaaatgtgctgatcttgatggatcaaagtgcctgggactccaacgccactctgaggcagatggccatccgagggctcggcaacacagcatccggggctcctcacaaggtgaagaaacataagcagttaatgctagaatctatcatcagaggcctgtatcacctagctcgcactgaagtcgtctgtgaaagcttgaaggctctaaaaaaaatcctggagctgctgacagaccgagacgtgagcttctacttcaaggaaatagtgctgcaaacaaggaccttctttgaagatgcttgccgtgatgtcttgatggtctgcattccctttttgggcctccaggagctctatggggtattagaccgtctccttgatcaggatctaccaagggccagggatttctacaggcaattctgtgtgaaactggccaagaaaaaccaggaaattctgtggatcctccacacacactccttcaccttcttcaccagcacctgggaggtgatcaggagtgcagctgtcaaactcacagaatctccttggtggcttccattagcaaaaagcaaatcccacaagttcacttcagggataacctgtgatttggatcgtgacagccacatggctttgcctaggttagccctctgtcttgagaaacgcttctctctcctgctgccttgtgaagaaggacgtttttgcttcccctcccgtggtaattgtaagtttcctgaggccttttcagccatgcagaactcacttctttctccggctgccatgtgaagaagaatgtgttttcttccccttccaccacgattgatggagattttgtaatgttcatggactgcctagtggctaagcactgctttgaagaactctgaatcatattattttgctactcagaactctgccctttaacccaacagtggaagccagtgttctgctggtaaatcaggcctgtttagtttggctgaccctgccatggaggcagttttaccagaaaaaaagaagaacaaagatcacagacaggaagaaacaaataggcttccagtgaaagaagccagagaaattgctcaactggagttgtcccagttactgccactgtttcaaaggataaagtacagaaagaggcacttctgaagcactcaccaggctctaaaattagagcaaagttttctaatggtttttactcttacttgagttagtctccaaccccaccatcatccttcagatttcctgagtatagaaatagagaatgcgtagtcaattagaagggctagtaacctgtgagctcatcaggagcctggcagagaaaaactttctgataacagttttatgtagctgcagcctgggaattatcatttcttcagatttctctttcttatgcattgctggtatcccttaaaccatgacaagcagaaaatgtgacagagtcgaggaacatgagggagggacagtggaattcattacaagaatgtatgtgtgtgtgtgtttgtgtgtgtgtgtacatgtgtgtgtctgtgtgtgtaaaaaatcaccaagtcatgacctgaaaaaaggacacttgctttctacctctactttgtcagactttctttatccaacaaaaacatccttacttatttgtattccttctggatgaactgtcctggattttatttattgagttatgtggttatcctaaaggcaagataaatttggggaatataactttccaaatatatgtgactcat

SEQ ID NO: 464728 - DNA, 2321 bp, Homo sapiens
  misc_feature (2318)..(2318): n is a, c, g, or t
ccacagaaaccacaggtaaccagacgcctgcacgtcaggccaccgacgccttggtctacacagcgcagcctccagtgagcccgcggcatgccgcgcggcctccccacacacgatggcgatgtcgcaaccacagtagaaagagtggcgctctctactgtcccggaattcttgaggccggaagaataacagggcaaaggtcacgtagacggcgcgccccgcccccgtacgcctaagttctcgcgcgactcccacttccgcccttttggctctctgaccagcaccatggcggttggcaagaacaagcgccttacgaaaggcggcaaaaagggagccaagaagaaagtggttgatccattttctaagaaagattggtatgatgtgaaagcacctgctatgttcaatataagaaatattggaaagacgctcgtcaccaggacccaaggaaccaaaattgcatctgatggtctcaagggtcgtgtgtttgaagtgagtcttgctgatttgcagaatgatgaagttgcatttagaaaattcaagctgattactgaagatgttcagggtaaaaactgcctgactaacttccatggcatggatcttacccgtgacaaaatgtgttccatggtcaaaaaatggcagacaatgattgaagctcacgttgatgtcaagactaccgatggttacttgcttcgtctgttctgtgttggttttactaaaaaacgcaacaatcagatacggaagacctcttatgctcagcaccaacaggtccgccaaatccggaagaagatgatggaaatcatgacccgagaggtgcagacaaatgacttgaaagaagtggtcaataaattgattccagacagcattggaaaagacatagaaaaggcttgccaatctatttatcctctccatgatgtcttcgttagaaaagtaaaaatgctgaagaagcccaagtttgaatggagcttcaaaggcaagggtatacaactaagctttctggaatggctgtgtatggatatcactggcaatgctgctcatcaacccagcctagcaggtgaagggcaagaggaacaggctagacagggttgccaacaagtggtccatacaattcagaccataccactggggtaggtatctggtgtcacaccccagttaccctcccctcagccccaggcaaccagtagtctactttctgtctctatggatttatctattctggacttttacacaaataacatcatataatctgtcaactctgaagacaactctgtgggcagttatctcacacattaaaaaaataaagtttagagaagttaaataaccaccgaagaaggtggaaggggaaccaaattccacttccctgaaacccaggtctggggtctcaaccatgtaccaggcaacaaccttccacttttcccatgatctgtctgattcaaccacaactggtcatgttcattcaatattttctgtttgccaagttagggcaaagtacaacatattcgtagagatatttaccttaaaactaggctttcaaataggtaagttttatttaaaaaaaaaatgtaacaatagccatgaacccagaagcataaaggaggattcatttcattatcaccaatagctgcccatcagaggccaactctctgcaagtctatagtaaaagatgagaaggtggtatttaaggtggaaagaactttgcactgttataaaagactaacttttggctgggcatggtgacccatacctgtaatctgaacactttgggaggcccatgcaggcagatggcttagcccaggagtttcagaccagccctggcaacatagtgagaccctgtctctacaaaaaattttaaaaattgccaggcatggtggtgcacgcctgtagtcccagctactcaggaggctgaggtgggaggattgcttgagccgggaaggtcaaggcttgcagtgaagaaaacaaaacacagggtagtcactctgtatcgaagtgattagtatggcagtggcaagtctcttagtagtaatttattctaaaagtagaataaatgctactgtaatttttactctggttaaaataaatgtgctaataaaaacctgaagatgagatataattaatagttccatgaaatgtgctgctatgtgtgatatgagggctgtaacaatattaattccttacgtttggtctgcttctaagatgttcatcaagtggagtgataatcttcatttgagacaggtgaactctgccagtgtcttctcccttttggcactccaagtaattattttccgtctgcttcagcatcacaagtacatccccacgctgcaagntaa

SEQ ID NO: 464729 - DNA, 1488 bp, Homo sapiens
tttcagaggcgtattgctacatttggggcaatgcgtacatatgtggtttcgttagctccagtgggggctaatcctctgacagagccacctctcacacgaaacactgaatggaggcgatcccgagatggatggagcagcagtagcgcaggttgctgcagctgtgctgccagagattgtaattcaggaaccaatctcaagctgagcagaggaaaaaatgagatgcttcatgaaaatggccaaatgtcatcaccagctattttgtgagaagagctatgttaggagccatccacatgtaaaatggactttcaccaaattccatccatctgccggtcatggaagctcacaacatgtatgtctcctgagggagccttttcgttttgtgctttttctggcactaagaaatacagacacttgtgatttactactgggcacttataggaatggagtcaactatttcctaagaaactcaaagactgaaatgagaaattcagaaaataaaaatattttctgtgttagaaaactatataccagaaagcctgaaaagtgaggcaaagggcacagaaattctggttaataagatgttgtagattagtgagaacttgaacatgtttttgcttctagtatattttttggaatttctaaactatattagctccctttcttaccttaggaattacagtattgtgatcatgtgagaagatagttctaaatattaataaatatttttaacttcatcaaatacgtctttgaagatttcaagggtatgactcgcggatggagcaatggtgagagcacacctgaagaagggaggagaagagattttttttcctgatgcagatagcccctactgctgtgtcattctcctgctggctagggagaacaacaaagaggagaccaaggatggaaggtctgctactgatcttcagagccctggtccagattgtaacaaggggataaagacctcaggaggtggaaaaggctacaaatatgtggaagacctggccatcaaggagcttacagatactcatggatctacatgtggggaggaaacaagcaagctacttctggaaccatttggcggcttggcagcttgctacagagaagctgaaggaggaccaccctggaaaaggacctgctttacccaagtcttctctgccacagtgaggaagccgcccccaccccaccaaccacaggtgctctcccaacccaaatcaaaaagccactggtactatcactaacctctgtcatcctgccccaaccaaaaagatatcacttgcctgccggctttgtcacgtaacttatttctgcattcaggactcacacaggtctacctgcaattccctttcatgtttagggcctgctgaggactgagcagcgtgaaaaaattgactcagtcatttttcaacattattaacaccaatttctaatttgtaaataatactgttagaagtgctagaatgtacattgagtcctagtgaataaattaca

SEQ ID NO: 464730 - DNA, 3593 bp, Homo sapiens
cttaagtagaatttatgattgcgggaaagatgggagcagtgaagctggagagtacagtagaaatcatctcatgtatggtactgaatgctagctgttttgtgttttcaactacagaaatggacagccatggaagagtcttaagcaatagagtgacactgtgtagatttaagttctgtgagatactgactatagtgaggaatggattgagttggggcaatattggtgtcacaggaggtagtatgatcacatctctggaaggtctgggtactgataatgtttttagcttacatgaagataaccattaccggataagcaagagcctggtaaaatctgcggaaggaagtactgtacccctgaccagggtgaagtgtctggtctccatgacaaccccacatgacatcagacttcatgggtcatcagttactccagcttttgttgaatttgacacatcacttgaaggtttggcccctcataatgctcctacaaataataccgtcacaacaggtcttattgatggggctgtggtcagtggcattggttctggtgaaagattcttccctcctccctccggcttaagttactctagctggttttgtattgaacattttagttctcctccaaataaccaccctgtcagacttcttactgttgtgcgccgagcaaattcttctgagcaacattacgtgtgccttgcaatagttctatcagcaaaagaccgatctctgattgtttccaccaaagaggaactcctccaaaattatgttgatgattttagtgaagagtcctcattttatgaaattctcccatgctgtgctcgctttcgatgtggagagcttatcattgagggacagtggcatcatttggtcctggtaatgagcaaaggcatgttgaaaaacagtactgcagccctttatattgatggacagcttgttaacactgtaaagcttcattatgtccacagtactccagggggttcaggttcggcaaatccaccagtggtgagcacggtctatgcctacattggtactccacctgcccaacgccaaattgcctcattggtttggcgcctgggacccacacattttctagaagaagttttaccttcttcaaatgttactaccatttatgaacttggaccaaattatgttggaagctttcaggctgtatgtatgccatgtaaagatgcaaaatccgaaggggtggtgccatcccctgtgtcattagtaccagaggagaaagtgtcatttggcctctatgcactctctgtgtcgtctctaacagtggcaagaatccggaaagtgtataacaaattggatagcaaagccattgctaagcagttaggcatttcctcacatgagaatgccactcctgtgaagttgatacacaattcagcaggacatcttaatggatctgcacggacaattggggccgctctgattggatacttgggagtaagaacatttgtccctaagcctgttgccactactttgcagtacgttggtggagctgcagccatcctgggcctggtggccatggcctctgatgtggaagggttatatgcagcagtcaaggccctggtttgtgtggtcaagagtaacccactagccagcaaagaaatggaaagaatcaagggctaccagaattagataaaaaatcacttgtaagaagaggaacaaatacttgaagcaagattaaaacctatcatacacgaagtacaaatgccttctgcaagtttaaccattagtttattgataatgaatatactgtttactgtgttgtatagatttaattatagtatttcaataagtgttttcttttgcaaaactttcaaaatgattattgcagcgttgtttatcatgaaaaaatagaacaatctagatataccagtaataagagaatgactaattatactctaagcattccatagactatcattcaaccttttaaaattgtaattattaagaccgtgttgcaaaaaaaaatactttataacacaaaaagtgtatatttaagtagttaccatcatgtgcatacaattttatattcttgctgtgatgttttcattatacatacaattttatgcacgcgttggtaactatttacatatttataatggaattgaaagggtaaatgtaaaagtggatattttaatagaatgttaagatccctttgtttttcagattttacctaatgttatattttcataataaaaatttagaaattaacttaataatctcagaaaatcatctacataggattctgtgtgtatgtgtgtgtttgtgtgtgtatgtgtgtgtttgtgtgtgtatgtgtgtgtttgtgtgtgtgtaatgaatatatatgatgatttatcaacaggcatttggtattactttcttgtagttgctggcaatgttgcttaagaagaaacgttcccttcttaacagccacatcctccatctaactttttctttggtgggaactgttgatagtggacatgagacctccattattccaaattcaactgctttccaggacctcctctgtgattttgaagtctggctccatgcaccatatgaacttcatctttccttatttgaacactttattgaactgctcacagagtccagtgaagcctcaaagaatgccaaattaatgagagaattccagttaatcccaaagctgctcctgactcttcgagatatgtctttatcccagcctactattgctgctattagtaatgtcctgagcttcttactgcaaggttttcctagcagcaatgatctgctcagtaaactttccaagaactatgttgtaaattttcttttagcttatctactagggagatttaatgtatttatttttattttaggaactgaagaggagtttggaggtcttgtatcagctaatcttatacttttgaggaacagacttctggatatcttgctaaaactaatttatacatctaaagaaaagacaagcattaatttgcaagcttgtgaagaactggtgaagacactgggttttgactggatcatgatgtttatggaggaacacttacattccaccacagttacagcagccatgaggattcttgttgtcctactaagtaatcagtctattctcatcaagtttaaagaaggactcagtggtggaggatggcttgaacagacagattctgtcttaactaataagattggaactgtattaggtatgggacttttctagtcagctgcttgaaaatgagctggtgtgttttgttttattttaaattttatgtaaacttatcctctgcggtttgatcaccattaaggagatattaattttaattaatgatagaaggaagagcttacaagatttcaaattagtccttttaaatggcaaatcaaactgaagacagagataacatactaagatttgaaaactcagggaattcctcaagatctttttgtagtataggccttactgatctgacttgcaatgtaatcaaaatctattttcctatttaatgtataaaataaccacttgatgtcttttggtttctttttcactttttaaattttttttattttttagagattgggtcttgttatgtggtccaggctagacttaag

SEQ ID NO: 464731 - DNA, 1192 bp, Homo sapiens
gtggatccccgctgcgtttcggcatccacatcctccatctaactttttctttggtgggaactgttgatagtggacatgagacctccattattccaaattcaactgctttccaggacctcctctgtgattttgaagtctggctccatgcaccatatgaacttcatctttccttatttgaacactttattgaactgctcacagagtccagtgaagcctcaaagaatgccaaattaatgagagaattccagttaatcccaaagctgctcctgactcttcgagatatgtctttatcccagcctactattgctgctattagtaatgtcctgagcttcttactgcaaggttttcctagcagcaatgatctgctcagtaaactttccaagaactatgttgtaaattttcttttagcttatctactagggagatttaatgtatttatttttattttaggaactgaagaggagtttggaggtcttgtatcagctaatcttatacttttgaggaacagacttctggatatcttgctaaaactaatttatacatctaaagaaaagacaagcattaatttgcaagcttgtgaagaactggtgaagacactgggttttgactggatcatgatgtttatggaggaacacttacattccaccacagttacagcagccatgaggattcttgttgtcctactaagtaatcagtctattctcatcaagtttaaagaaggactcagtggtggaggatggcttgaacagacagattctgtcttaactaataagattggaactgtattaggtatgggacttttctagtcagctgcttgaaaatgagctggtgtgttttgttttattttaaattttatgtaaacttatcctctgcggtttgatcaccattaaggagatattaattttaattaatgatagaaggaagagcttacaagatttcaaattagtccttttaaatggcaaatcaaactgaagacagagataacatactaagatttgaaaactcagggaattcctcaagatctttttgtagtataggccttactgatctgacttgcaatgtaatcaaaatctattttcctatttaatgtataaaataaccacttgatgtcttttggtttctttttcactttttaaattttttttattttttagagattgggtcttgttatgtggtccaggctagacttaag

SEQ ID NO: 464732 - DNA, 3162 bp, Homo sapiens
acccttcgctgaaaaacttcctgaagctccactgttttctgttctcctattctgaggaatacattgactgattaatctcttttgaaagagcatggcacagaataagtactatgacttgttaaatcagagaggacgagtccccacatccagagtttctaatttagtaggtctggagtggagccacaacatgtgcatttctgacaagttccaaagtgatgctgatactatgggttgggaaccatactttggagaaccactgctaaaaggacatttggtttttatcttccactggctggcacaagggacatgctgtgtgtcactcattaaatgccactgtggtgagtgtccccttttgaacacagctgtgagcctccacactgtggagagaagccagacacaggctttacatgcacctcgagattcctggagaacatatgccatgtgtttgtcatcttttcaggaaagcacttctgaagagccctttaatgagtttcctagagaaattctgaaggaatctacagtagacattcttactgttaataggctgcaataatcctttggttttcaatggtatattgctctcagttcattgtgcagatttcagcaaaataaaagtaaaagaatttccaaaacagaggaatcgtgacagggagaacaagaaatgcaatgcatcaaagcaacacaagatgtcacttttacacaggcctgcatttgcagatttttgtagctgtgtaatcaaaggtattctacttgtctgtgtttattctttgtatatttttaaatgtatattcatctggaatacatctgtgaagcacaagaaataacatttagtcttttctcctattaaattgccttaataaagaataattgattaaaatgatctgaagcctcattctgtgctagtcaatttgccaggagttctacatgcattacactacttaattgttacaacaacactgtgaggtagtcagtcaattctcacttttttatgaggtcactgagacttatgaaggctatggaacttcctcaaggtcatgcagaatcagaatgcagacatgtttgattgcaaagctcaagtctatttaaccactatattactctctgtgcacagaacaaaatgtcaataagaaattttacttggttttacctatgttttaaagatctaagcagataattttttcaaaatttatccagattttctgaatcttcttctaaaggaaaaatatcttatgcctgcataaatgaaaggagaccaagattattgacttactcatttagcaaatacatagcgagcccctatcctccactaggcattgtgctaaatactaaggatatagtaatgataagatacataatcctttacctcatcaggctctgctcctagtgggtagacaaaagaaaagcagaaaaagatgacaacacaacgggctgaaatgaccataataccggtatgtgccaggtactgagagaggacgaaggcttcacgaacgtgtttgaaaccaagacttgataggaattttactttaacggaagatagcggtgagggcttgaacactaaggaattaatgagagatcagcccctttagcgactcaaagcatattataactccagctggtcaaaaagagaggaaataaataatataacaggaacaactggaagagcaagtgcagcatcaggttggtgcatttcttctgatcaaaaggtcgaattgcaactggtctttgaagagtgtgctggtgacagtgtgcaacctttgcagtagctcctggactggccctagactgctgtcaaattaaaccagcactgtaaagaagagagcaagttgaatgaagttgaatgaaggggcatcttaattccaatcctggctctaatgctgactgtaagcatgaccccggatgagttattcactctctcagtctcagtctcctcatccacaaagcagggatcacaataaatgaatagcacctttcacagaacccaccatatatactgagtgttcaataaataccattattgggggatattattcaaattcttctttaataaaaggagctttatccttaatgttttgttagagcctatactgtttttgttgaaatgtactgtaatgaatatattataaagagatagacctgtaatttaaccttggaggaaataagttttacgtagtgctaagttgttctacatttcaggttgattgcatatgcaggacaatagagagtaattgctctaatattcatagcttaaggtcacaagtgtagtacaaatttcattttgttttactggtttgttctcaaatactattttaagttcacttatactgaattttcatgtttggatactaggatctaattatttgcagtatagctagcagtattgcatcaaatacaaattattgtgtttttcgccccacataactccatgttctgattaaaattcagctacactaataagatatcatagccaaactagctcacatgctcacaattgtgttttttaaaaaactcagagtaaaaataatatttcggtgaaaggaatgtcattgactttcactgaaatagtagttcagacttttgttgttatatagctgaataatataaccttgaatgtatttaaatgattcaaggctcttaatttttcatccagcagcattttaagcatcacatgataaaatatacattttgggttaactcattaaataatgtttgcataattaaataggtaaattagcatcaatagagttggtgccattcttatgaaaataaaagcacaataaactatacaacaaaaagtatgtttaggcttttaaataatacatgttgaggttactcccctctgcaatcaaatgatatttatgacttacaaatacaaggtaggctctgttttagatcattcctgttcttgactgcctactttctctgagctgcttctctcacagctctaggctctgggctggagggatgtagccataaacaaaatgctggaagtctttgcctttctatagattgtgttttaacagatgaaaatagatgaataaatacattattaacattgcaaatagtggtaaataccatgaaaagaaacagggcaatggggaggaatggggaaacggggagtattctagagactgtggtcaaggaaggtatttcaaaagagataag

SEQ ID NO: 464733 - DNA, 2300 bp, Homo sapiens
cctgtcacggagaagaacatcctgcagaatttcctgtcacgaggaacattccgcaggaggaaatggaggctgaaaggctgcgactcctcgaggaagaggccaagctgaaaaaggtagccagaatgggatttaatgcatcttccatgctccgaaaaagccagctaggtttcctcaacgtcaccagttactcccgtttagccaacgagctgcgtgtgagctgcatggagcggaaaaaggtccaaattcggagcttggatccctcctctttggcgagcgaccgatttaacttcattctggcgagtaccaacagcgaccagctcttcgtagtgaaccaggtcgaagtcgaaggctccaagtacggcatcatcagtctgcgaactctgaagatcccttcgttccacgtgtacgtgctcagaaacctctacgtccccaaccggaaggtgaagtccctgtgctgggcctcgctgaaccagttggactctcacgttctgctgtgcttcgagggaatcacagatgctccaagctgtgcagtgctgctcccagcgtcgcggttcttaagtgttcacacaagagttaaccagcctggcatgctctgcagtttccagatcccagaggcctggtcctgtgcgtggtccctcaacacccgggcatatcactgctttagtgcaggcttgtctcagcaggtcctgttgaccagcgtggcgacgggacaccagcagtcatttgataccagcagtgatgtcttggcccagcagtttgctagtacggctcctttgctgtttaatggctgtcgctccggggagatctttgccattgatctgcgttgtagaaatcgaggcaaggggtggagggccactcgcctgttccatgactcagcagtgacctctgtgcaaatcctccaagaagagcaatgcctgatggcatcagacatgactggaaagatcaagctgtgggatctgagggccactaaatgtgtaaggcagtacgaaggtcacgtgaatgagtccgcctatctgcccctgcatgtgcacgaggaagagggaatcgtggtggcagtgggccaggactgctacacgagaatctggagcctccatgatgcccacctgctcagaaccatcccttccccgtactctgcctccgaggacgacattcccagcgtggccttcgcttctcggctcgggggcatccggggagcagcaccagggctgctcatggctgtccggcaggacctttattgtttccccttcagctaattctgcaggtggcagcgcggccgaatgtggatttgacttaaggaagttaagagtatcttattaccgtttctgtgagagcattttaagagacgtgttgtatgtagatcgcatccatccggctgccagggaggcaaagaaaaaaaaaatcgccaaaacgtgatgacaacaagtatgtctgtgttcaaaattaaatttgtgttcttggaactctaaaactgacattatcttaagttttagcacttggggaagtttcaaagactttccaaaaggataagtatatcatgatatgtaggtataaataccaagacaactgcagagttattttaatccaagtctgttgaggctttattatgtgatacagcattgtgagagttaaggtaacagaaaatgatacactttgttcttcaaacttatttggcaaatcaagggtactggaggtttataacaattagtagtgtctaagtcaagttacaccccaactataccaggaaaaagaaggacaggaaagcacacactgtgaaattttactgtgcaccaacatattttacacatcaggtgggctgttatggaaattaagaactctgcacaaaatgtattttttttaaaagttttatcaagaaaggaacattttcttctaaaaatgattagtacagctaaacaaaataaaaataataatcctatcgcacaaattaaaaataaaacctgagaagttttgatcaggcttgcctaaaacgagttgaaaccaaagccattttaagaatccaaaatatgagattagttttgttcaaaaagaattatccataaaagttaatagatgtttgcatagttaccataaaataagaggtaagcctttatgtatttttacttcataaagttgaatttctattaaaatctattacaagaaagggaaagtaactttccagtaatattcagattttttagtaatattgagcctacatttatgggacatcattttttaatgtttgtccactgaatattttaagttatgtttgtcataggaaattaaatttgcttaccattcttaac

SEQ ID NO: 464734 - DNA, 6644 bp, Homo sapiens
attgatagcggatagggctgtgtggtaaaaccaatcccagttaaaggagatggatctgaaatgaatcacttagcagctgagtctccaggagaggtccaggcaagtgcggcttcaccagcttccaaaggccgacgcagtccttctcctggcaactccccatcaggtcgcacagtgaaatcagaatctccaggagtaaggagaaaaagagtttccccagtgccttttcagagtggcagaatcacaccaccccgaagagccccttcaccagatggcttctcaccatatagccctgaggaaacaaaccgccgtgttaacaaagtgatgcgggccagactgtacttactgcagcagatagggcctaactctttcctgattggaggagacagcccagacaataaataccgggtgtttattgggcctcagaactgcagctgtgcacgtggaacattctgtattcatctgctatttgtgatgctccgggtgtttcaactagaaccttcagacccaatgttatggagaaaaactttaaagaattttgaggttgagagtttgttccagaaatatcacagtaggcgtagctcaaggatcaaagctccatctcgtaacaccatccagaagtttgtttcacgcatgtcaaattctcatacattgtcatcatctagtacttctacatctagttcagaaaacagagctgcacagcagcaaaccgtacagcagcagcctttggctggatcacgaaggaatcaagagagcaattttaaccttactcattatggaactcagcaaatccctcctgcttacaaagatttagctgagccatggattcaggtgtttggaatggaactcgttggctgcttattttctagaaactggaatgtgagagagatggccctcaggcgtctttcccatgatgtcagtggggccctgctgttggcaaatggggagagcactggaaattctgggggcagcagtggaagcagcccgagtgggggagccaccagtgggtcttcccagaccagtatctcaggagatgtggtggaggcatgctgcagcgttctgtcaatggtctgtgctgaccctgtctacaaagtgtacgttgctgctttaaaaacattgagagccatgctggtatatactccttgccacagtttagcggaaagaatcaaacttcagagacttctccagccagttgtagacaccatcctagtcaaatgtgcagatgccaatagccgcacaagtcagctgtccatatcaacactgttggaactgtgcaaaggccaagcaggagagttggcagttggcagagaaatactaaaagctggatccattggtattggtggtgttgattatgtcttaaattgtattcttggaaaccaaactgaatcaaacaattggcaagaacttcttggccgcctttgtcttatagatagactgttgttggaatttcctgctgaattttatcctcatattgtcagtactgatgtttcacaagctgagcctgttgaaatcaggtataagaagctgctgtccctcttaacctttgctttgcagtccattaataattcccactcaatggttggcaaactttccagaaggatctacttgagttctgcaagaatggttactacagtaccccatgtgttttcaaaactgttagaaatgctgagtgtttccagttccactcacttcaccaggatgcgtcgccgtttgatggctattgcagatgaggtggaaattgccgaagccatccagttgggcgtagaagacactttggatggtcaacaggacagcttcttgcaggcatctgttcccaacaactatctggaaaccacagagaacagttcccctgagtgcacaatccatttagagaaaactggaaaaggattatgtgctacaaaattgagtgccagttcagaggacatttctgagagactggccagcatttcagtaggaccttctagttcaacaacaacaacaacaacaacagagcaaccaaagccaatggttcaaacaaaaggcagaccccacagtcagtgtttgaactcctctcctttatctcatcattcccaattaatgtttccagccttgtcaaccccttcttcttctaccccatctgtaccagctggcactgcaacagatgtctctaagcatagacttcagggattcattccctgcagaataccttctgcatctcctcaaacacagcgcaagttttctctacaattccacagaaactgtcctgaaaacaaagactcagataaactttccccagtctttactcagtcaagacccttgccctccagtaacatacacaggccaaagccatctcgacctaccccaggtaatacaagtaaacagggagatccctcaaaaaatagcatgacacttgatctgaacagtagttccaaatgtgatgacagctttggctgtagcagcaatagtagtaatgctgttatacccagtgacgagacagtgttcaccccagtagaggagaaatgcagattagatgtcaatacagagctcaactccagtattgaggaccttcttgaagcatctatgccttcaagtgatacaacagtaacttttaagtcagaagttgctgtcctgtctcctgaaaaggctgaaaatgatgatacctacaaagatgatgtgaatcataatcaaaagtgcaaagagaagatggaagctgaagaagaagaagctttagcaattgccatggcaatgtcagcgtctcaggatgccctccccatagttcctcagctgcaggttgaaaatggagaagatatcatcattattcaacaggatacaccagagactctaccaggacataccaaagcaaaacaaccgtatagagaagacactgaatggctgaaaggtcaacagataggccttggagcattttcttcttgttatcaggctcaagatgtgggaactggaactttaatggctgttaaacaggtgacttatgtcagaaacacatcttctgagcaagaagaagtagtagaagcactaagagaagagataagaatgatgagccatctgaatcatccaaacatcattaggatgttgggagccacgtgtgagaagagcaattacaatctcttcattgaatggatggcagggggatcggtggctcatttgctgagtaaatatggagccttcaaagaatcagtagttattaactacactgaacagttactccgtggcctttcgtatctccatgaaaaccaaatcattcacagagatgtcaaaggtgccaatttgctaattgacagcactggtcagagactaagaattgcagattttggagctgcagccaggttggcatcaaaaggaactggtgcaggagagtttcagggacaattactggggacaattgcatttatggcacctgaggtactaagaggtcaacagtatggaaggagctgtgatgtatggagtgttggctgtgctattatagaaatggcttgtgcaaaaccaccatggaatgcagaaaaacactccaatcatcttgctttgatatttaagattgctagtgcaactactgctccatcgatcccttcacatttgtctcctggtttacgagatgtggctcttcgttgtttagaacttcaacctcaggacagacctccatcaagagagctactgaagcatccagtctttcgtactacatggtagccaattatgcagatcaactacagtagaaacaggatgctcaacaagagaaaaaaaacttgtggggaaccacattgatattctactggccatgatgccactgaacagctatgaacgaggccagtggggaacccttacctaagtatgtgattgacaaatcatgatctgtacctaagctcagtatgcaaaagcccaaactagtgcagaaactgtaaactgtgcctttcaaagaactggccctaggtgaacaggaaaacaatgaagtttgcatgactaaattgcagaagcataattttatttttttggagcactttttcagcaatattagcggctgaggggctcaggatctattttaatatttcaattattcttccatttcatatagtgatcacaagcagggggttctgcaattccgttcaaattttttgtcactggctataaaatcagtatctgcctcttttaggtcagagtatgctatgagtagcaatacatacatatatttttaaaagttgatacttctttatgacccacagttgacctttattttcttaaataccagggcagttgtggctcattgtgcattttactgttggcccattcatttcgtttttggaaattatggttttgtattttcatgtttatttacattcatttttgtttattcagggaaagctgatctttttttcaaaccagaaaaaaaaaatgaactagatatgaagtagagttcattaaatatcttgctattgtcagagtttttaaaatatagacttaattttgtttttttaaattggaatacaataaagtactacctacatttgagtcagtcaccactcttattgtgcaggttaagtacaagttaactaaaaataaactgtcctctctggtgcaactcacaaccaagatcaagattaccttaaaatttatttgaattttttagatgttttggttgtcaaactgtaggaaacttcacaacatttaagtcttactctgtatgtaacaatccatcattcaccttcactactggtaataacatagagctgccattttccttttaccatgcatcatctctttacagtaggcctggcagatcattttttaaaaagattattcaactaccaatcagtaatgtttttaaacagtacatttgctttgaacttggaaaatgtgttcagaaagaaaaatggaattgaatttcatttatacactaattccttggattttgcacagttacctaacggttttagtctggagttaaattcagatgcatggaatcctgaaggaaaatggtagctttttaatctttttgtgtgtgtgtgagtcttttaaatcaagtactgattaactattaagtacaactttgagattttagttttaactcttcagaagccagtgtgaaatagaattggttattctcaaagactcaggataaactaaataagctatatatagagtacatttaaaatgtacaacacaaattggaagtaaaataagttacaagataagtttacagggatatattgcttacaatttttaaaaggcagtttgttttttatgtgaatatgtttcttagtgaaattttacattcctttgttttggaagattggcgatatttgaagagttaaaaatagtacagaaatgtgaagtttggtatctctaaatgtgttgtacttgactttcttttttatttttttttattttttttgactacttagaattttcacaattctaataagattgtttccaagtctctcatgtgcaagctttaaaggatgcactcttgccattttatgtactggaagatcattggtcagatgaatactgtgtctgacaaaaatgtaaactgtataaactgaggaacctcagctaatcagtattactttgtagatcaccatgcccaccacatttcaaactcaaactatctgtagatttcaaaatccattgtgtttgagtttgtttgcagttccctcagcttgctggtaattgtggtgttttgttttttgttttgttttcaatgcaaatgtgatgtaatattcttattttctttggatcaaagctggactggaaattgtatcgtgtaattatttttgtgttcttaatgttatttggtactcaagttgtaaataacgtctactactgtttattccagtttctactacctcaggtgtcctatagatttttcttctaccaaagttcactttcacaatgaaattatatttgctgtgtgactatgattcctaagatttccagggcttaagggctaacttctattagcaccttactgtgtaagcaaatgttacaaaaaaaaaaaaaaaaaaatctctgggttaagaaaatttgggcttaaatgtatcctttgttattttaaatatattgagatattttaattaaaatttttaccccattgaaccgattttatagtatttgtacctattttggtgtttttgtctttataatgaagtaatagaaccaattctattgctccttaattctatttaaatgatattaataattttataaaatgggtgacagtcttcatgtcagaatccagaaaaatgttggggtattgtgctcatagaaatgccaatgattgcatttatgagctgatgtcaatttacttaataagatttctcaacatctatgtagacatactgagaggatgagggttgtaactagggtgaaatggagagaaaggataggaggagaaataaaaagatggggagatattgaaaaatctttggcagagagtggcatgacgatatttgtgcgttagaaagagcacccttgcagtaccttgaagaaagaattacatgggccagtacaaaaggcagagagaaagtcagaaggcaattgcagtatccagaacctaggtgaaggtagcatcatgggaatgaggaggaagagacaaatctgagcgatattaaacagcagaattgaaagattgtagaaatgatcttgggggaagggtatgc

SEQ ID NO: 464735 - DNA, 6878 bp, Homo sapiens
tctggaacatcactggtgatttcatagattaataggcgaggggtgaccaaacctcagtggaccccatggtcctggagcagtatgtggtggtagccaactaccagaagcaggagagttcggagatcagcctcagcgtggggcaggtggtggacatcatcgagaagaatgagtcagtctcatggaggtattggtctctgccccggccggtgggccgccgccggactctgggggacttgtatgccatcagctggcgtcaaggtgcctacctcggagttttcttccccctgccagagcagataacactgggggtgggagctgttctagctctgtgggacaccctgccagagtgcagcgatgagcaacccgccctgccgagcccaggccctccagggctactgtgggagggacgcagctgggggcagctctcagggaggaggcttccttttgtccccacagaggagaagtacacagtcatctacccgtacacagctcgggaccaggatgaaatgaacctggagagaggggctgtggtggaggtcatccagaaaaacctggaaggctggtggaagatcaggtaccagccgctgccccccacggttgctgggtaccagggcaaagaaggctgggcccccgcctcctacctaaagaagaacagtggggagcccttgcccccgaagccaggccctggctcaccctcccacccgggtgcccttgacttggatggtgtttcccggcagcagaacgcggtgggcagggagaaggagctgctcagcagccagagggacgggcggtttgaaggccgcccggtgcccgacggtgacgccaagcagagatcaccaaagatgaggcagagaccccctcctcgccgggacatgaccattcctcgaggcctcaacctgccgaagccgcccatcccgccccaagtggaggaagagtattacaccatcgccgaattccagacaaccatcccagacggcatcagcttccaggcaggcctgaaggtcgaggtgatcgagaaaaacttgagtggctggtggtacattcagattgaagataaggaagggtgggccccggccaccttcattgacaagtacaagaagacgagcaacgcgtcgagacccaactttctggctcccctgccccacgaggtgacccagctccggctgggggaagcagcagcgctggagaacaacacgggcagcgaagccacgggcccctcccggcccctgcctgacgcaccgcatggtgtcatggactcggggttgccatggtctaaagactggaagggcagtaaggatgtcctgaggaaggcatcttcagacatgtctgcgtcagcaggctacgaggagatctcagaccccgacatggaggagaagcccagcctccctccgcggaaagaatccatcatcaagtcggagggggagctgctggagcgggagcgggagcggcagaggacggagcagctccggggccccactcccaagcctccgggcgtgattttgccgatgatgccagccaaacacatccctccagcccgggacagcaggaggccagagcccaaacctgacaaaagcagactgttccagctgaaaaatgacatggggctggagtgtggccacaaggtcttggccaaggaagtgaagaagcccaacctccggcccatctccaaatccaaaactgacctgccagaggagaagccagatgccactccccagaatcccttcttgaagtccagacctcaggttaggccaaaaccagctccttcccccaaaacggagccacctcagggcgaagaccaagtcgacatctgcaacctcaggagtaagctcaggcctgccaagtcccaagacaagtccttgttggatggggagggcccccaggcagtagggggccaagacgtggccttcagccgaagcttcctcccaggagaggggcctggccgcgcccaggacaggacgggcaaacaggatggtctcagcccaaaagagatttcctgcagagcccctccgaggccagccaagaccacagatcctgtgtctaagagcgtgcctgttcctctccaagaggctccccagcagagacctgtggtcccaccccgcagaccacctcccccaaagaaaacctcttcgtcatccaggccgctcccagaggtcagaggtccacagtgtgaaggccacgaaagcagggcagctcccaccccaggccgtgctctcctcgtccctccaaaagccaaaccttttctctccaactctttggggggccaggatgacacgcgaggcaaaggcagcctggggccatgggggaccggcaagattggagaaaacagggagaaagcagctgcagcctctgtccccaatgccgacggcctgaaggactctttgtatgtggccgtggccgactttgaaggagacaaagacaccagcagcttccaggaagggacagtgtttgaagtccgggagaagaacagcagtggctggtggttctgccaggtcctgagcggagccccttcctgggaagggtggattccttccaactatctcagaaagaagccgtagccgactccctttctgcctagagggcccgctggtccttgctggctttacccacgtatttaatacgcctcttaatttatcattctccacgcagcttccaaggcagacagactctggggtactgtgacttcttgcctcccatgggtggagagtgagtttcggacacctcgggcgcccctgggcctgatccctcctatcacagcatcactggaggctcagaacccacagcctttgctttctgtccatgtcagcatccctgccttaagagaactcctcctggccaatggcattgccacccagcagtgggaccaagactctccaagacctccaggactggatcccattgcctggagaaactccagcaagggtctctcatggcttggacatggcacagtaaggggcagccaacccagtccatgatgacttttgctccaacttcttcatgtttctaaaagcccagtggctttattcactcctcctaaattgcctgctaccagaaggaacttcatcctgaagaaatgcattccattaccagttccagggaaagtgtccccttccccaaagcctcaggcccgtgggcctctgaggttccactggatgcggctcccccaggagtgggcctggagatccgctcagccgccctgcctcccaccttctatcttgggaccgtggtcagccctgaagggtggttccagccccgcgtatgctgcgctttgctgctgcaggctccggtccctccagggcttttcaatgagagttcccaccccaacttggagcatttcatttttgcctacctaaagcaagaatctcaaagtttgtttgaataagaggcccattcacaagtcgtgcccttgtgagcacccctttgctgagtgcctcgtgggtgccaaacactgtacttggcgctttgcattcatgctttgaccctcacaacctccctttatagatgaggaaattcacgctccatgtgcccaaggacacaccagccaggaggaagagggaagaggatttgagtccaggcctgcctgacttcagtgcctgtgccctcccctctgtaaaagacaaaccaggcagggaagagatagaagctggctaagtggtggccaagtggcttcattgtgaggggggtgagggggcattcgtggctgctcccacacccaccatccctccagcccacagcagcctataccaaaggctgccccggactcaacagctgcgtctccatgacaggagaatgccagggtcctggtggttgacacagagccctgttccctcttctaagctgttgccccctggggaatagagcttatggagcaacgggagctgaggtggcctcgagggccagcctggagggctctgagcatagcatgcagcggtcccatagggaggcaggtaaccaagggccaggcagagctgcttcctgtgcctctccggcatttgtaatgtttttttcttttttcacgcactgccaaatctgttttctcccttgaagaaacccagggcagatgtggtcgtctgtcaaactgaggtctggagaggcatgactaaatcactgcagaagcaaaatcaggacccagcatttctagctcccagcccagagtaagagagcagagcagaaccccttcccattctacccgaccgaggcagccctgccctgccctgccccgcccctccccaccctgccctgccccagagatctccagttcacagtgttcatcaggcgagatacttttggacccacaaagccagttttttggggggatgctcagtgtctacctgcagtgccaaagttttgcttgaacagccctcttctgccgcgcctcccagctccaccccctatcacgtgggtgctggctgcttctgcgtgaggagcttcctctgatcacctgtagcatctttagtgccttcgtccagtcggcctgcaaatcccatttcccagagaggcttgggcagggcccacttgccacttggccctgtgcccagagcgttgggggcagatggcagccaggggaagaagggaggtggggaagggccgccaccgcttgagggtcccctcccttgagaggaggccccatggcagttttcctgagttcttgatccactttggtttaaacaacttttgtgaagctatgtgagatttgactgcatttcaaaagacaaaacacatgtttttttctgatttgctctttgcctttcagcgacgctttcagatactttgtgagtgtctactctgtgctaggtgctgagtagactgggatgtgtgtggctccatccctggctggaagagctttgagtcctgtctgctgacttcactgaaggagtttctctcttgcttcattccttcctcccgggggtcagctgggtaggagcagacttgccctgccttcctctaggcagaaagttttcctgcaaatgaaagaatctgccattctcttttgctatgatgatgatgattattctgacatgacccgcgggtactgaagccacagtcctctctgttcactgttctctccttgagtcatatctatggcctgaggacgtctgtatccagctccttttcctacaatggtagacacttccccaggcagtgggtgggtcagggtggccagtcactctcctagctgtccttgcctggggacttagatttaccccatccaggactgtggtcgctattctgtgagcgattgatggcgcatatgcagaactcccctggagtcatggctctagaaagtgtccaggcccatcgtgacaatggtgccaagcaccgggctggtgaccagtgcctaaacacacacgctcctttaatccttacggcaagcctgtgaggcggataggaccagccctgatctatagtgagaaaattaaggttcagagggagaaggtccaaatagtggccaagctgggactgagatctcgagtttgggtttgtttggttttgttgttgttgttctttccctcgtgtccatgacttttctctgccattagcagggaagtgtgcggagggcttccagggaatcaagtgaccctccctctgaatttcggtgcctcttccccccgccccttgctcacacatttcagtaggtcacaggccaaatggcagcccaaaaggtgggcagagatttttttttcttcccctcacccctgcttattaacacaattgtgacaactactttaccttacatcccagggcaaacggacagcttgcggtacctccaaaaatttggaaaaccctgagtctaagaccacctcttgataaaagaggcctttgctcacattttctgctcggaatctttctttgccattggtgggtgtatgtcgtcccagctgagactgcgggagagctgagctccagcttaaaccgcttttaatggcccttccctactgggggatcgctggagcccatgccaggttacggtagtcattttaaacctctgccacaaggccacgccatagaatcaatttccaagtcaatgttcttggccctaaaatgtttgcgcccactgaggatttcattaccaggtggaagatgggggaacatatgccacgttaaagagcaagtgctgagtgtgccaggacttgagaaggaccttaggctgaggagtggacagtctggtatttatttcgcctctcccaagtacccaagtaagccttcttagctccaatcagggatgaggggctcaacctcttctgtcctcaaagaggccaaacgcagtgccacagtcggtagccttcacttttagatgtcctattcatgtaaaaaagaaggtgcccccaccaggcttacatcagcaataagcaattctaatgcaacgatggtgtccacattttaccccagtgtgtgcccatgtatgcctttgtgcccgtgtaattattgttagcgcccctttcacttagaggggtgatgataaactgtggccaccttgattacaacccacatttcctgctttggggagcttccaagtaacaggccatttcttacctccctccaggaacagtgggcactgcccaccacctcgtgtctgctcataggatgacgctggagatccccacacttactctaccctcttggcaaattggcattccggtggtggtttttgtttcctttaacacattaaataaatgagtatataggatgtgaggggaggggtgagaacaactagctgtagcatgtgtaggctatatactttaccattcgacttctttccttttttttttttaaaataaaaaaagtgcttgactggtttcaagcttcatcatgaagatgcagtgtctatggattttatttggcaggagaaagggtacatagctttgtggcctgggatcttc

SEQ ID NO: 464736 - DNA, 7143 bp, Homo sapiens
tctggaacatcactggtgatttcatagattaataggcgaggggtgaccaaacctcagtggaccccatggtcctggagcagtatgtggtggtagccaactaccagaagcaggagagttcggagatcagcctcagcgtggggcaggtggtggacatcatcgagaagaatgagtcagtctcatggaggtattggtctctgccccggccggtgggccgccgccggactctgggggacttgtatgccatcagctggcgtcaaggtgcctacctcggagttttcttccccctgccagagcagataacactgggggtgggagctgttctagctctgtgggacaccctgccagagtgcagcgatgagcaacccgccctgccgagcccaggccctccagggctactgtgggagggacgcagctgggggcagctctcagggaggaggcttccttttgtccccacagaggagaagtacacagtcatctacccgtacacagctcgggaccaggatgaaatgaacctggagagaggggctgtggtggaggtcatccagaaaaacctggaaggctggtggaagatcaggtaccagccgctgccccccacggttgctgggtaccagggcaaagaaggctgggcccccgcctcctacctaaagaagaacagtggggagcccttgcccccgaagccaggccctggctcaccctcccacccgggtgcccttgacttggatggtgtttcccggcagcagaacgcggtgggcagggagaaggagctgctcagcagccagagggacgggcggtttgaaggccgcccggtgcccgacggtgacgccaagcagagatcaccaaagatgaggcagagaccccctcctcgccgggacatgaccattcctcgaggcctcaacctgccgaagccgcccatcccgccccaagtggaggaagagtattacaccatcgccgaattccagacaaccatcccagacggcatcagcttccaggcaggcctgaaggtcgaggtgatcgagaaaaacttgagtggctggtggtacattcagattgaagataaggaagggtgggccccggccaccttcattgacaagtacaagaagacgagcaacgcgtcgagacccaactttctggctcccctgccccacgaggtgacccagctccggctgggggaagcagcagcgctggagaacaacacgggcagcgaagccacgggcccctcccggcccctgcctgacgcaccgcatggtgtcatggactcggggttgccatggtctaaagactggaagggcagtaaggatgtcctgaggaaggcatcttcagacatgtctgcgtcagcaggctacgaggagatctcagaccccgacatggaggagaagcccagcctccctccgcggaaagaatccatcatcaagtcggagggggagctgctggagcgggagcgggagcggcagaggacggagcagctccggggccccactcccaagcctccgggcgtgattttgccgatgatgccagccaaacacatccctccagcccgggacagcaggaggccagagcccaaacctgacaaaagcagactgttccagctgaaaaatgacatggggctggagtgtggccacaaggtcttggccaaggaagtgaagaagcccaacctccggcccatctccaaatccaaaactgacctgccagaggagaagccagatgccactccccagaatcccttcttgaagtccagacctcaggttaggccaaaaccagctccttcccccaaaacggagccacctcagggcgaagaccaagtcgacatctgcaacctcaggagtaagctcaggcctgccaagtcccaagacaagtccttgttggatggggagggcccccaggcagtagggggccaagacgtggccttcagccgaagcttcctcccaggagaggggcctggccgcgcccaggacaggacgggcaaacaggatggtctcagcccaaaagagatttcctgcagagcccctccgaggccagccaagaccacagatcctgtgtctaagagcgtgcctgttcctctccaagaggctccccagcagagacctgtggtcccaccccgcagaccacctcccccaaagaaaacctcttcgtcatccaggccgctcccagaggtcagaggtccacagtgtgaaggccacgaaagcagggcagctcccaccccaggccgtgctctcctcgtccctccaaaagccaaaccttttctctccaactctttggggggccaggatgacacgcgaggcaaaggcagcctggggccatgggggaccggcaagattggagaaaacagggagaaagcagctgcagcctctgtccccaatgccgacggcctgaaggactctttgtatgtggccgtggccgactttgaaggagacaaagacaccagcagcttccaggaagggacagtgtttgaagtccgggagaagaacagcagtggctggtggttctgccaggtcctgagcggagccccttcctgggaagggtggattccttccaactatctcagaaagaagccgtagccgactccctttctgcctagagggcccgctggtccttgctggctttacccacgtatttaatacgcctcttaatttatcattctccacgcagcttccaaggcagacagactctggggtactgtgacttcttgcctcccatgggtggagagtgagtttcggacacctcgggcgcccctgggcctgatccctcctatcacagcatcactggaggctcagaacccacagcctttgctttctgtccatgtcagcatccctgccttaagagaactcctcctggccaatggcattgccacccagcagtgggaccaagactctccaagacctccaggactggatcccattgcctggagaaactccagcaagggtctctcatggcttggacatggcacagtaaggggcagccaacccagtccatgatgacttttgctccaacttcttcatgtttctaaaagcccagtggctttattcactcctcctaaattgcctgctaccagaaggaacttcatcctgaagaaatgcattccattaccagttccagggaaagtgtccccttccccaaagcctcaggcccgtgggcctctgaggttccactggatgcggctcccccaggagtgggcctggagatccgctcagccgccctgcctcccaccttctatcttgggaccgtggtcagccctgaagggtggttccagccccgcgtatgctgcgctttgctgctgcaggctccggtccctccagggcttttcaatgagagttcccaccccaacttggagcatttcatttttgcctacctaaagcaagaatctcaaagtttgtttgaataagaggcccattcacaagtcgtgcccttgtgagcacccctttgctgagtgcctcgtgggtgccaaacactgtacttggcgctttgcattcatgctttgaccctcacaacctccctttatagatgaggaaattcacgctccatgtgcccaaggacacaccagccaggaggaagagggaagaggatttgagtccaggcctgcctgacttcagtgcctgtgccctcccctctgtaaaagacaaaccaggcagggaagagatagaagctggctaagtggtggccaagtggcttcattgtgaggggggtgagggggcattcgtggctgctcccacacccaccatccctccagcccacagcagcctataccaaaggctgccccggactcaacagctgcgtctccatgacaggagaatgccagggtcctggtggttgacacagagccctgttccctcttctaagctgttgccccctggggaatagagcttatggagcaacgggagctgaggtggcctcgagggccagcctggagggctctgagcatagcatgcagcggtcccatagggaggcaggtaaccaagggccaggcagagctgcttcctgtgcctctccggcatttgtaatgtttttttcttttttcacgcactgccaaatctgttttctcccttgaagaaacccagggcagatgtggtcgtctgtcaaactgaggtctggagaggcatgactaaatcactgcagaagcaaaatcaggacccagcatttctagctcccagcccagagtaagagagcagagcagaaccccttcccattctacccgaccgaggcagccctgccctgccctgccccgcccctccccaccctgccctgccccagagatctccagttcacagtgttcatcaggcgagatacttttggacccacaaagccagttttttggggggatgctcagtgtctacctgcagtgccaaagttttgcttgaacagccctcttctgccgcgcctcccagctccaccccctatcacgtgggtgctggctgcttctgcgtgaggagcttcctctgatcacctgtagcatctttagtgccttcgtccagtcggcctgcaaatcccatttcccagagaggcttgggcagggcccacttgccacttggccctgtgcccagagcgttgggggcagatggcagccaggggaagaagggaggtggggaagggccgccaccgcttgagggtcccctcccttgagaggaggccccatggcagttttcctgagttcttgatccactttggtttaaacaacttttgtgaagctatgtgagatttgactgcatttcaaaagacaaaacacatgtttttttctgatttgctctttgcctttcagcgacgctttcagatactttgtgagtgtctactctgtgctaggtgctgagtagactgggatgtgtgtggctccatccctggctggaagagctttgagtcctgtctgctgacttcactgaaggagtttctctcttgcttcattccttcctcccgggggtcagctgggtaggagcagacttgccctgccttcctctaggcagaaagttttcctgcaaatgaaagaatctgccattctcttttgctatgatgatgatgattattctgacatgacccgcgggtactgaagccacagtcctctctgttcactgttctctccttgagtcatatctatggcctgaggacgtctgtatccagctccttttcctacaatggtagacacttccccaggcagtgggtgggtcagggtggccagtcactctcctagctgtccttgcctggggacttagatttaccccatccaggactgtggtcgctattctgtgagcgattgatggcgcatatgcagaactcccctggagtcatggctctagaaagtgtccaggcccatcgtgacaatggtgccaagcaccgggctggtgaccagtgcctaaacacacacgctcctttaatccttacggcaagcctgtgaggcggataggaccagccctgatctatagtgagaaaattaaggttcagagggagaaggtccaaatagtggccaagctgggactgagatctcgagtttgggtttgtttggttttgttgttgttgttctttccctcgtgtccatgacttttctctgccattagcagggaagtgtgcggagggcttccagggaatcaagtgaccctccctctgaatttcggtgcctcttccccccgccccttgctcacacatttcagtaggtcacaggccaaatggcagcccaaaaggtgggcagagatttttttttcttcccctcacccctgcttattaacacaattgtgacaactactttaccttacatcccagggcaaacggacagcttgcggtacctccaaaaatttggaaaaccctgagtctaagaccacctcttgataaaagaggcctttgctcacattttctgctcggaatctttctttgccattggtgggtgtatgtcgtcccagctgagactgcgggagagctgagctccagcttaaaccgcttttaatggcccttccctactgggggatcgctggagcccatgccaggttacggtagtcattttaaacctctgccacaaggccacgccatagaatcaatttccaagtcaatgttcttggccctaaaatgtttgcgcccactgaggatttcattaccaggtggaagatgggggaacatatgccacgttaaagagcaagtgctgagtgtgccaggacttgagaaggaccttaggctgaggagtggacagtctggtatttatttcgcctctcccaagtacccagcacagagtgggaaaaagaagaaactgctcctgccttccagtagctggcaacttgacatcaagaacaaaaacattcgtagctggacccccgtcctttcatcgtgcccaagtcttacatgttggcttaagctgcccccttggaggccgtacctttctctttggactgtgacagtggacacctaacagcctgagccatgtgtggctgtcttatcccccaagggttgtccaggcccgttctgcagggctgttgtgtagactgcagacatccatacctcaccacagaccaaagatgacctcgtgtcagactgtgggctgatgagaggtagagcagcatgcatcgaggcctgagggtgcagggcgccctctcttggcctggaggaattgctcctaactagagtaagtttccacgagggtcccaggcagagctgcagagctggaaccggaggctccacagtccttgcctgctcatggacctccttcagagcacctttctacagactggactgcccagctccgtggggtggcatctggtttctggtgctattctgccaagttatcgagctcctcctcatgtttcaacattccatcttcccgtttctatcctcgactccaagaacagtgggcactgcccaccacctcgtgtctgctcataggatgacgctggagatccccacacttactctaccctcttggcaaattggcattccggtggtggtttttgtttcctttaacacattaaataaatgagtatataggatgtgaggggaggggtgagaacaactagctgtagcatgtgtaggctatatactttaccattcgacttctttccttttttttttttaaaataaaaaaagtgcttgactggtttcaagcttcatcatgaagatgcagtgtctatggattttatttggcaggagaaagggtacatagctttgtggcctgggatcttc

SEQ ID NO: 464737 - DNA, 7491 bp, Homo sapiens
tctggaacatcactggtgatttcatagattaataggcgaggggtgaccaaacctcagtggaccccatggtcctggagcagtatgtggtggtagccaactaccagaagcaggagagttcggagatcagcctcagcgtggggcaggtggtggacatcatcgagaagaatgagtcagtctcatggaggtattggtctctgccccggccggtgggccgccgccggactctgggggacttgtatgccatcagctggcgtcaaggtgcctacctcggagttttcttccccctgccagagcagataacactgggggtgggagctgttctagctctgtgggacaccctgccagagtgcagcgatgagcaacccgccctgccgagcccaggccctccagggctactgtgggagggacgcagctgggggcagctctcagggaggaggcttccttttgtccccacagaggagaagtacacagtcatctacccgtacacagctcgggaccaggatgaaatgaacctggagagaggggctgtggtggaggtcatccagaaaaacctggaaggctggtggaagatcaggtaccagccgctgccccccacggttgctgggtaccagggcaaagaaggctgggcccccgcctcctacctaaagaagaacagtggggagcccttgcccccgaagccaggccctggctcaccctcccacccgggtgcccttgacttggatggtgtttcccggcagcagaacgcggtgggcagggagaaggagctgctcagcagccagagggacgggcggtttgaaggccgcccggtgcccgacggtgacgccaagcagagatcaccaaagatgaggcagagaccccctcctcgccgggacatgaccattcctcgaggcctcaacctgccgaagccgcccatcccgccccaagtggaggaagagtattacaccatcgccgaattccagacaaccatcccagacggcatcagcttccaggcaggcctgaaggtcgaggtgatcgagaaaaacttgagtggctggtggtacattcagattgaagataaggaagggtgggccccggccaccttcattgacaagtacaagaagacgagcaacgcgtcgagacccaactttctggctcccctgccccacgaggtgacccagctccggctgggggaagcagcagcgctggagaacaacacgggcagcgaagccacgggcccctcccggcccctgcctgacgcaccgcatggtgtcatggactcggggttgccatggtctaaagactggaagggcagtaaggatgtcctgaggaaggcatcttcagacatgtctgcgtcagcaggctacgaggagatctcagaccccgacatggaggagaagcccagcctccctccgcggaaagaatccatcatcaagtcggagggggagctgctggagcgggagcgggagcggcagaggacggagcagctccggggccccactcccaagcctccgggcgtgattttgccgatgatgccagccaaacacatccctccagcccgggacagcaggaggccagagcccaaacctgacaaaagcagactgttccagctgaaaaatgacatggggctggagtgtggccacaaggtcttggccaaggaagtgaagaagcccaacctccggcccatctccaaatccaaaactgacctgccagaggagaagccagatgccactccccagaatcccttcttgaagtccagacctcaggttaggccaaaaccagctccttcccccaaaacggagccacctcagggcgaagaccaagtcgacatctgcaacctcaggagtaagctcaggcctgccaagtcccaagacaagtccttgttggatggggagggcccccaggcagtagggggccaagacgtggccttcagccgaagcttcctcccaggagaggggcctggccgcgcccaggacaggacgggcaaacaggatggtctcagcccaaaagagatttcctgcagagcccctccgaggccagccaagaccacagatcctgtgtctaagagcgtgcctgttcctctccaagaggctccccagcagagacctgtggtcccaccccgcagaccacctcccccaaagaaaacctcttcgtcatccaggccgctcccagaggtcagaggtccacagtgtgaaggccacgaaagcagggcagctcccaccccaggccgtgctctcctcgtccctccaaaagccaaaccttttctctccaactctttggggggccaggatgacacgcgaggcaaaggcagcctggggccatgggggaccggcaagattggagaaaacagggagaaagcagctgcagcctctgtccccaatgccgacggcctgaaggactctttgtatgtggccgtggccgactttgaaggagacaaagacaccagcagcttccaggaagggacagtgtttgaagtccgggagaagaacagcagtggctggtggttctgccaggtcctgagcggagccccttcctgggaagggtggattccttccaactatctcagaaagaagccgtagccgactccctttctgcctagagggcccgctggtccttgctggctttacccacgtatttaatacgcctcttaatttatcattctccacgcagcttccaaggcagacagactctggggtactgtgacttcttgcctcccatgggtggagagtgagtttcggacacctcgggcgcccctgggcctgatccctcctatcacagcatcactggaggctcagaacccacagcctttgctttctgtccatgtcagcatccctgccttaagagaactcctcctggccaatggcattgccacccagcagtgggaccaagactctccaagacctccaggactggatcccattgcctggagaaactccagcaagggtctctcatggcttggacatggcacagtaaggggcagccaacccagtccatgatgacttttgctccaacttcttcatgtttctaaaagcccagtggctttattcactcctcctaaattgcctgctaccagaaggaacttcatcctgaagaaatgcattccattaccagttccagggaaagtgtccccttccccaaagcctcaggcccgtgggcctctgaggttccactggatgcggctcccccaggagtgggcctggagatccgctcagccgccctgcctcccaccttctatcttgggaccgtggtcagccctgaagggtggttccagccccgcgtatgctgcgctttgctgctgcaggctccggtccctccagggcttttcaatgagagttcccaccccaacttggagcatttcatttttgcctacctaaagcaagaatctcaaagtttgtttgaataagaggcccattcacaagtcgtgcccttgtgagcacccctttgctgagtgcctcgtgggtgccaaacactgtacttggcgctttgcattcatgctttgaccctcacaacctccctttatagatgaggaaattcacgctccatgtgcccaaggacacaccagccaggaggaagagggaagaggatttgagtccaggcctgcctgacttcagtgcctgtgccctcccctctgtaaaagacaaaccaggcagggaagagatagaagctggctaagtggtggccaagtggcttcattgtgaggggggtgagggggcattcgtggctgctcccacacccaccatccctccagcccacagcagcctataccaaaggctgccccggactcaacagctgcgtctccatgacaggagaatgccagggtcctggtggttgacacagagccctgttccctcttctaagctgttgccccctggggaatagagcttatggagcaacgggagctgaggtggcctcgagggccagcctggagggctctgagcatagcatgcagcggtcccatagggaggcaggtaaccaagggccaggcagagctgcttcctgtgcctctccggcatttgtaatgtttttttcttttttcacgcactgccaaatctgttttctcccttgaagaaacccagggcagatgtggtcgtctgtcaaactgaggtctggagaggcatgactaaatcactgcagaagcaaaatcaggacccagcatttctagctcccagcccagagtaagagagcagagcagaaccccttcccattctacccgaccgaggcagccctgccctgccctgccccgcccctccccaccctgccctgccccagagatctccagttcacagtgttcatcaggcgagatacttttggacccacaaagccagttttttggggggatgctcagtgtctacctgcagtgccaaagttttgcttgaacagccctcttctgccgcgcctcccagctccaccccctatcacgtgggtgctggctgcttctgcgtgaggagcttcctctgatcacctgtagcatctttagtgccttcgtccagtcggcctgcaaatcccatttcccagagaggcttgggcagggcccacttgccacttggccctgtgcccagagcgttgggggcagatggcagccaggggaagaagggaggtggggaagggccgccaccgcttgagggtcccctcccttgagaggaggccccatggcagttttcctgagttcttgatccactttggtttaaacaacttttgtgaagctatgtgagatttgactgcatttcaaaagacaaaacacatgtttttttctgatttgctctttgcctttcagcgacgctttcagatactttgtgagtgtctactctgtgctaggtgctgagtagactgggatgtgtgtggctccatccctggctggaagagctttgagtcctgtctgctgacttcactgaaggagtttctctcttgcttcattccttcctcccgggggtcagctgggtaggagcagacttgccctgccttcctctaggcagaaagttttcctgcaaatgaaagaatctgccattctcttttgctatgatgatgatgattattctgacatgacccgcgggtactgaagccacagtcctctctgttcactgttctctccttgagtcatatctatggcctgaggacgtctgtatccagctccttttcctacaatggtagacacttccccaggcagtgggtgggtcagggtggccagtcactctcctagctgtccttgcctggggacttagatttaccccatccaggactgtggtcgctattctgtgagcgattgatggcgcatatgcagaactcccctggagtcatggctctagaaagtgtccaggcccatcgtgacaatggtgccaagcaccgggctggtgaccagtgcctaaacacacacgctcctttaatccttacggcaagcctgtgaggcggataggaccagccctgatctatagtgagaaaattaaggttcagagggagaaggtccaaatagtggccaagctgggactgagatctcgagtttgggtttgtttggttttgttgttgttgttctttccctcgtgtccatgacttttctctgccattagcagggaagtgtgcggagggcttccagggaatcaagtgaccctccctctgaatttcggtgcctcttccccccgccccttgctcacacatttcagtaggtcacaggccaaatggcagcccaaaaggtgggcagagatttttttttcttcccctcacccctgcttattaacacaattgtgacaactactttaccttacatcccagggcaaacggacagcttgcggtacctccaaaaatttggaaaaccctgagtctaagaccacctcttgataaaagaggcctttgctcacattttctgctcggaatctttctttgccattggtgggtgtatgtcgtcccagctgagactgcgggagagctgagctccagcttaaaccgcttttaatggcccttccctactgggggatcgctggagcccatgccaggttacggtagtcattttaaacctctgccacaaggccacgccatagaatcaatttccaagtcaatgttcttggccctaaaatgtttgcgcccactgaggatttcattaccaggtggaagatgggggaacatatgccacgttaaagagcaagtgctgagtgtgccaggacttgagaaggaccttaggctgaggagtggacagtctggtatttatttcgcctctcccaagtacccagcacagagtgggaaaaagaagaaactgctcctgccttccagtagctggcaacttgacatcaagaacaaaaacattcgtagctggacccccgtcctttcatcgtgcccaagtcttacatgttggcttaagctgcccccttggaggccgtacctttctctttggactgtgacagtggacacctaacagcctgagccatgtgtggctgtcttatcccccaagggttgtccaggcccgttctgcagggctgttgtgtagactgcagacatccatacctcaccacagaccaaagatgacctcgtgtcagactgtgggctgatgagaggtagagcagcatgcatcgaggcctgagggtgcagggcgccctctcttggcctggaggaattgctcctaactagagtaagtttccacgagggtcccaggcagagctgcagagctggaaccggaggctccacagtccttgcctgctcatggacctccttcagagcacctttctacagactggactgcccagctccgtggggtggcatctggtttctggtgctattctgccaagttatcgagctcctcctcatgtttcaacattccatcttcccgtttctatcctcgactccaaagtaagccttcttagctccaatcagggatgaggggctcaacctcttctgtcctcaaagaggccaaacgcagtgccacagtcggtagccttcacttttagatgtcctattcatgtaaaaaagaaggtgcccccaccaggcttacatcagcaataagcaattctaatgcaacgatggtgtccacattttaccccagtgtgtgcccatgtatgcctttgtgcccgtgtaattattgttagcgcccctttcacttagaggggtgatgataaactgtggccaccttgattacaacccacatttcctgctttggggagcttccaagtaacaggccatttcttacctccctccaggaacagtgggcactgcccaccacctcgtgtctgctcataggatgacgctggagatccccacacttactctaccctcttggcaaattggcattccggtggtggtttttgtttcctttaacacattaaataaatgagtatataggatgtgaggggaggggtgagaacaactagctgtagcatgtgtaggctatatactttaccattcgacttctttccttttttttttttaaaataaaaaaagtgcttgactggtttcaagcttcatcatgaagatgcagtgtctatggattttatttggcaggagaaagggtacatagctttgtggcctgggatcttc

SEQ ID NO: 464738 - DNA, 2716 bp, Homo sapiens
tcagatctatgtccttctcatcaatgataataattcacacatattttatgtgcatggctgcattattctccataatcgtttttgattgtatagaccaggaagttgcattcatcgtgcgtcacaatcatttgggtgtcctgtgtccccaagccttcaaccacatcctttgccatgaagcctccggggtgtcctgtgtccccaagccctcaaccacctcctctgccatgaagccacaggtgtctgtttctagcaggaaggggtctgcttcaagtcaggccctttctggtcgaaggctacagaggcccatacaagatggctctggaaaaaagcacaggaatctcaggcaaggaatagcggcccctgctgctgggcaggcccagcagaaagttttgcctataattggtactaagaaaggaatcagtgcaagtgaagggtgctgagcggcaacggaagggctacagagtaggggtgacgaatggtcgcttcccgttaagaagctgtcaccttctgactcctctcctggtgtcatttgctgatttaaaaaaaaaaaaaagattttggaaaaagtaaggcctgggtcaccagatacacacctgccaggtgttcagatgctggtccttccctggccccttaagtgagccatgaaaaggacctggtgattcacccacagataacggaagaaagttctgttacctcttgatagcagcttttgtgtccaccccatttccccaggtgggccgagagcattggtagctaattgtaatcactccacacaattagagctgtgctgccccttcccctagccagtggacttcggtacccagagtgaagcctgcagcctgtgtcagacaccagcatgtgtaatgggaggaaacagcttccatgtccagagcgctggttccaagggcatcttcaggcactgaaattggcactgaataggcatggggaagtttcagtggaagtgaatggggagcactggggggacttactgaaagactttcagatacagggagtatttgacacagctcacctccaactggcctggttttattctgaattgtttggagcagaggaagggagagggaaaacataaagatcagggtaataggttctaggagctgacggagctgatggagctgaacagggtagggaccatggaaggtagagctattgcgcaaaaattaggcagcctctaggcaggcaggcacttggctggatccaagtggcagtgttaggtgctgtgggtgaatgcacacccacaagtatatgcacattccctgcctcctggaagctcacagttcagccagtgatacatgtatagaagtttgaagcagtaacattagatatgaggttgaattcatgctgaccggatttctgtggacttcgtggaggccctgaaggctttgtaggatctagaaaggcagaaacagatgtggtgggggataggttgaagagtcgtggatgactcactaagacattgaggtgggaaggtatgcagggactataccacactgtgtggaggagggggttcatggaaagggtaagaactcccaaagggtagatgaagagccatgaagacccagctaaggaaacccatgaatgactgggatccactggaaagtcttgagcaaagaaccggaggatgcaagtgctgcagagaacagaccccatactgtggacggattgagagcacagtgggggcccctcaagctgttccacactctgggcagtagggtttatccaagtgcccaccaccaagtatctgggcactaggcagggagcaaggggtgtttccagttccagtgttaaaaaattccatccaatttgtaggttccaaggaaggattgggctcccagaagcttggagttcttgttttatgaccaccatccagccctaagagcctggggggtttgtatgcattttcattgcgcagatggacctcccaattttctcaactttacttccctttcacatttgcacagaccatataatcatggttttaaaggtcataaagctgaggcatgagaatcacttcaacccaggaggcggaggttgcagtgagctgagatcatgccactgcagcctgggcgacacagtgagactatgtctcaaaaaaaaaaaaaaaaaagttgaacttttgcttctgggatgtttatgttttttcctagtcttcaggggttcagggctctcagatgtctcccccaccatacctccactcagtcttccactgatgacatttcttaataattcacgtgcttccccctcggctcagttacacattggagaacactgctgcatctgaaccactgtagctgacaagctatcatgcagctcacccaaacagcagcttgcaaggcctatccattctgaacatttggaatggaactcttctgatccttattttccacctagaacagtcataatggggcaatgggaatgtattgattgtcactgttttgcttgtataccttggactgtttctgcaaaaggagatatgtttgagtgttttaaggcagccttgcagatagcttctaaaaagaattcactggcctgaaaaaatgattcctagcctgcagaactttcatttgtcttccctgtgcttgagagagttgggtagcccacaggaaagaacaagtggtgaaaacctggcttctaatcctaaagcttccaacagcgagttatggggtcttgggcacattctttacatttcaggctc

SEQ ID NO: 464739 - DNA, 3259 bp, Homo sapiens
tcagatctatgtccttctcatcaatgataataattcacacatattttatgtgcatggctgcattattctccataatcgtttttgattgtatagaccaggaagttgcattcatcgtgcgtcacaatcatttgggtgtcctgtgtccccaagccttcaaccacatcctttgccatgaagcctccggggtgtcctgtgtccccaagccctcaaccacctcctctgccatgaagccacaggtgtctgtttctagcaggaaggggtctgcttcaagtcaggccctttctggtcgaaggctacagaggcccatacaagatggctctggaaaaaagcacaggaatctcaggcaaggaatagcggcccctgctgctgggcaggcccagcagaaagttttgcctataattggtactaagaaaggaatcagtgcaagtgaagggtgctgagcggcaacggaagggctacagagtaggggtgacgaatggtcgcttcccgttaagaagctgtcaccttctgactcctctcctggtgtcatttgctgatttaaaaaaaaaaaaaagattttggaaaaagtaaggcctgggtcaccagatacacacctgccaggtgttcagatgctggtccttccctggccccttaagtgagccatgaaaaggacctggtgattcacccacagataacggaagaaagttctgttacctcttgatagcagcttttgtgtccaccccatttccccaggtgggccgagagcattggtagctaattgtaatcactccacacaattagagctgtgctgccccttcccctagccagtggacttcggtacccagagtgaagcctgcagcctgtgtcagacaccagcatgtgtaatgggaggaaacagcttccatgtccagagcgctggttccaagggcatcttcaggcactgaaattggcactgaataggcatggggaagtttcagtggaagtgaatggggagcactggggggacttactgaaagactttcagatacagggagtatttgacacagctcacctccaactggcctggttttattctgaattgtttggagcagaggaagggagagggaaaacataaagatcagggtaataggttctaggagctgacggagctgatggagctgaacagggtagggaccatggaaggtagagctattgcgcaaaaattaggcagcctctaggcaggcaggcacttggctggatccaagtggcagtgttaggtgctgtgggtgaatgcacacccacaagtatatgcacattccctgcctcctggaagctcacagttcagccagtgatacatgtatagaagtttgaagcagtaacattagatatgaggttgaattcatgctgaccggatttctgtggacttcgtggaggccctgaaggctttgtaggatctagaaaggcagaaacagatgtggtgggggataggttgaagagtcgtggatgactcactaagacattgaggtgggaaggtatgcagggactataccacactgtgtggaggagggggttcatggaaagggtaagaactcccaaagggtagatgaagagccatgaagacccagctaaggaaacccatgaatgactgggatccactggaaagtcttgagcaaagaaccggaggatgcaagtgctgcagagaacagaccccatactgtggacggattgagagcacagtgggggcccctcaagctgttccacactctgggcagtagggtttatccaagtgcccaccaccaagtatctgggcactaggcagggagcaaggggtgtttccagttccagtgttaaaaaattccatccaatttgtaggttccaaggaaggattgggctcccagaagcttggagttcttgttttatgaccaccatccagccctaagagcctggggggtttgtatgcattttcattgcgcagatggacctcccaattttctcaactttacttccctttcacatttgcacagaccatataatcatggttttaaaggtcataaagttcactgtgctaggagatacagaaatactttcttgatgacggggccaaacgttcattaagtgctttcatgtgccctgcatttgaatttattcatgatagcttcaacattctgagtgtttactgtggggcaggcactgtgctaactgtgtattatcttgtatacttttcaggacaagtgaaagtgatgaccccatttaatagatgaagaaaactgacactcaaagaagggaaataacttgcccaagatcacagagctcaggttggctggactctaggacatcccatgcctccacaccatgctgcttgtcagcagcagcacgcagagctggttgcaaaggaggggctgacatatattaagagttgaggccgggcgtggtggctcacgcctgtaatcccaacactttgggatgccgaggtgggcggatcacaaagtcaagaggtcgagaccatcctgaccaacatggtgaagccccgtctctactaaaaatacaaaaattagctgggcgtggtggcgtgtgcctgtgatcgcagctacttgggaggctgaggcatgagaatcacttcaacccaggaggcggaggttgcagtgagctgagatcatgccactgcagcctgggcgacacagtgagactatgtctcaaaaaaaaaaaaaaaaaagttgaacttttgcttctgggatgtttatgttttttcctagtcttcaggggttcagggctctcagatgtctcccccaccatacctccactcagtcttccactgatgacatttcttaataattcacgtgcttccccctcggctcagttacacattggagaacactgctgcatctgaaccactgtagctgacaagctatcatgcagctcacccaaacagcagcttgcaaggcctatccattctgaacatttggaatggaactcttctgatccttattttccacctagaacagtcataatggggcaatgggaatgtattgattgtcactgttttgcttgtataccttggactgtttctgcaaaaggagatatgtttgagtgttttaaggcagccttgcagatagcttctaaaaagaattcactggcctgaaaaaatgattcctagcctgcagaactttcatttgtcttccctgtgcttgagagagttgggtagcccacaggaaagaacaagtggtgaaaacctggcttctaatcctaaagcttccaacagcgagttatggggtcttgggcacattctttacatttcaggctc

SEQ ID NO: 464740 - DNA, 2868 bp, Homo sapiens
ccgccgagtctggaaaccgcattttatcagtagtccagtcatattttgtttactgggcaaggattgaatcatctgttgtgtctcaacagacacatagcagcgcccattctgacgaccgcatggagcccagattgctgatgccaaaccttcaccagaggctgggcgatgttgaaggagctgctccagctcccaggacccccatcactcttccacagcagcacacacatgtctttgctgttgcccttcctggagctgcagaggaggacaacctagatcctgttcctgccagtatttgggtgacaaagtttcctggggatgcagagactctgtcccaaccatcttcacacacagccactgaaggcagcatcaaccagcaacccagcggggacagcaatcccaccctagagccgtccctggaggtccacaggctggagaggctcgtggccctcaagagagtctcctcagagagctttgcttccagccttagcacccatcacagaactcaggatgatcccagctttgattcactggaaacttgcctgtcctcagatgggggtgaacaggacaagacgaaggcctctaacaggaccgtgacacagcctcctctgtccaccgtccagcttacctatccccagtgcctctggtcctctgaaactttcacagggaatggggtcagggcaagcaacccaatccctgtcctccagacctctggcacttctgggctacctgctgctggtgaccagtcagaggcatccagggcctctgccagcttcttacctcagtcaaagcacaaggagctcagagcagggaagggaaatggagagggtggagtgggataccctcggcagaccaacccacggcctgacattgggctagagggagcccaggcccctctgggtatccagctcagaactcctcagctgggaattctgctttgcctgtcagccaccctgggcatggccctggccgctggccttcgctacctgcacacccagtattgccaccagcagacagaagtgtctttcagtgagcccgcttcggatgctgttgccaggagcaacagtgaaactcagggctccagcaaacagggattgaaaaccatgaacaacgccttcttcagatgaggagaacaaggccacggagagaccctctgggattggacataaactcctcttgatattaaacaaacaaatatttttttctttctctttgtaatgcttgttggtgaaacattttgcaggcctggttgtctgccaaacatggggctctatgccccagtggcagatgcatctagaggaagcataaagaatggagtaggggcaggagaaaggatggatcggggagtggaaatgagccataaaggaaactgaggacctgctgaacaggcaacagagaagtaattaaacgagaagggggaaagtcaaagacagctgattagtggcccagggtagttgaatgcaaaggttgagcatctttgaaatccagatcgctagacctcagttggcaagccaaaataaaagcacttggccagtaacacatgcacagcctaggatacaaccaacggctctcttccattgttctattcgacacacttccctgcacttatagttttaaaatatcgtacacataacattatgatttcagttctaaatgtaaaccatgatttctttttaaagacgtatggcagccttcatttccagtcaaggcatgcgacattttagggtcctgtggaagaaatgcgatatgctttcagatcacgtgtgaaggaggtctcactgagtttatatcactgagtcatgtgagtgacctcattacatcctggaaacagccctgtgtaggtgtcatcatcatcagccccattgtagagaaggacaccaagacccaggaaggaggagggattccaacagggtcccacagcactggcggtggggctggggctacaatcagttcacctctcctacatcacgttttactgagcatctgctgtgcgctggactcgcggctcggtgtgaacaggatgctgcgtcttgcatttcctcggaaacaggctctgtaaatgtcaaggcaagccctttggcttcccttggaactactcattcttgcagaagctcagctagaagaggaagctggagagcgcgaaggcagctgccacctcttgcacgcgtgggggtctcggggtagcaggggctgctctgtgctgggctgggccagtagggggcgccctccctgggagcagcagggccttccagaaggccagggcggtctccggcgctcagacctcagcctgcctctccgccccgcccctcttggggggcatcccttctgtgcacgcccacgtgtgagcagagaagcaactctcagaagccttctgtgtgttcaggaaatgcgaggcctggctggatttgaacccgtgacccagacgtaaaagggcctgatgtagggctccctttacaataactggctgcctgtaccttgttactcccagcccaggactctctctcacatctgcccatgctttctcctcatgcagctgaagtttggttagatcctgacttagcactggggctaagtgattgatgtccctgggcaagcagaagatgcattagtgtcttagggaatggaaaatgaaaggtggaagaagaacgggacggtgggactgcagtgtgattagcgtgtagccaaaagccatgtgctcctgtgaagccagggcctgaccctctcaggatctgtgcagcctgtcggccagccagacggctcccatgcaaaggccaccaggagtgtgggtctggagtaatactgagtttagattctccaggtgtcaactattctggtgttgaaattgtcatcattattcatactgatagtttt

SEQ ID NO: 464741 - DNA, 1259 bp, Homo sapiens
tgatgttacaatttttttatttcagcagttacatatattttaacaaacatataagtctatttggtttatccagagatttgccattttggttgctcttccttctttgcaatcattttccttccccatgaacttcctttaccatttctgttaaaggaggactactagcaatgaattattttagctttccttcttctgacaatgtctttatttcagccaggtatggtggctcatgcctctaatctcagcactttgggaggccgaagcaggcagatcacctgaggtcaggagtttgagaccatcctgaccaacatggtgaaactcgtctctactacaaacataaaaaaattagctgggcgtggtaccacgcacctgtaatcccagctactcctctggaggctcagacaggagaactgcttgaaccgggaggcggaggttgcagtgagctgagatcgcaccactccattccagcctgggcaacagagtgagactccatctcataaaaaaaaaaaaagtaaagaaaaaaaagaaaatgtctttatttcattttctttcctaaagaatatatttgctggataaaggattctgtgttgacagttttgttgctttttaaaagcactttataaatgttgctccatggtttctgatgagaaatctgccatcactgaaatctttggttctcctatatacaaagtgttgttttcttccagttgttttcaaagtattttctttacagttggtttcatcactttgattatgatgtgcctgggtgtggttttcctttttgggatttgctgtgccagcagaccggctttaaatagaatgttatgtaaatgtatgtgaatatttgttttttgccagatgtttggaagtttttagctattatttcttcagatatttttttcttccaattgttctttctgggctcctaagacatgaatattagactgtttcatattgtcccacagatccccaaaggtcttctcatttttttcacttttttctctgtcattcagactagataatttctgctcatgtatcttcaaatttactgactcttccctcagtcatcttcattgtgttgagaccttccagtaaattttgttattgtattttcagttctacaatttccacttgtttctttttatagcttctatgctgagacttttagctttccatttatttcaacagtgtttccctttatatatttcctttggagaaatgtcttctttgtgtagcatgattaaaataactagtttaac

SEQ ID NO: 464742 - DNA, 1200 bp, Homo sapiens
acctgggcctccagcggatgctgccatggtgacgacgcccgccgtccgcgcaggcgcccaggctggcgcccctgctaaccgggcactggtggcagggaaattcgactccacaaaccacaggcctcggcgggggaagagcccggcgggcgccagcgaagcggaaccaaacggagccgcggcacgcaggcgcaaaggctggcgttcgaggttcgtttacgcgccgcttcgccgtgcaggtggtggcgaagcgctcctccgaaaggtttcggaagctggtggtagctctgaagataacgctgcgttagggcatactgcggcggaggatggaactccgattgaaagcagttgctggagtggagcacgaatttcaacagttgcagtgagctgagatcgcaccactccattccagcctgggcaacagagtgagactccatctcataaaaaaaaaaaaagtaaagaaaaaaaagaaaatgtctttatttcattttctttcctaaagaatatatttgctggataaaggattctgtgttgacagttttgttgctttttaaaagcactttataaatgttgctccatggtttctgatgagaaatctgccatcactgaaatctttggttctcctatatacaaagtgttgttttcttccagttgttttcaaagtattttctttacagttggtttcatcactttgattatgatgtgcctgggtgtggttttcctttttgggatttgctgtgccagcagaccggctttaaatagaatgttatgtaaatgtatgtgaatatttgttttttgccagatgtttggaagtttttagctattatttcttcagatatttttttcttccaattgttctttctgggctcctaagacatgaatattagactgtttcatattgtcccacagatccccaaaggtcttctcatttttttcacttttttctctgtcattcagactagataatttctgctcatgtatcttcaaatttactgactcttccctcagtcatcttcattgtgttgagaccttccagtaaattttgttattgtattttcagttctacaatttccacttgtttctttttatagcttctatgctgagacttttagctttccatttatttcaacagtgtttccctttatatatttcctttggagaaatgtcttctttgtgtagcatgattaaaataactagtttaac

SEQ ID NO: 464743 - DNA, 1515 bp, Homo sapiens
acctgggcctccagcggatgctgccatggtgacgacgcccgccgtccgcgcaggcgcccaggctggcgcccctgctaaccgggcactggtggcagggaaattcgactccacaaaccacaggcctcggcgggggaagagcccggcgggcgccagcgaagcggaaccaaacggagccgcggcacgcaggcgcaaaggctggcgttcgaggttcgtttacgcgccgcttcgccgtgcaggtggtggcgaagcgctcctccgaaaggtttcggaagctggtggtagctctgaagataacgctgcgttagggcatactgcggcggaggatggaactccgattgaaagcagttgctggagtggagcacgaatttcaacaagccgcatgttgaagtgtgaggcgtgaaagggtatgtctgatatttgctttaaaatgctccagcaaagaaattaagggatggatgaagcaaaagagccaggtatggtggctcatgcctctaatctcagcactttgggaggccgaagcaggcagatcacctgaggtcaggagtttgagaccatcctgaccaacatggtgaaactcgtctctactacaaacataaaaaaattagctgggcgtggtaccacgcacctgtaatcccagctactcctctggaggctcagacaggagaactgcttgaaccgggaggcggaggttgcagtgagctgagatcgcaccactccattccagcctgggcaacagagtgagactccatctcataaaaaaaaaaaaagtaaagaaaaaaaagaaaatgtctttatttcattttctttcctaaagaatatatttgctggataaaggattctgtgttgacagttttgttgctttttaaaagcactttataaatgttgctccatggtttctgatgagaaatctgccatcactgaaatctttggttctcctatatacaaagtgttgttttcttccagttgttttcaaagtattttctttacagttggtttcatcactttgattatgatgtgcctgggtgtggttttcctttttgggatttgctgtgccagcagaccggctttaaatagaatgttatgtaaatgtatgtgaatatttgttttttgccagatgtttggaagtttttagctattatttcttcagatatttttttcttccaattgttctttctgggctcctaagacatgaatattagactgtttcatattgtcccacagatccccaaaggtcttctcatttttttcacttttttctctgtcattcagactagataatttctgctcatgtatcttcaaatttactgactcttccctcagtcatcttcattgtgttgagaccttccagtaaattttgttattgtattttcagttctacaatttccacttgtttctttttatagcttctatgctgagacttttagctttccatttatttcaacagtgtttccctttatatatttcctttggagaaatgtcttctttgtgtagcatgattaaaataactagtttaac

SEQ ID NO: 464744 - DNA, 1231 bp, Homo sapiens
acctgggcctccagcggatgctgccatggtgacgacgcccgccgtccgcgcaggcgcccaggctggcgcccctgctaaccgggcactggtggcagggaaattcgactccacaaaccacaggcctcggcgggggaagagcccggcgggcgccagcgaagcggaaccaaacggagccgcggcacgcaggcgcaaaggctggcgttcgaggttcgtttacgcgccgcttcgccgtgcaggtggtggcgaagcgctcctccgaaaggtttcggaagctggtggtagctctgaagataacgctgcgttagggcatactgcggcggaggatggaactccgattgaaagcagttgctggagtggagcacgaatttcaacaatgaagtctcactctgttcccccaggctggagttgcagtgagctgagatcgcaccactccattccagcctgggcaacagagtgagactccatctcataaaaaaaaaaaaagtaaagaaaaaaaagaaaatgtctttatttcattttctttcctaaagaatatatttgctggataaaggattctgtgttgacagttttgttgctttttaaaagcactttataaatgttgctccatggtttctgatgagaaatctgccatcactgaaatctttggttctcctatatacaaagtgttgttttcttccagttgttttcaaagtattttctttacagttggtttcatcactttgattatgatgtgcctgggtgtggttttcctttttgggatttgctgtgccagcagaccggctttaaatagaatgttatgtaaatgtatgtgaatatttgttttttgccagatgtttggaagtttttagctattatttcttcagatatttttttcttccaattgttctttctgggctcctaagacatgaatattagactgtttcatattgtcccacagatccccaaaggtcttctcatttttttcacttttttctctgtcattcagactagataatttctgctcatgtatcttcaaatttactgactcttccctcagtcatcttcattgtgttgagaccttccagtaaattttgttattgtattttcagttctacaatttccacttgtttctttttatagcttctatgctgagacttttagctttccatttatttcaacagtgtttccctttatatatttcctttggagaaatgtcttctttgtgtagcatgattaaaataactagtttaac

SEQ ID NO: 464745 - DNA, 1386 bp, Homo sapiens
caataggcttgcacatttgaaaacttctggtctgatgtccaagtttttctaaaatggtactgcacagaaggagcagttttactgagacaataggagctttgggtacctgtgtgaatgtggtcacaccaagttactgcttcaaagaacaagaaacgaatgctgtgagaactgcagagaccacagcctatagtggtattccccaaatgggcctgatcagaagactcatttgggggcagttgtttaataatttagattcccaggcttgtgaaagcaagaagggaggctacccttcagacagagtggccaggttttggggcacacgggagaggcaagtgaggcccaggccctttaagactctggagtctgtggatgtggccaaccaatgcctggctggacccaaaaaccccacgacctcagggtcaagggctagggcactggtgagagctctcactcggaatttcctgctggagtgctagacctgcagcacataaatatactttacttttctttcttctcccatttccttagttttgtttgtggaacagtattggagccttcccaggcattgtttcattctgacaccataacaaggtctgctccctattcactttctcagtcagaagcctgtggagtgttcattgttcctgtggatttttactgatgcacaattgtgtttaaaataacttgtccgaaaaccacagtgctaggctcagcagagtctcatcttgataaacttctgtgagaacaaaggcatggggacacactgaattttccttttctgagcttgaaaccagctgatcatgcttcctgtttctctaagggcttccctgacatagacgacttgcttctttcaaatttggtcatcgccctcttgccttcctgtgtgagtcagcgtggctgcccttgtgcacgccaggctcctgtctgtgctccggggcctgtttcctggcctccccagatgaggaaactgaggcacaaaaaggtgaagtcctgagctcacagtcatgcaaccagcaggtggtgaaacacacctccaagctgcctgcctcctaagcatcaagctttgtggcccaggatctacttcatgctccaaatattcatggaccttcccaggacctcaacaaaacaaaaccatgaagaaaaaccttgacatgaaccccaaaaaaacccagtcagcaatattttaagttaaattttgaaacaaatccaaacgggttcctccccataaatctaccagtaaattgtgcagaatcagaactgaagccatgccctttcttaaagtattgaattagaataaatgagaacatctaaatattttccaaattcatattccagttataatattcaagtttcttagtttctctctgttcacattcaacatgaaat

SEQ ID NO: 464746 - DNA, 1394 bp, Homo sapiens
  misc_feature (1385)..(1385): n is a, c, g, or t
caataggcttgcacatttgaaaacttctggtctgatgtccaagtttttctaaaatggtactgcacagaaggagcagttttactgagacaataggagctttgggtacctgtgtgaatgtggtcacaccaagttactgcttcaaagaacaagaaacgaatgctgtgagaactgcagagaccacagcctatagtggtattccccaaatgggcctgatcagaagactcatttgggggcagttgtttaataatttagattcccaggcttgtgaaagcaagaagggaggctacccttcagacagagtggccaggttttggggcacacgggagaggcaagtgaggcccaggccctttaagactctggagtctgtggatgtggccaaccaatgcctggctggacccaaaaaccccacgacctcagggtcaagggctagggcactggtgagagctctcactcggaatttcctgctggagtgctagacctgcagcacataaatatactttacttttctttcttctcccatttccttagttttgtttgtggaacagtattggagccttcccaggcattgtttcattctgacaccataacaaggtctgctccctattcactttctcagtcagaagcctgtggagtgttcattgttcctgtggatttttactgatgcacaattgtgtttaaaataacttgtccgaaaaccacagtgctaggctcagcagagtctcatcttgataaacttctgtgagaacaaaggcatggggacacactgaattttccttttctgagcttgaaaccagctgatcatgcttcctgtttctctaagggcttccctgacatagacgacttgcttctttcaaatttggtcatcgccctcttgccttcctgtgtgagtcagcgtggctgcccttgtgcacgccaggctcctgtctgtgctccggggcctgtttcctggcctccccagatgaggaaactgaggcacaaaaaggtgaagtcctgagctcacagtcatgcaaccagcaggtggtgaaacacacctccaagctgcctgcctcctaagcatcaagctttgtggcccaggatctacttcatgctccaaatattcatggaccttcccaggacctcaacaaaacaaaaccatgaagaaaaaccttgacatgaaccccaaaaaaacccagtcagcaatattttaagttaaattttgaaacaaatccaaacgggttcctccccataaatctaccagtaaattgtgcagaatcagaactgaagccatgccctttcttaaagtattgaattagaataaatgagaacatctaaatattttccaaatcgtcgaaggtacgagaggaaataaaataatagtcgagggcggccggtgtagaggatctttngattacgta

SEQ ID NO: 464747 - DNA, 713 bp, Homo sapiens
cagctgcaggaggactcgggcagttggcggtcaccgggaggcgtcgtcctgccccgcggcgggccagccgccttcgctgctgccactgcctagcctaaccgcatctgcagccagtcacagagtcggctgtctcctctttgcaccgcccacgccaagtaccttgcaaggcggctgctaagcctggctaattttagatctccagaatgcgctatgcccgcgctcaactaaaaccaagtcaaaccatcaagcacagtgatgtgctgctttttgaacaaatatggctcaaaactccgtatttccctgaataaagtcgattatctgcactttttaaaagccctaccccctgtggtctggcagttggctgaaaagcggaaagccacacgctcccacctcaaacatggtcatcacctttctaaggaacaaaagtataatgactcagtattgtatggttgcatagacaagggctcggaacaagagacactagttttgtctgacggtcgtgggaatcggagcgtcctgccgttcacatctcctgcattccgtttagcggaatcaattaggcaagacagaccctcagattccccaccccctttccatttttgtcaggtctatatacgtcctaattatttcagtttgggatgccagagctgtttcctggatagacctgatcatccttaaacaaaaagagaggaggcgcacacgtgggttgtggc

SEQ ID NO: 464748 - DNA, 1716 bp, Homo sapiens
tgcaagtatctgagtctgggtcaggcccgaaatggcagaggagaggagctttgaagcacatgagaaactgaatcagcctctaactgaacgttgcatggcccatgggcctgtcccagaggctagatacctgaaggctcgatactgcctgctgcttgaggctgggctaggggcaacatgccacagttgggctggagtggaactcagtgacatctttgagaccctcagctgggctggctgggacagttggggctcttctccacatagtctcccatcctctgatcggtcaacccgggctcattcatgtagtgatgggagggctccatggaagcagcaagagagggcaagccctaaggagcgagtgtttctccaggcctctgcatgcattgcatgtgctgatgtcccattggcagccatagtcattcacacggccaagcccagactcaatgtgggaaggggctacttgcagactgagggcgtgaatcactggtggccattactacaaaagtagacaatcgcctttcctgttaattccaattattcacagtcctttcacatgcaaaaatgtactgattcccgccaggacccccatcaattgcattcaattatagcatcaattatggcaaagtctaggatcctgtgatttctgtcaagtccaaatgaggaaactgggctttaaaggtgcttctgagctatggacccagattaactacccagcaaactgaagttatatttggggtacttttctggttgctgccttatttgtgtatattgcagcttattgtgtatagcaaccttgagatactgaagagactggggtacatgggaaaaaaggcagaaaggacacagtggaaaaaccaactcacataggatgaaatgtgatggggtgaaatcatggcagtgtgattttcaaacaccaacttgccttggaagggaatgtggggatgtgcactgctggaagccatgtgttctgatatgagaagaacttcttcagaaggtatcttaatgcatatggggaaactgaggcccagattgcacatacatgagttgccctggaaaatcccaagtcaaagaagctgcactgcaggaaatcagtatggtgcaggccccaggcaaggcatcactgactacacttgcaagaaacaaacgcctgcaaaaatcaggacaggatgattttgaagctgtgcaaaacagttgtcatagccttctccagcatgtgttccttctgtatttcagacatggcagaggagacacagcaataactaaggggcaactattgcatccagaaaaaaaaaaaatgaagataatgacttctctgcaactaagatgaagatccactgaactttggggtttgaaatgcaacgttagaacttcagactcccggcacctaggtctccagctgctgggtggtgccagcatcagagatacactctgcaaaacatatactgtcttaggaaaaagtgaccctgttgtcctttcaggcccatattccacaagaagacaaatggagatgtaaaaggaaaactgcagctccgactgaagagagagcaagttgtctgttctgatacagccaggaaataagatgttctggttaatatgtgctaaagatgtggtgctgactttccgactcagaatatgatcacatgtttttctcattaaaactatattgaatattatttgaccattgttgagtcagtcatcttgataaatattatcttc

SEQ ID NO: 464749 - DNA, 998 bp, Homo sapiens
attccggctcagcgcctggcgagtcctccgcttgtactgagacgcctgggatctcaaaatggcggccccgtgcggaaacagcgtctgggagcagtcatgttgcctcctgaacaaagccgctgaagatgaagaatgggcaaaatcgccccatacggaacagcgcagcctcgggagcccgttacctggctcgcgaacacgaagcgggagagttcgccaatatggatgtgacagcggttcccattaagcggtgataggatttttgggacctgataatcaagctagggaccctgggatggcacaaatgaaacaatctctctatcatgatattcccccgttgctctgaatgagttcagctctgtctgcatgatctatcccagactgaaaagagtttaccagctaagtactttcctgcaatgtagtatattcccgtttattgttccaacctgtcagtaattttttatacaggcaactgccttgttgaaaatcagcaataaaaatttaaaccaaagaaatcttaaaatcagcaataaaaatttaaaccaaagaaatcttaaaatcagcaattttaatccacaaatattgatttatcaagagaatttgctggtttggagtaaaatataaaagagcttgtcttactcagtttgggctgctgtaacagaatgccacagatggaggaccttaaacagcaaacatttatttctcacatttctggaggcagagaagttcaagatcaaggtgccagcaggtctagtgtttgctgatagcactcttcctgttttgtaaacttctcattgtatcctcacaaggccaagagacaaatcatctctctgatatttcctgttgtaagggcattaatcccatttattagggctctcatttcatgacctaattacctcccaaagaccccacttcccaatacaatcacattagaattgcaacatttgaattttggagggacaaacattcagtccataacagagctcttagaattttgtagg

SEQ ID NO: 464750 - DNA, 918 bp, Homo sapiens
agatatcagagcattctaaggcatattctctttcttattatgaaaggtgtagtttcagtcttgcttattcgtaagtttactgaaatagtttatgttctatttaacaaatatttattggacatctgctatttactctatggagggctgggtgttcagacattaacatgactatttgattgtttccttcctgatttattttgacaaaccctgggatggcacaaatgaaacaatctctctatcatgatattcccccgttgctctgaatgagttcagctctgtctgcatgatctatcccagactgaaaagagtttaccagctaagtactttcctgcaatgtagtatattcccgtttattgttccaacctgtcagtaattttttatacaggcaactgccttgttgaaaatcagcaataaaaatttaaaccaaagaaatcttaaaatcagcaataaaaatttaaaccaaagaaatcttaaaatcagcaattttaatccacaaatattgatttatcaagagaatttgctggtttggagtaaaatataaaagagcttgtcttactcagtttgggctgctgtaacagaatgccacagatggaggaccttaaacagcaaacatttatttctcacatttctggaggcagagaagttcaagatcaaggtgccagcaggtctagtgtttgctgatagcactcttcctgttttgtaaacttctcattgtatcctcacaaggccaagagacaaatcatctctctgatatttcctgttgtaagggcattaatcccatttattagggctctcatttcatgacctaattacctcccaaagaccccacttcccaatacaatcacattagaattgcaacatttgaattttggagggacaaacattcagtccataacagagctcttagaattttgtagg

SEQ ID NO: 464751 - DNA, 398 bp, Homo sapiens
attccggctcagcgcctggcgagtcctccgcttgtactgagacgcctgggatctcaaaatggcggccccgtgcggaaacagcgtctgggagcagtcatgttgcctcctgaacaaagccgctgaagatgaagaatgggcaaaatcgccccatacggaacagcgcagcctcgggagcccgttacctggctcgcgaacacgaagcgggagagttcgccaatatggatgtgacagcggttcccattaagcggtgataggatttttgggacctgataatcaagctaggggtcacagactactctcaagttgaaaaccttcagaagttttctcaaaccacttgtcccctccataactcgtgccttcacagaagaaaacatccttcaaataaatatcaaaacaaa

SEQ ID NO: 464752 - DNA, 575 bp, Homo sapiens
actgagacgcctgggatctcaaaatggcggccccgtgcggaaacagcgtctgggagcagtcatgttgcctcctgaacaaagccgctgaagatgaagaatgggcaaaatcgccccatacggaacagcgcagcctcgggagcccgttacctggctcgcgaacacgaagcgggagagttcgccaatatggatgtgacagcggttcccattaagcggtgataggatttttgggacctgataatcaagctaggggtcagcaggggggtttatgggttgagtctgggattggtattggggcagggttccttggggttcagtgacgaggtctatgagttcagtgatggttagtgatgagtgttgggaacatgtgggggtcattagcagggaggcctgtgtgatctgtgggtcagggatggagtgtctgcgccaagtgatggggtgtacgtgtggccagtgacttatggacctgtatgactggtgctatgatggtggtggggatggatgtgttctgtggggtttgtgatttctggacctggcgattcagtgattttaaggaccaagggctgttaaagttagtt

SEQ ID NO: 464753 - DNA, 1720 bp, Homo sapiens
attccggctcagcgcctggcgagtcctccgcttgtactgagacgcctgggatctcaaaatggcggccccgtgcggaaacagcgtctgggagcagtcatgttgcctcctgaacaaagccgctgaagatgaagaatgggcaaaatcgccccatacggaacagcgcagcctcgggagcccgttacctggctcgcgaacacgaagcgggagagttcgccaatatggatgtgacagcggttcccattaagcggtgataggatttttgggacctgataatcaagctagggacctgattcctcagacctctgccctatcggaagggaagcagaaaatgatcaggtctcagggtccagtgtcatttgaggatgtggctgtggatttcacccaggaggagtggcagcaactggactatgctcagaggaccctgtacagggatgtgatgctggagatctatagccacctggtctcaatgggatatccagtttccaaaccagatgtcatctccaagttggaacaaggagaagagccatggatcataaagagacacataccaaattggatctatccaggtgaaaatgtggcagatgggagacaagaaaaataaatgctcagttgctttattttatttttaactggcttatggctgaggcttagatctccacccagattgccatctcctatttcttcttgctcctgtggagagcatgtagtaggcattcaacaactaactcattaatagtgagccatgtacaaaaagagcaataaacaatctcttattcattatgtgaatgttgaaactggggagaagacctatgtatgtgttgaatgtggaaaatcctttctcaagaagtcacagattattatacatcaaagaattcatactggagagaaaccttatgattgtggtgcatgtggaaaagccttcagtgagaagtcacaccttattgcacatcagagaactcatactggggagaaaccttatgattgttctgaatgtggaaaaggcttttctcagaaatcatccctcattatacatcagagagttcacactggggaaaaaccatatgaatgtagtgaatgtgagaaagccttctcccagaaatcacccctcattatacatcagagaatacatactggggaaaagccctatgaatgtagagtgtgggaaagccttttcccagagtcacagctgattatacatcacagagctcatactggagagaagccatttcacactggtgagaaaccctacaaatgtgctcaatgtgaggaagccttcagcaggaagtcagaactcattatacatcagataattcatactggggagaaaccgtatgaatgtacagaatgtgggaaaacattctctcgcaagtcacaactcatcatacatcagagaacccacactggagagaaaccctataaatgtaccaaatgtggaaaatccttctgtcagcagtcacatctcattggacatcagagaattcacacgggagaacaaccttataagtcagaccttgttgtacatcagataattcatactggagagaaacctgatcgatgtactaaagagacactcatttataaatattccatgccaggtaaggatggcacataagtaatttccagttggtgaaacttcaacagacatgaggaggaaaacctatcacaaggttcctatctatgtagaatttagacaaacaagggggagggaggatgggctaag

SEQ ID NO: 464754 - DNA, 1181 bp, Homo sapiens
cagaatgcttaagaattcattttcatataaattctaccaaagaatcaaaggaaacctaagcagattttaaaacatcacatctaccatacccatattctcactctgctggtacagcatgcagcattaaaccaataacactgaccactagggttgccatatgtgggacatacttatgctagggaaagaaagtatgtattattcatctgaaatttaagattaactgggggttctgtattttgtctaaaaaccctggtaacaacgcagttccttgaaatataatagtggtcaagttaaataactgttaatatttcttctgttttctctgccttaggatgaagtattcatttgtgatgagcagtgtgcaaacaataataaagccaaatccacatttttgtgacactcctgacaaactgctgctgtattaaagaaataaattacaagtcctctattgctccactgcacagctctcatccctatttttgaggcatttcaatcaaccttgcaattttcaccaagtagtaagatattaaacatatattttatctgccctgaaatagcattgattttgaaactgtgagatcttctaattttttttccagataatggtcaaactggccctttgggttataaattaggtttttcatggctaatatacttcacatcggcacatattatacaagcaaaaattatgtcatcaaaaggctctggtacaatatgaagggagcataaatgtcaagattgatgatgacggctcggagccagctcattaaaggcaatggtgtgaataatataactatgttgcttttgaaagaaccgaatatgtattatccacctatcagtgcaccaaagcagcgtcataaacatagatctctaactgcagcccatttaaatgatgaaagggtatatattaatctatgaaatagattttacccaggggggaaaattgttctatttatgaaagttaaaaacattcagtgcacagagaagcacttatcagatgagcatccacggtatgcagatgcattttactaatgcttcctgctaagataaatagtctgtggtcatggaagatgctactataatttgctagaaataaaagaactaaaaagaacaacatgtaggcagctttttgtaaagcatggggagtaaatattctaaattactggacctctgtgttttat

SEQ ID NO: 464755 - DNA, 1345 bp, Homo sapiens
tgcttccaaccatctgagtaacaagtcaatatgactattttctggtaaaactgggaatgcttacagacgccaggggtgaaaggcattcaacaatgacttattttaaggatgaatttgtaaactgccagataaagggcgagagattgccaggatggtatcctacccacctgccaccttattgcaacggccctgagttgcagacacttgtcacttatgtgccctggactgtgtgtaagaactgtgttcccaatgcacagtcaacacaaagtcctctgtggttcactggaaccaccaccagcaccatcaccatcactagaaacaaacagattcaaaagctagcaaataacatacctcccagcagtcctctgaccacaccatacctgagcacatttactgtggacagcatgtttagcttgaagtctttccttctaccccatcatagctaccactgttgtgagaactcccatgtccagcactccagggaggtgacatcaggatgaagtattcatttgtgatgagcagtgtgcaaacaataataaagccaaatccacatttttgtgacactcctgacaaactgctgctgtattaaagaaataaattacaagtcctctattgctccactgcacagctctcatccctatttttgaggcatttcaatcaaccttgcaattttcaccaagtagtaagatattaaacatatattttatctgccctgaaatagcattgattttgaaactgtgagatcttctaattttttttccagataatggtcaaactggccctttgggttataaattaggtttttcatggctaatatacttcacatcggcacatattatacaagcaaaaattatgtcatcaaaaggctctggtacaatatgaagggagcataaatgtcaagattgatgatgacggctcggagccagctcattaaaggcaatggtgtgaataatataactatgttgcttttgaaagaaccgaatatgtattatccacctatcagtgcaccaaagcagcgtcataaacatagatctctaactgcagcccatttaaatgatgaaagggtatatattaatctatgaaatagattttacccaggggggaaaattgttctatttatgaaagttaaaaacattcagtgcacagagaagcacttatcagatgagcatccacggtatgcagatgcattttactaatgcttcctgctaagataaatagtctgtggtcatggaagatgctactataatttgctagaaataaaagaactaaaaagaacaacatgtaggcagctttttgtaaagcatggggagtaaatattctaaattactggacctctgtgttttat

SEQ ID NO: 464756 - DNA, 2785 bp, Homo sapiens
cagtgggagggtgtttgcagctctgccaaggaatattaatcagaggcaatgcatagggtttctaggttgattggtgtcgcattcttgggcattgggtgggtggatatctgtgtggtacctaatacactggagcccactggcaacaatgctcagacatggccttcccagctcctccaggggcccctccttccactaggttctccatccatctttcctggattcatgggagctgtcatttcctactctttgctggaaagggaacagtccactctctttctcttcggacaccaagaggaggggtgcctgtatctggatgggctggcctggcaggaagccctgggcacactagtggacccatgtttgtttcggtttgctgatggcactcctccttcttcctatgtcattttcccaggatttaagctgttctttggctgcaaatgtacctttggaagacgcacagtggggtctccaggcacagaaagtaaaccagctggaacagaatatgctggtagcctggaccgtgttgagtttcttggtgttctggtctttaagggagcagctgctatcctgcagttggggctggagtacatgatgagcagttgttatttgtcagtgtagtttgtctggaaatgaatgctgatgttaggcaacttaatcccttccttgtgacttttgctcctatttccaagctgggtatctcttacacaggcattaacaagtaggttgactgtcgggacaagcccagggatggcattgtttctatttgctgataaatgactctggggctgtgaagactcagacccaaggagtgactcagaaagtcaggggcccatgtcattctgctctgggttcagacgtgcactgcagcagcaccgggacttgacagccctacggctcgatcagctttctgttttcattgccttacgatgccatgagtggaactattgtcaaatcagagttcactccccagcttttcagtctttcccctaattcttgctctatcagaggtcgaggacaacagtataatgattcataggttctacttcctggcaagtaatcattttcccacgggcccttgtgaattgatgaatatgaagacactaagaaagcagaaatagaactgagaagaatgaaataactgtctctacctttctcgaattgtctaatatggaaagaatgaaagacagctaataagcaactctctgcaagaagacatatggcttaggttctgctgagctattggtgatttgattccatgcatatgtattcactactgagatgggatcttgctatgtggcccaggctggcctcaaactcctggcctcaagatatttccccctgccttggcctctcaaagtgaccactctttttcttatcttactcagaatctacttggagagagtcaaacacagaatccctttgaatttaatggccattccaggtgatttgaacagccaaataagaaacaggtcctcttcaatgtacaatctgccaagtatgaagtctgaatgaccatcattattatgtatttaatgtgcatagaaaatctatctgcaaccttccagagtgtaccagaagtttggaatgtacattattattggctccatctcaaaccactcataaatcaaagaaaatagcagttccagaggaatcatcatagaggcttctaggcccccatgctgtgtgaacctggtgagaaagggaagtctgctctcactggacactggaactgtttgtctctgtctctgctgtactttccctgcctctacctcacttagtaaagaaatcatctttgcttgataactaaaacaaccaataaggctgagaaaggggaaaacccacatctggatttaaatacaaggtatgtttttgactttgtcagaaactgctaaactgcttttcaaagtagttgtaccattttacactctcacaggcaacgcatgaaaattcccttggcaacgtttgatattgccaatctttaattttagttattctagtgggtatagagtaatatcacattggttttaatttatattcccaaaatgactaatgtttaacatcttggatattcacatgtctttgtgaagagtctactaaaatcttttgcccttttaaataaattgtattaattgccttcctattgagttggagatatgctttatgtattctggatatactcctgtatccattaaggtgttgcaaatattttcttccagtccgctttttcatttaaaaaaatttttttttgaagacagcagaaggatttactgttgaaaaagtccaatttaagcactttaaaatttttaattaaaaaattatttttagtgatttttccttttttatctaaaaaatctttgcctaccacagggtcatcatacatgtttgaatctatttcagaactttctattctattccaccatcttgattgctatagcttcacagttaagttttaaaatcgagtagtgtaagttatctttctaaacattgtttttcccccttagattcttttctttttcatgtataatttaaaataagcttgtgaatttctttaaaaaaaagcttgccaggattttgattgggattacatcaaatctgtagattaatttgctaagaatggagaacaatactgagtcttccaatccataaacatagtattatctccatttttcaattctttaaaaatttccctagcaatgtcttacagatttctgtgtaaaagtcttgcatattttttgtctaaatttatttctaaatttctatgtcttctgagacctttgtacctggc

SEQ ID NO: 464757 - DNA, 1616 bp, Homo sapiens
ggagttaggaacagactataagaaatggttggtctggaggaaaaagggtaaaacttatgagggcccttgtgaattgatgaatatgaagacactaagaaagcagaaatagaactgagaagaatgaaataactgtctctacctttctcgaattgtctaatatggaaagaatgaaagacagctaataagcaactctctgcaagaagacatatggcttagaatctacttggagagagtcaaacacagaatccctttgaatttaatggccattccaggtgatttgaacagccaaataagaaacaggtcctcttcaatgtacaatctgccaagtatgaagtctgaatgaccatcattattatgtatttaatgtgcatagaaaatctatctgcaaccttccagagtgtaccagaagtttggaatgtacattattattggctccatctcaaaccactcataaatcaaagaaaatagcagttccagaggaatcatcatagaggcttctaggcccccatgctgtgtgaacctggtgagaaagggaagtctgctctcactggacactggaactgtttgtctctgtctctgctgtactttccctgcctctacctcacttagtaaagaaatcatctttgcttgataactaaaacaaccaataaggctgagaaaggggaaaacccacatctggatttaaatacaaggtatgtttttgactttgtcagaaactgctaaactgcttttcaaagtagttgtaccattttacactctcacaggcaacgcatgaaaattcccttggcaacgtttgatattgccaatctttaattttagttattctagtgggtatagagtaatatcacattggttttaatttatattcccaaaatgactaatgtttaacatcttggatattcacatgtctttgtgaagagtctactaaaatcttttgcccttttaaataaattgtattaattgccttcctattgagttggagatatgctttatgtattctggatatactcctgtatccattaaggtgttgcaaatattttcttccagtccgctttttcatttaaaaaaatttttttttgaagacagcagaaggatttactgttgaaaaagtccaatttaagcactttaaaatttttaattaaaaaattatttttagtgatttttccttttttatctaaaaaatctttgcctaccacagggtcatcatacatgtttgaatctatttcagaactttctattctattccaccatcttgattgctatagcttcacagttaagttttaaaatcgagtagtgtaagttatctttctaaacattgtttttcccccttagattcttttctttttcatgtataatttaaaataagcttgtgaatttctttaaaaaaaagcttgccaggattttgattgggattacatcaaatctgtagattaatttgctaagaatggagaacaatactgagtcttccaatccataaacatagtattatctccatttttcaattctttaaaaatttccctagcaatgtcttacagatttctgtgtaaaagtcttgcatattttttgtctaaatttatttctaaatttctatgtcttctgagacctttgtacctggc

SEQ ID NO: 464758 - DNA, 1690 bp, Homo sapiens
tttttttgagacaagctctatcacccaggctggagtataatgtcacgatcatagctcactataaacttaaactccagggttcagccgtggaacacaggtgatcttcttgactcagccttttgagtagctgggactacaggcccaccacactgtctaattttttatttatttatttttgtagagatgggatcttgctatgtggcccaggctggcctcaaactcctggcctcaagatatttccccctgccttggcctctcaaagtgaccactctttttcttatcttactcagaatctacttggagagagtcaaacacagaatccctttgaatttaatggccattccaggtgatttgaacagccaaataagaaacaggtcctcttcaatgtacaatctgccaagtatgaagtctgaatgaccatcattattatgtatttaatgtgcatagaaaatctatctgcaaccttccagagtgtaccagaagtttggaatgtacattattattggctccatctcaaaccactcataaatcaaagaaaatagcagttccagaggaatcatcatagaggcttctaggcccccatgctgtgtgaacctggtgagaaagggaagtctgctctcactggacactggaactgtttgtctctgtctctgctgtactttccctgcctctacctcacttagtaaagaaatcatctttgcttgataactaaaacaaccaataaggctgagaaaggggaaaacccacatctggatttaaatacaaggtatgtttttgactttgtcagaaactgctaaactgcttttcaaagtagttgtaccattttacactctcacaggcaacgcatgaaaattcccttggcaacgtttgatattgccaatctttaattttagttattctagtgggtatagagtaatatcacattggttttaatttatattcccaaaatgactaatgtttaacatcttggatattcacatgtctttgtgaagagtctactaaaatcttttgcccttttaaataaattgtattaattgccttcctattgagttggagatatgctttatgtattctggatatactcctgtatccattaaggtgttgcaaatattttcttccagtccgctttttcatttaaaaaaatttttttttgaagacagcagaaggatttactgttgaaaaagtccaatttaagcactttaaaatttttaattaaaaaattatttttagtgatttttccttttttatctaaaaaatctttgcctaccacagggtcatcatacatgtttgaatctatttcagaactttctattctattccaccatcttgattgctatagcttcacagttaagttttaaaatcgagtagtgtaagttatctttctaaacattgtttttcccccttagattcttttctttttcatgtataatttaaaataagcttgtgaatttctttaaaaaaaagcttgccaggattttgattgggattacatcaaatctgtagattaatttgctaagaatggagaacaatactgagtcttccaatccataaacatagtattatctccatttttcaattctttaaaaatttccctagcaatgtcttacagatttctgtgtaaaagtcttgcatattttttgtctaaatttatttctaaatttctatgtcttctgagacctttgtacctggc

SEQ ID NO: 464759 - DNA, 1993 bp, Homo sapiens
gtgtctccaaacagctttatgccatgaaatctgctgactctggctctgcctctgcccttccagatggcctggtggattgtttggaccctgactgctgcctgcagtcagcctgtcagaacagcctgctctgccgggggtcccgggacccactggacatcattcagcagggccagacggattggcccgcagtgaagtccttctatgaccgtatcaagctcttggcaggcaaggatagcacccacatcattcctggagagaaccctttcaacagcaggacacccaggaatgcaaaagtaagtgcatccaaaaatcgagccgactttgacaagattgtgacaaaggacggcttggtttctctcatccgaggccaagtagtaactacagatggaactcccctggtcggtgtgaacgtgtcttttgtcaagtacccaaaatacggctacaccatcacccgccaggatggcacgttcgacctgatcgcaaatggaggtgcttccttgactctacactttgagcgagccccgttcatgagccaggagcgcactgtgtggctgccgtggaacagcttttacgccatggacaccctggtgatgaagaccgaggagaactccatccccagctgtgacctcagtggctttgtccggcctgatccaatcatcatctcctccccactgtccaccttctttagtgctgcccctgggcagaatcccatcgtgcctgagacccaggttcttcatgaagaaatcgagctccctggttccaatgtgaaacttcgctatctgagctctagaactgcagggtacaagtcactgctgaagatcaccatgacccagtccacagtgcccctgaacctcattagggttcacctgatggtggctgtcgaggggcatctcttccagaagtcattccaggcttctcccaacctggcctacaccttcatctgggacaagacagatgcgtatggccaaagggtgtatggactctcagatgctgttgtgtctgtcgggtttgaatatgagacctgtcccagtctaattctctgggagaaaaggacagccctccttcagggattcgagctggacccctccaacctcggtggctggtccctagacaaacaccacatcctcaatgttaaaagtggaatcctacacaaaggcactggggaaaaccagttcctgacccagcagcctgccatcatcaccagcatcatgggcaatggtcgccgccggagcatttcctgtcccagctgcaacggccttgctgaaggcaacaagctgctggccccagtggctctggctgttggaatcgatgggagcctctatgtgggtgacttcaattacatccgacgcatctttccctctcgaaatgtgaccagcatcttggagttacggcaccctgtgggcaacagagaaccatgggagaagacagaggctaatcagccctcacctggtacagtctcacctccaaaccttcactcttgctgcttgctctgcttaaaataccttctctacctaatctaccacatcacatccacctgcaaggcccagtgtcagggccccctcttccacgtagcctgatctccccagcagaaaccattgtcacccacctctgagtcactacaccctctgatcctccattagagttgatgccactgaatgccttgttgtcattatctccatttttagaacatcttaggaattagacctcaatatgaggcagtaaattatacgggatgggacggtatctctctcccttttcttagcttagctccttttaataaacataagaatctcacaccttacataatttttgaaatttccatttttttattttttaaacataaaataatattatgatattaaacatgcttttttccaactaaaccgcttctccatgctgacattctgatggtgctttcagcatggagtcaagggcaccaatcattagaggagaccttcagagaagggacatgtccaacccagatatgttagta

SEQ ID NO: 464760 - DNA, 1989 bp, Homo sapiens
gagaggatcccctgtttaaagcacaccctcctgtgctgattacaaggattatgagggagatggcctggtggattgtttggaccctgactgctgcctgcagtcagcctgtcagaacagcctgctctgccgggggtcccgggacccactggacatcattcagcagggccagacggattggcccgcagtgaagtccttctatgaccgtatcaagctcttggcaggcaaggatagcacccacatcattcctggagagaaccctttcaacagcaggacacccaggaatgcaaaagtaagtgcatccaaaaatcgagccgactttgacaagattgtgacaaaggacggcttggtttctctcatccgaggccaagtagtaactacagatggaactcccctggtcggtgtgaacgtgtcttttgtcaagtacccaaaatacggctacaccatcacccgccaggatggcacgttcgacctgatcgcaaatggaggtgcttccttgactctacactttgagcgagccccgttcatgagccaggagcgcactgtgtggctgccgtggaacagcttttacgccatggacaccctggtgatgaagaccgaggagaactccatccccagctgtgacctcagtggctttgtccggcctgatccaatcatcatctcctccccactgtccaccttctttagtgctgcccctgggcagaatcccatcgtgcctgagacccaggttcttcatgaagaaatcgagctccctggttccaatgtgaaacttcgctatctgagctctagaactgcagggtacaagtcactgctgaagatcaccatgacccagtccacagtgcccctgaacctcattagggttcacctgatggtggctgtcgaggggcatctcttccagaagtcattccaggcttctcccaacctggcctacaccttcatctgggacaagacagatgcgtatggccaaagggtgtatggactctcagatgctgttgtgtctgtcgggtttgaatatgagacctgtcccagtctaattctctgggagaaaaggacagccctccttcagggattcgagctggacccctccaacctcggtggctggtccctagacaaacaccacatcctcaatgttaaaagtggaatcctacacaaaggcactggggaaaaccagttcctgacccagcagcctgccatcatcaccagcatcatgggcaatggtcgccgccggagcatttcctgtcccagctgcaacggccttgctgaaggcaacaagctgctggccccagtggctctggctgttggaatcgatgggagcctctatgtgggtgacttcaattacatccgacgcatctttccctctcgaaatgtgaccagcatcttggagttacggcaccctgtgggcaacagagaaccatgggagaagacagaggctaatcagccctcacctggtacagtctcacctccaaaccttcactcttgctgcttgctctgcttaaaataccttctctacctaatctaccacatcacatccacctgcaaggcccagtgtcagggccccctcttccacgtagcctgatctccccagcagaaaccattgtcacccacctctgagtcactacaccctctgatcctccattagagttgatgccactgaatgccttgttgtcattatctccatttttagaacatcttaggaattagacctcaatatgaggcagtaaattatacgggatgggacggtatctctctcccttttcttagcttagctccttttaataaacataagaatctcacaccttacataatttttgaaatttccatttttttattttttaaacataaaataatattatgatattaaacatgcttttttccaactaaaccgcttctccatgctgacattctgatggtgctttcagcatggagtcaagggcaccaatcattagaggagaccttcagagaagggacatgtccaacccagatatgttagta

SEQ ID NO: 464761 - DNA, 579 bp, Homo sapiens
aatgagggccgagtagatgtaggcgagctcggagagggaggccatggcacgggtgtgtgtggggctggcgctgctggatgaggtgctaatcgccggatgaagaatggcttcagggaaagatacttgtcctactttgcctaaactcactaacaactgctctgatgagagtctctataaatctgctaataagtatgaagagattcatttgccacgattttcattaaagcaagggatgatcccaagacgttatgtcatgccttggaaagaaaacatgatattcaggaatgtgaatctgaagcaagcagaagtgtgtgggatccatactggccctttagaagactctctgtttttgaatcacagtgaaaggctttgccatggggaagatcgtaaagttgtcttccaaaaaggcccaccagaaataaaaattgcagatatgcctttgcattcgcctctctccagataccaaagcactgtgatttcccatggcttcaggaggcgactagtctaatgaaagaagaataaaataataaagtgtttcaatctctgctctcttactgtctctgataaatgtttaagttc

SEQ ID NO: 464762 - DNA, 517 bp, Homo sapiens
aatgagggccgagtagatgtaggcgagctcggagagggaggccatggcacgggtgtgtgtggggctggcgctgctggatgaggtgctaatcgccggatgaagaatggcttcagggaaagatacttgtcctactttgcctaaactcactaacaactgctctgatgagagtctctataaatctgctaataagtatgaagagattcatttgccacgattttcattaaagcaagggatgatcccaagacgttatgtcatgccttggaaagaaaacatgatattcaggaatgtgaatctgaagtgaaaggctttgccatggggaagatcgtaaagttgtcttccaaaaaggcccaccagaaataaaaattgcagatatgcctttgcattcgcctctctccagataccaaagcactgtgatttcccatggcttcaggaggcgactagtctaatgaaagaagaataaaataataaagtgtttcaatctctgctctcttactgtctctgataaatgtttaagttc

SEQ ID NO: 464763 - DNA, 2389 bp, Homo sapiens
tctgttaggctttatgagttaattatgaaaacatacacgtgtttttcaggttgtccgggtgccaaaaagcatgagtttctgaccagcgttctggacgcgctgtccacggacatggtccacgccgcctccgacccctcctcctcgtcaggcaggctctcagaacccgaccccagccataccctagaggagcgggtggtgcactggtacttcaaactactggataaaaactccagtggagacatcggcaaaaaggaaatcaaacccttcaagaggttccttcgcaaaaaatcaaagcccaaaaaatgtgtgaagaagtttgttgaatactgtgacgtgaataatgacaaatccatctccgtacaagaactgatgggctgcctgggcgtggcgaaagaggacggcaaagcggacaccaagaaacgccacaaccacggttggcttcccccagaatggattgtcttctggtatttgaggtgcaaacctgggaaccactggaataaccaaccctgcacctgagctccaaccaaatgttaggaactcaccaaccctgctcctgagctccaaccaaatgttaggaactcaccaaccctctacctgagctccaaccaaatgttaggaactcaccaaccctctacctgagctccaaccaaatgttaggaactcaccacccctgtacctgagctccaaccaaatgttaggaactcaccaaccctgtacctgagctccaaccagatgttaggaactcaccacccctgtacctgagctccaaccagatgttaggaactcaccaaccctgcacctgagctccaaccagatgttaggaactcaccaaccctgcacctgagctccaaccagatgttaggaactcaccaaccctgcacctgagctccaaccagatgttaggaactcaccaaccctgcacctgagctccaaccagatgttaggaactcaccaaccctgcacctgagctccaaccagatgttaggaactcaccaaccctgctcctgagctccaaccaaatgttaggaactcaccaaccctgtacctgagctccaaccaaatgttaggaactcaccaaccctgtacctgagctccaaccagatgttaggaactcaccaaccctgcacctgagctccaaccagatgttaggaactcaccaaccctgcacctgagctccaaccagatgttaggaactcaccaaccctgctcctgagctccaaccaaatgttaggaactcaccaaccctctacctgagctccaaccaaatgttaggaactcaccaaccctctacctgagctccaaccaaatgttaggaactcaccaaccctctacctgagctccaaccaaatgttaggaactcaccacccctgtacctgagctccaaccaaatgttaggaactcaccacccctgtacctgagctccaaccaaatgttaggaactcaccacccctgtacctgagctccaaccagatgttaggaactcaccaaccctgcacctgagctccaaccagatgttaggaactcaccaaccctgcacctgagctccaaccagatgttaggaactcaccaaccctgcacctgagctccaaccagatgttaggaactcaccaaccctgcacctgagctccaaccagatgttaggaactcaccaaccctgcacctgagctccaaccagatgttaggaactcaccaaccctgcacctgagctccaaccagatgttaggaactcaccaaccctgcacctgagctccaaccagatgttaggaactcaccaaccctgcacctgagctccaaccagatgttaggaactcaccaaccctgcacctgagctccaaccagatgttaggaactcaccaaccctgcacctgagctccaaccagatgttaggaactcaccaaccctgcacctgagctccaaccagatgttaggaactcaccaaccctgcacctgagctccaaccagatgttaggaactcaccaaccctgcacctgagctccaaccagatgttaggaactcaccaaccctgcacctgagctccaaccagatgttaggaactcaccaaccctgcacctgagctccaaccagatgttaggaactcaccaaccctgcacctgagctccaaccagatgttaggaactcaccaaccctgcacctgagctccaaccagatgttaggaactcaccaaccctgcacctgagctccaactaaacgttaggccagttcacaagccgtaaaatcattgctgtggcccagaccagttattccaatggttatagcagttttaacaattgaaaatacttttttttgtgggcctggcctacccaaccgtgacaggaaatccctctgaataatctgatatgtctcatttttactgtcttcttagtaatca

SEQ ID NO: 464764 - DNA, 535 bp, Homo sapiens
tctgttaggctttatgagttaattatgaaaacatacacgtgtttttcaggttgtccgggtgccaaaaagcatgagtttctgaccagcgttctggacgcgctgtccacggacatggtccacgccgcctccgacccctcctcctcgtcaggcaggctctcagaacccgaccccagccataccctagaggagcgggtggtgcactggtacttcaaactactggataaaaactccagtggagacatcggcaaaaaggaaatcaaacccttcaagaggttccttcgcaaaaaatcaaagcccaaaaaatgtgtgaagaagtttgttgaatactgtgacgtgaataatgacaaatccatctccgtacaagaactgatgggctgcctgggcgtggcgaaagaggacggcaaagcggacaccaagaaacgccacacccccagaggtcatgctgaaagtacgtctaatagacagctcaaggaaacaaggataaatggctcagaccccgaaggcagtcccaagttcgggatcctctagaatcagc

SEQ ID NO: 464765 - DNA, 1710 bp, Homo sapiens
cgccgtggccgaagcgcggtggccgaagcgggggacgggggtgggacttacggggacagaaggcggagcttccagcagctgctggcccccctgggtccagaggagccttgccgccctcacctgcgcagagcctggagccgacgcgtcacccccagcggaagcgcctcgctgcccgggcgtctggcgaggtgtgcgctccgggtcccagctccagcgcttcgcggcagtcgcccgcctctttccgcaagcagggcggggactgggcggcatctaccgagatctgcgattcgaggcgccgaggagccgaagaccacagctcagctcagacggcgccctagggccgcacagagggtcgggcagtgccggagagaggtttgaaagcgccgccgccaactcgacagcgcgtcccagcgccttgagctcgcttcctcctgctctcaggaaaaactgaggaaacgcgcctggttccaggggtcggcggggaccgtggagacgctgccagcatcctcaacagcttggaaatcccatcaccttggttccctgagacttggaggactagtaggaactgacagctggctgacagaaaacttatccagggagagaagagacaaaagtgaagtgtgaaattttgaataatgttttcagatgctttgcattcagaatagacctctgagttgggacccaagctgtcaactgatcccaaattcctaagttcctgacttgcaggtattgagttctaacctccgaagatggatgaaggtatggaaatttcaagtgaaggaaattccttgatcaaagcagtccatcagagccggcttcgcctcacaagacttttgctagaaggcggtgcctacattaatgagagcaacgaccgtggggaaacccctttaatgatcgcttgtaagaccaaacatgtcgatcaccagagtgtcagtaaagccaaaatggtgaaatacctgttagagaacaatgccgatcccaacatacaggacaaatctgggaaaacggctctgatgcatgcttgcttagaaaaagctggccctgaagttgtttccttgctcctcaagagtggggctgacctcagcttgcaagaccattctagttactcagctcttgtttatgctataaattcagaagatacagagaccctgaaagttcttcttagtgcttgcaaggcaaaagggaaagaggtcatcatcatcacaacagcaaagtcgccctgtgggaagcatactactaaacaatacttaaatatgcctcctgtggatatagatgggtgtcattccccagctacctgcaccactccttcagaaatagacatcaaaactgcctcatcgccactttcacattcttctgaaacggaactgacgctttttggctttaaagatcttgagcttgctggaagcaatgatgatacctgggacccaggttcccctgtgaggaaacctgcattggcccctaaggggcccaagctcccccacgctccaccctgggtcaagaatgtttgcaacagcagttaggcgtgtatatatgcacatatttttaaatacatttttgttatattttaacttcatttaagagtagatttaacttacaggtataatgacattttatttattcgtttcacagaagcaagattcagtcacccttgacacactactagttctacaccgccccccagttcctcagcctggtcgatccaggtatcta

SEQ ID NO: 464766 - DNA, 3392 bp, Homo sapiens
aaatgaagagggcagaggggtcatggaccttgcctgtcacacatcttttacgagcaaacaaaatgtgatgagatgactgaagacttgagatctggttagtgataccaccaatgagatgagcaccacagttattcaagccagcccagccctgtccaaggaataggctgtggaaaaattgagagaatttccatttcagaatataggaaaaggaacataaaggaacattaccatctatgatcccaaacgactgatatgaaaaaatgactgcaactacttctctgagtagcaagcctaaagatgtaaaacctaaccttagatcaagtgaagatccttcctccaaaagtggagatctgttggaacccagtgaggtggattggacgtcagacctcaagaaagtggaccggatcgggctggctctcctgagcaagtcaggtctgagtcgtcagacggggtcagctgctcacacctccctgtgtcctgccaggagactgtagatgatgatcaaagaatcatcactaaagctacgtcaactgcaagttgtgagctcagaggccgggacctgttcccagcggaaccattcatggctctgcagctgagacgcagaacatggggctgcggtgcctgcactcttgatgtcacccctcccagcacagcttccttcagccagaggtattgaagaacactcccttcagctggaagtgtcgccctgcctcagtgccaggctggcagggccatagcctgtggcttctcaggaggccatccctatccagctgtcacgggagagcatgtgcagaactctgtggctgtggaatttgggaccaaataccggctctggatggatgggcacctcttccatctgcgacccatattctgatgcctcacatcggaacctgctaagcacagcgaagccttttcctgtgcattctattggtacaaactggaaagaaaccacgagattcaggaatgacatcagtactggtttagagttgaatcctggagtgagcgagtgcttccagcttgtgagtttctgggtgtctgtggtggagaggcagcactcagcaaagacttggaaccaacctaaatgtccaacaacaatagactggattgagaaaatgtggcacatacacaccatggaatactatgcagccataaaaaatgatgagttcatgtcctttgtagggacatggatgaaactggaaaccatcattctcagcaaactatcgcaaggacaaaaaaccaaacaccgcatgttctcactcataggtgggaattgaaacaatgagaacacatggacacaggaaggggaacatcacacaccggggactgttgtggggtggggggaggggggagggatagcattaggagatatacctaatgctaaatgacgagttaacgggtgcagcacaccaacatggcacatgtatacatatgtaacaaacctgcatgttgtgcacatgtaccctaaaacttaaagtataataataataaaataaaaaaataaaaaagtctattaaaacaattttacagattgatggagctatttgaacttgttcatgctcagcatcgcttcatgaatcttctactttttcctctgttgtagactttatgatctgtatttgaaacgaaccgttgtgtagttgatttcagatttctgtttcttgaggcactaatgtttccaccagttacttttgttgaatcttcctgactttctttgagtggattccatttttttggtatttaaaaatgtttcatgcaagttcacattgattgaggctgcttttctgctttaggaatcccatgtgtcctgctttttggaaatgtccctagaggatactttgcagaaatgctggaggcactgaaagccttcgtgatttttagcctggggctcccatgcctggtggggccttggcccaggccttcatgttcctgttaacaaccttcgatgccacccacctctggacaggttccttgttatccccacagacatgcgatcagactttttttcagttttctttttatttctagaaagaatgcttctttgactttctgggctttatgtatagaattcaaatttcattttagcctctccctgtccacaacaagaagtcacaccacaacaagcttgaagtcacatcgattgttctctggaaggtattaaagctttacctccttgagggtcaatctggaccccagacttttctgagccactgtggaagtcagctccctcttgccaggcggcctttgatttccctttattttatggttgtataaggcaaagcaaaatgtgtgtgtgttaaatatattcagccctgtgtatctgtgggtcctgcatcctcacattctaccaagcttgaatcaaaaatatccacatcccctcataaaaaagctggttgcatttgtactgaacatgtacaagcatttcttccttgttactgttctctacacggtaatgtataacaactatttacgtagcatttacactctattaagcattgtgaataatctaggaatgatttgaagtatgaaggagaatgtgcctaggctgcaggcaggtactgtgccatttcatgtcagggacttgcccagattgtggtgtccagtggcgttcccacgtcttcaaatatttccatatgtgggggtctcagggtctcagttatgttggtcacccctgattaaggaagtcagttcttcatgatcataggcactttttggaagctttaaatacgtctattttgatatattttaaacatttttaaataaaatcggaaaatgcgaagatactagtggtatttttgaaaagaatggagaagtcattattctaagagtaggactcattgttaaaactttctaataatagaggggaggtctatgtaatttatacaattgtcacttcatctcaagattaaatagccttttccaggaggcagcagcttaattctctggtccatttgggtatatagatgacctcaaaaaaagaatttaatatttatctttgtagaaaataagcaattggaaagttctccttaatcctgactcttaatttatggctagaaatggcattgatatgaacataaggagtgctatttattaatatattgcttttcataaatcagttccttttttgtaattaggtagaaacagaacagaaagccattcttgattttggtgactggagttgtggaggctggaagtctctgccaataaaagcactgaactggacacacaccacttaccaatcaagttgattctcaatgttgtgagtatgaatgtacaggaaaaaatgctgttcacagaatacattctatgaactgaactatttttgttaaagattttgttaacacagttcatgttcttattgctattggctttactgacactgagtcttctctttc

SEQ ID NO: 464767 - DNA, 918 bp, Homo sapiens
tccaggtctgcccagcaccagacttgcccctcccaatggcctttcagttccctgagctcctgcagcccaaccaccagattcagagtattaaaattcaccttgcttttatttactcattgatacacccctcttcccccacctatgctccctccccactacatgtcacccactctgcaccagttaggcttctagaacctggaaacattttccagggaccctaccttctcccccaggaagctttccaggaattagctttcattgccctccctacttctgaccagatagtttggctccagggaccctaccttctcccccaggaagctttccaggagttagctttcattgccctccctacttctgaccagatagatgtggctgtggacttcaaacaggaggagtggcagcaactggaccttgctcagagagtcctatatatgatgtgatgttagagaattatagtcattaccctaattttagtgcatgaggatagagtccctgaattagaatgtttccaatactgagcactttcactttggttttgtggcctcagaaatatttattgcttttgcccttgaaggattgtgcatctctcttgcctaaataatagcataattgactcatttacctataaatgatattgactttgtcaagtactgatacccaagttttgtgttattttgtacaaacagtatctaccaaagcaaacacgactgtcatactgaagcatggagaagaaccatggacactggggggagaacctcaaggtttggactattaatgaattgaaataatatgccagaagaaccagaagctatcatagctgaagatgtttcattgtctaatgagataatgaaaaaattgagataatgaaaatagtgagataataaaataattaaaataatgagataatgaaaataa

SEQ ID NO: 464768 - DNA, 419 bp, Homo sapiens
cctccctcccatacctgcaaaggcccaattaaagaaacctccctatcctgtcttactgggcaaaggcccaaggaacaccatgatgacatcccaccagaaaaagggtcaaaccccccctatcatgggtacatcttattgatatcctgccgggcagcaagccacactatccagacttctcccagccataccttatctaccaaagcaaacacgactgtcatactgaagcatggagaagaaccatggacactggggggagaacctcaaggtttggactattaatgaattgaaataatatgccagaagaaccagaagctatcatagctgaagatgtttcattgtctaatgagataatgaaaaaattgagataatgaaaatagtgagataataaaataattaaaataatgagataatgaaaataa

SEQ ID NO: 464769 - DNA, 725 bp, Homo sapiens
ggaaatcttcgcgttggaaaagggaatttttatgagactgcaaagaagcataaaatgaatagacaatccaaccaaccaaagaccgggggcagcagcaggccagcaagacggcatcttctccttcccagcctagaagccctgtgaaatcgaggatcttccccctaaaacacatacacacaagatatgtgcaatcaagctgccaccgcttggtaaaaagctcatggtgcctaaccaaaaaggatcaggaacagatccttgaatcagctgtcacttctatagaatgggatttttttttccttcctccttaacctgcgctggaaattgccgttggctttatacatctctatagagagaggctaaagagtcttgcgtgagaaagaagcaatttacaatgcaaatagaggcctgtgaagggacggatgctgctgctcactcgtaacagcttgctgcaccttaatagctggttttattttctgatattaatagatgaattgttggctaacgctgccggagattacttgctgaaaggaaaaagaaaagttcggaataaactctgaaggcaacagatctcgtttggatgttttagccgcgcacacacacaaacagaaaccaggtcatatttacataaaaggaggaatcttaagcgcggcaagtatcctggacgaccactcttcggtactgccagaaaggatcaggacctggagtctggcaagaggaagacagag

SEQ ID NO: 464770 - DNA, 616 bp, Homo sapiens
atccttaattaaattaatctccctcccccggacagaaagagagagagagagagagagagagagagagagagagagagagagaaacgagctggcggagaggagcagaaggcaggaggggaaatctggcacaacggctgggagaggaaacttgatgcttctgggccaccatttgccagggcctcgctcgagccggcgcctcggttcctgcccagctggatttggggggcagcattgcctggcgcagggagatcaaatgagactgcaaagaagcataaaatgaatagacaatccaaccaaccaaaggaaattgctttggagatgaggaaacaaactcttatggagacctaagagactgaagacatctggcgtggactactctgatgactcattgcttccagctgttcgtggaccaatactagatgccagcaatagagaaatcactgcagttccccaaaggaaaaaagtcacgtgttcatgatgatcaaacacagctgtttgattggtgttaaaatggatctgcctgataagacctggaactgagaacccaaacagagccttaaggatgacacatgcttcatacagtaagtgcttcagatgctacccatggaggataggt

SEQ ID NO: 464771 - DNA, 825 bp, Homo sapiens
gctagctggaacgactctcttaatcttccaccgctacacagatagaagataaggctctgcccacagtctccaggctgcagcatctggtgaggaagggaaggtgtatggctgcattgtttttctcttggtgttcaactggaatagagcaggaaattgctttggagatgaggaaacaaactcttatggagacctaagagactgaagacatctggcgtggactactctgatggtaaaattgaaagtacaccctaaatttgctttgttacaggattctcttcagaggacaagagaagatgttacattctctgcatgaggacaattctgcagcatcaaaatcgaataatatttgttttctggcagcagaattttgtatcatatttctaaagacagtaagcacttgggtggacgtcaatgaatactaaacactaattgatctgatacagccgtatgcacatacacagatatacatggtggcttgtaatggttgaaaaattacggtttggttttattaaaagatctgtcacttttaggtcagagtgggattttggagggatagtctcccacaatagaaaactaccctgacaacagtggtgttttgaggttgtttgttgtttggcttcttgatgatgcttagctaaggagacacttcctttcagattctgtcttccaaaccccagggctctgttctgggcagttcagcctaatggaattaagcctgacatgtttcaactctatttcttgataaaataaacataaaacaatggtttagatttcgaaataaaccagagcggccttcctttagggaagggtaatctgaacctcccg

SEQ ID NO: 464772 - DNA, 911 bp, Homo sapiens
caaaccttttgctatgttgtttctggggctacatgcatggacttctaagaagttttctcaagatttcaacagctcctttctttcattggaaggaggagtaacaccatttctttattgtatggcagagatagaagataaggctctgcccacagtctccaggctgcagcatctggtgaggaagggaaggtgtatggctgcattgtttttctcttggtgttcaactggaatagagcaggaaattgctttggagatgaggaaacaaactcttatggagacctaagagactgaagacatctggcgtggactactctgatggtaaaattgaaagtacaccctaaatttgctttgttacaggattctcttcagaggacaagagaagatgttacattctctgcatgaggacaattctgcagcatcaaaatcgaataatatttgttttctggcagcagaattttgtatcatatttctaaagacagtaagcacttgggtggacgtcaatgaatactaaacactaattgatctgatacagccgtatgcacatacacagatatacatggtggcttgtaatggttgaaaaattacggtttggttttattaaaagatctgtcacttttaggtcagagtgggattttggagggatagtctcccacaatagaaaactaccctgacaacagtggtgttttgaggttgtttgttgtttggcttcttgatgatgcttagctaaggagacacttcctttcagattctgtcttccaaaccccagggctctgttctgggcagttcagcctaatggaattaagcctgacatgtttcaactctatttcttgataaaataaacataaaacaatggtttagatttcgaaataaaccagagcggccttcctttagggaagggtaatctgaacctcccg

SEQ ID NO: 464773 - DNA, 883 bp, Homo sapiens
atccttaattaaattaatctccctcccccggacagaaagagagagagagagagagagagagagagagagagagagagagagaaacgagctggcggagaggagcagaaggcaggaggggaaatctggcacaacggctgggagaggaaacttgatgcttctgggccaccatttgccagggcctcgctcgagatgagactgcaaagaagcataaaatgaatagacaatccaaccaaccaaagaccgggggcagcagcaggccagcaagacggcatcttctccttcccagcctagaagccctgtgaaatcgaggatcttccccctaaaacacatacacacaagatatgtgcaatcaagctgccaccgcttggtaaaaagctcatggtgcctaaccaaaaaggatcaggaacagatccttgaatcagctgtcacttctatagaatgggatttttttttccttcctccttaacctgcgctggaaattgccgttggctttatacatctctatagagagaggctaaagagtcttgcgtgagaaagaagcaatttacaatgcaaatagaggcctgtgaagggacggatgctgctgctcactcgtaacagcttgctgcaccttaatagctggttttattttctgatattaatagatgaattgttggctaacgctgccggagattacttgctgaaaggaaaaagaaaagttcggaataaactctgaaggcaacagatctcgtttggatgttttagccgcgcacacacacaaacagaaaccaggtcatatttacataaaaggaggaatcttaagcgcggcaagtatcctggacgaccactcttcggtactgccagaaaggatcaggacctggagtctggcaagaggaagacagag

SEQ ID NO: 464774 - DNA, 1133 bp, Homo sapiens
aagcaaaagaagtttccaaagaaatgtgtgctttgcatcctacaataggaaaatgtagccattgccttccttcagacgagacatttctaatttgttccgtctgtcaggaggggactatgagaggtttgggtgcaaattcattatctctggcaacgcagaacgtagtgtggggactgaaaaagaccagcacgtcctcctcggcagagggggctggactagaccttggacagcccccccaaaaacttgccaagcctcgcacacaccacttcactctccactccgaggctcagggagcaagtgcctggcatgggggacgccgaaagaagcctgtttgtgtgctgcggccgtgctgtgactttggatcttgtctttcagccggcgcctcggttcctgcccagctggatttggggggcagcattgcctggcgcagggagatcaaatgagactgcaaagaagcataaaatgaatagacaatccaaccaaccaaagaccgggggcagcagcaggccagcaagacggcatcttctccttcccagcctagaagccctgtgaaatcgaggatcttccccctaaaacacatacacacaagatatgtgcaatcaagctgccaccgcttggtaaaaagctcatggtgcctaaccaaaaaggatcaggaacagatccttgaatcagctgtcacttctatagaatgggatttttttttccttcctccttaacctgcgctggaaattgccgttggctttatacatctctatagagagaggctaaagagtcttgcgtgagaaagaagcaatttacaatgcaaatagaggcctgtgaagggacggatgctgctgctcactcgtaacagcttgctgcaccttaatagctggttttattttctgatattaatagatgaattgttggctaacgctgccggagattacttgctgaaaggaaaaagaaaagttcggaataaactctgaaggcaacagatctcgtttggatgttttagccgcgcacacacacaaacagaaaccaggtcatatttacataaaaggaggaatcttaagcgcggcaagtatcctggacgaccactcttcggtactgccagaaaggatcaggacctggagtctggcaagaggaagacagag

SEQ ID NO: 464775 - DNA, 927 bp, Homo sapiens
ccagaaagcttgctcttccctgtcaggagccgcctgccgcaggcgggatgaacgagagctgtaaaatgggactgtcccattcccacgctccacggctgcgacccctgtacggggcagtgggcggcggcgcgggaaattccctggatggatttcagacagaaggagacattcctgcttttatcctggagcacacattggggactgagacagctggacagtttggggcaagaaaccaagtgatcaagaagaaggcttatgagccgggccgcagacgaagaggtggcaagtgcaggcagtttactgcagcgtcggagagtgacgagttgcccctcaggggctccgtcatcatggggaaagatgagcaagccttgctaagttgcatgttcttctcaagtgctggctttctgcatgccatccctgtgaaacaggaactttctagaatgtgtctcactatcactaatggtcataatggcaagaccttcgtaaatgggattagtgcccttataaaagaggcctgagagacactcctcgtcccttccaccatgtgagcacatggcaagaaagtgccatgtatgaaccataaaataggccttctccagatattgaatctgccagtaccttaatcttggacttctcagcctccagaacgatgaagacccctagacttcagagaagatgatatctaagtgtcagagctgggattccaaaccagatctgtccagctccgaagactgagctcataacccttaacactaatcccctctctgacccagcgctgtgattctaggctagtctgattaaagccccagaatttcacaaccttttaagaatacagtcaagaaagaagagatcattgtttcaacctgcctctgaatcgtagtaaataacgggccctgatattaacaaggcagcttccctcctaagtgc

SEQ ID NO: 464776 - DNA, 1299 bp, Homo sapiens
cagaattcctctgcttatatagaaacagaaagagctcgaacgccatgctgggagaaccactgctgtcttcagagctgtctgacagggacgtttaaatctgcagaagctgtctgctgccttttgttctgctctggtctgccctcagaggtggaatctagagaaacagtagtccttgctgagctgcggtgggctccgccaagttcgagcttcctggccactttgtttaccctgtgagctactcaagcctctgcaatggcagacgcccctcccgctgtcaagctgcagcataacaggttgatctcagactgctgtgctagcagtgagcaagactctatgggcatgggatgtgccaagccaggcatgggagggtatctcctggtctaccggttgctgagaccatgggaaaagagcagtatttggtcaggagtgtaccgtttctccagtcaaataagaaatcctcctggaaaaggagaagaaagtcctcccttgagggcttcagcaatgttcctttcttcaggagcagctccctccagcaagagtcctgcttatgattctcccttgggtcagtgcagtcttgttaaccacctgctgggcctgctaactgcctctctgctgatttccatcctaaacaatggctctcaaactttggctggcatcagtcacttggggggttggtttgtaaaagcacagattgctgaccccactctcagagtttctgattcagcaggtctggggtggggcctactaatgtgcatttctaactagttccctggagatgctattgctacatcttgaagaaatgctgctttaatatatacagtagaagtatttttaaatagttgtttattaacaaatatagatcattttctgtaatccaggggtacacttacaaaccactttttactgctagatgctgagcgtttaaaatgtttccaaagatctctgaatcacaaaatcacagaagctcaagtgttgggcattaccttacggagccagattttctaatttcgtcttcttcctttctctctctctctctgtttttctttttttcttctgagacagagtctcactctgttgcccaggctggagtgcaacggcatgatctcagctcactgcaacctccacctccgaggatcacttgagtcttggaggcagagtttgcagtaagctgagatggtactactgtactccagcctaggtgacagagccagagcgagaccctgtctcaaaacaaaacaaaaaaacaagaaagagagagagagcgagagaaagaaagaaagaaagaaagaaagaaagaaa

SEQ ID NO: 464777 - DNA, 1726 bp, Homo sapiens
ttttcagatggatgttcatgtttctgactttgcattaccccagtgtaggctccggacaggcatgcgaggtgcctttggaaagccccagggcactgtggccagggttcacattggccaagttatcatgtccatctgtaccaagctgcagaacaaggagcatgtgatagaagccctgcacagggccaagttcaagtttcctggccgccagaagatccacatctcaaagaagtggggcttcatcaagttcaatgccaatgaatttgaggacatggtggctgagaagcggctcatcctagatggctgtggggtaaagtacatccccagtcgtggccttctggacaagtggcgggccctgcactcacgagggcttccacttctcatgtcctcccggaatcctggccagcgggctgagctgagctttgctgctgccacaggagccactcctattgctggccacttcacccctggaaccttcattaaccaggtccaggcagccttctgggagctgcgtctgttggtagatactgatcccagggtggccactggcctctcacagcagcatctcatgataacctacctaccatacctctgtggaacacaggttctcctctgcgctgtgtggatatttccatcccatgcaacaagggagctcactcgggggtctgatgtggggaatgctggctcaggaagttctgcacatgcctggcactgtctcctgtgaacacccattagagatcatgcctgatctctgcttctacagagatcccgaagagatggaaaagctcatgcctgtaatcccagcacttgaggaggccaaggcaagcagatcacgaggtatacatctagatggcccgaagcaactgaagatccacaaaagaagtgaaaacagccaggtcttgcctttccaccattgtgctttgttcctgccccaccctcactgatcagttgaccttatgacaatacacgctccccgcccctgcgatcatgtactttgtgatattccccgcccttaagaaggtactttgtaatattcttcccacccttgagaatggactttgtaagatccgccccctgcccacaaaaaaatttctcctaactccactgcctatcccaaacctataagaactaatgataatcccaccaccctttgctgactctcttttcaaactcagcctgcctgcgcccaggtgattaaaaagctttattgctcacccaaagcctgtttggtggtctcttcacacagacgcgcgtgacagaaaccacttgaagccgggcgcggtggctcaggcctgtaatcccagcactttgggaggctgaggtgggtggattacctgaggtcaggagttcgagaccagcctgaccaacatggtaaaaccctgtctctactaaaaatacaaaaaaattagccaggggtggtggcgggcacctgtaatctcagttacttgggacgctgaggcaggagaatcgcttgaacctgggaggcggaggttgcgatgagttgagatcaagccattgcactccagcctgggcaacaagagtaaaaattccgtctcaaaaaaagaaaagaaaagaaaagaaaagaaaccacctgaagctggagaaagaaccccctcaaaagaaccatccctagacctcacacagacagggctgtggatcattggtattcaggcagagtgggaaaacctcatcctgcccagggcatccagtagagtagtcaagagttttt

SEQ ID NO: 464778 - DNA, 2068 bp, Homo sapiens
agcagcagcaggtaaagacctctggatgcggtacctgtggcctgagctactgccagcaaggcggcagagctgaagatatggcttttgttcgactgattctggaactgtgtaaggagctgctggattctacggtgcccaataggcagctctcacctgacggacaaagagctgcagggcttgtggatggcagttccaaggtggatcacagcacaattgacctggtgaagttgtacccccaacactggcaggtcaccctaattccctccctccaatccctggcctggcctgacctcgctggttctgagacagccaggggggaggcggtccttggagaaggtccaccctctccatctttcctgcccactgggaggagccacacaggttcacaccatttgccgcagggagtagcctggcccctcctcttcctgtgtggaaactgggatgcgaatggctggtgggaagccccaaaatgggatgaggatggctggtgggaagcaccctagcagggactctggcttagcgagagtccctgtttcccctttttcttcctttttcacccaacaaaaccctgtcttactcattcaaattcaaattgtctgtgagcatgaattttctccactgcacaccgttctcctctccagacctctcactggcaagtcctttcatctcaatttcagttctgtgaggccgtcctactattgtctatcaccctgtttgatttttttgtagcctcatcatttattcattacagtttcttaagttcttttttttagggagcttgtcattgcctagaagagtgctgggcacacaatagtgatactgaatatacaactaaaatcatgtaatatagcacatgagattcttaatgctaaaattaagactttttaacatgaaaaatgctcttaagggcagaaatgaagcaaatttcaggcaagatggcagacaagactgaaacggattcatccatcaactgctacagacttaaaaaacaaaatatgcccaatgcaaagctgagctcaggaaatcctcagatgctagagataaagacaaaatccagttgcagaagtgagttccaggtgatgccaggagaccccaggaagtatcagattaggtcacaaaactaggaataaggttttaatgtcttcagaaaaacagagcatttggtgagagaagggaactaatccgagactcccgcatacaaccaggacacttgaagggctgcctcacctgtgaaaaagaaactggaaaaatctcttcaaatctgtctgtggaaacagaaagacagcctggtgtttgacaaagctctcggtgggacaaacctcctctgagaaatggaaacctaggaaatcaaaagcccagaaattaagggaaagcattagtctcagataatgaaaaggaaacccttggggcccgggccaaagcaaatgtaaaaacatgaacacttgcataatctcgtacatgggactcacagaaaatgcaacccctaatatagatgagctcgcaatgaaaaattatccaccactgtggcaatgcagtcaccaaaaggaagactcaacagaccaatgagcatagacacgagctgtggagtatgatcagcttgtcgaaagaatgaatcaatgacactctgtcttcgtggagagcagcctgggtgtggaatcaggcacccccgggttcaaagccatcactggcgaactcacaaagagtgggactcaccgacctgagggtttgccagcacactcgtagcccgcgggactagagtatttgtgagagaggagtgtggtcttttgattgaagaacagaagtcattcgtgaaggacacagcacacacagcccagagagctcgcaggttaaaactgcacatggagcaatgtctgccagccattcagggtacttcaaaatagcaaacacagtattcacaatcaagttatttagaccttttagattgtatacaaatgacatagaaaaatgtacagccagtccactgggttgtaattttagaaacaaacatctcaagtcataataataaagtagagttttaaaaagttactaggttttctttatttgccat

SEQ ID NO: 464779 - DNA, 1979 bp, Homo sapiens
agcagcagcaggtaaagacctctggatgcggtacctgtggcctgagctactgccagcaaggcggcagagctgaagatatggcttttgttcgactgattctggaactgtgtaaggagctgctggattctacggtgcccaataggcagctctcacctgacggacaaagagctgcagggcttgtggatggcagttccaaggtggatcacagcacaattgacctggtgaagttgtacccccaacactggcaggtcaccctaattccctccctccaatccctggcctggcctgacctcgctggttctgagacagccaggggggaggcggtccttggagaaggtccaccctctccatctttcctgcccactgggaggagccacacaggttcacaccatttgccgcagggagtagcctggcccctcctcttcctgtgtggaaactgggatgcgaatggctggtgggaagccccaaaatgggatgaggatggctggtgggaagcaccctagcagggactctggcttagcgagagtccctgtttcccctttttcttcctttttcacccaacaaaaccctgtcttactcattcaaattcaaattgtctgtgagcatgaattttctccactgcacaccgttctcctctccagacctctcactggcaagtcctttcatctcaatttcagttctgtgaggccgtcctactattgtctatcaccctgtttgatttttttgtagcctcatcatttattcattacagtttcttaagttcttttttttagggagcttgtcattgcctagaagagtgctgggcacacaatagtgatactgaatatacaactaaaatcatgtaatatagcacatgagattcttaatgctaaaattaagactttttaacatgaaaaatgctcttaagggcagaaatgaagcaaatttcaggcaagatggcagacaagactgaaacggattcatccatcaactgctacagacttaaaaaacaaaatatgcccaatgcaaagctgagctcaggaaatcctcagatgctagagataaagacaaaatccagttgcagaagtgagttccaggtgatgccaggagaccccaggaagtatcagattaggtcacaaaactaggaataaggttttaatgtcttcagaaaaacagagcatttggtgagagaagggaactaatccgagactcccgcatacaaccaggacacttgaagggctgcctcacctgtgaaaaagaaactggaaaaatctcttcaaatctgtctgtggaaacagaaagacagcctggtgtttgacaaagctctcggtgggacaaacctcctctgagaaatggaaacctaggaaatcaaaagcccagaaattaagggaaagcattagtctcagataatgaaaaggaaacccttggggcccgggccaaagcaaatgtaaaaacatgaacacttgcataatctcgtacatgggactcacagaaaatgcaacccctaatatagatgagctcgcaatgaaaaattatccaccactgtggcaatgcagtcaccaaaaggaagactcaacagaccaatgagcatagacacgagctgtggagtatgatcagcttgtcgaaagaatgaatcaatgacactctgtcttcgtggagagcagcctgggtgtggaatcaggcacccccgggttcaaagccatcactggcgaactcacaaagagtgggactcaccgacctgagggtttgccagcacactcgtagcccgcgggactagagtatttgtgagagaggagtgtggtcttttgattgaagaacagaagtcattcgtgaaggacacagcacacacagcccagagagctcgcaggttaaaactgcacatggagcaatgtctgccagccattcagggtacttcaaaataggtcagaatacgtttccagaaagtgacaccttctttttgggtttgcgtataataataaatctaggggataagaacataa

SEQ ID NO: 464780 - DNA, 2381 bp, Homo sapiens
ctgtcctcgtgcccatgtgcacttgagttgacggtgacctcattaccgcctccgcaaaggccccttgaaatccctgcgccgtcgcatttggctgctcaaagtgatgggaacggcctgagcttcctgatcaatcgcttaaaattcagggtcggctcgctcgcgggagagggctgcctgccagcccgcgcaccgcgctctgccgcctccccctacaccccctccttgctttggcggggcgatgctgtcgtattggaaaacatccccgcgctggctggggggcccggtggggccagcgctggaagccgttccactcgagcagatggctgtgaaactttggcggcgagataaattgggtctgacggcagccccctttggcacccgcctcgccagcacaagccttcaggaggccacccatccggcaacagccttcctcagccgaaggcgccctccaccacattccttccggccccagatctccccagagacgagcccagagggagggacagcccccagcccccgcccggtcacctccgccaagctggcagctgggctttccccctcctctgccatccgcagaggcctgaagcgtgaagcccgttctgtggcggtcctacaaagaagcgggggtgcctcacttctcgggcctcccccgcgggggattctgtaccagaataacacccccggggccagggtcagggcggcacactcgcccccgcctgtcccagcgcgatcccattcggcgggcccagtgacacagcctggagacccagctctgtcactcaactctacatagccttcacccagagcctgacagtgtatatgaacaagaggctgtgcctggtgagtgcttctgccactttctccaggatgacagctgtggactcctgccacatccaacacccccttgctgctccccaccgccctccttggcacccaggtggctgatctcctatggtcttgctggcttctctaccttgtatgctgagggcgggcccagcctgccccagctcagggtctgcacatagtaggtgcttgcatgttgcctgctaaactgacagccctgtaaccatgtcagcacaaagcaaccagcattttgggtgcatctgcagttaaaataaaccactgaggtcatgggtctgttctctctgcaaaaacaaaaataccccactagccatatctgatgagaaccatagcaaaagatcagaatgtaatggcttcatccagaagcaaagcatgagattccaaaccatgtccctgacctgaaggggcacctgcccaggcccaggggtgccaactcctagaggcagctggcatgtgactactgtgcccagtagagaaaggcagacactcagtccccagagcccagagccccgagggaattatggaacatcctccatatttgattcaaaataaaaaccacagtaaaccatagacccaaaacttatacgtcggctgaaattaaaatagcttcttgctacgttttctggtttcaatattctggataaactcatggaagctgaatcaggcaatttgtctgtctcttgctttgtttctgctgttgcccctgctttgcagggatctcagcacacgcttggtctcccctctgaagcagaccccagccgggtctggggggtgtccagtcctgcactcccagggctgatccccccaggaaggtatccatgcctatgcacacaccacccccatgggttcttgtggcccctcaggaagggggcaggaccagggcccagccttggccaagagctgcccccagcagacctctctctgccactgctccccacaaggtttccagcacccccagcccctccctcttctggggaaccttgcggctgggcccgtgcctgcggcgagtctcaccccagtattattttagtcgcagacagacacgaggcagatggtgacaacatcccttccccgctccccactgacgagccgttgccgccctgaagcctcagggttcttctccctcaggaatatttcagtcccgactcggtggctaaatgcggctgctcgtgtgagacaagcgcacatctgcgcctcctcctccctaccccctacccatttcctgaggctgagcagagccctggggaggccctgcccacttgcagctctgccccatcctcccagctgccctactgtgtgccaggcatcatgccatgagcatggtaccactgggagagggcagttactgtgcccactttacagatgaggaagctaaggctcagagtgaagcaggggccatcccagatcacacagcaggagagaaggcgttcccttgggtcccagtgcaccctggagacagacacagcctccctctgctccttccccacccctcaatcctccaccttaccacccctgtgcct

SEQ ID NO: 464781 - DNA, 659 bp, Homo sapiens
cactcacatgctcactcatacactcgcacaccctcacacacactcattacacactcacaaggtcacttacacacacattcctacacacacatattcactcacacactcatacactcacatacacatgtatctcacacaacccacactctcacacacattcacacactcaataactcacacactgacaggaatattttctcatttcacccacacaaaaaaaccactagttttgaaacaattagattccctgagaattgatgtctccctgacacaatcatactttaaaaggcaggtcttaagtgaagggatgactttatcgtttaattttatcaatagttgggctcagttggccatcaagctgtctgcaagggttttcctttctagcaatgactttgctgctgagaccctcatccaccgtcgtggtgcccagcgtgagtgacgggagctacacgcaggtctttatagcacatcacctgtgactggcataaaaatgggtcaagggctgggcgcggtggctcatacctgtagtcccagcaatttgggaggctgaggcagaagaatcgcttgaactcgggaggtggaggctgcagtgagccaagatcgcgctactgcaagatccagcctgggcaacaagagaaaaactccatctcaaaaaaaaa

SEQ ID NO: 464782 - DNA, 988 bp, Homo sapiens
taagactaacaaactctcttcaaccaagtaaaggagactccttgtggaggggagcccctgcccgctcacctggatgaccatgcctcacctctgccgatcacatgcaaatatttgtcctgttctgagacatcctcctgggtcccagcttcttctcttgaagatacagatttccagtgcaccatcagaagccgaagtaactgtgagtgggaggcattggagccggctgggaggtaagcattcgggccagcagggaggaggagtcgcccatgtagcagtgctggatgacaacattcccacactgccctcggacacatcacagaccctggtaccacaggatccctctgattcaactgaagagagatgcagagctgcatgccaccaagtaactaattcgttcttctcttcttatatccattgagcagtgtgcagtgttggcacaatgcacagtacttgttaaccactccaggaaaagaaagagccactcattctgattagctgtcagaactaattttaagctatgttattatatggtaaagaggaaaaaggaaatacaaggaaactgtacttaaagccagtgcctaatcaggttttttccccttcgtctgtttcatacaaaagctccctggaatcactgctgaaagggagcaagtctggtcatatcctcaacattatcagatgtcaaaaaacatcacatccgcccccttttgagaacgtgcctcggtgtgatggtgtggagcgattcacagtgcaaacacctgtttcccatgataggcaagtgtatgttttctcttttcacagattagcctacactccagggaaaattagtcagaataacagagccacagtgaatttgggtcaggccgatccaagggccggcatcttggatttaaattcgatctgccaggttcttccttggtcacagccacaccctcccagcttcctgctacctgtggaagaggcttaatgactgaaaaggcatgacctgtgc

SEQ ID NO: 464783 - DNA, 3186 bp, Homo sapiens
cctgggattgaaccacagaggacggattatcctgaagaaatgtcaccccccccttaatgaactcagtgttcccccccacaagcattgttgcaagagaatcaccctttggtcatcttgcagcctgggaagagacctttacctgtggaatccccggatactcgaagtggaggatacacagatgtgattacgatggatgcaacaaagtgtacgctaaaagctcccacttgaaagcacacagaagacgacacacagaaaaaccctacaaatgtacatgggaaggatgcacatggacgtttgctcggtctgatgaactaaaaagacatttaggaaaacatactggaatcaaacctttacagtgtccggactgtaaccgtcgtaaccagcctttgaaaaaggagaaaccaaaatggaaaagcgattatcctatgacagatggacaactacgcagcaagagggatgaattttgggatacagcaccagcttttgaaggccggaaagagatttgggatgccttgaaggctgctgcacatgcttttgagagcaatgatcatgaactggcacaagcaatcattgatggtgcaaacataacattaccacatggtgcacttacagagtgctacgatgaactggggaacagatatcagcttccagtgtattgcttggcaccgccaatcaacatgatagaggaaaagagcgacatagagactctggatattcctgagccaccacccaattctggatatgaatgtcagcttcgtttgcgcctttccacaggcaaagacctcaagcttgtggttcgcagcacagacacagtattccacatgaagagacggttgcatgcagcagagggagtggaaccaggtagtcagcggtggtttttttctggcagacctctcactgacaaaatgaagttcgaagagctgaagatcccaaaggactatgttgtacaggttatagtgagccaacctgtgcagaacccaacaccagtggagaactgaactgagccctgttggccagctcccacatccctctgctcctttttatggttcttgttgtcatttcctactctgcggcgtgaaatctatttcactgctctaaattccctatgaatggatttagttctgaggaattaccagtgaaaaattccatctgtgatggagaccaacaaaaataataaaacacaaagagccaggctttgagactcatgtaattacaatttctaatttgaaaggcagttaagaaatagataaccatttattttagaacactcaacaactatgtaatggctatatttcagtgacttggactgtaaatgaaacattgcatccatgaaggacagcaccaagcacctttttgaatacagaatttttttagaaaaatatatcaaattatataatttccagaaaccataaataatggatataaaacttaaccttttttgttttgttttgttttgttttgttttgttttgttttggttaatggaaactgaaaagagcagtatttgaggttgcttctattctggttttttattcttagctcaattaatatttagccataaatgagtagagactggcaaattgtgctttagtgttgctttcctcatccccacatcttgagctccttatttacattcacactaaattttggtgccttccagcacattagtggcaggcacccttctggaacactaggcaataatttcatcaatacagtcaggtctcttgagtttcaacagatactcagttgaaaagtcgctgtcatcttgctgcataagtattttgaaaggtctgtataacgaagccatttttatatccaggcttagaaggtcactactatatagtaccttcattgatctatctattctgcttggaacttttcatagctaagtataacccccaaatgcatggttcctgggtcaggagacaccaaaatcaattatagctgttcccactcaagttaataaagtaaatgatttcctccactttgcatggaggggtgtaaggaaagcctattttatctgtgcctgggagaactgtgcctattttcagtcttttagaggaaatttcaactcaaaatttttaagtgtgaaaggtttactggtgtcacataaacattagcagtgagaccaaataatgaaacattgctttataccttagtgctttccagttcactgttacctctagtcatggtagatgacaattttcctccctcatcttttgtagcaaagaagcaaattaagagccttttgcaagttagattaggggactgaaaaatccagggagataacctgattcttctatactatgactggagtaaagctgccaagagttaggttgaatttggagccttttaaaagttggttccataagtgagaaggggggctaacatgtgaccactgtgcccctgagaatccatgagatggaaaagtacagacaagaaggcacttaacgctgttctcagttggaaaatgtcagccctccacacctgtttggatgtgaagtgcattattaattttaatgacaaaatgaaactgctaattagtttaaatgtaatgtttaaatggtattgaatttcctattgcctgattaaatatatctgtaattgtaacatcatgtttctgagagctttaactacttccttatttttatgcaatcattttaaagattgtggctatatctaatttaaatttgctgatgattgaatctaaattcaagtgaagaccacagcattaatcccaaaggagattttttttatgtttagaggtggagatattagggtaaatcagtatattgctcctgtcatcaaagtttttgttcatttgtgtgccacatcgaatagcagcacttctcaaagtttgtcaactggaaaaaagtgtttaaaactgtttttttcttaagcagatttggtgatgtcatcaatatctatgatatcgattggtaaaaggtctttctttgttgaggatttgagctctctttttaagagtttattttattttaaaggaacatatgctttgaataacaattctctgggcatgtttaactaacctaggtgggaaaaccatggtgctgtttaattgtaaatagattgatataagattggaccagtacttgatgtgtataattttagtatgtagggtttatgtgctttttttaaaaaaaaaaaagtcgacgcggccgcgaattta

SEQ ID NO: 464784 - DNA, 2725 bp, Homo sapiens
atcattgatgatcagctgagagtgatgttttttctctacagtgccatgctagcaagagaagcttaagcattttgtgaggcataaacaaaaatgcattcattaaggattaagttcttattcatatcttctctttctgaaggtgcacttacagagtgctacgatgaactggggaacagatatcagcttccagtgtattgcttggcaccgccaatcaacatgatagaggaaaagagcgacatagagactctggatattcctgagccaccacccaattctggatatgaatgtcagcttcgtttgcgcctttccacaggcaaagacctcaagcttgtggttcgcagcacagacacagtattccacatgaagagacggttgcatgcagcagagggagtggaaccaggtagtcagcggtggtttttttctggcagacctctcactgacaaaatgaagttcgaagagctgaagatcccaaaggactatgttgtacaggttatagtgagccaacctgtgcagaacccaacaccagtggagaactgaactgagccctgttggccagctcccacatccctctgctcctttttatggttcttgttgtcatttcctactctgcggcgtgaaatctatttcactgctctaaattccctatgaatggatttagttctgaggaattaccagtgaaaaattccatctgtgatggagaccaacaaaaataataaaacacaaagagccaggctttgagactcatgtaattacaatttctaatttgaaaggcagttaagaaatagataaccatttattttagaacactcaacaactatgtaatggctatatttcagtgacttggactgtaaatgaaacattgcatccatgaaggacagcaccaagcacctttttgaatacagaatttttttagaaaaatatatcaaattatataatttccagaaaccataaataatggatataaaacttaaccttttttgttttgttttgttttgttttgttttgttttgttttggttaatggaaactgaaaagagcagtatttgaggttgcttctattctggttttttattcttagctcaattaatatttagccataaatgagtagagactggcaaattgtgctttagtgttgctttcctcatccccacatcttgagctccttatttacattcacactaaattttggtgccttccagcacattagtggcaggcacccttctggaacactaggcaataatttcatcaatacagtcaggtctcttgagtttcaacagatactcagttgaaaagtcgctgtcatcttgctgcataagtattttgaaaggtctgtataacgaagccatttttatatccaggcttagaaggtcactactatatagtaccttcattgatctatctattctgcttggaacttttcatagctaagtataacccccaaatgcatggttcctgggtcaggagacaccaaaatcaattatagctgttcccactcaagttaataaagtaaatgatttcctccactttgcatggaggggtgtaaggaaagcctattttatctgtgcctgggagaactgtgcctattttcagtcttttagaggaaatttcaactcaaaatttttaagtgtgaaaggtttactggtgtcacataaacattagcagtgagaccaaataatgaaacattgctttataccttagtgctttccagttcactgttacctctagtcatggtagatgacaattttcctccctcatcttttgtagcaaagaagcaaattaagagccttttgcaagttagattaggggactgaaaaatccagggagataacctgattcttctatactatgactggagtaaagctgccaagagttaggttgaatttggagccttttaaaagttggttccataagtgagaaggggggctaacatgtgaccactgtgcccctgagaatccatgagatggaaaagtacagacaagaaggcacttaacgctgttctcagttggaaaatgtcagccctccacacctgtttggatgtgaagtgcattattaattttaatgacaaaatgaaactgctaattagtttaaatgtaatgtttaaatggtattgaatttcctattgcctgattaaatatatctgtaattgtaacatcatgtttctgagagctttaactacttccttatttttatgcaatcattttaaagattgtggctatatctaatttaaatttgctgatgattgaatctaaattcaagtgaagaccacagcattaatcccaaaggagattttttttatgtttagaggtggagatattagggtaaatcagtatattgctcctgtcatcaaagtttttgttcatttgtgtgccacatcgaatagcagcacttctcaaagtttgtcaactggaaaaaagtgtttaaaactgtttttttcttaagcagatttggtgatgtcatcaatatctatgatatcgattggtaaaaggtctttctttgttgaggatttgagctctctttttaagagtttattttattttaaaggaacatatgctttgaataacaattctctgggcatgtttaactaacctaggtgggaaaaccatggtgctgtttaattgtaaatagattgatataagattggaccagtacttgatgtgtataattttagtatgtagggtttatgtgctttttttaaaaaaaaaaaagtcgacgcggccgcgaattta

SEQ ID NO: 464785 - DNA, 2952 bp, Homo sapiens
gcgccggaggaggctgcagcggcggcggcggcgggcccggacgagcgtccggaggtggcggacgaggcgccgggggcccccatgggcgggtgtgtgggcgcccagcacgactcctcgggcagcctcaacgagaactcggagggcaccggagttgctctaggtcgtaaccagcctttgaaaaaggagaaaccaaaatggaaaagcgattatcctatgacagatggacaactacgcagcaagagggatgaattttgggatacagcaccagcttttgaaggccggaaagagatttgggatgccttgaaggctgctgcacatgcttttgagagcaatgatcatgaactggcacaagcaatcattgatggtgcaaacataacattaccacatggtgcacttacagagtgctacgatgaactggggaacagatatcagcttccagtgtattgcttggcaccgccaatcaacatgatagaggaaaagagcgacatagagactctggatattcctgagccaccacccaattctggatatgaatgtcagcttcgtttgcgcctttccacaggcaaagacctcaagcttgtggttcgcagcacagacacagtattccacatgaagagacggttgcatgcagcagagggagtggaaccaggtagtcagcggtggtttttttctggcagacctctcactgacaaaatgaagttcgaagagctgaagatcccaaaggactatgttgtacaggttatagtgagccaacctgtgcagaacccaacaccagtggagaactgaactgagccctgttggccagctcccacatccctctgctcctttttatggttcttgttgtcatttcctactctgcggcgtgaaatctatttcactgctctaaattccctatgaatggatttagttctgaggaattaccagtgaaaaattccatctgtgatggagaccaacaaaaataataaaacacaaagagccaggctttgagactcatgtaattacaatttctaatttgaaaggcagttaagaaatagataaccatttattttagaacactcaacaactatgtaatggctatatttcagtgacttggactgtaaatgaaacattgcatccatgaaggacagcaccaagcacctttttgaatacagaatttttttagaaaaatatatcaaattatataatttccagaaaccataaataatggatataaaacttaaccttttttgtttttttgttttggttaatggaaactgaaaagagcagtatttgaggttgcttctattctggttttttattcttagctcaattaatatttagccataaatgagtagagactggcaaattgtgctttagtgttgctttcctcatccccacatcttgagctccttatttacattcacactaaattttggtgccttccagcacattagtggcaggcacccttctggaacactaggcaataatttcatcaatacagtcaggtctcttgagtttcaacagatactcagttgaaaagtcgctgtcatcttgctgcataagtattttgaaaggtctgtataacgaagccatttttatatccaggcttagaaggtcactactatatagtaccttcattgatctatctattctgcttggaacttttcatagctaagtataacccccaaatgcatggttcctgggtcaggagacaccaaaatcaattatagctgttcccactcaagttaataaagtaaatgatttcctccactttgcatggaggggtgtaaggaaagcctattttatctgtgcctgggagaactgtgcctattttcagtcttttagaggaaatttcaactcaaaatttttaagtgtgaaaggtttactggtgtcacataaacattagcagtgagaccaaataatgaaacattgctttataccttagtgctttccagttcactgttacctctagtcatggtagatgacaattttcctccctcatcttttgtagcaaagaagcaaattaagagccttttgcaagttagattaggggactgaaaaatccagggagataacctgattcttctatactatgactggagtaaagctgccaagagttaggttgaatttggagccttttaaaagttggttccataagtgagaaggggggctaacatgtgaccactgtgcccctgagaatccatgagatggaaaagtacagacaagaaggcacttaacgctgttctcagttggaaaatgtcagccctccacacctgtttggatgtgaagtgcattattaattttaatgacaaaatgaaactgctaattagtttaaatgtaatgtttaaatggtattgaatttcctattgcctgattaaatatatctgtaattgtaacatcatgtttctgagagctttaactacttccttatttttatgcaatcattttaaagattgtggctatatctaatttaaatttgctgatgattgaatctaaattcaagtgaagaccacagcattaatcccaaaggagattttttttatgtttagaggtggagatattagggtaaatcagtatattgctcctgtcatcaaagtttttgttcatttgtgtgccacatcgaatagcagcacttctcaaagtttgtcaactggaaaaaagtgtttaaaactgtttttttcttaagcagatttggtgatgtcatcaatatctatgatatcgattggtaaaaggtctttctttgttgaggatttgagctctctttttaagagtttattttattttaaaggaacatatgctttgaataacaattctctgggcatgtttaactaacctaggtgggaaaaccatggtgctgtttaattgtaaatagattgatataagattggaccagtacttgatgtgtataattttagtatgtagggtttatgtgctttttttaaaaaaaaaaaagtcgacgcggccgcgaattta

SEQ ID NO: 464786 - DNA, 2863 bp, Homo sapiens
gcgccggaggaggctgcagcggcggcggcggcgggcccggacgagcgtccggaggtggcggacgaggcgccgggggcccccatgggcgggtgtgtgggcgcccagcacgactcctcgggcagcctcaacgagaactcggagggcaccggagttgctctaggtcgtaaccagcctttgaaaaaggagaaaccaaaatggaaaagcgattatcctatgacagatggacaactacgcagcaagagggatgaattttgggatacagcaccagcttttgaaggccggaaagagatttgggatgccttgaaggctgctgcacatgcttttgagagcaatgatcatgaactggcacaagcaatcattgatggtgcaaacataacattaccacatggtgcacttacagagtgctacgatgaactggggaacagatatcagcttccagtgtattgcttggcaccgccaatcaacatgatagaggaaaagagcgacatagagactctggatattcctgagccaccacccaattctggatatgaatgtcagcttcgtttgcgcctttccacaggcaaagacctcaagcttgtggttcgcagcacagacacagtattccacatgaagagacggttgcatgcagcagagggagtggaaccaggtagtcagcggtggtttttttctggcagacctctcactgacaaaatgaagttcgaagagctgaagatcccaaaggactatgttgtacaggttatagtgagccaacctgtgcagaacccaacaccagtggagaactgaactgagccctgttggccagctcccacatccctctgctcctttttatggttcttgttgtcatttcctactctgcggcgtgaaatctatttcactgctctaaattccctatgaatggatttagttctgaggaattaccagtgaaaaattccatctgtgatggagaccaacaaaaataataaaacacaaagagccaggctttgagactcatgtaattacaatttctaatttgaaaggcagttaagaaatagataaccatttattttagaacactcaacaactatgtaatggctatatttcagtgacttggactgtaaatgaaacattgcatccatgaaggacagcaccaagcacctttttgaatacagaatttttttagaaaaatatatcaaattatataatttccagaaaccataaataatggatataaaacttaaccttttttgttttgttttgttttgttttgttttgttttgttttggttaatggaaactgaaaagagcagtatttgagtagagactggcaaattgtgctttagtgttgctttcctcatccccacatcttgagctccttatttacattcacactaaattttggtgccttccagcacattagtggcaggcacccttctggaacactaggcaataatttcatcaatacagtcaggtctcttgagtttcaacagatactcagaagccatttttatatccaggcttagaaggtcactactatatagtaccttcattgatctatctattctgcttggaacttttcatagctaagtataacccccaaatgcatggttcctgggtcaggagacaccaaaatcaattatagctgttcccactcaagttaataaagtaaatgatttcctccactttgcatggaggggtgtaaggaaagcctattttatctgtgcctgggagaactgtgcctattttcagtcttttagaggaaatttcaactcaaaatttttaagtgtgaaaggtttactggtgtcacataaacattagcagtgagaccaaataatgaaacattgctttataccttagtgctttccagttcactgttacctctagtcatggtagatgacaattttcctccctcatcttttgtagcaaagaagcaaattaagagccttttgcaagttagattaggggactgaaaaatccagggagataacctgattcttctatactatgactggagtaaagctgccaagagttaggttgaatttggagccttttaaaagttggttccataagtgagaaggggggctaacatgtgaccactgtgcccctgagaatccatgagatggaaaagtacagacaagaaggcacttaacgctgttctcagttggaaaatgtcagccctccacacctgtttggatgtgaagtgcattattaattttaatgacaaaatgaaactgctaattagtttaaatgtaatgtttaaatggtattgaatttcctattgcctgattaaatatatctgtaattgtaacatcatgtttctgagagctttaactacttccttatttttatgcaatcattttaaagattgtggctatatctaatttaaatttgctgatgattgaatctaaattcaagtgaagaccacagcattaatcccaaaggagattttttttatgtttagaggtggagatattagggtaaatcagtatattgctcctgtcatcaaagtttttgttcatttgtgtgccacatcgaatagcagcacttctcaaagtttgtcaactggaaaaaagtgtttaaaactgtttttttcttaagcagatttggtgatgtcatcaatatctatgatatcgattggtaaaaggtctttctttgttgaggatttgagctctctttttaagagtttattttattttaaaggaacatatgctttgaataacaattctctgggcatgtttaactaacctaggtgggaaaaccatggtgctgtttaattgtaaatagattgatataagattggaccagtacttgatgtgtataattttagtatgtagggtttatgtgctttttttaaaaaaaaaaaagtcgacgcggccgcgaattta

SEQ ID NO: 464787 - DNA, 308 bp, Homo sapiens
gtgttgcgaggaggagagtcagtgaaggccgaaggtggggggtcaaaccggaagacgaagcccttatcaaatgggcacgcgtctctaggttcctaaaaaacggaagaaaataaaaataaccggccgggtgcggtggctcacgcctgtaatcccagcacttggggaggccgaggcgggcggatcacgaggtcaggagatcaagaccatcctggctaacacggtgaaatcccatctctactaaaaatacaaaaaaattagccaggcatggtggcgggcgcctgtagtcccagctactcgggaggctgagg

SEQ ID NO: 464788 - DNA, 1018 bp, Homo sapiens
gcgccggaggaggctgcagcggcggcggcggcgggcccggacgagcgtccggaggtggcggacgaggcgccgggggcccccatgggcgggtgtgtgggcgcccagcacgactcctcgggcagcctcaacgagaactcggagggcaccggagttgctctaggtcgtaaccagcctttgaaaaaggagaaaccaaaatggaaaagcgattatcctatgacagatggacaactacgcagcaagagggatgaattttgggatacagcaccagcttttgaaggccggaaagagatttgggatgccttgaaggctgctgcacatgcttttgagagcaatgatcatgaactggcacaagcaatcattgatggtgcaaacataacattaccacatggtgcacttacagagtgctacgatgaactggggaacagatatcagcttccagtgtattgcttggcaccgccaatcaacatgatagaggaaaagagcgacatagagactctggatattcctgagccaccacccaattctggatatgaatgtcagcttcgtttgcgcctttccacaggcaaagacctcaagcttgtggttcgcagcacagacacagtattccacatgaagagacggttgcatgcagcagagggagtggaaccaggtagtcagcggtggtttttttctggcagacctctcactgacaaaatgaagttcgaagagctgaagatcccaaaggactatgttgtacaggttatagtgagccaacctgtgcagaacccaacaccagtggagaactgaactgagccctgttggccagctcccacatccctctgctcctttttatggttcttgttgtcatttcctactctgcggcgtgaaatctatttcactgctctaaattccctatgaatggatttagttctgaggaattaccagtgaaaaattccatctgtgatggagaccaacaaaaataataaaactgtatccgacaactcttccctctcgttctgctagagaaaaatcaacaact

SEQ ID NO: 464789 - DNA, 1001 bp, Homo sapiens
atcattgatgatcagctgagagtgatgttttttctctacagtgccatgctagcaagagaagcttaagcattttgtgaggcataaacaaaaatgcattcattaaggattaagttcttattcatatcttctctttctgaaggtgcacttacagagtgctacgatgaactggggaacagatatcagcttccagtgtattgcttggcaccgccaatcaacatgatagaggaaaagagcgacatagagactctggatattcctgagccaccacccaattctggatatgaatgtcagcttcgtttgcgcctttccacaggcaaagacctcaagcttgtggttcgcagcacagacacagtattccacatgaagagacggttgcatgcagcagagggagtggaaccaggtagtcagcggtggtttttttctggcagacctctcactgacaaaatgaagttcgaagagctgaagatcccaaaggactatgttgtacaggttatagtgagccaacctaaaataaaaataaccggccgggtgcggtggctcacgcctgtaatcccagcacttggggaggccgaggcgggcggatcacgaggtcaggagatcaagaccatcctggctaacacggtgaaatcccatctctactattttttccatgttagaaggatcctaatgaacagcaccctgtcatttttaaagttctaagggtctagtcgttccagacatccccaaggaatatttccctaagctcactcagtcaccatgtaggagccagggtaggctatggaattatcttaggaactcaagcttctaaaactatccatgtcgtcaactctaggggacacaccccgcacaacacaaacacagacaaaaaaacatttgggggcacgcggccgcagaaggtttacacaacttgtgggggcgggacacaagagacatgaacagtgcaaccggccaagaaccgggccgcgggctggttcccaaaaaaccggggcccggggtctcga

SEQ ID NO: 464790 - DNA, 2974 bp, Homo sapiens
gcgccggaggaggctgcagcggcggcggcggcgggcccggacgagcgtccggaggtggcggacgaggcgccgggggcccccatgggcgggtgtgtgggcgcccagcacgactcctcgggcagcctcaacgagaactcggagggcaccggagttgctctaggtcgtaaccagcctttgaaaaaggagaaaccaaaatggaaaagcgattatcctatgacagatggacaactacgcagcaagagggatgaattttgggatacagcaccagcttttgaaggccggaaagagatttgggatgccttgaaggctgctgcacatgcttttgagagcaatgatcatgaactggcacaagcaatcattgatggtgcaaacataacattaccacatggtgcacttacagagtgctacgatgaactggggaacagatatcagcttccagtgtattgcttggcaccgccaatcaacatgatagaggaaaagagcgacatagagactctggatattcctgagccaccacccaattctggatatgaatgtcagcttcgtttgcgcctttccacaggcaaagacctcaagcttgtggttcgcagcacagacacagtattccacatgaagagacggttgcatgcagcagagggagtggaaccaggtagtcagcggtggtttttttctggcagacctctcactgacaaaatgaagttcgaagagctgaagatcccaaaggactatgttgtacaggttatagtgagccaacctgtgcagaacccaacaccagtggagaactgaactgagccctgttggccagctcccacatccctctgctcctttttatggttcttgttgtcatttcctactctgcggcgtgaaatctatttcactgctctaaattccctatgaatggatttagttctgaggaattaccagtgaaaaattccatctgtgatggagaccaacaaaaataataaaacacaaagagccaggctttgagactcatgtaattacaatttctaatttgaaaggcagttaagaaatagataaccatttattttagaacactcaacaactatgtaatggctatatttcagtgacttggactgtaaatgaaacattgcatccatgaaggacagcaccaagcacctttttgaatacagaatttttttagaaaaatatatcaaattatataatttccagaaaccataaataatggatataaaacttaaccttttttgttttgttttgttttgttttgttttgttttgttttggttaatggaaactgaaaagagcagtatttgaggttgcttctattctggttttttattcttagctcaattaatatttagccataaatgagtagagactggcaaattgtgctttagtgttgctttcctcatccccacatcttgagctccttatttacattcacactaaattttggtgccttccagcacattagtggcaggcacccttctggaacactaggcaataatttcatcaatacagtcaggtctcttgagtttcaacagatactcagttgaaaagtcgctgtcatcttgctgcataagtattttgaaaggtctgtataacgaagccatttttatatccaggcttagaaggtcactactatatagtaccttcattgatctatctattctgcttggaacttttcatagctaagtataacccccaaatgcatggttcctgggtcaggagacaccaaaatcaattatagctgttcccactcaagttaataaagtaaatgatttcctccactttgcatggaggggtgtaaggaaagcctattttatctgtgcctgggagaactgtgcctattttcagtcttttagaggaaatttcaactcaaaatttttaagtgtgaaaggtttactggtgtcacataaacattagcagtgagaccaaataatgaaacattgctttataccttagtgctttccagttcactgttacctctagtcatggtagatgacaattttcctccctcatcttttgtagcaaagaagcaaattaagagccttttgcaagttagattaggggactgaaaaatccagggagataacctgattcttctatactatgactggagtaaagctgccaagagttaggttgaatttggagccttttaaaagttggttccataagtgagaaggggggctaacatgtgaccactgtgcccctgagaatccatgagatggaaaagtacagacaagaaggcacttaacgctgttctcagttggaaaatgtcagccctccacacctgtttggatgtgaagtgcattattaattttaatgacaaaatgaaactgctaattagtttaaatgtaatgtttaaatggtattgaatttcctattgcctgattaaatatatctgtaattgtaacatcatgtttctgagagctttaactacttccttatttttatgcaatcattttaaagattgtggctatatctaatttaaatttgctgatgattgaatctaaattcaagtgaagaccacagcattaatcccaaaggagattttttttatgtttagaggtggagatattagggtaaatcagtatattgctcctgtcatcaaagtttttgttcatttgtgtgccacatcgaatagcagcacttctcaaagtttgtcaactggaaaaaagtgtttaaaactgtttttttcttaagcagatttggtgatgtcatcaatatctatgatatcgattggtaaaaggtctttctttgttgaggatttgagctctctttttaagagtttattttattttaaaggaacatatgctttgaataacaattctctgggcatgtttaactaacctaggtgggaaaaccatggtgctgtttaattgtaaatagattgatataagattggaccagtacttgatgtgtataattttagtatgtagggtttatgtgctttttttaaaaaaaaaaaagtcgacgcggccgcgaattta

SEQ ID NO: 464791 - DNA, 2917 bp, Homo sapiens
gcgccggaggaggctgcagcggcggcggcggcgggcccggacgagcgtccggaggtggcggacgaggcgccgggggcccccatgggcgggtgtgtgggcgcccagcacgactcctcgggcagcctcaacgagaactcggagggcaccggagttgctctaggtcgtaaccagcctttgaaaaaggagaaaccaaaatggaaaagcgattatcctatgacagatggacaactacgcagcaagagggatgaattttgggatacagcaccagcttttgaaggccggaaagagatttgggatgccttgaaggctgctgcacatgcttttgagagcaatgatcatgaactggcacaagcaatcattgatggtgcaaacataacattaccacatggtgcacttacagagtgctacgatgaactggggaacagatatcagcttccagtgtattgcttggcaccgccaatcaacatgatagaggaaaagagcgacatagagactctggatattcctgagccaccacccaattctggatatgaatgtcagcttcgtttgcgcctttccacaggcaaagacctcaagcttgtggttcgcagcacagacacagtattccacatgaagagacggttgcatgcagcagagggagtggaaccaggtagtcagcggtggtttttttctggcagacctctcactgacaaaatgaagttcgaagagctgaagatcccaaaggactatgttgtacaggttatagtgagccaacctgtgcagaacccaacaccagtggagaactgaactgagccctgttggccagctcccacatccctctgctcctttttatggttcttgttgtcatttcctactctgcggcgtgaaatctatttcactgctctaaattccctatgaatggatttagttctgaggaattaccagtgaaaaattccatctgtgatggagaccaacaaaaataataaaacacaaagagccaggctttgagactcatgtaattacaatttctaatttgaaaggcagttaagaaatagataaccatttattttagaacactcaacaactatgtaatggctatatttcagtgacttggactgtaaatgaaacattgcatccatgaaggacagcaccaagcacctttttgaatacagaatttttttagaaaaatatatcaaattatataatttccagaaaccataaataatggatataaaacttaaccttttttgttttgttttgttttgttttgttttgttttgttttggttaatggaaactgaaaagagcagtatttgagtagagactggcaaattgtgctttagtgttgctttcctcatccccacatcttgagctccttatttacattcacactaaattttggtgccttccagcacattagtggcaggcacccttctggaacactaggcaataatttcatcaatacagtcaggtctcttgagtttcaacagatactcagttgaaaagtcgctgtcatcttgctgcataagtattttgaaaggtctgtataacgaagccatttttatatccaggcttagaaggtcactactatatagtaccttcattgatctatctattctgcttggaacttttcatagctaagtataacccccaaatgcatggttcctgggtcaggagacaccaaaatcaattatagctgttcccactcaagttaataaagtaaatgatttcctccactttgcatggaggggtgtaaggaaagcctattttatctgtgcctgggagaactgtgcctattttcagtcttttagaggaaatttcaactcaaaatttttaagtgtgaaaggtttactggtgtcacataaacattagcagtgagaccaaataatgaaacattgctttataccttagtgctttccagttcactgttacctctagtcatggtagatgacaattttcctccctcatcttttgtagcaaagaagcaaattaagagccttttgcaagttagattaggggactgaaaaatccagggagataacctgattcttctatactatgactggagtaaagctgccaagagttaggttgaatttggagccttttaaaagttggttccataagtgagaaggggggctaacatgtgaccactgtgcccctgagaatccatgagatggaaaagtacagacaagaaggcacttaacgctgttctcagttggaaaatgtcagccctccacacctgtttggatgtgaagtgcattattaattttaatgacaaaatgaaactgctaattagtttaaatgtaatgtttaaatggtattgaatttcctattgcctgattaaatatatctgtaattgtaacatcatgtttctgagagctttaactacttccttatttttatgcaatcattttaaagattgtggctatatctaatttaaatttgctgatgattgaatctaaattcaagtgaagaccacagcattaatcccaaaggagattttttttatgtttagaggtggagatattagggtaaatcagtatattgctcctgtcatcaaagtttttgttcatttgtgtgccacatcgaatagcagcacttctcaaagtttgtcaactggaaaaaagtgtttaaaactgtttttttcttaagcagatttggtgatgtcatcaatatctatgatatcgattggtaaaaggtctttctttgttgaggatttgagctctctttttaagagtttattttattttaaaggaacatatgctttgaataacaattctctgggcatgtttaactaacctaggtgggaaaaccatggtgctgtttaattgtaaatagattgatataagattggaccagtacttgatgtgtataattttagtatgtagggtttatgtgctttttttaaaaaaaaaaaagtcgacgcggccgcgaattta

SEQ ID NO: 464792 - DNA, 2920 bp, Homo sapiens
gcgccggaggaggctgcagcggcggcggcggcgggcccggacgagcgtccggaggtggcggacgaggcgccgggggcccccatgggcgggtgtgtgggcgcccagcacgactcctcgggcagcctcaacgagaactcggagggcaccggagttgctctaggtcgtaaccagcctttgaaaaaggagaaaccaaaatggaaaagcgattatcctatgacagatggacaactacgcagcaagagggatgaattttgggatacagcaccagcttttgaaggccggaaagagatttgggatgccttgaaggctgctgcacatgcttttgagagcaatgatcatgaactggcacaagcaatcattgatggtgcaaacataacattaccacatggtgcacttacagagtgctacgatgaactggggaacagatatcagcttccagtgtattgcttggcaccgccaatcaacatgatagaggaaaagagcgacatagagactctggatattcctgagccaccacccaattctggatatgaatgtcagcttcgtttgcgcctttccacaggcaaagacctcaagcttgtggttcgcagcacagacacagtattccacatgaagagacggttgcatgcagcagagggagtggaaccaggtagtcagcggtggtttttttctggcagacctctcactgacaaaatgaagttcgaagagctgaagatcccaaaggactatgttgtacaggttatagtgagccaacctgtgcagaacccaacaccagtggagaactgaactgagccctgttggccagctcccacatccctctgctcctttttatggttcttgttgtcatttcctactctgcggcgtgaaatctatttcactgctctaaattccctatgaatggatttagttctgaggaattaccagtgaaaaattccatctgtgatggagaccaacaaaaataataaaacacaaagagccaggctttgagactcatgtaattacaatttctaatttgaaaggcagttaagaaatagataaccatttattttagaacactcaacaactatgtaatggctatatttcagtgacttggactgtaaatgaaacattgcatccatgaaggacagcaccaagcacctttttgaatacagaatttttttagaaaaatatatcaaattatataatttccagaaaccataaataatggatataaaacttaaccttttttgttttgttttgttttgttttgttttgttttgttttggttaatggaaactgaaaagagcagtatttgaggttgcttctattctggttttttattcttagctcaattaatatttagccataaatgagtagagactggcaaattgtgctttagtgttgctttcctcatccccacatcttgagctccttatttacattcacactaaattttggtgccttccagcacattagtggcaggcacccttctggaacactaggcaataatttcatcaatacagtcaggtctcttgagtttcaacagatactcagttgaaaagtcgctgtcatcttgctgcataagtattttgaaaggtctgtataacgaagccatttttatatccaggcttagaaggtcactactatatagtaccttcattgatctatctattctgcttggaacttttcatagctaagtataacccccaaatgcatggttcctgggtcaggagacaccatttgcatggaggggtgtaaggaaagcctattttatctgtgcctgggagaactgtgcctattttcagtcttttagaggaaatttcaactcaaaatttttaagtgtgaaaggtttactggtgtcacataaacattagcagtgagaccaaataatgaaacattgctttataccttagtgctttccagttcactgttacctctagtcatggtagatgacaattttcctccctcatcttttgtagcaaagaagcaaattaagagccttttgcaagttagattaggggactgaaaaatccagggagataacctgattcttctatactatgactggagtaaagctgccaagagttaggttgaatttggagccttttaaaagttggttccataagtgagaaggggggctaacatgtgaccactgtgcccctgagaatccatgagatggaaaagtacagacaagaaggcacttaacgctgttctcagttggaaaatgtcagccctccacacctgtttggatgtgaagtgcattattaattttaatgacaaaatgaaactgctaattagtttaaatgtaatgtttaaatggtattgaatttcctattgcctgattaaatatatctgtaattgtaacatcatgtttctgagagctttaactacttccttatttttatgcaatcattttaaagattgtggctatatctaatttaaatttgctgatgattgaatctaaattcaagtgaagaccacagcattaatcccaaaggagattttttttatgtttagaggtggagatattagggtaaatcagtatattgctcctgtcatcaaagtttttgttcatttgtgtgccacatcgaatagcagcacttctcaaagtttgtcaactggaaaaaagtgtttaaaactgtttttttcttaagcagatttggtgatgtcatcaatatctatgatatcgattggtaaaaggtctttctttgttgaggatttgagctctctttttaagagtttattttattttaaaggaacatatgctttgaataacaattctctgggcatgtttaactaacctaggtgggaaaaccatggtgctgtttaattgtaaatagattgatataagattggaccagtacttgatgtgtataattttagtatgtagggtttatgtgctttttttaaaaaaaaaaaagtcgacgcggccgcgaattta

SEQ ID NO: 464793 - DNA, 1823 bp, Homo sapiens
gactattttcttgataatgtagctgggataaactagaaaacaagtttccccatggtcagctggaaatactcatattgcacttggacggagcagattgtttctgaagagggccagtgatgagcaccagttccctccttgcccaggccaacagcgtttcacaggacccctgggatcgtcctgatggttctcttccaaacaatgatctagaaagatgccccgtgtcaagttgcttgcctttcgaaggtcttcaaatcattgttcctccatatcatattcagagctagtgctttcatgctgatgtggaaacatctaagaggactcataatgtcaacatgcatttccccaataagtaaacaagagaaatgacactgacaagaacaagaaatgattatttcttctgccaaagttggaagcgaccagatacggatacgaagagatagcccaggttgggcaactggccctggaagctgataatgaccccatggcaacgcgggccctggacacaggagaggagagaaggccacagcgcggaggccctaggacgccgcatggagaacattggaggcgatatcttcccaatgagaggtgacagcgggctggcagtcctcagagccctcgctcactctgggtgcctcctctgcctgggctcccactttggcggcacttgaggagcccttcagcccaccgctgcactgtgggagcccctttctgggctggccaaggcgggagcccactccctcagcttgcagggaggtggggagggagaggcgcgagcaggaaccggggctgcatgtggcgcttgcgggccagctggagttccaggtgggcgtgggcttggcgggccccgcactcggagcagccagccggccctgccggccccaggcaatgagggacttagcacccgggccagcggctgcggagggtgtactgggtcccccagcagtgccagcccaccggcgctgcgctcgatttctcgccgggccttagctgccttcccgcggggcaggtctcgggactgcagcccgccatgcctgagccttcccccgcctccgtgggctcctgtgcagcccgagcctccccgaggagcgccgccccctgctctacagcgcccagtcccatcgatcacccaagggctgaggagtgagagcgcatggcgtgggactggcgggcagctccacctgcagcccccgtgcgggatccactgggtgaagccagctgggctcctgagtctggtggggccttggagaacctttatctcagggattataaacgcaccaatcagtgccctgtcaaaacagaccactcggctctaccaatcagcaggacgtgggtggggccagataagagaataaaagcaggctgcccgagccagcagtggcaacccgctcgggtccccttcgacactctgtggaagatggtaaaactgagattcaggatgatgaataacacacccaagagcaatagccaagtgtcagagcgtggactcaggccccaggtctgcccaggcagagccaagagcctcatccgtctactgcattgctgttaccaggagtggagcttgggattctcctagtgctcaccctgccatctctactgaattgaattttgtgatgtaaaggcagtgttttgtgtcaagcctgctactcattccaccacttcccagctcagggatctcaaacccgtttcttcatgtgtaaagtgagaaataacaaaatggggataataataacttatcccttatgattgttgtcaagattaaatgaattactctaagtgcattgctgagaacacacctggaacccagtaagcattcaatacgaggt

SEQ ID NO: 464794 - DNA, 2084 bp, Homo sapiens
tatgatttacagcagccggcgcctgggggctctgaagtggcccccagcatgcttgagatcaccattcagaatgctaaggcttacctgctgaagactagcagcaattcgggctttaatctatatgatcatctttctaatatgttgaccaagatattaaatgagcgtcctgaaaatgctgttgacatctttgaaaatattagccaagatgtgaagatggcacattttagtaaaaaatttgatgcactacaaaatgagaatgagttgcttccaacatatgaaatagcagaaaagcaaaaggctctttttctccagggacatttggaaggagttgaccaagaattggaagatgaaatagcagaaaacgctcttccaaatgtaatggagtcagctttttattttgaacaagctggagttggtttgggcacagatgagacataccgcatatttcttgccctcaagcagcttactgatacccacccaatccaaagatgccgcttctggggaaagatcttgggtctggaaatgaattatattgtagctgaagtggaatttcgtgagggggaagatgaagaggaagtggaagaggaagatgtagctgaagagagggacaatggagaaagtgaagctcatgaagatgaggaagatgaattaccaaagtccttttacaaggccccacaggctataccaaaagaagaaagtagaacaggtgccaacaaatatgtctattttgtttgcaatgaaccaggaagaccatgggtgaagttaccaccagttatacctgcacaaattgttattgcaagaaaaatcaagaaatttttcactgggcgattggatgctcccatcataagctacccacctttcccaggaaatgagagtaattatttacgagcacaaattgcccgaatttcagcaggaacccacgtcagtcctctaggattttatcagtttggtgaagaggaaggagaggaggaggaagaggcagaaggtgggcgaaatagctttgaggaaaaccctgattttgaaggcatccaagtgattgatctagtagaatccctatccaattgggttcatcatgtacagcatattctctctcagggtcgctgtaattggttcaactccatacaaaaaaatgaggaagaagaagaggaagaagatgaagaaaaagacgattctgactacatagaacaggaagtggggcttcctcttttgacaccaatctctgaagatttaggttattttacgaatgcaaacattgaagagcatgacgagccaaaggggccagcgtccttgactgcaacttcccgtaaagacagcagtgcattgtactccaagtctgatgtgccaggctggggtcataagtatagtccagacaattatacacccccagttccaccaccagtttatcaagaataccccagtggaccagaaattacagaaatggatgatcctagtgtggaggaggagcaggctttcagggctgcacaagaagcagttctactcgcagctgagaatgaagaatctgaggaagatgaagatgaggaagatgattatgactaataaacataaaattagcctggttttatgtgacactgatacacacacaccccttatatgggactaattttacacttttctgtgttatgtgtgtatatacatacacatgtaagaaattattcaactgcaaaatctcaatcttgaaaatcaagcttgaaatttcataggtagaaatattagcatttttattgaaagatactcacaggattttccagaggctaaataacatgcaattgcataattgttctgagggttatggataatggaatatgtgtttgtacattcctgtttttaaaagggctcaggtttcacatggtccaggtgaggtaaaacaattaaaataaataaataaatggtctcaggtttaatttgtaatacgacaaacactggaagatataacccacaggaaattcttggaaacatcaatactttttaaagagtgtcaaggggtatgaagacaaaaaatattgatagtcactagagtaatgtattcttaacctttgtaagaactgatctcagcatgtattctt

SEQ ID NO: 464795 - DNA, 2729 bp, Homo sapiens
atttccgtttcaaaccacccacttccggtttttcagccggttccggtcccgcccttcacttccggtcgctttcggtctctcagcggccggtttctgcgtccgctgccgcaggttccaccgcgctccaggtatttttttttctgaaggaaagctgcttcctcatatgtttcaagaatggctctccctatcattgtaaaatggggtggacaggagtattcagtgaccacactttcagaagatgatactgtgctcgatctcaaacagtttctcaagacccttacaggagttcttccagaacgccaaaagttacttggactcaaagttaaaggcaaacctgcagaaaatgatgttaagcttggagctctcaaactgaaaccaaatactaaaatcatgatgatgggaactcgtgaggagagcttggaagatgtcttaggtccaccccctgacaatgatgatgttgttaatgactttgatattgaagatgaagtagttgaagtagaaaatagggaagaaaacctactgaaaatttctcgcagagtgaaagagtacaaagtggaaattttgaatcctcccagggaagggaaaaagcttttggtgctagatgttgattatacattatttgaccacaggtcttgtgcagagactggggtagaattaatgcggccatatcttcatgaatttctaacatctgcctatgaagattatgacattgttatttggtctgcaacaaatatgaagtggattgaagctaaaatgaaagagctgggagtgagcacaaatgcaaattataagattactttcatgttggatagtgctgctatgataacagtacatactccaaggagaggattaatagacgtaaagcctcttggtgttatatggggaaagttttcggagttttacagcaagaaaaacaccattatgtttgatgacatagggagaaattttctaatgaacccacagaatggactaaagataaggccttttatgaaagcgcacctaaatcgtgataaagacaaagaacttttaaaattaactcagtacctcaaggagatagcaaaattagatgactttttggatctaaatcacaaatattgggaaagatatctctcaaagaagcaaggacagtagttacaagttatactggcagttattgaagatacttaagatccaagaacttcttgcttttatgctagaaatcattatgatagtgctggacactgaagcaaataccatactgcttatacttggtcttccagttttttgtaaatttaattttatattttttgaagatgatagcaatatgctaaaaaatgcttgtcccctatatgaatattctgttacgcttgaaaaatattttctccagcgttggttactgaccaccccaccctcccaccacacacacacacacacacacacacacacacacacacacacacacacaaagtggagaaaaatgtatactcaacaatgtcattttgtgactttggaaacaagttatgttttgtgtttttgtctcattgtgttattgtctgactaaatctaaaaccaaacccatgttgaaactagtacttttccctttaaaaacaaaccaaaaaaaaaaacaaaaaaaaactttttaattaaagaacctagtttgctatgcttaaaattaccaagaattttttatttctttgtcatagacacaatttctcttctgtatgccactagttacatttctaaattctgagcggtctcagttaggcctgtatgtgtgtacatgtccaagtaaagctggaaaatgtcagtcttgacacagctgtgtcttagtatgagaaacagaagactgaagaataaaaactaaggaacaagaatgagtctctttttggtggctaagtagaatcttcctaaaaccattgtcataaaagcagttaaaggcaataaatttttaaaagggacatatcactgattcattcctaaaaagcatgaacaaaaagtttttgttctgttccagctatatcttgtctaagtgctaacactgtttcagtgaaaatatctagccataagattaaaaaaatatattatttgcaatgcttaagcctgcagatacgtaatgtgaccactgttttgtgttgacaatattgctttatacagttcttgtatttgaaaggaattgatccttttaaagaaacatggtgtatattgttcttacaggactaatttcagtggtgtaaataataaatatcttttcttaaaacattcgttatctgttctatattaccacatatattttacctctttgttgaatgacaaaatgaacattatattcaggcaaggatctcttgcaaaaacttaaatgtgtatggtgatgttaaaggtgtgtatatcactatttatacattcaggagtagttttagcagctaatcagatacataaaattacttaattctaataagtaccttttttcagaaatatatactattttctttgtgacaggttttgaggatatacagtgcagaagagtttgaggactctaaagtgattcaattaaaatatatttcttaattatgaagtaaaatttaaatatttaaggatagaacagaaattttagagtattcatttttcattggtacatttttcccactgtaaaagacaacttattccaaagtacgcacggaaagggcttaatcttctcaagaaaatggaacacttaaactattaacataggtcaagaacgggcagacattttc

SEQ ID NO: 464796 - DNA, 398 bp, Homo sapiens
gtctcttttaggaagattctacttagccaccaaaaagagaatcttcctaaaaccattgtcataaaagcagttaaaggcaataaatttttaaaagggacatatcactgattcattcctaaaaagcatgaacaaaaagtttttgttctgttccagctatatcttgtctaagtgctaacactgtttcagtgaaaatatctagccataagattaaaaaaatatattatttgcaatgcttaagcctgcagatacgtaatgtgaccactgttttgtgttgacaatattgctttatacagttcttgtatttgaaaggaattgatccttttaaagaaacatggtgtatattgttcttacaggactaatttcagtggtgtaaataataaatatcttttcttaaaaca

SEQ ID NO: 464797 - DNA, 2268 bp, Homo sapiens
  misc_feature (2258)..(2258): n is a, c, g, or t
atttccgtttcaaaccacccacttccggtttttcagccggttccggtcccgcccttcacttccggtcgctttcggtctctcagcggccggtttctgcgtccgctgccgcaggttccaccgcgctccaggtatttttttttctgaaggaaagctgcttcctcatatgtttcaagaatggctctccctatcattgtaaaatggggtggacaggagtattcagtgaccacactttcagaagatgatactgtgctcgatctcaaacagtttctcaagacccttacaggagttcttccagaacgccaaaagttacttggactcaaagttaaaggcaaacctgcagaaaatgatgttaagcttggagctctcaaactgaaaccaaatactaaaatcatgatgatgggaactcgtgaggagagcttggaagatgtcttaggtccaccccctgacaatgatgatgttgttaatgactttgatattgaagatgaagtagttgaagtagaaaatagggaagaaaacctactgaaaatttctcgcagagtgaaagagtacaaagtggaaattttgaatcctcccagggaagggaaaaagcttttggtgctagatgttgattatacattatttgaccacaggtcttgtgcagagactggggtagaattaatgcggccatatcttcatgaatttctaacatctgcctatgaagattatgacattgttatttggtctgcaacaaatatgaagtggattgaagctaaaatgaaagagctgggagtgagcacaaatgcaaattataagattactttcatgttggatagtgctgctatgataacagtacatactccaaggagaggattaatagacgtaaagcctcttggtgttatatggggaaagttttcggagttttacagcaagaaaaacaccattatgtttgatgacatagggagaaattttctaatgaacccacagaatggactaaagataaggccttttatgaaagcgcacctaaatcgtgataaagacaaagaacttttaaaattaactcagtacctcaaggagatagcaaaattagatgactttttggatctaaatcacaaatattgggaaagatatctctcaaagaagcaaggacagtagttacaagttatactggcagttattgaagatacttaagatccaagaacttcttgcttttatgctagaaatcattatgatagtgctggacactgaagcaaataccatactgcttatacttggtcttccagttttttgtaaatttaattttatattttttgaagatgatagcaatatgctaaaaaatgcttgtcccctatatgaatattctgttacgcttgaaaaatattttctccagcgttggttactgaccaccccaccctcccaccacacacacacacacacacacacacacacacacacacacacacacacaaagtggagaaaaatgtatactcaacaatgtcattttgtgactttggaaacaagttatgttttgtgtttttgtctcattgtgttattgtctgactaaatctaaaaccaaacccatgttgaaactagtacttttccctttaaaaacaaaccaaaaaaaaaaacaaaaaaaaactttttaattaaagaacctagtttgctatgcttaaaattaccaagaattttttatttctttgtcatagacacaatttctcttctgtatgccactagttacatttctaaattctgagcggtctcagttaggcctgtatgtgtgtacatgtccaagtaaagctggaaaatgtcagtcttgacacagctgtgtcttagtatgagaaacagaagactgaagaataaaaactaaggaacaagaatgagtctctttttggtggctaagtagaatcttcctaaaaccattgtcataaaagcagttaaaggcaataaatttttaaaagggacatatcactgattcattcctaaaaagcatgaacaaaaagtttttgttctgttccagctatatcttgtctaagtgctaacactgtttcagtgaaaatatctagccataagattaaaaaaatatattatttgcaatgcttaagcctgcagatacgtaatgtgaccactgttttgtgttgacaatattgctttatacagttcttgtatttgaaaggaattgatccttttaaagaaacatggtgtatattgttcttacaggactaatttcagtggtgtaaataataaatatcttttcttaaaacaaaaaaaaaaatttcactgtnccgtcgttta

SEQ ID NO: 464798 - DNA, 1713 bp, Homo sapiens
attctgtcttgaagacacactgcagtaagtttacttttatcaatatttaaaagaaaattaccataagtatgctagggactgttaattctgatgcatttaaacttttagttttgcttagaaaacttacttatacagattttttttaaagaaattcaagcttttcatatgtattgtattatcattcctcgtgttttagctgcaacaaatatgaagtggattgaagctaaaatgaaagagctgggagtgagcacaaatgcaaattataagattactttcatgttggatagtgctgctatgataacagtacatactccaaggagaggattaatagacgtaaagcctcttggtgttatatggggaaagttttcggagttttacagcaagaaaaacaccattatgtttgatgacatagggagaaattttctaatgaacccacagaatggactaaagataaggccttttatgaaagcgcacctaaatcgtgataaagacaaagaacttttaaaattaactcagtacctcaaggagatagcaaaattagatgactttttggatctaaatcacaaatattgggaaagatatctctcaaagaagcaaggacagtagttacaagttatactggcagttattgaagatacttaagatccaagaacttcttgcttttatgctagaaatcattatgatagtgctggacactgaagcaaataccatactgcttatacttggtcttccagttttttgtaaatttaattttatattttttgaagatgatagcaatatgctaaaaaatgcttgtcccctatatgaatattctgttacgcttgaaaaatattttctccagcgttggttactgaccaccccaccctcccaccacacacacacacacacacacacacacacacacacacacacacacacaaagtggagaaaaatgtatactcaacaatgtcattttgtgactttggaaacaagttatgttttgtgtttttgtctcattgtgttattgtctgactaaatctaaaaccaaacccatgttgaaactagtacttttccctttaaaaacaaaccaaaaaaaaaaacaaaaaaaaactttttaattaaagaacctagtttgctatgcttaaaattaccaagaattttttatttctttgtcatagacacaatttctcttctgtatgccactagttacatttctaaattctgagcggtctcagttaggcctgtatgtgtgtacatgtccaagtaaagctggaaaatgtcagtcttgacacagctgtgtcttagtatgagaaacagaagactgaagaataaaaactaaggaacaagaatgagtctctttttggtggctaagtagaatcttcctaaaaccattgtcataaaagcagttaaaggcaataaatttttaaaagggacatatcactgattcattcctaaaaagcatgaacaaaaagtttttgttctgttccagctatatcttgtctaagtgctaacactgtttcagtgaaaatatctagccataagattaaaaaaatatattatttgcaatgcttaagcctgcagatacgtaatgtgaccactgttttgtgttgacaatattgctttatacagttcttgtatttgaaaggaattgatccttttaaagaaacatggtgtatattgttcttacaggactaatttcagtggtgtaaataataaatatcttttcttaaaaca

SEQ ID NO: 464799 - DNA, 1072 bp, Homo sapiens
taaactggccatccgaaaatagcaacaacccagactggctcctcactcccttttccatcactaaaaatcacagagcagtcagagggacccagtaagaccaaaggaggggaggacagagcatgaaaaccaaaatccatgcaaatgaaatgtaattggcacgaccctcacccccaaatcttacatctcaattcccatcctaaaaagcactcatactttacccaccctcccaccacacacacacacacacacacacacacacacacacacacacacacacaaagtggagaaaaatgtatactcaacaatgtcattttgtgactttggaaacaagttatgttttgtgtttttgtctcattgtgttattgtctgactaaatctaaaaccaaacccatgttgaaactagtacttttccctttaaaaacaaaccaaaaaaaaaaacaaaaaaaaactttttaattaaagaacctagtttgctatgcttaaaattaccaagaattttttatttctttgtcatagacacaatttctcttctgtatgccactagttacatttctaaattctgagcggtctcagttaggcctgtatgtgtgtacatgtccaagtaaagctggaaaatgtcagtcttgacacagctgtgtcttagtatgagaaacagaagactgaagaataaaaactaaggaacaagaatgagtctctttttggtggctaagtagaatcttcctaaaaccattgtcataaaagcagttaaaggcaataaatttttaaaagggacatatcactgattcattcctaaaaagcatgaacaaaaagtttttgttctgttccagctatatcttgtctaagtgctaacactgtttcagtgaaaatatctagccataagattaaaaaaatatattatttgcaatgcttaagcctgcagatacgtaatgtgaccactgttttgtgttgacaatattgctttatacagttcttgtatttgaaaggaattgatccttttaaagaaacatggtgtatattgttcttacaggactaatttcagtggtgtaaataataaatatcttttcttaaaaca

SEQ ID NO: 464800 - DNA, 671 bp, Homo sapiens
ctggtattggggttaaatttttatgaataaaataatgtgaatgaaattaattagaagcaactagaatgataggaggcgggaaaggctaagtagttttgcaaagtagagtagctgtgtatggattcaagtgcaataagaaagctggtgttgtcaggttcagattgaaaagataatgttaggtaaaataggtagaagagtttgtaatttgtaaacattatacatgactttctatttaggctaatataaaagtaatttttagtatttatgttcttggtgatattttaacctcattaactctaattgaaatgatagtatagatttgttagttttccttatcacattgtgatgtgttgagtaatgtttgtttcctaatagataaggccttttatgaaagcgcacctaaatcgtgataaagacaaagaacttttaaaattaactcagtacctcaaggagatagcaaaattagatgactttttggatctaaatcacaaatattgggaaaggtaagttttaattgcttatttattttctctttacatcaatgaagaaaaaattatcatttttcatcagtgaccccagtatatatatagctgtcttaatttttatttaaaataggtgacttctaaaaacattttctaatccagtgacctacccccaaaagtattttcccc

SEQ ID NO: 464801 - DNA, 304 bp, Homo sapiens
cttaggtccaccccctgacaatgatgatgttgttaatgactttgatattgaagatgaagtagttgaagtagaaaataggtaagtgcttttcgctttagaagtaatcagttgtcatgtgagaacaagtgaatattttatctaattatatgttttccattagggaagaaaacctactgaaaatttctcgcagagtgaaagagtacaaagtggaaattttgaatcctcccagggaagggaaaaagcttttggtgctagatgttgattatacattatttggtaagtcagttaagaatgcttttcattt

SEQ ID NO: 464802 - DNA, 2238 bp, Homo sapiens
atttccgtttcaaaccacccacttccggtttttcagccggttccggtcccgcccttcacttccggtcgctttcggtctctcagcggccggtttctgcgtccgctgccgcaggttccaccgcgctccaggtatttttttttctgaaggaaagctgcttcctcatatgtttcaagaatggctctccctatcattgtaaaatggggtggacaggagtattcagtgaccacactttcagaagatgatactgtgctcgatctcaaacagtttctcaagacccttacaggagttcttccagaacgccaaaagttacttggactcaaagttaaaggcaaacctgcagaaaatgatgttaagcttggagctctcaaactgaaaccaaatactaaaatcatgatgatgggaactcgtgaggagagcttggaagatgtcttaggtccaccccctgacaatgatgatgttgttaatgactttgatattgaagatgaagtagttgaagtagaaaatagggaagaaaacctactgaaaatttctcgcagagtgaaagagtacaaagtggaaattttgaatcctcccagggaagggaaaaagcttttggtgctagatgttgattatacattatttgaccacaggtcttgtgcagagactggggtagaattaatgcggccatatcttcatgaatttctaacatctgcctatgaagattatgacattgttatttggtctgcaacaaatatgaagtggattgaagctaaaatgaaagagctgggagtgagcacaaatgcaaattataagattactttcatgttggatagtgctgctatgataacagtacatactccaaggagaggattaatagacgtaaagcctcttggtgttatatggggaaagttttcggagttttacagcaagaaaaacaccattatgtttgatgacatagggagaaattttctaatgaacccacagaatggactaaagataaggccttttatgaaagcgcacctaaatcgtgataaagacaaagaacttttaaaattaactcagtacctcaaggagatagcaaaattagatgactttttggatctaaatcacaaatattgggaaagatatctctcaaagaagcaaggacagtagttacaagttatactggcagttattgaagatacttaagatccaagaacttcttgcttttatgctagaaatcattatgatagtgctggacactgaagcaaataccatactgcttatacttggtcttccagttttttgtaaatttaattttatattttttgaagatgatagcaatatgctaaaaaatgcttgtcccctatatgaatattctgttacgcttgaaaaatattttctccagcgttggttactgaccaccccaccctcccaccacacacacacacacacacacacacacacacacacacacacacacacaaagtggagaaaaatgtatactcaacaatgtcattttgtgactttggaaacaagttatgttttgtgtttttgtctcattgtgttattgtctgactaaatctaaaaccaaacccatgttgaaactagtacttttccctttaaaaacaaaccaaaaaaaaaaacaaaaaaaaactttttaattaaagaacctagtttgctatgcttaaaattaccaagaattttttatttctttgtcatagacacaatttctcttctgtatgccactagttacatttctaaattctgagcggtctcagttaggcctgtatgtgtgtacatgtccaagtaaagctggaaaatgtcagtcttgacacagctgtgtcttagtatgagaaacagaagactgaagaataaaaactaaggaacaagaatgagtctctttttggtggctaagtagaatcttcctaaaaccattgtcataaaagcagttaaaggcaataaatttttaaaagggacatatcactgattcattcctaaaaagcatgaacaaaaagtttttgttctgttccagctatatcttgtctaagtgctaacactgtttcagtgaaaatatctagccataagattaaaaaaatatattatttgcaatgcttaagcctgcagatacgtaatgtgaccactgttttgtgttgacaatattgctttatacagttcttgtatttgaaaggaattgatccttttaaagaaacatggtgtatattgttcttacaggactaatttcagtggtgtaaataataaatatcttttcttaaaaca

SEQ ID NO: 464803 - DNA, 1269 bp, Homo sapiens
ccacctcacctcaagtcgcctatgcacctgaacagcgtgagcatgcatgtgatagtggtgcaggggctgctggtgggagggacatttgtgggcatggacagtggctgtcctgggtttgaagccacagcaccaaccgtcacactggctagggcagcaccaaccgtcacactggctagggcagctccaaccgtcacactggctagggcagcaccaaccgtcacactggctagggcagctccaaccgtcacactggctagggcagctccaaccgtcacactggctagggcagctccaaccgtcacactggctagggcagcaccaaccgtcacactggctagggcagctccagcagtaggggaaggggagtggtggcttaggcatctggggtctgtaaaggcaaaaattgatgttaatgtggcatctgttgccaacaaatattttgcatatgatacaatctatgcaatcacaatgggagggatcaagaggagccaatcacaatgggagggatcaagaggagccaatcacaatgggagggatcaagaggagccaatcacaatgggagggatcaagaggagccaatcacaatgggagggatcaagaggagccaatcacaatgggtgggatcaagaggagccaatcacaatgagagggataaagaggagccaatcacaatgggcgggataaagagaagcagacatggagccctgcaaacttggcctaaacattgctctcggtgttctagcatcataatgtgacttttctttttaaccacagtttgttgttaatttataaagttacactaacttccacctccgatacagagcttctaaaagaatcaaagtataaaatatatgtggttgtaaaaaagtgccttgtaaattctaaagcactagagagtgaatacatctccaggatgaggccacccattttggcttccactaacccggaggaacctggagcaaggaaaccaaaggaagtattcaggaagcttcagatttgactgctggcattataggcaagaattacacacacatgacttactgttcactattggtgagaactcgtgttctcatttcgggcaatgtttagaatgaagctccattaaacatgcttgctccgaggaatatccttagaacggccatgcttcttattgtgattgttatgttattttaagaaggtgacccctaatctgagggccaacgctgcaaagcggctctgtctgtttcaaagctgagcacacgtggtgtcacgtgacacatggtcttttgc

SEQ ID NO: 464804 - DNA, 800 bp, Homo sapiens
ttgagagaaacagggaagttaggatgggaaaccggtttttggaggggaaactgggcttgaaagatgactatttcatttttggacacacgttacgttttctctctggagctgtgtttaataatggaataatgtgtgctcataacagtgtggactgcatcctaagcctagctctcctcatggttgaggagtggctgtcaacagtagtcaaagttctttgctttcttttccatggcctctcctccaacatcgaggattacaatttgacaaaagatttgagtggcgacacagacccaaatcatatcagcaccaacaagacctacgaaaatgaagttaagatagaacttgggcaagttaaccttgttcttaactgctgtacctcattgcctgatgtctgttctctctcaaatattccacgtgtctaatcaattagaaacatttcaaccagtataagagtatatgtaaactagtataagagtataaataaatgctgtcttaatcgctagacacattcagcttctctatatagcctttttcaaaggatattttgtaagtaccaattaatattgaagaagattttggtctaagatatctgattgtcagtttacgagtgaagcgttttagtttcaaagctccagatctctttctgattccctaatatgcaagtatacaagatttcattccataattaaattaaaatagtttatccacaataaaatctgggaaaatcaaacaatgtttatcttctcctgggtttatttattaagacaaactcctctaagggaggtggagcaagatagcca

SEQ ID NO: 464805 - DNA, 739 bp, Homo sapiens
agccgggtcgcggggccaggctggccgcggggctgggggcggccagtggggcaggagctccggccgcgtcaaggtcgggtggaaaaactaactgaaagctgagaaaacgcccacttttactttccagagctgagaggcggccccgggccccgaactcccctggcccgacgctcccaccccggcagataatgaaactgctgtttatacattaatgccaatggttatggctgatcaacacaggtctgtttctgaactactatcaaattcaaaatttgatgtcaattatgcattcggacgtgtgaaaagaagcttgcttcacattgcagcaaattgtggatcggtggaatgcttggttttgctgttaaagaaaggagcaaatcctaactatcaagatatttcaggctgtacaccccttcatttggcagcaagaaatgggcagaagaaatgtatgagtaaattattagaatatagcgctgatgtcaacatttgtaataatgaaggccttacagcaatacattggctggctgtgaatgggcggacagaactactccatgaccttgtgcagcatgtcagtgatgttgatgttgaggatgccatggggcagacagcactgcatgttgcctgccagaacggtcacaagacgtcaagtagtgaactgtaataacgttcttttttgaggatggctgtttttcttgaagttaataattgggtttgctcagttttctttgtatgaatcagc

SEQ ID NO: 464806 - DNA, 1165 bp, Homo sapiens
  misc_feature (115)..(116): n is a, c, g, or t
  misc_feature (123)..(123): n is a, c, g, or t
gaatcaatcttgcaccccctccctcctgttacatatggtatctgttcatgttcctcactgaggcctctcttaagcactgggctccatcctcacttccctgttcacaaaggaatgnntttccanaagcttaggagtacgcccagtcgctgcgtggcttcccgcatactcagccctgcgcccgcgttggcgtggcctgggcgcccccaacgtgactccgcccagggcgctccgttctgccagctggaaactacagttcccagaaggccacgcgagcccgggagggacgcggcggcgggggctgcaggaaaggcgcgagcagaggcggcggcgggtgtactgtaggtggtcggtccggcagcagcccggcccccggacgcaggacgtggccccaggcagccctcgcagctcagtgctctagccggggcaagcccgcgtctccgcctgctggacgggcccaggcgagatgtagggctctgggcgcggaggccgccggtggggcggctgatcgcggaggatcgcggagggcgcgccgaggatggagagagcgatggagcaactcaaccgcctgacgcgctcgctgcgccgcgcgcgcaccgtggagttgcccgaggataatgaaactgctgtttatacattaatgccaatggttatggctgatcaacacaggtctgtttctgaactactatcaaattcaaaatttgatgtcaattatgcattcggacgtgtgaaaagaagcttgcttcacattgcagcaaattgtggatcggtggaatgcttggttttgctgttaaagaaaggagcaaatcctaactatcaagatatttcaggctgtacaccccttcatttggcagcaagaaatgggcagaagaaatgtatgagtaaattattagaatatagcgctgatgtcaacatttgtaataatgaaggccttacagcaatacattggctggctgtgaatgggcggacagaactactccatgaccttgtgcagcatgtcagtgatgttgatgttgaggatgccatggggcagacagcactgcatgttgcctgccagaacggtcacaagacgtcaagtagtgaactgtaataacgttcttttttgaggatggctgtttttcttgaagttaataattgggtttgctcagttttctttgtatgaatcagc

SEQ ID NO: 464807 - DNA, 1974 bp, Homo sapiens
tgagatacagccatgtccatagaagagttatgttctgatttcaaaaaatacttgtttcccaacagctttgaaatatcagtttttcttcaaactcttgccatgatacacagcattgagatgatcaacaattcaacactcttacctggagtcaaactggggtatgaaatctatgacacttgtacagaagtcacagtggcaatggcagccactctgaggtttctttctaaattcaactgctccagagaaactgtggagtttaagtgtgactattccagctacatgccaagagttaaggctgtcataggttctgggtactcagaaataactatggctgtctccaggatgttgaatttacagctcatgccacaggtgggttatgaatcaactgcagaaatcctgagtgacaaaattcgctttccttcatttttacggactgtgcccagtgacttccatcaaattaaagcaatggctcacctgattcagaaatctggttggaactggattggcatcataaccacagatgatgactatggacgattggctcttaacacttttataattcaggctgaagcaaataacgtgtgcatagccttcaaagaggttcttccagcctttctttcagataataccattgaagtcagaatcaatcggacactgaagaaaatcattttagaagcccaggttaatgtcattgtggtatttctgaggcaattccatgtttttgatctcttcaataaagccattgaaatgaatataaataagatgtggattgctagtgataattggtcaactgccaccaagattaccaccattcctaatgttaaaaagattggcaaagttgtagggtttgcctttagaagagggaatatatcctctttccattcctttcttcaaaatctgcacttgcttcccagtgacagtcacaaactcttacatgaatatgccatgcatttatctgcctgcgcatatgtcaaggacactgatttgagtcaatgcatattcaatcattctcaaaggactttggcctacaaggctaacaaggctatagaaaggaacttcgtcatgagaaatgacttcctctgggactatgctgagccaggactcattcatagtattcagcttgcagtgtttgcccttggttatgccattcgggatctgtgtcaagctcgtgactgtcagaaccccaacgcctttcaaccatgggagttacttggtgtgctaaaaaatgtgacattcactgatggatggaattcatttcattttgatgctcacggggatttaaatactggatatgatgttgtgctctggaaggagatcaatggacacatgactgtcactaagatggcagaatatgacctacagaatgatgtcttcatcatcccagatcaggaaacaaaaaatgagttcaggaatcttaagcccaaggactttgcccctgctatttcctttgcctataataattttctctgatgttcatgtggttaattttcttattcctttctgtcttttctaaaatgtcaccacctcagtgagagcttccctggacacttatttaaaaattgcaacatcaacctagtagttcttattcactgtcctatccttatttttctccttaacacttataactttctgtcattctgtacattttgcttattttaactctgtcagtcttgtcaactagaacttaagttcgacgagctaaatatttgtgtttcattccccactgtggcttcaacaattagaacagtgcctaacatatagataggcactcaacaaatatttggtgaatgaaagaatgaacacagtaatgctgtaaaccattttccttaatttgatttcccctggctgtaaaagttttagtaaagcaagatacttcttccttgaaagacagaaacgtagccattcttctgtgttctcaaactttcactgtcatcatcttcattttccttaccattatcctcacaactacattac

SEQ ID NO: 464808 - DNA, 793 bp, Homo sapiens
  misc_feature (755)..(755): n is a, c, g, or t
  misc_feature (764)..(764): n is a, c, g, or t
tgagatacagccatgtccatagaagagttatgttctgatttcaaaaaatacttgtttcccaacagctttgaaatatcagtttttcttcaaactcttgccatgatacacagcattgagatgatcaacaattcaacactcttacctggagtcaaactggggtatgaaatctatgacacttgtacagaagtcacagtggcaatggcagccactctgaggtttctttctaaattcaactgctccagagaaactgtggagtttaagtgtgactattccagctacatgccaagagttaaggctgtcataggttctgggtactcagaaataactatggctgtctccaggatgttgaatttacagctcatgccacaggtgggttatgaatcaactgcagaaatcctgagtgacaaaattcgctttccttcatttttacggactgtgcccagtgacttccatcaaattaaagcaatggctcacctgattcagaaatctggttggaactggattggcatcataaccacagatgatgactatggacgattggctcttaacacttttataattcaggctgaagcaaataacgtgtgcatagccttcaaagaggttcttccagcctttctttcagataataccattgaagtcagaatcaatcggacactgaagaaaatcattttagaagcccaggttaatgtcattgtggtatttctgaggcaattccatgtttttgatctcttcaataaagcaggatgcggcagccnccctttttnttttttcacttatgctacatctacaataa

SEQ ID NO: 464809 - DNA, 1384 bp, Homo sapiens
tgcctacatcaaaataggggaaacttcaaataaacaatctaatgatgcatccagctgggaacggtggctcacgtctgtaatcccagcactttgggaggccaaggtcggtcctgtcagccttctggccatcggggtcctcaccgtgcactgcatggtcatcctgttgaactgtgctcaacacctcagccagagactgcagaagacttttgtgaactatggagaggccacgatgtacggccttgaaacctgcccgaacacctggctgagggcccatgcagtgtggggaaggtacactgtcagcttcttattagtcatcacccagctgggcttctgcagtgtttattttatgtttatggcagacaatttacaacagcaaccacactgcctgtcattgtgctttatgtcagatggtggaaaaagcccacgtgacctccaacatctgccagcccagggagattctgacgctgacccccatcctggacattcgtttctacatgctgataatcctgcccttcctgatcctgttggtgtttatccagaacctcaaggggattccatatcccagcaacctacccttgatggcaaactggaagaccttcttgctgttctttggtacagccatcttcacatttgaaggcgtcggtatggttctgcctctcaaaaaccagatgaagcatccacagcagttttcttttgttctgtacttggggatgtccattgtcatcatcctctatatcttactggggacactgggctacatgaagtttgggtcagacacccaggccagcatcaccctcaacttgcccaattgctggtatgtcctgcccacctcaggtgagatagggagagacactggaactgttctggttgtcatagcagagagcacagcaaagctgagccatgaagctggtaatccatcactggaagtgacatatgtctctcctgctcacactgcatcagtcaaagcaagccacatggccgcacctcactccaagggggcagggaagtgcaattctgccatgtgcctggaagtatttggtgaacagcacaaataactgctgtgctacctgatgcagtgaccgtggggattaattggattaatacatagataatgcttagaaaagtgcttagcacgtggtaagcattcatgagcgttagctattatcattgttatgcatccccacagccttcatttttccaaggtgagtaggatgatggtgcatttatttcccacaaatccagagctgtagaatgagaaaaatgtaaccatccccacccaccttgctgtgttatgataatgactagatgagacaataaatgtggagtttctttgaagttgtgccttattttactcaagatatcatcctaatatgctgttcttgtt

SEQ ID NO: 464810 - DNA, 1502 bp, Homo sapiens
tgagctgtgggagggccactggtccaccacagggagtctgtgctgtccagtgcccactggatggcaggaagggtagggccttagggtttttctaggccttcgggacacagaagtgatctagacagatgggccttgccttggtggaatttgtaactaacaggatgagagatattaatcaagaaaccacacagtcaaatatttcacagcagaggaacgggtgctctgaatgaggggtatgagggtggtggcagtcatgaagaagatgtgtcagaactgtgacgctgaatccggagccccaacctctcctagcctcctagaggaggatgacccaggacccttgtcctcccaacagcaggccaccagttcaagggacaagaagcccctaagctccctccacctttcacatagggcccaggtggccttggagtacctgcctttcttctgcacctatgggtgcctcctggaagaggaggggttggtcctgcagcccaagacaccgctccaggaggactcagaactgctcagtgggttcttcccttactaccgctctgaggaggagagtttgcccagcctggcccttcctggctggtcacacaggggctcccaagatctgcccactgagaaggaggcacgggctggctgcttctgcaggacaacagtcagggacgaatgctctactctaacaggcccctggacaggcccctctcagggctgctgcggcccttggagcaaggtgtcactggttgggagcacagacactgcaggaagactgtcctgttcaagcccagcttgaccacctgctaggagagcggcctggggaacgtggtttccttataaaagagagaacagcagcagcaacaataaagccattgtgagaattacatacaaccacgtacctaaagtgctcagcaggatggtaaggatggtgactctgcatgtgtctgctaggccctacctccttggaccttgtggacctgttttctggtgctccagcccaacttccaaccccaggctcacctggtgagtggctgaatcacactgggattttgagagtatatgctcatcccacctaccccgggaccagacacttagatgctgattcctgtttgaaaatcctttagtgccagccacactggcatgtcccaagttcacagcctctctgtcccgtggcgctggttttgtgtctcctccccgggtgtaggttctttgtttgctttgacactcacacacctctgaccactggatccctgctcctccacccgatggctgcttgtctggaatgccctcacctgctcacatgcttcctgaggatgaggactttaagaaagagagagaaatcaatcggtcacactagagttacatcaaagaaattctttttagaaaatctattttttactatttccaaggcactcctatgacttcccattgggtttggggatttgggatttggagtatgatgggagtatgaagaaataaaggtacccttgccaggaaaactcgtc

SEQ ID NO: 464811 - DNA, 1743 bp, Homo sapiens
gatacccttaagggagaactctggagcactaactgtgtgttccctacagatgcgtccaccacctcccccgccggctaaagccccggatcctggccacccagatcccctcacctgaaggccagggaagccttgacccccagtgatgctgctgtccctatcttcaagctgtcagaccacaccatcaatgatccagagcaacacagccaaaagctggaatcgcccttatttccaccctcacctccaagggtggaaacttgccccttcccatttctagagctggaacccactcctttttttcccattgttctatcatctctaggaccggaactaccttctcttctgtcatgaccctatctagggtggtgaaatgcctgaaatctctggggctggaaaccatccatcaaggtctctagtagttctggcccacctctttccccaccctggctccatgacccaccccactctggatgccagggtcactggggttgggctggggagaggaacaggccttgggaatcaggagctggagccaggatgcgaagcagctgtaatggtctgagcggatttattgacaatgaataaagggcacgaaggccaggccagggcctgggcctcttgtgctaagagggcagggggcctacggtgctattgctttaggggcccaccacgggcaggggcctgctcccagctgccacgctctatcatatggagcgaggtgttggggaaggcggggcaggcagcctgttgcaggcaggggaaggagaagagactgaggggctgtgacctctcctgaggcccccagcctgagactgtgcaactccaggtggaagtagagctggtccctcagctggggggcagtgctgtccagtggaggggagggctttcacgcccacccaccccctggccctgccagctggtagtccatcagcacaatgaaggagacttggagaagaggaagaataacactgttgcttcctgttcaagctgtgtccagcttttcccctggggctccaggaccttccctacctccaccaccaaaccaagggatttatagcaaaggctaagcctgcagtttactcggggggttcagggagccgaaaggcttaaatagtttaagtaggtgatgggaagatgagattacctcatttagggctcaggcagactcacctcacatactccctgctccctgtggtagagacatcctgagtttggtggctacttccctctggcctaaggtaggggaggccttctcagattgtggggcacattgtgtagcctgacttctgccggagctcccagtccaggaggaaagagccaaggcccacttttgggatcaggtgcctgatcactgggccccctacctcagcccccctttccctggagcacctgccccacctgcccacagagaacacagtggtctcccctgtccgggggcggctttttccttccttggagcgtccctgacggacaagtggaggcctcttgctgcggctgcaatggatgcaaggggctgcagagcccaggtgcactgtgtgatgatgggagggggctccgtcctgcaggctggaggtggcatccacactggacagcagggaggaggggagtgagggtaacatttccatttcccttcatgttttgtttcttacgttctttcagcatgctccttaaaaccccagaagccccaatttccccaagccccattttttcttgtctttatctaataaactcaatattaagatgtta

SEQ ID NO: 464812 - DNA, 4687 bp, Homo sapiens
attagcatagtagaggctcggtgtgtagatccagtggctgaccgccttgctggagcggagatgcagccgccgccccgaaaagtgaagccggcccaggaggtgaagcttcgcttcctggaacagctgagcatccttcagacctggcagcagagggaggcggatctgctggaggacatcagatcctacagcaagcagagggcagccattgaacgggagtatgggcaggacagtgttcggtgcctggcgctgcctgctggatgccaccgtggctgggggccaaacccgactccaggcgtctgaccgataccgtgacctagcagggggtacagggcggagcgccaaggagcaggtgcttaggaagagggcgcaggctgaggtgctgcagtctgtccgggagctgagccgaagtcggaagctgtatgggcagcgggaacgtgtgtgggccttggcacaggagaaggcggctgatgtccaggccaggctaaaccgaagtgaccatgggatcttccactctcggaccagtctccagaaactgagcaccaagctgtccgcccagtcagcccagtactcccagcagctgcaagcagcccgcaatgagtacctgcttaacttggtggctaccaatgcccacctcgaccattactaccaggaggaactgccagctctgctcaagagcacttgagggaccccctgacctccctgagccacactgagctggaagccgcagaggtcatcctggagcatgcccaccgcggggagcagacaacctcccaggtgtgtgtcctggagtggggagcagaaggcgtggctggcaagagtggcctggagaaagaggttcagcgcttgaccagccgagctgcccgtgactacaagatccagaaccatgggcatcgggtactgcaacgactggagcagaggcggcagcaggcttcagagcgggaggctccaagcatagaacagaggttacaggaagtgcgagagagcatccgccgggcacaggtgagccaggtgaagggggctgcccggctggccctgctgcagggggctggcttagatgtggagcgctggctgaagccagccatgacccaggcccaggatgaggtggagcaggagcggcggctcagtgaggctcggctgtcccagagggacctctctccaaccgctgaggatgctgagctttctgactttgaggaatgtgaggagacgggagagctctttgaggagcctgccccccaagccctggccacgagggccctcccctgccctgcacacgtggtatttcgctatcaggcagggcgtgaggatgagctgacaatcacggagggtgagtggctggaggtcatagaggagggagatgctgacgaatgggtcaaggctcggaaccagcacggcgaggtaggctttgtccctgagcgatatctcaacttcccggacctctccctcccagagagcagccaagacagtgacaatccctgcggggcagagcccacagcattcctggcacaggccctgtacagctacaccggacagagtgcagaggagctgagcttccctgagggggcactcatccgtctgctgccccgggcccaagatggagtagatgacggcttctggaggggagaatttgggggccgtgttggggtcttcccctccctgctggtggaagagctgcttggccccccagggccacctgaactctctgaccctgaacagatgctgccgtccccttctcctcccagcttctccccacctgcacctacctctgtgttggatgggccccctgcacctgtcctgcctggggctcccacttataagtgagaacatgcaatatttggttttctgtttctgagttagttcacttaggataatggcatccaactccattcatgttgctgcagaggacatgatttcattcttttttatggctgtggaatgcctgccttttctaaaactttctggtacttccaccttgtccacaaggagtctccctccctggagttaccaccatctccaccaccccaagttcactttgcatgacttagcacttagtcatttattgtgtttgttgaggtttcattattggtttcttgacagccattgggggtgggagcactatgcatcctatctcccttagttttgtaccttgagcagagctgattatacagcagttgcccaataaatgttgaggacagtggatagagtgatggattttatggtctaggatggtgaccattaatttaacaaatatttatagaatgccactgtcctaagtgctggagatacagcattgaacaaaacaaagtctgaagactgacttgtggttcttatttccagacaaagccctggacttccctgggttcctggacatgatggcacctcgactcaggccgatgcgtccaccacctcccccgccggctaaagccccggatcctggccacccagatcccctcacctgaaggccagggaagccttgacccccagtgatgctgctgtccctatcttcaagctgtcagaccacaccatcaatgatccagagcaacacagccaaaagctggaatcgcccttatttccaccctcacctccaagggtggaaacttgccccttcccatttctagagctggaacccactcctttttttcccattgttctatcatctctaggaccggaactaccttctcttctgtcatgaccctatctagggtggtgaaatgcctgaaatctctggggctggaaaccatccatcaaggtctctagtagttctggcccacctctttccccaccctggctccatgacccaccccactctggatgccagggtcactggggttgggctggggagaggaacaggccttgggaatcaggagctggagccaggatgcgaagcagctgtaatggtctgagcggatttattgacaatgaataaagggcacgaaggccaggccagggcctgggcctcttgtgctaagagggcagggggcctacggtgctattgctttaggggcccaccacgggcaggggcctgctcccagctgccacgctctatcatatggagcgaggtgttggggaaggcggggcaggcagcctgttgcaggcaggggaaggagaagagactgaggggctgtgacctctcctgaggcccccagcctgagactgtgcaactccaggtggaagtagagctggtccctcagctggggggcagtgctgtccagtggaggggagggctttcacgcccacccaccccctggccctgccagctggtagtccatcagcacaatgaaggagacttggagaagaggaagaataacactgttgcttcctgttcaagctgtgtccagcttttcccctggggctccaggaccttccctacctccaccaccaaaccaagggatttatagcaaaggctaagcctgcagtttactcggggggttcagggagccgaaaggcttaaatagtttaagtaggtgatgggaagatgagattacctcatttagggctcaggcagactcacctcacatactccctgctccctgtggtagagacacctgagagaaaggggaggggtcaacaatgagagaccaggagtaggtcctatcagtgccccccagagtagagagcaataagagcccagcccagtgcagtgccggctgtgttttcctacctggtgatcagaagtgtctggtttgcttggctgcccatttgcctcttgagtgggcagccctgggcttgggcccctccctccggccctcagtgttggctctgcagaagctctggggttcccttcaagtgcacgaggggttaggctgctgtccctgagtcctccattctgtactggggggctggctaggacctggggctgtggcctctcagggggcagcctctccatggcaggcatccctgccttgggctgccctcccccagacccctgaccaccccctgggtcctgtcccccaccagagccccagctcctgtctgtgggggagccatcacggtgttcgtgcagtccatagcgcttctcaatgtgtgtcacccggaacctgggaggggagggaacactggggtttaggaccacaactcagaggctgcttggccctcccctctgaccagggacatcctgagtttggtggctacttccctctggcctaaggtaggggaggccttctcagattgtggggcacattgtgtagcctgacttctgccggagctcccagtccaggaggaaagagccaaggcccacttttgggatcaggtgcctgatcactgggccccctacctcagcccccctttccctggagcacctgccccacctgcccacagagaacacagtggtctcccctgtccgggggcggctttttccttccttggagcgtccctgacggacaagtggaggcctcttgctgcggctgcaatggatgcaaggggctgcagagcccaggtgcactgtgtgatgatgggagggggctccgtcctgcaggctggaggtggcatccacactggacagcagggaggaggggagtgagggtaacatttccatttcccttcatgttttgtttcttacgttctttcagcatgctccttaaaaccccagaagccccaatttccccaagccccattttttcttgtctttatctaataaactcaatattaagatgttagtgaccatatgttcttcctcccagggctgtttgct

SEQ ID NO: 464813 - DNA, 5480 bp, Homo sapiens
attagcatagtagaggctcggtgtgtagatccagtggctgaccgccttgctggagcggagatgcagccgccgccccgaaaagtgaagccggcccaggaggtgaagcttcgcttcctggaacagctgagcatccttcagacctggcagcagagggaggcggatctgctggaggacatcagatcctacagcaagcagagggcagccattgaacgggagtatgggcaggcactccagaaactggctggcccattcctgaagagggaagggcaccggagcggtgagatggacagcaggacagtgttcggtgcctggcgctgcctgctggatgccaccgtggctgggggccaaacccgactccaggcgtctgaccgataccgtgacctagcagggggtacagggcggagcgccaaggagcaggtgcttaggaagggaacagagaacctccagagggcgcaggctgaggtgctgcagtctgtccgggagctgagccgaagtcggaagctgtatgggcagcgggaacgtgtgtgggccttggcacaggagaaggcggctgatgtccaggccaggctaaaccgaagtgaccatgggatcttccactctcggaccagtctccagaaactgagcaccaagctgtccgcccagtcagcccagtactcccagcagctgcaagcagcccgcaatgagtacctgcttaacttggtggctaccaatgcccacctcgaccattactaccaggaggaactgccagctctgctcaaggccctggtcagtgagctgtcagagcacttgagggaccccctgacctccctgagccacactgagctggaagccgcagaggtcatcctggagcatgcccaccgcggggagcagacaacctcccaggtaagctgggagcaagacctgaagctgtttcttcaggagcctggtgtattttcccccaccccacctcagcagtttcagccagcagggactgatcaggtgtgtgtcctggagtggggagcagaaggcgtggctggcaagagtggcctggagaaagaggttcagcgcttgaccagccgagctgcccgtgactacaagatccagaaccatgggcatcgggtgaggtgggggggcacaggtgtcatgtgcaccttcttgtctcagcaagaagagctgagagaggggatcttggagtcattgagggtgtcatggagctacagaggggagggaaaggtattttaaggtaacagtgtggcacaatagttaagagcacagtttttggagctagaccgacataggttcaaattctcttctgttgcttcctagttctgtagccccaggtaagggagtgacttaacccctctggacttcaatttcctcatcactaaagtagggccaataatagcacccacctcatagggaagattaaatgacataatgtatgtgatgcaactagcaaagtaccagtcccatagtaagtcatgccccacagtatttccacccacccctgttctctgccttcccaaccaggtactgcaacgactggagcagaggcggcagcaggcttcagagcgggaggctccaagcatagaacagaggttacaggaagtgcgagagagcatccgccgggcacaggtgagccaggtgaagggggctgcccggctggccctgctgcagggggctggcttagatgtggagcgctggctgaagccagccatgacccaggcccaggatgaggtggagcaggagcggcggctcagtgaggctcggctgtcccagagggacctctctccaaccgctgaggatgctgagctttctgactttgaggaatgtgaggagacgggagagctctttgaggagcctgccccccaagccctggccacgagggccctcccctgccctgcacacgtggtatttcgctatcaggcagggcgtgaggatgagctgacaatcacggagggtgagtggctggaggtcatagaggagggagatgctgacgaatgggtcaaggctcggaaccagcacggcgaggtaggctttgtccctgagcgatatctcaacttcccggacctctccctcccagagagcagccaagacagtgacaatccctgcggggcagagcccacagcattcctggcacaggccctgtacagctacaccggacagagtgcagaggagctgagcttccctgagggggcactcatccgtctgctgccccgggcccaagatggagtagatgacggcttctggaggggagaatttgggggccgtgttggggtcttcccctccctgctggtggaagagctgcttggccccccagggccacctgaactctctgaccctgaacagatgctgccgtccccttctcctcccagcttctccccacctgcacctacctctgtgttggatgggccccctgcacctgtcctgcctggggattcaggaggtacatgtgcttgtttgtcatatggatatattgcatactggtggagattgggcttctagtgtacctgtaactcaaatagtgaacattgtacctgataggtaatttttcaaccctcgcccctgcctctactcctacctttgccccctttggagtcctgggagtctgttatttccatctctatgtccatgtgtacccgttgtttagctcccacttataagtgagaacatgcaatatttggttttctgtttctgagttagttcacttaggataatggcatccaactccattcatgttgctgcagaggacatgatttcattcttttttatggctgtggaatgcctgccttttctaaaactttctggtacttccaccttgtccacaaggagtctccctccctggagttaccaccatctccaccaccccaagttcactttgcatgacttagcacttagtcatttattgtgtttgttgaggtttcattattggtttcttgacagccattgggggtgggagcactatgcatcctatctcccttagttttgtaccttgagcagagctgattatacagcagttgcccaataaatgttgaggacagtggatagagtgatggattttatggtctaggatggtgaccattaatttaacaaatatttatagaatgccactgtcctaagtgctggagatacagcattgaacaaaacaaagtctgaagactgacttgtggttcttatttccagacaaagccctggacttccctgggttcctggacatgatggcacctcgactcaggccgatgcgtccaccacctcccccgccggctaaagccccggatcctggccacccagatcccctcacctgaaggccagggaagccttgacccccagtgatgctgctgtccctatcttcaagctgtcagaccacaccatcaatgatccagagcaacacagccaaaagctggaatcgcccttatttccaccctcacctccaagggtggaaacttgccccttcccatttctagagctggaacccactcctttttttcccattgttctatcatctctaggaccggaactaccttctcttctgtcatgaccctatctagggtggtgaaatgcctgaaatctctggggctggaaaccatccatcaaggtctctagtagttctggcccacctctttccccaccctggctccatgacccaccccactctggatgccagggtcactggggttgggctggggagaggaacaggccttgggaatcaggagctggagccaggatgcgaagcagctgtaatggtctgagcggatttattgacaatgaataaagggcacgaaggccaggccagggcctgggcctcttgtgctaagagggcagggggcctacggtgctattgctttaggggcccaccacgggcaggggcctgctcccagctgccacgctctatcatatggagcgaggtgttggggaaggcggggcaggcagcctgttgcaggcaggggaaggagaagagactgaggggctgtgacctctcctgaggcccccagcctgagactgtgcaactccaggtggaagtagagctggtccctcagctggggggcagtgctgtccagtggaggggagggctttcacgcccacccaccccctggccctgccagctggtagtccatcagcacaatgaaggagacttggagaagaggaagaataacactgttgcttcctgttcaagctgtgtccagcttttcccctggggctccaggaccttccctacctccaccaccaaaccaagggatttatagcaaaggctaagcctgcagtttactcggggggttcagggagccgaaaggcttaaatagtttaagtaggtgatgggaagatgagattacctcatttagggctcaggcagactcacctcacatactccctgctccctgtggtagagacacctgagagaaaggggaggggtcaacaatgagagaccaggagtaggtcctatcagtgccccccagagtagagagcaataagagcccagcccagtgcagtgccggctgtgttttcctacctggtgatcagaagtgtctggtttgcttggctgcccatttgcctcttgagtgggcagccctgggcttgggcccctccctccggccctcagtgttggctctgcagaagctctggggttcccttcaagtgcacgaggggttaggctgctgtccctgagtcctccattctgtactggggggctggctaggacctggggctgtggcctctcagggggcagcctctccatggcaggcatccctgccttgggctgccctcccccagacccctgaccaccccctgggtcctgtcccccaccagagccccagctcctgtctgtgggggagccatcacggtgttcgtgcagtccatagcgcttctcaatgtgtgtcacccggaacctgggaggggagggaacactggggtttaggaccacaactcagaggctgcttggccctcccctctgaccagggacatcctgagtttggtggctacttccctctggcctaaggtaggggaggccttctcagattgtggggcacattgtgtagcctgacttctgccggagctcccagtccaggaggaaagagccaaggcccacttttgggatcaggtgcctgatcactgggccccctacctcagcccccctttccctggagcacctgccccacctgcccacagagaacacagtggtctcccctgtccgggggcggctttttccttccttggagcgtccctgacggacaagtggaggcctcttgctgcggctgcaatggatgcaaggggctgcagagcccaggtgcactgtgtgatgatgggagggggctccgtcctgcaggctggaggtggcatccacactggacagcagggaggaggggagtgagggtaacatttccatttcccttcatgttttgtttcttacgttctttcagcatgctccttaaaaccccagaagccccaatttccccaagccccattttttcttgtctttatctaataaactcaatattaagatgtta

SEQ ID NO: 464814 - DNA, 4841 bp, Homo sapiens
attagcatagtagaggctcggtgtgtagatccagtggctgaccgccttgctggagcggagatgcagccgccgccccgaaaagtgaagccggcccaggaggtgaagcttcgcttcctggaacagctgagcatccttcagacctggcagcagagggaggcggatctgctggaggacatcagatcctacagcaagcagagggcagccattgaacgggagtatgggcaggcactccagaaactggctggcccattcctgaagagggaagggcaccggagcggtgagatggacagcaggacagtgttcggtgcctggcgctgcctgctggatgccaccgtggctgggggccaaacccgactccaggcgtctgaccgataccgtgacctagcagggggtacagggcggagcgccaaggagcaggtgcttaggaagggaacagagaacctccagagggcgcaggctgaggtgctgcagtctgtccgggagctgagccgaagtcggaagctgtatgggcagcgggaacgtgtgtgggccttggcacaggagaaggcggctgatgtccaggccaggctaaaccgaagtgaccatgggatcttccactctcggaccagtctccagaaactgagcaccaagctgtccgcccagtcagcccagtactcccagcagctgcaagcagcccgcaatgagtacctgcttaacttggtggctaccaatgcccacctcgaccattactaccaggaggaactgccagctctgctcaaggccctggtcagtgagctgtcagagcacttgagggaccccctgacctccctgagccacactgagctggaagccgcagaggtcatcctggagcatgcccaccgcggggagcagacaacctcccaggtaagctgggagcaagacctgaagctgtttcttcaggagcctggtgtattttcccccaccccacctcagcagtttcagccagcagggactgatcaggtgtgtgtcctggagtggggagcagaaggcgtggctggcaagagtggcctggagaaagaggttcagcgcttgaccagccgagctgcccgtgactacaagatccagaaccatgggcatcgggtgaggtgggggggcacaggtgtcatgtgcaccttcttgtctcagcaagaagagctgagagaggggatcttggagtcattgagggtgtcatggagctacagaggggagggaaaggtattttaaggtaacagtgtggcacaatagttaagagcacagtttttggagctagaccgacataggttcaaattctcttctgttgcttcctagttctgtagccccaggtaagggagtgacttaacccctctggacttcaatttcctcatcactaaagtagggccaataatagcacccacctcatagggaagattaaatgacataatgtatgtgatgcaactagcaaagtaccagtcccatagtaagtcatgccccacagtatttccacccacccctgttctctgccttcccaaccaggtactgcaacgactggagcagaggcggcagcaggcttcagagcgggaggctccaagcatagaacagaggttacaggaagtgcgagagagcatccgccgggcacaggtgagccaggtgaagggggctgcccggctggccctgctgcagggggctggcttagatgtggagcgctggctgaagccagccatgacccaggcccaggatgaggtggagcaggagcggcggctcagtgaggctcggctgtcccagagggacctctctccaaccgctgaggatgctgagctttctgactttgaggaatgtgaggagacgggagagctctttgaggagcctgccccccaagccctggccacgagggccctcccctgccctgcacacgtggtatttcgctatcaggcagggcgtgaggatgagctgacaatcacggagggtgagtggctggaggtcatagaggagggagatgctgacgaatgggtcaaggctcggaaccagcacggcgaggtaggctttgtccctgagcgatatctcaacttcccggacctctccctcccagagagcagccaagacagtgacaatccctgcggggcagagcccacagcattcctggcacaggccctgtacagctacaccggacagagtgcagaggagctgagcttccctgagggggcactcatccgtctgctgccccgggcccaagatggagtagatgacggcttctggaggggagaatttgggggccgtgttggggtcttcccctccctgctggtggaagagctgcttggccccccagggccacctgaactctctgaccctgaacagatgctgccgtccccttctcctcccagcttctccccacctgcacctacctctgtgttggatgggccccctgcacctgtcctgcctggggattcaggaggtacatgtgcttgtttgtcatatggatatattgcatactggtggagattgggcttctagtgtacctgtaactcaaatagtgaacattgtacctgatagacaaagccctggacttccctgggttcctggacatgatggcacctcgactcaggccgatgcgtccaccacctcccccgccggctaaagccccggatcctggccacccagatcccctcacctgaaggccagggaagccttgacccccagtgatgctgctgtccctatcttcaagctgtcagaccacaccatcaatgatccagagcaacacagccaaaagctggaatcgcccttatttccaccctcacctccaagggtggaaacttgccccttcccatttctagagctggaacccactcctttttttcccattgttctatcatctctaggaccggaactaccttctcttctgtcatgaccctatctagggtggtgaaatgcctgaaatctctggggctggaaaccatccatcaaggtctctagtagttctggcccacctctttccccaccctggctccatgacccaccccactctggatgccagggtcactggggttgggctggggagaggaacaggccttgggaatcaggagctggagccaggatgcgaagcagctgtaatggtctgagcggatttattgacaatgaataaagggcacgaaggccaggccagggcctgggcctcttgtgctaagagggcagggggcctacggtgctattgctttaggggcccaccacgggcaggggcctgctcccagctgccacgctctatcatatggagcgaggtgttggggaaggcggggcaggcagcctgttgcaggcaggggaaggagaagagactgaggggctgtgacctctcctgaggcccccagcctgagactgtgcaactccaggtggaagtagagctggtccctcagctggggggcagtgctgtccagtggaggggagggctttcacgcccacccaccccctggccctgccagctggtagtccatcagcacaatgaaggagacttggagaagaggaagaataacactgttgcttcctgttcaagctgtgtccagcttttcccctggggctccaggaccttccctacctccaccaccaaaccaagggatttatagcaaaggctaagcctgcagtttactcggggggttcagggagccgaaaggcttaaatagtttaagtaggtgatgggaagatgagattacctcatttagggctcaggcagactcacctcacatactccctgctccctgtggtagagacacctgagagaaaggggaggggtcaacaatgagagaccaggagtaggtcctatcagtgccccccagagtagagagcaataagagcccagcccagtgcagtgccggctgtgttttcctacctggtgatcagaagtgtctggtttgcttggctgcccatttgcctcttgagtgggcagccctgggcttgggcccctccctccggccctcagtgttggctctgcagaagctctggggttcccttcaagtgcacgaggggttaggctgctgtccctgagtcctccattctgtactggggggctggctaggacctggggctgtggcctctcagggggcagcctctccatggcaggcatccctgccttgggctgccctcccccagacccctgaccaccccctgggtcctgtcccccaccagagccccagctcctgtctgtgggggagccatcacggtgttcgtgcagtccatagcgcttctcaatgtgtgtcacccggaacctgggaggggagggaacactggggtttaggaccacaactcagaggctgcttggccctcccctctgaccagggacatcctgagtttggtggctacttccctctggcctaaggtaggggaggccttctcagattgtggggcacattgtgtagcctgacttctgccggagctcccagtccaggaggaaagagccaaggcccacttttgggatcaggtgcctgatcactgggccccctacctcagcccccctttccctggagcacctgccccacctgcccacagagaacacagtggtctcccctgtccgggggcggctttttccttccttggagcgtccctgacggacaagtggaggcctcttgctgcggctgcaatggatgcaaggggctgcagagcccaggtgcactgtgtgatgatgggagggggctccgtcctgcaggctggaggtggcatccacactggacagcagggaggaggggagtgagggtaacatttccatttcccttcatgttttgtttcttacgttctttcagcatgctccttaaaaccccagaagccccaatttccccaagccccattttttcttgtctttatctaataaactcaatattaagatgtta

SEQ ID NO: 464815 - DNA, 5952 bp, Homo sapiens
tgaattcactcagggctggggcttcatgatcttacaggccccggtctacaattaacagaagccggcccaggaggtgaagcttcgcttcctggaacagctgagcatccttcagacctggcagcagagggaggcggatctgctggaggacatcagatcctacagcaagcagagggcagccattgaacgggagtatgggcaggcactccagaaactggctggcccattcctgaagagggaagggcaccggagcggtgagatggacagcaggacagtgttcggtgcctggcgctgcctgctggatgccaccgtggctgggggccaaacccgactccaggcgtctgaccgataccgtgacctagcagggggtacagggcggagcgccaaggagcaggtgcttaggaagggaacagagaacctccagagggcgcaggctgaggtgctgcagtctgtccgggagctgagccgaagtcggaagctgtatgggcagcgggaacgtgtgtgggccttggcacaggagaaggcggctgatgtccaggccaggctaaaccgaagtgaccatgggatcttccactctcggaccagtctccagaaactgagcaccaagctgtccgcccagtcagcccagtactcccagcagctgcaagcagcccgcaatgagtacctgcttaacttggtggctaccaatgcccacctcgaccattactaccaggaggaactgccagctctgctcaaggccctggtcagtgagctgtcagagcacttgagggaccccctgacctccctgagccacactgagctggaagccgcagaggtcatcctggagcatgcccaccgcggggagcagacaacctcccaggtaagctgggagcaagacctgaagctgtttcttcaggagcctggtgtattttcccccaccccacctcagcagtttcagccagcagggactgatcaggtgtgtgtcctggagtggggagcagaaggcgtggctggcaagagtggcctggagaaagaggttcagcgcttgaccagccgagctgcccgtgactacaagatccagaaccatgggcatcgggtgaggtgggggggcacaggtgtcatgtgcaccttcttgtctcagcaagaagagctgagagaggggatcttggagtcattgagggtgtcatggagctacagaggggagggaaaggtattttaaggtaacagtgtggcacaatagttaagagcacagtttttggagctagaccgacataggttcaaattctcttctgttgcttcctagttctgtagccccaggtaagggagtgacttaacccctctggacttcaatttcctcatcactaaagtagggccaataatagcacccacctcatagggaagattaaatgacataatgtatgtgatgcaactagcaaagtaccagtcccatagtaagtcatgccccacagtatttccacccacccctgttctctgccttcccaaccaggtactgcaacgactggagcagaggcggcagcaggcttcagagcgggaggctccaagcatagaacagaggttacaggaagtgcgagagagcatccgccgggcacaggtgagccaggtgaagggggctgcccggctggccctgctgcagggggctggcttagatgtggagcgctggctgaagccagccatgacccaggcccaggatgaggtggagcaggagcggcggctcagtgaggctcggctgtcccagagggacctctctccaaccgctgaggatgctgagctttctgactttgaggaatgtgaggagacgggagagctctttgaggagcctgccccccaagccctggccacgagggccctcccctgccctgcacacgtggtatttcgctatcaggcagggcgtgaggatgagctgacaatcacggagggtgagtggctggaggtcatagaggagggagatgctgacgaatgggtcaaggctcggaaccagcacggcgaggtaggctttgtccctgagcgatatctcaacttcccggacctctccctcccagagagcagccaagacagtgacaatccctgcggggcagagcccacagcattcctggcacaggccctgtacagctacaccggacagagtgcagaggagctgagcttccctgagggggcactcatccgtctgctgccccgggcccaagatggagtagatgacggcttctggaggggagaatttgggggccgtgttggggtcttcccctccctgctggtggaagagctgcttggccccccagggccacctgaactctctgaccctgaacagatgctgccgtccccttctcctcccagcttctccccacctgcacctacctctgtgttggatgggccccctgcacctgtcctgcctgggggtgagtggaaggaactgggagccttgggaggctaacagacaggaagaaggaggaagcttggactcccaggtcacgctctggtcctctccgtgccttcaggcatcttgcttggtggagagcacttgcctgggctctggagccaggctgactggttcaggtcccgctctgtcatctccaagtgtgtggtgggattctgaacctgtcttggcctcagtttatgttctttatgaggtaaggaaaaggtactagcttattgaattcttatgagagttaaaaaagatgcctgtggactacacagcattgtgcctggcacacagtaagtatgcagtcactgttattattttaaaaattagctaacttctctcacggtgtcctcccaatatgcaccttttgctcctagtgtccagatacctagctttgtatcattattttttctgatgcccactttttttctttttttaaatgtctatagcagttttattttattatttattttagattcaggaggtacatgtgcttgtttgtcatatggatatattgcatactggtggagattgggcttctagtgtacctgtaactcaaatagtgaacattgtacctgataggtaatttttcaaccctcgcccctgcctctactcctacctttgccccctttggagtcctgggagtctgttatttccatctctatgtccatgtgtacccgttgtttagctcccacttataagtgagaacatgcaatatttggttttctgtttctgagttagttcacttaggataatggcatccaactccattcatgttgctgcagaggacatgatttcattcttttttatggctgtggaatgcctgccttttctaaaactttctggtacttccaccttgtccacaaggagtctccctccctggagttaccaccatctccaccaccccaagttcactttgcatgacttagcacttagtcatttattgtgtttgttgaggtttcattattggtttcttgacagccattgggggtgggagcactatgcatcctatctcccttagttttgtaccttgagcagagctgattatacagcagttgcccaataaatgttgaggacagtggatagagtgatggattttatggtctaggatggtgaccattaatttaacaaatatttatagaatgccactgtcctaagtgctggagatacagcattgaacaaaacaaagtctgaagactgacttgtggttcttatttccagacaaagccctggacttccctgggttcctggacatgatggcacctcgactcaggccgatgcgtccaccacctcccccgccggctaaagccccggatcctggccacccagatcccctcacctgaaggccagggaagccttgacccccagtgatgctgctgtccctatcttcaagctgtcagaccacaccatcaatgatccagagcaacacagccaaaagctggaatcgcccttatttccaccctcacctccaagggtggaaacttgccccttcccatttctagagctggaacccactcctttttttcccattgttctatcatctctaggaccggaactaccttctcttctgtcatgaccctatctagggtggtgaaatgcctgaaatctctggggctggaaaccatccatcaaggtctctagtagttctggcccacctctttccccaccctggctccatgacccaccccactctggatgccagggtcactggggttgggctggggagaggaacaggccttgggaatcaggagctggagccaggatgcgaagcagctgtaatggtctgagcggatttattgacaatgaataaagggcacgaaggccaggccagggcctgggcctcttgtgctaagagggcagggggcctacggtgctattgctttaggggcccaccacgggcaggggcctgctcccagctgccacgctctatcatatggagcgaggtgttggggaaggcggggcaggcagcctgttgcaggcaggggaaggagaagagactgaggggctgtgacctctcctgaggcccccagcctgagactgtgcaactccaggtggaagtagagctggtccctcagctggggggcagtgctgtccagtggaggggagggctttcacgcccacccaccccctggccctgccagctggtagtccatcagcacaatgaaggagacttggagaagaggaagaataacactgttgcttcctgttcaagctgtgtccagcttttcccctggggctccaggaccttccctacctccaccaccaaaccaagggatttatagcaaaggctaagcctgcagtttactcggggggttcagggagccgaaaggcttaaatagtttaagtaggtgatgggaagatgagattacctcatttagggctcaggcagactcacctcacatactccctgctccctgtggtagagacacctgagagaaaggggaggggtcaacaatgagagaccaggagtaggtcctatcagtgccccccagagtagagagcaataagagcccagcccagtgcagtgccggctgtgttttcctacctggtgatcagaagtgtctggtttgcttggctgcccatttgcctcttgagtgggcagccctgggcttgggcccctccctccggccctcagtgttggctctgcagaagctctggggttcccttcaagtgcacgaggggttaggctgctgtccctgagtcctccattctgtactggggggctggctaggacctggggctgtggcctctcagggggcagcctctccatggcaggcatccctgccttgggctgccctcccccagacccctgaccaccccctgggtcctgtcccccaccagagccccagctcctgtctgtgggggagccatcacggtgttcgtgcagtccatagcgcttctcaatgtgtgtcacccggaacctgggaggggagggaacactggggtttaggaccacaactcagaggctgcttggccctcccctctgaccagggacatcctgagtttggtggctacttccctctggcctaaggtaggggaggccttctcagattgtggggcacattgtgtagcctgacttctgccggagctcccagtccaggaggaaagagccaaggcccacttttgggatcaggtgcctgatcactgggccccctacctcagcccccctttccctggagcacctgccccacctgcccacagagaacacagtggtctcccctgtccgggggcggctttttccttccttggagcgtccctgacggacaagtggaggcctcttgctgcggctgcaatggatgcaaggggctgcagagcccaggtgcactgtgtgatgatgggagggggctccgtcctgcaggctggaggtggcatccacactggacagcagggaggaggggagtgagggtaacatttccatttcccttcatgttttgtttcttacgttctttcagcatgctccttaaaaccccagaagccccaatttccccaagccccattttttcttgtctttatctaataaactcaatattaagatgtta

SEQ ID NO: 464816 - DNA, 5730 bp, Homo sapiens
attagcatagtagaggctcggtgtgtagatccagtggctgaccgccttgctggagcggagatgcagccgccgccccgaaaagtgaagccggcccaggaggtgaagcttcgcttcctggaacagctgagcatccttcagacctggcagcagagggaggcggatctgctggaggacatcagatcctacagcaagcagagggcagccattgaacgggagtatgggcaggcactccagaaactggctggcccattcctgaagagggaagggcaccggagcggtgagatggacagcaggacagtgttcggtgcctggcgctgcctgctggatgccaccgtggctgggggccaaacccgactccaggcgtctgaccgataccgtgacctagcagggggtacagggcggagcgccaaggagcaggtgcttaggaagggaacagagaacctccagagggcgcaggctgaggtgctgcagtctgtccgggagctgagccgaagtcggaagctgtatgggcagcgggaacgtgtgtgggccttggcacaggagaaggcggctgatgtccaggccaggctaaaccgaagtgaccatgggatcttccactctcggaccagtctccagaaactgagcaccaagctgtccgcccagtcagcccagtactcccagcagctgcaagcagcccgcaatgagtacctgcttaacttggtggctaccaatgcccacctcgaccattactaccaggaggaactgccagctctgctcaaggccctggtcagtgagctgtcagagcacttgagggaccccctgacctccctgagccacactgagctggaagccgcagaggtcatcctggagcatgcccaccgcggggagcagacaacctcccaggtaagctgggagcaagacctgaagctgtttcttcaggagcctggtgtattttcccccaccccacctcagcagtttcagccagcagggactgatcaggtgtgtgtcctggagtggggagcagaaggcgtggctggcaagagtggcctggagaaagaggttcagcgcttgaccagccgagctgcccgtgactacaagatccagaaccatgggcatcgggtgaggtgggggggcacaggtgtcatgtgcaccttcttgtctcagcaagaagagctgagagaggggatcttggagtcattgagggtgtcatggagctacagaggggagggaaaggtattttaaggtaacagtgtggcacaatagttaagagcacagtttttggagctagaccgacataggttcaaattctcttctgttgcttcctagttctgtagccccaggtaagggagtgacttaacccctctggacttcaatttcctcatcactaaagtagggccaataatagcacccacctcatagggaagattaaatgacataatgtatgtgatgcaactagcaaagtaccagtcccatagtaagtcatgccccacagtatttccacccacccctgttctctgccttcccaaccaggtactgcaacgactggagcagaggcggcagcaggcttcagagcgggaggctccaagcatagaacagaggttacaggaagtgcgagagagcatccgccgggcacaggtgagccaggtgaagggggctgcccggctggccctgctgcagggggctggcttagatgtggagcgctggctgaagccagccatgacccaggcccaggatgaggtggagcaggagcggcggctcagtgaggctcggctgtcccagagggacctctctccaaccgctgaggatgctgagctttctgactttgaggaatgtgaggagacgggagagctctttgaggagcctgccccccaagccctggccacgagggccctcccctgccctgcacacgtggtatttcgctatcaggcagggcgtgaggatgagctgacaatcacggagggtgagtggctggaggtcatagaggagggagatgctgacgaatgggtcaaggctcggaaccagcacggcgaggtaggctttgtccctgagcgatatctcaacttcccggacctctccctcccagagagcagccaagacagtgacaatccctgcggggcagagcccacagcattcctggcacaggccctgtacagctacaccggacagagtgcagaggagctgagcttccctgagggggcactcatccgtctgctgccccgggcccaagatggagtagatgacggcttctggaggggagaatttgggggccgtgttggggtcttcccctccctgctggtggaagagctgcttggccccccagggccacctgaactctctgaccctgaacagatgctgccgtccccttctcctcccagcttctccccacctgcacctacctctgtgttggatgggccccctgcacctgtcctgcctgggggtgagtggaaggaactgggagccttgggaggctaacagacaggaagaaggaggaagcttggactcccaggtcacgctctggtcctctccgtgccttcaggcatcttgcttggtggagagcacttgcctgggctctggagccaggctgactggttcaggtcccgctctgtcatctccaagtgtgtggtgggattctgaacctgtcttggcctcagtttatgttctttatgaggtaaggaaaaggtactagcttattgaattcttatgagagttaaaaaagatgcctgtggactacacagcattgtgcctggcacacagtaagtatgcagtcactgttattattttaaaaattagctaacttctctcacggtgtcctcccaatatgcaccttttgctcctagtgtccagatacctagctttgtatcattattttttctgatgcccactttttttctttttttaaatgtctatagcagttttattttattatttattttagattcaggaggtacatgtgcttgtttgtcatatggatatattgcatactggtggagattgggcttctagtgtacctgtaactcaaatagtgaacattgtacctgataggtaatttttcaaccctcgcccctgcctctactcctacctttgccccctttggagtcctgggagtctgttatttccatctctatgtccatgtgtacccgttgtttagctcccacttataagtgagaacatgcaatatttggttttctgtttctgagttagttcacttaggataatggcatccaactccattcatgttgctgcagaggacatgatttcattcttttttatggctgtggaatgcctgccttttctaaaactttctggtacttccaccttgtccacaaggagtctccctccctggagttaccaccatctccaccaccccaagttcactttgcatgacttagcacttagtcatttattgtgtttgttgaggtttcattattggtttcttgacagccattgggggtgggagcactatgcatcctatctcccttagttttgtaccttgagcagagctgattatacagcagttgcccaataaatgttgaggacagtggatagagtgatggattttatggtctaggatggtgaccattaatttaacaaatatttatagaatgccactgtcctaagtgctggagatacagcattgaacaaaacaaagtctgaagactgacttgtggttcttatttccagacaaagccctggacttccctgggttcctggacatgatggcacctcgactcaggccgatgcgtccaccacctcccccgccggctaaagccccggatcctggccacccagatcccctcacctgaaggccagggaagccttgacccccagtgatgctgctgtccctatcttcaagctgtcagaccacaccatcaatgatccagagcaacacagccaaaagctggaatcgcccttatttccaccctcacctccaagggtggaaacttgccccttcccatttctagactggagccaggatgcgaagcagctgtaatggtctgagcggatttattgacaatgaataaagggcacgaaggccaggccagggcctgggcctcttgtgctaagagggcagggggcctacggtgctattgctttaggggcccaccacgggcaggggcctgctcccagctgccacgctctatcatatggagcgaggtgttggggaaggcggggcaggcagcctgttgcaggcaggggaaggagaagagactgaggggctgtgacctctcctgaggcccccagcctgagactgtgcaactccaggtggaagtagagctggtccctcagctggggggcagtgctgtccagtggaggggagggctttcacgcccacccaccccctggccctgccagctggtagtccatcagcacaatgaaggagacttggagaagaggaagaataacactgttgcttcctgttcaagctgtgtccagcttttcccctggggctccaggaccttccctacctccaccaccaaaccaagggatttatagcaaaggctaagcctgcagtttactcggggggttcagggagccgaaaggcttaaatagtttaagtaggtgatgggaagatgagattacctcatttagggctcaggcagactcacctcacatactccctgctccctgtggtagagacacctgagagaaaggggaggggtcaacaatgagagaccaggagtaggtcctatcagtgccccccagagtagagagcaataagagcccagcccagtgcagtgccggctgtgttttcctacctggtgatcagaagtgtctggtttgcttggctgcccatttgcctcttgagtgggcagccctgggcttgggcccctccctccggccctcagtgttggctctgcagaagctctggggttcccttcaagtgcacgaggggttaggctgctgtccctgagtcctccattctgtactggggggctggctaggacctggggctgtggcctctcagggggcagcctctccatggcaggcatccctgccttgggctgccctcccccagacccctgaccaccccctgggtcctgtcccccaccagagccccagctcctgtctgtgggggagccatcacggtgttcgtgcagtccatagcgcttctcaatgtgtgtcacccggaacctgggaggggagggaacactggggtttaggaccacaactcagaggctgcttggccctcccctctgaccagggacatcctgagtttggtggctacttccctctggcctaaggtaggggaggccttctcagattgtggggcacattgtgtagcctgacttctgccggagctcccagtccaggaggaaagagccaaggcccacttttgggatcaggtgcctgatcactgggccccctacctcagcccccctttccctggagcacctgccccacctgcccacagagaacacagtggtctcccctgtccgggggcggctttttccttccttggagcgtccctgacggacaagtggaggcctcttgctgcggctgcaatggatgcaaggggctgcagagcccaggtgcactgtgtgatgatgggagggggctccgtcctgcaggctggaggtggcatccacactggacagcagggaggaggggagtgagggtaacatttccatttcccttcatgttttgtttcttacgttctttcagcatgctccttaaaaccccagaagccccaatttccccaagccccattttttcttgtctttatctaataaactcaatattaagatgtta

SEQ ID NO: 464817 - DNA, 4314 bp, Homo sapiens
ggcttcctccagttccggagtccagtggctgaccgccttgctggagcggagatgcagccgccgccccgaaaagtgaagccggcccaggaggtgaagcttcgcttcctggaacagctgagcatccttcagacctggcagcagagggaggcggatctgctggaggacatcagatcctacagcaagcagagggcagccattgaacgggagtatgggcaggcactccagaaactggctggcccattcctgaagagggaagggcaccggagcggtgagatggacagcaggacagtgttcggtgcctggcgctgcctgctggatgccaccgtggctgggggccaaacccgactccaggcgtctgaccgataccgtgacctagcagggggtacagggcggagcgccaaggagcaggtgcttaggaagggaacagagaacctccagagggcgcaggctgaggtgctgcagtctgtccgggagctgagccgaagtcggaagctgtatgggcagcgggaacgtgtgtgggccttggcacaggagaaggcggctgatgtccaggccaggctaaaccgaagtgaccatgggatcttccactctcggaccagtctccagaaactgagcaccaagctgtccgcccagtcagcccagtactcccagcagctgcaagcagcccgcaatgagtacctgcttaacttggtggctaccaatgcccacctcgaccattactaccaggaggaactgccagctctgctcaaggccctggtcagtgagctgtcagagcacttgagggaccccctgacctccctgagccacactgagctggaagccgcagaggtcatcctggagcatgcccaccgcggggagcagacaacctcccaggtaagctgggagcaagacctgaagctgtttcttcaggagcctggtgtattttcccccaccccacctcagcagtttcagccagcagggactgatcaggtgtgtgtcctggagtggggagcagaaggcgtggctggcaagagtggcctggagaaagaggttcagcgcttgaccagccgagctgcccgtgactacaagatccagaaccatgggcatcgggtactgcaacgactggagcagaggcggcagcaggcttcagagcgggaggctccaagcatagaacagaggttacaggaagtgcgagagagcatccgccgggcacaggtgagccaggtgaagggggctgcccggctggccctgctgcagggggctggcttagatgtggagcgctggctgaagccagccatgacccaggcccaggatgaggtggagcaggagcggcggctcagtgaggctcggctgtcccagagggacctctctccaaccgctgaggatgctgagctttctgactttgaggaatgtgaggagacgggagagctctttgaggagcctgccccccaagccctggccacgagggccctcccctgccctgcacacgtggtatttcgctatcaggcagggcgtgaggatgagctgacaatcacggagggtgagtggctggaggtcatagaggagggagatgctgacgaatgggtcaaggctcggaaccagcacggcgaggtaggctttgtccctgagcgatatctcaacttcccggacctctccctcccagagagcagccaagacagtgacaatccctgcggggcagagcccacagcattcctggcacaggccctgtacagctacaccggacagagtgcagaggagctgagcttccctgagggggcactcatccgtctgctgccccgggcccaagatggagtagatgacggcttctggaggggagaatttgggggccgtgttggggtcttcccctccctgctggtggaagagctgcttggccccccagggccacctgaactctctgaccctgaacagatgctgccgtccccttctcctcccagcttctccccacctgcacctacctctgtgttggatgggccccctgcacctgtcctgcctggggacaaagccctggacttccctgggttcctggacatgatggcacctcgactcaggccgatgcgtccaccacctcccccgccggctaaagccccggatcctggccacccagatcccctcacctgaaggccagggaagccttgacccccagtgatgctgctgtccctatcttcaagctgtcagaccacaccatcaatgatccagagcaacacagccaaaagctggaatcgcccttatttccaccctcacctccaagggtggaaacttgccccttcccatttctagagctggaacccactcctttttttcccattgttctatcatctctaggaccggaactaccttctcttctgtcatgaccctatctagggtggtgaaatgcctgaaatctctggggctggaaaccatccatcaaggtctctagtagttctggcccacctctttccccaccctggctccatgacccaccccactctggatgccagggtcactggggttgggctggggagaggaacaggccttgggaatcaggagctggagccaggatgcgaagcagctgtaatggtctgagcggatttattgacaatgaataaagggcacgaaggccaggccagggcctgggcctcttgtgctaagagggcagggggcctacggtgctattgctttaggggcccaccacgggcaggggcctgctcccagctgccacgctctatcatatggagcgaggtgttggggaaggcggggcaggcagcctgttgcaggcaggggaaggagaagagactgaggggctgtgacctctcctgaggcccccagcctgagactgtgcaactccaggtggaagtagagctggtccctcagctggggggcagtgctgtccagtggaggggagggctttcacgcccacccaccccctggccctgccagctggtagtccatcagcacaatgaaggagacttggagaagaggaagaataacactgttgcttcctgttcaagctgtgtccagcttttcccctggggctccaggaccttccctacctccaccaccaaaccaagggatttatagcaaaggctaagcctgcagtttactcggggggttcagggagccgaaaggcttaaatagtttaagtaggtgatgggaagatgagattacctcatttagggctcaggcagactcacctcacatactccctgctccctgtggtagagacacctgagagaaaggggaggggtcaacaatgagagaccaggagtaggtcctatcagtgccccccagagtagagagcaataagagcccagcccagtgcagtgccggctgtgttttcctacctggtgatcagaagtgtctggtttgcttggctgcccatttgcctcttgagtgggcagccctgggcttgggcccctccctccggccctcagtgttggctctgcagaagctctggggttcccttcaagtgcacgaggggttaggctgctgtccctgagtcctccattctgtactggggggctggctaggacctggggctgtggcctctcagggggcagcctctccatggcaggcatccctgccttgggctgccctcccccagacccctgaccaccccctgggtcctgtcccccaccagagccccagctcctgtctgtgggggagccatcacggtgttcgtgcagtccatagcgcttctcaatgtgtgtcacccggaacctgggaggggagggaacactggggtttaggaccacaactcagaggctgcttggccctcccctctgaccagggacatcctgagtttggtggctacttccctctggcctaaggtaggggaggccttctcagattgtggggcacattgtgtagcctgacttctgccggagctcccagtccaggaggaaagagccaaggcccacttttgggatcaggtgcctgatcactgggccccctacctcagcccccctttccctggagcacctgccccacctgcccacagagaacacagtggtctcccctgtccgggggcggctttttccttccttggagcgtccctgacggacaagtggaggcctcttgctgcggctgcaatggatgcaaggggctgcagagcccaggtgcactgtgtgatgatgggagggggctccgtcctgcaggctggaggtggcatccacactggacagcagggaggaggggagtgagggtaacatttccatttcccttcatgttttgtttcttacgttctttcagcatgctccttaaaaccccagaagccccaatttccccaagccccattttttcttgtctttatctaataaactcaatattaagatgtta

SEQ ID NO: 464818 - DNA, 5978 bp, Homo sapiens
attagcatagtagaggctcggtgtgtagatccagtggctgaccgccttgctggagcggagatgcagccgccgccccgaaaagtgaagccggcccaggaggtgaagcttcgcttcctggaacagctgagcatccttcagacctggcagcagagggaggcggatctgctggaggacatcagatcctacagcaagcagagggcagccattgaacgggagtatgggcaggcactccagaaactggctggcccattcctgaagagggaagggcaccggagcggtgagatggacagcaggacagtgttcggtgcctggcgctgcctgctggatgccaccgtggctgggggccaaacccgactccaggcgtctgaccgataccgtgacctagcagggggtacagggcggagcgccaaggagcaggtgcttaggaagggaacagagaacctccagagggcgcaggctgaggtgctgcagtctgtccgggagctgagccgaagtcggaagctgtatgggcagcgggaacgtgtgtgggccttggcacaggagaaggcggctgatgtccaggccaggctaaaccgaagtgaccatgggatcttccactctcggaccagtctccagaaactgagcaccaagctgtccgcccagtcagcccagtactcccagcagctgcaagcagcccgcaatgagtacctgcttaacttggtggctaccaatgcccacctcgaccattactaccaggaggaactgccagctctgctcaaggccctggtcagtgagctgtcagagcacttgagggaccccctgacctccctgagccacactgagctggaagccgcagaggtcatcctggagcatgcccaccgcggggagcagacaacctcccaggtaagctgggagcaagacctgaagctgtttcttcaggagcctggtgtattttcccccaccccacctcagcagtttcagccagcagggactgatcaggtgtgtgtcctggagtggggagcagaaggcgtggctggcaagagtggcctggagaaagaggttcagcgcttgaccagccgagctgcccgtgactacaagatccagaaccatgggcatcgggtgaggtgggggggcacaggtgtcatgtgcaccttcttgtctcagcaagaagagctgagagaggggatcttggagtcattgagggtgtcatggagctacagaggggagggaaaggtattttaaggtaacagtgtggcacaatagttaagagcacagtttttggagctagaccgacataggttcaaattctcttctgttgcttcctagttctgtagccccaggtaagggagtgacttaacccctctggacttcaatttcctcatcactaaagtagggccaataatagcacccacctcatagggaagattaaatgacataatgtatgtgatgcaactagcaaagtaccagtcccatagtaagtcatgccccacagtatttccacccacccctgttctctgccttcccaaccaggtactgcaacgactggagcagaggcggcagcaggcttcagagcgggaggctccaagcatagaacagaggttacaggaagtgcgagagagcatccgccgggcacaggtgagccaggtgaagggggctgcccggctggccctgctgcagggggctggcttagatgtggagcgctggctgaagccagccatgacccaggcccaggatgaggtggagcaggagcggcggctcagtgaggctcggctgtcccagagggacctctctccaaccgctgaggatgctgagctttctgactttgaggaatgtgaggagacgggagagctctttgaggagcctgccccccaagccctggccacgagggccctcccctgccctgcacacgtggtatttcgctatcaggcagggcgtgaggatgagctgacaatcacggagggtgagtggctggaggtcatagaggagggagatgctgacgaatgggtcaaggctcggaaccagcacggcgaggtaggctttgtccctgagcgatatctcaacttcccggacctctccctcccagagagcagccaagacagtgacaatccctgcggggcagagcccacagcattcctggcacaggccctgtacagctacaccggacagagtgcagaggagctgagcttccctgagggggcactcatccgtctgctgccccgggcccaagatggagtagatgacggcttctggaggggagaatttgggggccgtgttggggtcttcccctccctgctggtggaagagctgcttggccccccagggccacctgaactctctgaccctgaacagatgctgccgtccccttctcctcccagcttctccccacctgcacctacctctgtgttggatgggccccctgcacctgtcctgcctgggggtgagtggaaggaactgggagccttgggaggctaacagacaggaagaaggaggaagcttggactcccaggtcacgctctggtcctctccgtgccttcaggcatcttgcttggtggagagcacttgcctgggctctggagccaggctgactggttcaggtcccgctctgtcatctccaagtgtgtggtgggattctgaacctgtcttggcctcagtttatgttctttatgaggtaaggaaaaggtactagcttattgaattcttatgagagttaaaaaagatgcctgtggactacacagcattgtgcctggcacacagtaagtatgcagtcactgttattattttaaaaattagctaacttctctcacggtgtcctcccaatatgcaccttttgctcctagtgtccagatacctagctttgtatcattattttttctgatgcccactttttttctttttttaaatgtctatagcagttttattttattatttattttagattcaggaggtacatgtgcttgtttgtcatatggatatattgcatactggtggagattgggcttctagtgtacctgtaactcaaatagtgaacattgtacctgataggtaatttttcaaccctcgcccctgcctctactcctacctttgccccctttggagtcctgggagtctgttatttccatctctatgtccatgtgtacccgttgtttagctcccacttataagtgagaacatgcaatatttggttttctgtttctgagttagttcacttaggataatggcatccaactccattcatgttgctgcagaggacatgatttcattcttttttatggctgtggaatgcctgccttttctaaaactttctggtacttccaccttgtccacaaggagtctccctccctggagttaccaccatctccaccaccccaagttcactttgcatgacttagcacttagtcatttattgtgtttgttgaggtttcattattggtttcttgacagccattgggggtgggagcactatgcatcctatctcccttagttttgtaccttgagcagagctgattatacagcagttgcccaataaatgttgaggacagtggatagagtgatggattttatggtctaggatggtgaccattaatttaacaaatatttatagaatgccactgtcctaagtgctggagatacagcattgaacaaaacaaagtctgaagactgacttgtggttcttatttccagacaaagccctggacttccctgggttcctggacatgatggcacctcgactcaggccgatgcgtccaccacctcccccgccggctaaagccccggatcctggccacccagatcccctcacctgaaggccagggaagccttgacccccagtgatgctgctgtccctatcttcaagctgtcagaccacaccatcaatgatccagagcaacacagccaaaagctggaatcgcccttatttccaccctcacctccaagggtggaaacttgccccttcccatttctagagctggaacccactcctttttttcccattgttctatcatctctaggaccggaactaccttctcttctgtcatgaccctatctagggtggtgaaatgcctgaaatctctggggctggaaaccatccatcaaggtctctagtagttctggcccacctctttccccaccctggctccatgacccaccccactctggatgccagggtcactggggttgggctggggagaggaacaggccttgggaatcaggagctggagccaggatgcgaagcagctgtaatggtctgagcggatttattgacaatgaataaagggcacgaaggccaggccagggcctgggcctcttgtgctaagagggcagggggcctacggtgctattgctttaggggcccaccacgggcaggggcctgctcccagctgccacgctctatcatatggagcgaggtgttggggaaggcggggcaggcagcctgttgcaggcaggggaaggagaagagactgaggggctgtgacctctcctgaggcccccagcctgagactgtgcaactccaggtggaagtagagctggtccctcagctggggggcagtgctgtccagtggaggggagggctttcacgcccacccaccccctggccctgccagctggtagtccatcagcacaatgaaggagacttggagaagaggaagaataacactgttgcttcctgttcaagctgtgtccagcttttcccctggggctccaggaccttccctacctccaccaccaaaccaagggatttatagcaaaggctaagcctgcagtttactcggggggttcagggagccgaaaggcttaaatagtttaagtaggtgatgggaagatgagattacctcatttagggctcaggcagactcacctcacatactccctgctccctgtggtagagacacctgagagaaaggggaggggtcaacaatgagagaccaggagtaggtcctatcagtgccccccagagtagagagcaataagagcccagcccagtgcagtgccggctgtgttttcctacctggtgatcagaagtgtctggtttgcttggctgcccatttgcctcttgagtgggcagccctgggcttgggcccctccctccggccctcagtgttggctctgcagaagctctggggttcccttcaagtgcacgaggggttaggctgctgtccctgagtcctccattctgtactggggggctggctaggacctggggctgtggcctctcagggggcagcctctccatggcaggcatccctgccttgggctgccctcccccagacccctgaccaccccctgggtcctgtcccccaccagagccccagctcctgtctgtgggggagccatcacggtgttcgtgcagtccatagcgcttctcaatgtgtgtcacccggaacctgggaggggagggaacactggggtttaggaccacaactcagaggctgcttggccctcccctctgaccagggacatcctgagtttggtggctacttccctctggcctaaggtaggggaggccttctcagattgtggggcacattgtgtagcctgacttctgccggagctcccagtccaggaggaaagagccaaggcccacttttgggatcaggtgcctgatcactgggccccctacctcagcccccctttccctggagcacctgccccacctgcccacagagaacacagtggtctcccctgtccgggggcggctttttccttccttggagcgtccctgacggacaagtggaggcctcttgctgcggctgcaatggatgcaaggggctgcagagcccaggtgcactgtgtgatgatgggagggggctccgtcctgcaggctggaggtggcatccacactggacagcagggaggaggggagtgagggtaacatttccatttcccttcatgttttgtttcttacgttctttcagcatgctccttaaaaccccagaagccccaatttccccaagccccattttttcttgtctttatctaataaactcaatattaagatgtta

SEQ ID NO: 464819 - DNA, 5997 bp, Homo sapiens
cggcccacagatgatgtatgaggccggaccgggtgtaagtacactagtgggggctcggcgcttgaattgaactgtgagatgcacgcctgcgcgccgaaaagagaagccggcccaggaggtgaagcttcgcttcctggaacagctgagcatccttcagacctggcagcagagggaggcggatctgctggaggacatcagatcctacagcaagcagagggcagccattgaacgggagtatgggcaggcactccagaaactggctggcccattcctgaagagggaagggcaccggagcggtgagatggacagcaggacagtgttcggtgcctggcgctgcctgctggatgccaccgtggctgggggccaaacccgactccaggcgtctgaccgataccgtgacctagcagggggtacagggcggagcgccaaggagcaggtgcttaggaagggaacagagaacctccagagggcgcaggctgaggtgctgcagtctgtccgggagctgagccgaagtcggaagctgtatgggcagcgggaacgtgtgtgggccttggcacaggagaaggcggctgatgtccaggccaggctaaaccgaagtgaccatgggatcttccactctcggaccagtctccagaaactgagcaccaagctgtccgcccagtcagcccagtactcccagcagctgcaagcagcccgcaatgagtacctgcttaacttggtggctaccaatgcccacctcgaccattactaccaggaggaactgccagctctgctcaaggccctggtcagtgagctgtcagagcacttgagggaccccctgacctccctgagccacactgagctggaagccgcagaggtcatcctggagcatgcccaccgcggggagcagacaacctcccaggtaagctgggagcaagacctgaagctgtttcttcaggagcctggtgtattttcccccaccccacctcagcagtttcagccagcagggactgatcaggtgtgtgtcctggagtggggagcagaaggcgtggctggcaagagtggcctggagaaagaggttcagcgcttgaccagccgagctgcccgtgactacaagatccagaaccatgggcatcgggtgaggtgggggggcacaggtgtcatgtgcaccttcttgtctcagcaagaagagctgagagaggggatcttggagtcattgagggtgtcatggagctacagaggggagggaaaggtattttaaggtaacagtgtggcacaatagttaagagcacagtttttggagctagaccgacataggttcaaattctcttctgttgcttcctagttctgtagccccaggtaagggagtgacttaacccctctggacttcaatttcctcatcactaaagtagggccaataatagcacccacctcatagggaagattaaatgacataatgtatgtgatgcaactagcaaagtaccagtcccatagtaagtcatgccccacagtatttccacccacccctgttctctgccttcccaaccaggtactgcaacgactggagcagaggcggcagcaggcttcagagcgggaggctccaagcatagaacagaggttacaggaagtgcgagagagcatccgccgggcacaggtgagccaggtgaagggggctgcccggctggccctgctgcagggggctggcttagatgtggagcgctggctgaagccagccatgacccaggcccaggatgaggtggagcaggagcggcggctcagtgaggctcggctgtcccagagggacctctctccaaccgctgaggatgctgagctttctgactttgaggaatgtgaggagacgggagagctctttgaggagcctgccccccaagccctggccacgagggccctcccctgccctgcacacgtggtatttcgctatcaggcagggcgtgaggatgagctgacaatcacggagggtgagtggctggaggtcatagaggagggagatgctgacgaatgggtcaaggctcggaaccagcacggcgaggtaggctttgtccctgagcgatatctcaacttcccggacctctccctcccagagagcagccaagacagtgacaatccctgcggggcagagcccacagcattcctggcacaggccctgtacagctacaccggacagagtgcagaggagctgagcttccctgagggggcactcatccgtctgctgccccgggcccaagatggagtagatgacggcttctggaggggagaatttgggggccgtgttggggtcttcccctccctgctggtggaagagctgcttggccccccagggccacctgaactctctgaccctgaacagatgctgccgtccccttctcctcccagcttctccccacctgcacctacctctgtgttggatgggccccctgcacctgtcctgcctgggggtgagtggaaggaactgggagccttgggaggctaacagacaggaagaaggaggaagcttggactcccaggtcacgctctggtcctctccgtgccttcaggcatcttgcttggtggagagcacttgcctgggctctggagccaggctgactggttcaggtcccgctctgtcatctccaagtgtgtggtgggattctgaacctgtcttggcctcagtttatgttctttatgaggtaaggaaaaggtactagcttattgaattcttatgagagttaaaaaagatgcctgtggactacacagcattgtgcctggcacacagtaagtatgcagtcactgttattattttaaaaattagctaacttctctcacggtgtcctcccaatatgcaccttttgctcctagtgtccagatacctagctttgtatcattattttttctgatgcccactttttttctttttttaaatgtctatagcagttttattttattatttattttagattcaggaggtacatgtgcttgtttgtcatatggatatattgcatactggtggagattgggcttctagtgtacctgtaactcaaatagtgaacattgtacctgataggtaatttttcaaccctcgcccctgcctctactcctacctttgccccctttggagtcctgggagtctgttatttccatctctatgtccatgtgtacccgttgtttagctcccacttataagtgagaacatgcaatatttggttttctgtttctgagttagttcacttaggataatggcatccaactccattcatgttgctgcagaggacatgatttcattcttttttatggctgtggaatgcctgccttttctaaaactttctggtacttccaccttgtccacaaggagtctccctccctggagttaccaccatctccaccaccccaagttcactttgcatgacttagcacttagtcatttattgtgtttgttgaggtttcattattggtttcttgacagccattgggggtgggagcactatgcatcctatctcccttagttttgtaccttgagcagagctgattatacagcagttgcccaataaatgttgaggacagtggatagagtgatggattttatggtctaggatggtgaccattaatttaacaaatatttatagaatgccactgtcctaagtgctggagatacagcattgaacaaaacaaagtctgaagactgacttgtggttcttatttccagacaaagccctggacttccctgggttcctggacatgatggcacctcgactcaggccgatgcgtccaccacctcccccgccggctaaagccccggatcctggccacccagatcccctcacctgaaggccagggaagccttgacccccagtgatgctgctgtccctatcttcaagctgtcagaccacaccatcaatgatccagagcaacacagccaaaagctggaatcgcccttatttccaccctcacctccaagggtggaaacttgccccttcccatttctagagctggaacccactcctttttttcccattgttctatcatctctaggaccggaactaccttctcttctgtcatgaccctatctagggtggtgaaatgcctgaaatctctggggctggaaaccatccatcaaggtctctagtagttctggcccacctctttccccaccctggctccatgacccaccccactctggatgccagggtcactggggttgggctggggagaggaacaggccttgggaatcaggagctggagccaggatgcgaagcagctgtaatggtctgagcggatttattgacaatgaataaagggcacgaaggccaggccagggcctgggcctcttgtgctaagagggcagggggcctacggtgctattgctttaggggcccaccacgggcaggggcctgctcccagctgccacgctctatcatatggagcgaggtgttggggaaggcggggcaggcagcctgttgcaggcaggggaaggagaagagactgaggggctgtgacctctcctgaggcccccagcctgagactgtgcaactccaggtggaagtagagctggtccctcagctggggggcagtgctgtccagtggaggggagggctttcacgcccacccaccccctggccctgccagctggtagtccatcagcacaatgaaggagacttggagaagaggaagaataacactgttgcttcctgttcaagctgtgtccagcttttcccctggggctccaggaccttccctacctccaccaccaaaccaagggatttatagcaaaggctaagcctgcagtttactcggggggttcagggagccgaaaggcttaaatagtttaagtaggtgatgggaagatgagattacctcatttagggctcaggcagactcacctcacatactccctgctccctgtggtagagacacctgagagaaaggggaggggtcaacaatgagagaccaggagtaggtcctatcagtgccccccagagtagagagcaataagagcccagcccagtgcagtgccggctgtgttttcctacctggtgatcagaagtgtctggtttgcttggctgcccatttgcctcttgagtgggcagccctgggcttgggcccctccctccggccctcagtgttggctctgcagaagctctggggttcccttcaagtgcacgaggggttaggctgctgtccctgagtcctccattctgtactggggggctggctaggacctggggctgtggcctctcagggggcagcctctccatggcaggcatccctgccttgggctgccctcccccagacccctgaccaccccctgggtcctgtcccccaccagagccccagctcctgtctgtgggggagccatcacggtgttcgtgcagtccatagcgcttctcaatgtgtgtcacccggaacctgggaggggagggaacactggggtttaggaccacaactcagaggctgcttggccctcccctctgaccagggacatcctgagtttggtggctacttccctctggcctaaggtaggggaggccttctcagattgtggggcacattgtgtagcctgacttctgccggagctcccagtccaggaggaaagagccaaggcccacttttgggatcaggtgcctgatcactgggccccctacctcagcccccctttccctggagcacctgccccacctgcccacagagaacacagtggtctcccctgtccgggggcggctttttccttccttggagcgtccctgacggacaagtggaggcctcttgctgcggctgcaatggatgcaaggggctgcagagcccaggtgcactgtgtgatgatgggagggggctccgtcctgcaggctggaggtggcatccacactggacagcagggaggaggggagtgagggtaacatttccatttcccttcatgttttgtttcttacgttctttcagcatgctccttaaaaccccagaagccccaatttccccaagccccattttttcttgtctttatctaataaactcaatattaagatgtta

SEQ ID NO: 464820 - DNA, 5306 bp, Homo sapiens
catacgccatggctgactctagaggatacactcctgtcctgccacctcgaccattactaccaggaggaactgccagctctgctcaaggccctggtcagtgagctgtcagagcacttgagggaccccctgacctccctgagccacactgagctggaagccgcagaggtcatcctggagcatgcccaccgcggggagcagacaacctcccaggtaagctgggagcaagacctgaagctgtttcttcaggagcctggtgtattttcccccaccccacctcagcagtttcagccagcagggactgatcaggtgtgtgtcctggagtggggagcagaaggcgtggctggcaagagtggcctggagaaagaggttcagcgcttgaccagccgagctgcccgtgactacaagatccagaaccatgggcatcgggtgaggtgggggggcacaggtgtcatgtgcaccttcttgtctcagcaagaagagctgagagaggggatcttggagtcattgagggtgtcatggagctacagaggggagggaaaggtattttaaggtaacagtgtggcacaatagttaagagcacagtttttggagctagaccgacataggttcaaattctcttctgttgcttcctagttctgtagccccaggtaagggagtgacttaacccctctggacttcaatttcctcatcactaaagtagggccaataatagcacccacctcatagggaagattaaatgacataatgtatgtgatgcaactagcaaagtaccagtcccatagtaagtcatgccccacagtatttccacccacccctgttctctgccttcccaaccaggtactgcaacgactggagcagaggcggcagcaggcttcagagcgggaggctccaagcatagaacagaggttacaggaagtgcgagagagcatccgccgggcacaggtgagccaggtgaagggggctgcccggctggccctgctgcagggggctggcttagatgtggagcgctggctgaagccagccatgacccaggcccaggatgaggtggagcaggagcggcggctcagtgaggctcggctgtcccagagggacctctctccaaccgctgaggatgctgagctttctgactttgaggaatgtgaggagacgggagagctctttgaggagcctgccccccaagccctggccacgagggccctcccctgccctgcacacgtggtatttcgctatcaggcagggcgtgaggatgagctgacaatcacggagggtgagtggctggaggtcatagaggagggagatgctgacgaatgggtcaaggctcggaaccagcacggcgaggtaggctttgtccctgagcgatatctcaacttcccggacctctccctcccagagagcagccaagacagtgacaatccctgcggggcagagcccacagcattcctggcacaggccctgtacagctacaccggacagagtgcagaggagctgagcttccctgagggggcactcatccgtctgctgccccgggcccaagatggagtagatgacggcttctggaggggagaatttgggggccgtgttggggtcttcccctccctgctggtggaagagctgcttggccccccagggccacctgaactctctgaccctgaacagatgctgccgtccccttctcctcccagcttctccccacctgcacctacctctgtgttggatgggccccctgcacctgtcctgcctgggggtgagtggaaggaactgggagccttgggaggctaacagacaggaagaaggaggaagcttggactcccaggtcacgctctggtcctctccgtgccttcaggcatcttgcttggtggagagcacttgcctgggctctggagccaggctgactggttcaggtcccgctctgtcatctccaagtgtgtggtgggattctgaacctgtcttggcctcagtttatgttctttatgaggtaaggaaaaggtactagcttattgaattcttatgagagttaaaaaagatgcctgtggactacacagcattgtgcctggcacacagtaagtatgcagtcactgttattattttaaaaattagctaacttctctcacggtgtcctcccaatatgcaccttttgctcctagtgtccagatacctagctttgtatcattattttttctgatgcccactttttttctttttttaaatgtctatagcagttttattttattatttattttagattcaggaggtacatgtgcttgtttgtcatatggatatattgcatactggtggagattgggcttctagtgtacctgtaactcaaatagtgaacattgtacctgataggtaatttttcaaccctcgcccctgcctctactcctacctttgccccctttggagtcctgggagtctgttatttccatctctatgtccatgtgtacccgttgtttagctcccacttataagtgagaacatgcaatatttggttttctgtttctgagttagttcacttaggataatggcatccaactccattcatgttgctgcagaggacatgatttcattcttttttatggctgtggaatgcctgccttttctaaaactttctggtacttccaccttgtccacaaggagtctccctccctggagttaccaccatctccaccaccccaagttcactttgcatgacttagcacttagtcatttattgtgtttgttgaggtttcattattggtttcttgacagccattgggggtgggagcactatgcatcctatctcccttagttttgtaccttgagcagagctgattatacagcagttgcccaataaatgttgaggacagtggatagagtgatggattttatggtctaggatggtgaccattaatttaacaaatatttatagaatgccactgtcctaagtgctggagatacagcattgaacaaaacaaagtctgaagactgacttgtggttcttatttccagacaaagccctggacttccctgggttcctggacatgatggcacctcgactcaggccgatgcgtccaccacctcccccgccggctaaagccccggatcctggccacccagatcccctcacctgaaggccagggaagccttgacccccagtgatgctgctgtccctatcttcaagctgtcagaccacaccatcaatgatccagagcaacacagccaaaagctggaatcgcccttatttccaccctcacctccaagggtggaaacttgccccttcccatttctagagctggaacccactcctttttttcccattgttctatcatctctaggaccggaactaccttctcttctgtcatgaccctatctagggtggtgaaatgcctgaaatctctggggctggaaaccatccatcaaggtctctagtagttctggcccacctctttccccaccctggctccatgacccaccccactctggatgccagggtcactggggttgggctggggagaggaacaggccttgggaatcaggagctggagccaggatgcgaagcagctgtaatggtctgagcggatttattgacaatgaataaagggcacgaaggccaggccagggcctgggcctcttgtgctaagagggcagggggcctacggtgctattgctttaggggcccaccacgggcaggggcctgctcccagctgccacgctctatcatatggagcgaggtgttggggaaggcggggcaggcagcctgttgcaggcaggggaaggagaagagactgaggggctgtgacctctcctgaggcccccagcctgagactgtgcaactccaggtggaagtagagctggtccctcagctggggggcagtgctgtccagtggaggggagggctttcacgcccacccaccccctggccctgccagctggtagtccatcagcacaatgaaggagacttggagaagaggaagaataacactgttgcttcctgttcaagctgtgtccagcttttcccctggggctccaggaccttccctacctccaccaccaaaccaagggatttatagcaaaggctaagcctgcagtttactcggggggttcagggagccgaaaggcttaaatagtttaagtaggtgatgggaagatgagattacctcatttagggctcaggcagactcacctcacatactccctgctccctgtggtagagacacctgagagaaaggggaggggtcaacaatgagagaccaggagtaggtcctatcagtgccccccagagtagagagcaataagagcccagcccagtgcagtgccggctgtgttttcctacctggtgatcagaagtgtctggtttgcttggctgcccatttgcctcttgagtgggcagccctgggcttgggcccctccctccggccctcagtgttggctctgcagaagctctggggttcccttcaagtgcacgaggggttaggctgctgtccctgagtcctccattctgtactggggggctggctaggacctggggctgtggcctctcagggggcagcctctccatggcaggcatccctgccttgggctgccctcccccagacccctgaccaccccctgggtcctgtcccccaccagagccccagctcctgtctgtgggggagccatcacggtgttcgtgcagtccatagcgcttctcaatgtgtgtcacccggaacctgggaggggagggaacactggggtttaggaccacaactcagaggctgcttggccctcccctctgaccagggacatcctgagtttggtggctacttccctctggcctaaggtaggggaggccttctcagattgtggggcacattgtgtagcctgacttctgccggagctcccagtccaggaggaaagagccaaggcccacttttgggatcaggtgcctgatcactgggccccctacctcagcccccctttccctggagcacctgccccacctgcccacagagaacacagtggtctcccctgtccgggggcggctttttccttccttggagcgtccctgacggacaagtggaggcctcttgctgcggctgcaatggatgcaaggggctgcagagcccaggtgcactgtgtgatgatgggagggggctccgtcctgcaggctggaggtggcatccacactggacagcagggaggaggggagtgagggtaacatttccatttcccttcatgttttgtttcttacgttctttcagcatgctccttaaaaccccagaagccccaatttccccaagccccattttttcttgtctttatctaataaactcaatattaagatgtta

SEQ ID NO: 464821 - DNA, 1525 bp, Homo sapiens
aggtagtcgggagaatcctgactcggggtgcggggtttatgaatgggaagagctttgatcctaaacttaagataattcatactggagacaaacccttcaaaggtgatgaatgtcacaaagcctttaaccagttctcaacccttaccaactgtaagagaattcatactggagagaaaccctacaaacgtaaagaatgtgggaaaggttttaaccagttttcacaccttactaaacataagaaaactcatactggagagaaaccctacaaatgtaaagaatgtggcaaaggttttaaccagttttcacaccttactaaacataagaaaactcatactggaaagaaatcctacaaatgtgaagaatgtggcaaagcttttaaccagtttgcaaaccttattaaacataaaagaattcataccggagagaaatcctacaatatgaagaatgatgaaaagcttttacccagtcctcagaccttactgaacacatgagaaatcatacaggagagaaaccctacaaatgtgaagaatgtggcaaatgttttaatgggccctcctaccttacctgacataagataattcatactagaaagaatacctacaaatgtgaagaatgtggcaaaagctttagtgtattctcaacctttactaatcataaagcaattaatactggagagaaatcttacaaatatgttgaatgtgacaatgtttttaactaggctgcaactcttgctgatcataagaaaattcatacgggagaaaaaccccacaaatgtgacaaatgtggcaaagcttttaactgctcctcaaaccttactagacataaaaaaattcatactgatgagaaactctacaaacctaaaagatatgacaatgattttgacaacacctccaacttttctaaatatacaaaaaatcatcctggtgaaaaacctttaaaatgtgaagaatgtgtgaacactgatttttttctatagaagagtaagggcattaaagcttaagatttataatgaaaatctaagtaggttcttggtggttaacttataatactgagtgatgagggggtgtaaagttcagtctacagtgttcattcttagtcacctaactgtagccaactcccttgtcattttctctggaaaaattttgggatcatggcagcttttggattaaaatattttctgttaatttatgagacactgccattggggctttaagggaactgtcagtgggtgaggccttttttaagtcagattctggactgccttctgttgagcgagtgtgaaagggcacaggtctggtctgggaagttcagagaggacagggtagagtggtgctgtaggtggaggtgagggtggtgcgaagggggaagtaagggattttgagtgttttttgagagacataagattagagagttcctgattagtagttctaagttgcttgttcgcctcctgtagggaggtgaggcagtctttgccccgtttgctactctccaaataccactaaaaataactctcccattctggccg

SEQ ID NO: 464822 - DNA, 868 bp, Homo sapiens
  misc_feature (15)..(15): n is a, c, g, or t
taactggtaccagangtgggaagaagacaggaagatgtgggaaagtttggaacttcctagagacttgctggataattttaaccaaaatgctgacagtgatatggacaatgaagtccaagctgagatggcttcagatggagatgaggaacttattgggaacgggaagggtgcaggctccaagccttggtggcttccatgtggtgttgggcctgtggtacgcagaagacaagagttgagctttgggacggtttgccaatttcagagaatgtatggaaacacctggatgtccaggcagaagtctgttgcagggtggagctgtgagagagggccaccatcctccagagcccagaaagggagatccatcgatagcttgcatcatgcacctggaaaaaccataggcattcaacaacagcctgtgaaagcagttcaggggttctaattaccatgtgccaaaacaagactgcagaaagtataatctattagcaataacttgtgtctaacaatataattgcatctggaataatgaaatgttctttttagtatcaaaattaataatgtcatatcaatgccattaataattaaggattctttttataacattgaatcattaataacaactgcattatgaacaattctattaatatcaacactaaaataatatcatattgtctttccatagttacaattttgcaagtataatgaaatgctgtacacataatggactagaccctgctgtgtccaaggtaagcaatcctggaaatatagtacccttttagataaataaactatatttttgttttcctagacagtaatatgtagatagaaaaattcatcattaaaaacttagaaaccacatgaaaattctgtt

SEQ ID NO: 464823 - DNA, 5036 bp, Homo sapiens
  misc_feature (15)..(15): n is a, c, g, or t
taactggtaccagangtgggaagaagacaggaagatgtgggaaagtttggaacttcctagagacttgctggataattttaaccaaaatgctgacagtgatatggacaatgaagtccaagctgagatggcttcagatggagatgaggaacttattgggaacgggaagggtgcaggctccaagccttggtggcttccatgtggtgttgggcctgtggtacgcagaagacaagagttgagctttgggacggtttgccaatttcagagaatgtatggaaacacctggatgtccaggcagaagtctgttgcagggtggagctgtgagagagggccaccatcctccagagcccagaaagggagatccatcgatagcttgcatcatgcacctggaaaaaccataggcattcaacaacagcctgtgaaagcagttcaggggttctaattaccatgtgccaaaacaagactgcagaaagtataatctattagcaataacttgtgtctaacaatataattgcatctggaataatgaaatgttctttttagtatcaaaattaataatgtcatatcaatgccattaataattaaggattctttttataacattgaatcattaataacaactgcattatgaacaattctattaatatcaacactaaaataatatcatattgtctttccatagttacaattttgcaagtataatgaaatgctgtacacataatggactagaccctgctgtgtccaagatggtttgctattaccagcaatgccacttctgggtatctgttcaaaagaattgaaagcaggatctcaaggagctacttgtgtatccatgttcctggcagcactattcacaatatctaagaggtagaaacaaccaaaatatccattggcagatgagtggataaacaatatatagtatatatgttcaatgaaatgttattcaaccttaaaaaaagtaaatcctgcaatgtgtgacaacatagatgaaccttgaggacattaaaataagtgaaataaatcaatcacagaatgacaaatattgcatgataccacttatatatcttaaatattcaaattcacagaagcaaataatagaatggtggttgccaggagctggaaagagagagaaatggggagccctaatcaagcgatataaaatttcagttaaaaaagatgaataggttctagaggtctgctatacaatattgtgcctacaaatgataatactgcattgtatactttttaagctgttaagagggtaggttgcatattaggtgttcttacaattttttcaaaaaaattaactcaatacaaaaaataatgtaaaagaagcataaaatatatctaagaaaattaggaaacatgagtaatataaggtaaaaccaagacatcataaaaacaaaaaaaaaatttaatgaacagggtaatagggattaaaaaataaagaatgtaaaacaaatttttgagtcctaagaccagattagagaactccgtcagaacgtaggaagaaggggtaaaaatatagaaacataaaggaaaacaggtaagagaataggagtaatcagaggatatttgaaaaattatcaaaactatttatttcacaataatactagatggatgatcttaaatacaatgggctcatagattgctacaggagtggtaaggaagcaaatacacatatggacacattctatattgagaatatcaaagaaaaatgaataattataaaagtttctacagagaaaaagtagattgcctacacaggaataataatcagaatgctgtcaaatttattaaagcaacactggatacaaaaagaacaagatatcatatttttaaagtattaatggaaaataaactttgaacttagaattttatatacagccaaaggttcagaaaagattttctttggtaaaaaataagaaaggcctcatagatttaacattaactgaaagtctaatatcaaaaacactaatgtgatataggcttcaagaaaaaaaaaactcacgagggtacttccaaagatacagagagtaaggataatcaaataccttgtaacaatgtattaataacatgactttaagttccaagttggggaaactaccatgctatggacagaacgtttgtgttctcccaaattcatatactgaaagtctaatccccaaggtgatgatatttgtaggtgaggtctttgggaggtgattaggtcataagggtagagccttataaaaaagagacaccagagaacttgcttttttctctctttctgcacaatgcaatgtgaggatacaagaagacagctatctgaaaaccagaaaacaggtcctcaccagacaccagatctgcttgtaccttgatcttagacttcccagcctccagaacttcgagaataaatttttggtgtatatgccacctagtctgtggtattgattgtattttaacagcctgaactaagacatgccataagagcaaatataaatatataactttaaaatagtgaaataaaacccacacagtgaataatacacacacaaacgaaagtttacaaatgaaaatatatttgaatgtttgcccatgaaagggaatgggaatgggaaataggggtaaaaggagtaaataaatgaatgaagcaagataaagctttgaatgaatcaatgtcaattatgaaccatagataattgtgatcaattctaccctttgcacctgaagtccaaacaaaatacacatatgaataaaaagaatggaaagaatgatgatgcttttcttttctttaaaaattaagccaggtattccctaaaactcagtttccaaatgtacttccattgggttttatttgcagcatatgaatacctacaacagtaagccctctgaatataaataaaatggtttgtgattctatgaaagtttgatgagtgactcctaggacaacaaaaaacaacactgacctgttctctgcctgaaaaaaaatgaccaaagtgactctcaatgctttatgatgatgaatcgtgcttaaaaacacagccagtttctatgagagggagttttattgcttgagctaatgggcactgacattttgcttctataaaatattatatagggttttccaagaacccgagagattttgttttcctattgcaaatccatggaaagcaaactgctataagtagatgtggtgcctctgcaggtgaatgatttctgaatattggttttttaactggaaggggaattctaatcttggtggtgctgggaaaatcattttagatatttatgtctagtgttccattattggaagactaagcatgtaagagttatttatatcctactgcttaaggtcttcaccaaggtctgatcgcaaaaattcaaaaaattgcaacctctggcataaaggcgttaattttttccccattttcccatctgctaagtcattttaacactagtgtttgaagtgaaacaaacttatcttcttagaatgagttggttttgttaaggaaggctgccacacaagaattctggtttgtgaatcagtgtaatatccaatgtaaaacatgaactgaggggtacaaacacttctttactgagcaatgtctcttttttaaatctttattattattattatactttaaattctgggatacatgtgcagaacatgcaggcaaaacaaagaatcaagatgccataaatatgtcaataaacccagttatccaacataccaatggcaatgcagatataataaaaagacaagcatctgagaaatactttaaggtatataataaaaaattaatttccaaaatatagaaatacctcctacaattaaaacattatagaaatatctaaaattatgtaaacagtaaattcataaaaaatgaataaaagtgatgacaaacatataaaattatcttcaccctcactagtactcaggaaagtgtaaatgaatatcctgaaattaaatagtggtcaaatagaatatcaaaacctaaaaacactgataatagccagtgatgaaaaagatgcacagaaaatgcatcatcttatttactctcagtgggaataaaaatatatgcaggtctttcaggggctaatttggtaatatctattaaaatttaaaatatatctatttatccccaaattctgtgtttagatatctattttagagaagtacttgtgcacaaaaagccatgtacaagaatattgatccatttttataattaaaaatacatataaacattcatctataggcaatgaattcttaaatgtcatatgatacagcattagtctggaaaactatgcaacaggtaaaaagttgaagagaatatatgtttgctcatgtgtcttttaagtcagaaaaacacagcacactccaaaatatatacacaatgtattttaacatacaaaattaaacacaaaaaatcaaaattttacctttataagtacatagaaatacatttataagcagaaaaaatggactgaatgaccatatgaaattgaagggagtagcaatgaaaataatgtttgagaaagaagaatcaagaacattactaattagaattcatttatgtgttcttttgtaaataaaaataagaaaaatatgtaaaaatgaatacattaaaaagaagacaggatacatatatcaaaaaaaaaaaccacgtatcaacctcaaaaaatcccacttacaaaagctattttcaagatcttctcttggttttggttttcaaaactttttctatcatggagctagttctatcatggtagtttgtattttcctgattagtttctgaaaaattgatgtacttgtggcttgatgtttcttgtcagttttgaaaagcttgattaggatagcctccaatactgtatttttttcttttagagtttgttctgatatgttactagtgttttacattatttatttttatatttatatatttttaacttttaagttcaggtatgcatgtgtaggtgtgttctatgttaaatttgtttcataagagtttgttgtacagattgtttcatcacccagatattaagcctagtacccattc

SEQ ID NO: 464824 - DNA, 1947 bp, Homo sapiens
tattgtgtcaattaggaatcagtaagcgtatatgttaattaggaaacagtagtggaagctgttaatagcacaaccaacaactgctattccaatgagacggtgattctgacccccaccatggactcgcgactctacatgctctccttcctgcccttcctggtgctgctggtcctcatccggaacctcaggatcttgaccatcttctccatgctggccaacatcagcatgctggtcagcttggtcatcatcatacagtacattacccaggaaatcccagaccccagccggttgccactggtagcaagctggaagacctaccctctcttcttcggaacagccattttttcttttgaaagcattggtgtggtaaggtttgaattgaggtggccttatccctagtgcttgtgagtgaccttctagaaaggaactgtgagctctgggtttctgtgtcccgctggccattgttttgggcctgctagaaaatgcccatgggagaaagtaacctctggccttacttgggacagttgtcaccagcaagagaaaagttgattacaacagagaggcagtcaggagacagttttatttttgtccccacatgcctattaaacatctatcctcctatcgacatgagtttcctaatcttttaaaatcaagaagaaccatggtgtccaatttaaaggatttgattaaacataaaggagttttaacctggaaagttctgtatttacagtctgtagtctctacttccacacttgtggaagggtagtgttgtttatatatttttaaaagttacttttagtgtacatacagtaacattcacttttttggtgtacattcctgtaagtttcaagaagcatgtagaggaataaatgcaccaaagtcagaatgcagaacaattctccttctgttctctgcctgtactgtcttctcttttccaaaatgtcacatatatgggatcatacagttctgcctctggaaaacaagatgaagaatgcccgccacttcccagccatcctgtctttgggaatgtccatcgtcacttccctatacattggcatggcggctctgggctacctgcggtttggagatgacatcaaggccagcataagccttaacctgcctaactgctggctgtaccagtctgtcaagcttctctacattgccggcatcctgtgcacctatgccctgcagttctacgtccctgcagaaatcatcatcccctttgccatctcccgggtgtcaacacgctgggcactgcctctggatctgtccattcgcctcgtcatggtctgcctgacatgcctcctggccatcctcatcccccgcctggacctggtcatctccctggtgggctccgtgagtggcaccgccctggccctcatcatcccaccgctcctggaggtcaccacgttctactcagagggcatgagccccctcaccatcttcaaggacgccctgatcagcatcctgggcttcgtgggctttgtggtggggacctaccaggccctggacgagctgctcaagtcagaagactctcaccccttttccaactccaccacttttatcaaccagcctaccaacttccagacacgagtaaagccatcctagactatatccaaccccagtcaggctgacacagaccataagaattgtacagataatccacagaactgtgataaataataaagatgtttgtaattttaatacataaagagtgggaagttttatgcagcaaaagataactgataaatcattctaaagaggatacactgattaatgagaaaagaatccctgctctcaagcagccagtctgctgtccattggggaagagttaacagaattactaaaattgagaaaacgcacctagataaataaatagatgttgaagatctatagtcccaaaaggtggggagaggagagtttctcatcaaactctccgtggtttac

SEQ ID NO: 464825 - DNA, 622 bp, Homo sapiens
tattgtgtcaattaggaatcagtaagcgtatatgttaattaggaaacagtagtggaagctgttaatagcacaaccaacaactgctattccaatgagacggtgattctgacccccaccatggactcgcgactctacatgctctccttcctgcccttcctggtgctgctggtcctcatccggaacctcaggatcttgaccatcttctccatgctggccaacatcagcatgctggtcagcttggtcatcatcatacagtacattacccaggaaatcccagaccccagccggttgccactggtagcaagctggaagacctaccctctcttcttcggaacagccattttttcttttgaaagcattggtgtggtaaggtttgaattgaggtggccttatccctagtgcttgtgagtgaccttctagaaaggaactgtgagctctgggtttctgtgtcccgctggccattgttttgggcctgctagaaaatgcccatgggagaaagtaacctctggccttacttgggacagttgtcaccagcaagagaaaagttgattacaacagagaggcagtcaggagacagttttatttttgtccccacatgcctattaaacatctatcctcctat

SEQ ID NO: 464826 - DNA, 493 bp, Homo sapiens
gtgagtgcacaccatgcacctgcccactccactgggcagggtttttttatcaaggatagactgagctttagatacctggagccaaccctgtaggtgggtaagagtgttatgagagacatgcatctcactgtagcatttcttctacaaggatgtctccgtgcagtcccattcttctgattgtctccttgttcatgttctttctccaaatatctatttttatgtcaaattctggcttttttaaaaaaatgtgcttgcaaggaaaacatcttggttggtgaactgtagaccattcctataatggttggctggcagcaaaaggcaggcgaaaacagattcttgtactacagctaaaagttattgcgttacccatagggtacaatttcaggtacccaataggaaggcaagaaaaaaaaaatctaatatttagtcacagagatatacatagagagtctcaaaaaccataagctttcaataagtgtcttgttactaattt

SEQ ID NO: 464827 - DNA, 667 bp, Homo sapiens
tattgtgtcaattaggaatcagtaagcgtatatgttaattaggaaacagtagtggaagctgttaatagcacaaccaacaactgctattccaatgagacggtgattctgacccccaccatggactcgcgactctacatgctctccttcctgcccttcctggtgctgctggtcctcatccggaacctcaggatcttgaccatcttctccatgctggccaacatcagcatgctggtcagcttggtcatcatcatacagtacattacccaggaaatcccagaccccagccggttgccactggtagcaagctggaagacctaccctctcttcttcggaacagccattttttcttttgaaagcattggtgtggttctgcctctggaaaacaagatgaagaatgcccgccacttcccagccatcctgtctttgggaatgtccatcgtcacttccctatacattggcatggcggctctgggctacctgcggtttggagatgacatcaaggccagcataagccttaacctgcctaactgctggtatcttcatgggctgtcaggtggtggggactcaggaatgggtggaaacgtataggtcacttcctcctcccttccacagctgggaaactgaggtctagagagcctcccacagaagaagcagaattgtcattgga

SEQ ID NO: 464828 - DNA, 832 bp, Homo sapiens
tcttttctattgcgcttgtcaaatgccctggagaagacttctagttgtctgcctagggcatatgtgtctgtgtatgcgtgtgtatgcactcacaagagtgtgtgtacttagcaaacggtattccagcctagaaaaggttaagaaatatgaagggtttttgcatttagtgtgtaagctcaactcccctctttttagttcgaaccctctgtgtgtctgtctgcaggaaattaatctcttagatcttctgctaagatggttagttacctgttgcatgaagtggggaggagatgagaaggtccagctgcttcttcagcaactctccttgcaacagaacttccagagatatttgaggatgcccattgttggatctgtatttgaaattaaaaacaaaacaaaacaaaaaaaatcagtctgcttctcagctctctctgcagttggctgagaatccaactttctcagatcttctcccagcttccaaatttctgttgctgttgtctccattcttgtttattttatctttgatatgggtcaatgacagtgtgggaagaaacaagaaaaatcaataacctacattttaatgtgaaatgacaacatgtttaacaacagacttcccaggcatgcttcaggagagaatgcgagaacataattttagaaccagaaggaaacttagagatgatgagaacttaacactggatttcacaggtgagaaatggagaccctgactggagaactttcttgggtcacacaactagttatccactttcagcttggtcttctttcaatcttcatttgcctcctaaataaaagatctgctggctcggactcaatgttt

SEQ ID NO: 464829 - DNA, 5539 bp, Homo sapiens
gaagacctccccttcacatgaggcccagctgcactttggcatggacccagctaccagctatgcttgtcatcctgtggctgccctcagctactcctgtgcagaagtcaggattgaataaagctgtgctacaaactgtacagcacaagggatactcgaatgtcgtaaatcatttcaatgaaaatcagtctttctctgttaattcattaggcaaaaatgatgtgagattccgggccctgaagcccagccccacagcctgccgatgggacaggtgtacacctccacttgaggcaggatgtacctctccctggacacctctccccaaaccactaacatgggtgtgctccaagtcctggcccttggaggacttccccaccctgctttgcaagattgttccagttctggcttattggacaacatggaaagcaaaccttggtggtgaatgtatctgtttccagagtggaattcatgccagttgcagcatggagctgagaagacaagaaacttctctaggtcttgtgggcaggagtggttcccggttttctggggtcctgatgatttcccaggtccctttaagaacaagaatataaaattctcttttgtttgttttcatgttgatccaaattaaaaatagctttttttttcatttgatgagagtgttttattgttgccgtgttttatcatatttgaagagaaacaaaaagttaattttatggcaatcccaggctttgataaacaacgatttctgttctcacagcatgtgtagcagtagataataagcctgccaccattcaattgaataaacgcatcagttgacagtaagatcaataagagatattaaacccttttcccaaatacacacacacacaccacacacacacacacacacacactcatattccacaaaggcatgtaaactaaaataataaaaataactttttgattacataaatgataaatgattattgtagaaagaccttttaaacagtatagaaaattgtaaagaaattacagtgatctggaactgtgctagccctgtctgttgatgctgtgttgaggcccatgcttcttgcatctctttgtgtgcatgagtatattcaccctcacctttcacctcgcgcttctccacctccatcccccaggctctttatataattatcttcatggtcatagaactatatggggttatttgggtagctacccacacacatacatgattgtatttttgtcattgtttattctaaaaaaatagaatccttattccatgcacttttgctaggacttgcatatctcattatagatactcctcgagccttttggcatagatctagcagattctttttctgttagatctatgccaaatgaagcatagatgatgcgtgttaaacatacagaaaagaagatattttacagaaaacacccttatgcccactacctcgattctaccattaacctattacttatacttattttccatctatccatctctgtaaccatccaatccatcttattttgggggaatgtatttcaaggaaagttgcagacttctcagcatacttccccctaaacactttgcacacatgccattagctagtgttcaatatttttttccttcaaggtaaattttatttacattctaaagcactaatattgagcaaattatttgatgagtttggatgatggcatacatttgtgtaaccgaaatccctattgagatacagagcaacactataaccccaaaaggtacccttgtgcccccccacccaatgaattcccaattcccccacccagggacaaactgtattctgatgtttcctaccatagattagttttgctgcgtctaaaacttcatatatatcatatatgaagtcatgatatatatgaagtccttacaatatcagggtttcttcccagctttttctccccttgagcagtattccattttatgaatataccacacttagtttgttcattctctcattgatagacacctgggctgttttcagattggtgctattatagagaaagctgctatacaactcactctttttagtgactatataatatttcaatgtatgcatttataaaatttattcaagtatctattttgatatttatttagtcctctctttctttcaaaactttttggctactatgcgattgctatgatgtgaaaatctttgacccatgatgcttttattttcatagactagatttttggcagtgggcttgctaggttgaacagcatgtatttctctaggcttgtttgaatagatgttgtcatgcttttgcagcaaggcagccgctgctgacatttccagcagaagtctgtgagtgctcctaaccagcttccctgctggtgcagtgtcaccaagctcaaatgtttttccttgttgagagttactcattttcattttcctaagtaccaatggagctgagcatttttttatatgtctgctgaccatttgggtatgttctgcaaatcacttcatttcttttgcccattttacttttaggttgtatgtctttaacaatctgtgaaagctctgtgtatattatggacaattacctttatctacagataattccctttaaaatgtgcagtacagatatttgtacccagtgtatcatttttcttttgattttattagcactatatttttatcttagatatttaatttttttctgtaggcaatcaagtatatatataattatactctctatataaatacatcctctataaataaatatatgtgtatttctgtataccttctgagctcctaccacctttttttcttttcttctgttttgcttgcttgtttgttaaaagatctacctattctctaggtcatatgtatattctcctaaaatttactctaaattactgttattgttaattactttttttttaatacttaaacctttacttcctttagtgttagttttccatgtagtgtgggtggtgcttcaattctcttttgttccagatggagagccatttgtgccaacatcattcatttgataaactctacccaccaaactaaaataccaactgtaccatttattacactctcatgtaaatctagatctgtttctggattctctgttttgtctcattggcctgtttgcctttctctagatctgtttctggattttctgttttgtctcattggcctgtttgcctttctctagatctgtttctggattttctgttttgtctcattggcctgtttgcctttctctatgtcaatatcatttatagtgactttcttgtatgtcttagtagctggcaaggcaaccccttcaccccccaagtcctaaaaccttttatctttgttatctttgggcacttacttttccatatgaactttaagataactgtattcaactcacatttcccctgaatccactaggattaaattgaaattatatattaatttttagaaatattgacattttataatattaagccttcttccttcaataagattttacagttttctacacataccctgaacaacatttcctatcagattttgtcttcttttatagacttattccctgttatgaattagcatttccctaatatcaatttttagatctttaatatcagtatagaaaaaatgttaatgattttcatatgtttattgtgtacatagatccttaccaaattcttcaatgaattctaatggcattccccacccccccctttaagtgctgaattttatgtgtataaaatcgtattactagcgaaaaaaaaggtatctatactcttccaatgcttaaatgtactgttttctttccttatgtcattttccagactgctaaaactatgctgaatagcactggtgatgggggaacccctgcctgttcctgattttagtggaaatgactttagcttttagcatttttccacttacaatcatggtggtagttggatttgggtaaggatcctctattatatataaaatattccgtttctatttccatttaactgaggctttggtagaagcagctgtttcagttttataaaagttcttctggtctcagttggtatgtttatatgattcttcttcttgtggatataataaattatgttgatatgttttctcatagtgagcaccgggccattcttggtgtaaagctgacttgatgaaactctgttctttttagatgctgaatttcatgttaattttttattcagaattttagcacagtttttactcataaaagatatttatttatagggttatcttaggtactacactaatttttttatcaagttttgttattaagaacacattaattttagagaatgagttggggaaattctcatacacaaatacgtattacgttaaaattaaccgtaaagaaatattagtaggacttagctttgaagccagctgactctgggatctttttcaatggtaggtctttaatcattctttaaatgtctcctatggtagtaatatattaaaattttttcttcattcatggggagatgttggcattttgtatttgctagaaaattacaatttttttgtagatttcaacttcattgcctcagagttacacatgctactgacttattattcttataatcccttccatattcgtattttttcttccctgtatgctccccctgtttatgctccccctgtttatgctccccctgtttatgctccccctgtatgctccccctgtttatgctccccctgtatgctccccctgtttatgctcccactgtttatgctccccctgtttatgctccccctgtatgctccccctgtttatgctccccctgtatgctccccctgtatgctccccctgtttatgctccccctgtttatgctccccctgtttatgttccatcacacccatggagacctattttaattctttccaaataatcacctttaaaatttatattttctactacttttttcttatttttattaatttcagcaaatgtctttattgattctctctacttttaaaaaattttggctttattttcatagccttttttctaatttcttaagatcaagtagttagtactgctttagctatatctctacatataaatatatctagagagcaattattggattgctttctacatgtatttaattttaagttcaagttctaattttattaacatgattatgtagaaagatatattttggttcctaagtaattaaactatttttgctgttctttttattgtatttttctaattttattgcattatgatgagatactatcttgtccttttaaaattgatgtctaattctctgaggagtgtgttaaattcttctataatttttttttggggggaaacacatgtttgtgactgttatatagtcttaatcttgcttaatgttttaaaaagccctttaaatacctttaaactacttctttcttgaaattaatgttgtgattcctgctttcatcttgttgcctttgtctgaaatctctgcccgccccctgctacctctctgctcatgtgttctgtccatgtttaaaggctagccttgtgcat

SEQ ID NO: 464830 - DNA, 893 bp, Homo sapiens
tttcattgtctttttaaagtttgcatctcaaagtataagtcgcagaactgaacaggaaattccagcatgttcatcatggagaagtttgaagatgttctgctgctggctttgaagatggaggaagatggaggaaggggccacaaaccaagcaagcctcctctagaaattggaaacggtcgccagtgcgcacgcgcaagattaggtggggcgccagagccggggcacctgcgcaggcttggctgcgccctctcgcgccgcacgctctgcgggttcctcccttcttccgagcctctcctctggccgccgcgcgggagagaggccgagatggcagatgagattgccaaggctcaggtcgctcggcctggtggcgacacgatctttgggaagatcatccgcaaggaaataccagccaaaatcatttttgaggatgaccggtgccttgctttccatgacatttcccctcaagcaccaacacattttctggtgatacccaagaaacatatatcccagatttctgtggcagaagatgatgatgaaagtcttcttggacacttaatgattgttggcaagaaatgtgctgctgatctgggcctgaataagggttatcgaatggtggtgaatgaaggttcagatggtggacagtctgtctatcacgttcatctccatgttcttggaggtcggcaaatgcattggcctcctggttaagcacgttttggggataattttctcttctttaggcaatgattaagttaggcaatttccagtatgttaagtaacacacttatttttgcctgtgtatggagagattcaagaaataattttaaaaccgcatacataataaaagacattgttgcatggttacaagaaaaagaaacggagtagcacaagacaaa

SEQ ID NO: 464831 - DNA, 1661 bp, Homo sapiens
tttcattgtctttttaaagtttgcatctcaaagtataagtcgcagaactgaacaggaaattccagcatgttcatcatggagaagtttgaagatgttctgctgctggctttgaagatggaggaagatggaggaaggggccacaaaccaagcaagcctcctctagaaattggaaacggtcgccagtgcgcacgcgcaagattaggtggggcgccagagccggggcacctgcgcaggcttggctgcgccctctcgcgccgcacgctctgcgggttcctcccttcttccgagcctctcctctggccgccgcgcgggagagaggccgagatggcagatgagattgccaaggctcaggtcgctcggcctggtggcgacacgatctttgggaagatcatccgcaaggaaataccagccaaaatcatttttgaggatgaccggtgccttgctttccatgacatttcccctcaagcaccaacacattttctggtgatacccaagaaacatatatcccagatttctgtggcagaagatgatgatgaaagtagtgttgaatatctcatgtaagagtattttactgcatatcaccagtctggaaaaggatcagaattcgaagtatggtttctcctgaatgcatatcgccacaccattgtaaagttgaaaaatcataatttccccaacttacaatttttgtccattgtccatctgtacaatggaccttactgcatgagtaagcttcttggacacttaatgattgttggcaagaaatgtgctgctgatctgggcctgaataagggttatcgaatggtggtgaatgaaggttcagatggtggacagtctgtctatcacgttcatctccatgttcttggaggtcggcaaatgcattggcctcctggttaagcacgttttggggataattttctcttctttaggcaatgattaagttaggcaatttccagtatgttaagtaacacacttatttttgcctgtgtatggagagattcaagaaataattttaaaaccgcatacataataaaagacattgttgcatggcttatagtctctctgagtgttgcgtttgatttgttattttaaaaacatatttgttggaatatgtgaaggtgggtttataattttggatgtttcttgctttttcttcccaaggaggactcaacatatgaacatcgcattgttttaatggtgttactagtctttgaagacaaataatgagagtttataaatttagctttaacttcgaaatatctttccaggctaaaataggtccaacttagatttttaagctaattctcacattttctaagaacataggaaattgaccattttgggtttagaaacagtgctttatgttcagcccacattgcccctggactctgggcgtaatttggaagggatgaaagtaggtttgtcacacaatctttgatgaccatgtaaagccatacattggtatttccttgctgtttaaaccccatctgaatattataaagacttgaaaacattttacctagaattcatttttccaattgaaaccccactgttctaaatgtgtatgcacacattaataaacgtatttaagttgtgcacgaatctggctacgtcatatagagtaggaaagggaacttgtcagggtctgggttttcatgtagacc

SEQ ID NO: 464832 - DNA, 792 bp, Homo sapiens
caggaaacgtttactgaaccagctttaaaaccgtgctaattcataattaaatgttgtgaccaatataggtatctgctgtacaaaattttatatagatgctcatcaacttaagatgggcttacatgctgataaacccatcataagttgaaaatattgtatgtctgttgaaaatgcgtgtaagacacctaacttactgaacattatagcctagcctagtctaacttaagcttgctcggaacacttaacgttaacctacagttgggcaaaatcatctaatacagagcctattctgtaacagagtgttgaatatctcatgtaagagtattttactgcatatcaccagtctggaaaaggatcagaattcgaagtatggtttctcctgaatgcatatcgccacaccattgtaaagttgaaaaatcataatttccccaacttacaatttttgtccattgtccatctgtacaatggaccttactgcatgagtaaggtaagcagagtccactgtcctggggcttaataaggtaatgggaatagaaatgtaagactctctcccttccctcttttcttgccaaaggaattaaaggagttccctttcctgagagctttttagaatgttgaagttaaccctcccaacttttttctctcataatgggaaagcataagcagtgaaatgggagttaaagttcttttctcttgccaaccttctcccctttaacttttattagggaagaaagctggcaacatacaaatagactccatgtgtaaatagagacaaattgactgtagatagaa

SEQ ID NO: 464833 - DNA, 1817 bp, Homo sapiens
tttcattgtctttttaaagtttgcatctcaaagtataagtcgcagaactgaacaggaaattccagcatgttcatcatggagaagtttgaagatgttctgctgctggctttgaagatggaggaagatggaggaaggggccacaaaccaagcaagcctcctctagaaattggaaacggtcgccagtgcgcacgcgcaagattaggtggggcgccagagccggggcacctgcgcaggcttggctgcgccctctcgcgccgcacgctctgcgggttcctcccttcttccgagcctctcctctggccgccgcgcgggagagaggccgagatggcagatgagattgccaaggctcaggtcgctcggcctggtggcgacacgatctttgggaagatcatccgcaaggaaataccagccaaaatcatttttgaggatgaccggtgccttgctttccatgacatttcccctcaagcaccaacacattttctggtgatacccaagaaacatatatcccagatttctgtggcagaagatgatgatgaaagtgtcattactaaggaaaaaccagaaaaaccattaggacttcaactgcccagctgttttccaaagttactgcatcattttgtatcccaccagcaatgaatgagcgttccagcttctccttgggcaaaatcatctaatacagagcctattctgtaacagagtgttgaatatctcatgtaagagtattttactgcatatcaccagtctggaaaaggatcagaattcgaagtatggtttctcctgaatgcatatcgccacaccattgtaaagttgaaaaatcataatttccccaacttacaatttttgtccattgtccatctgtacaatggaccttactgcatgagtaagcttcttggacacttaatgattgttggcaagaaatgtgctgctgatctgggcctgaataagggttatcgaatggtggtgaatgaaggttcagatggtggacagtctgtctatcacgttcatctccatgttcttggaggtcggcaaatgcattggcctcctggttaagcacgttttggggataattttctcttctttaggcaatgattaagttaggcaatttccagtatgttaagtaacacacttatttttgcctgtgtatggagagattcaagaaataattttaaaaccgcatacataataaaagacattgttgcatggcttatagtctctctgagtgttgcgtttgatttgttattttaaaaacatatttgttggaatatgtgaaggtgggtttataattttggatgtttcttgctttttcttcccaaggaggactcaacatatgaacatcgcattgttttaatggtgttactagtctttgaagacaaataatgagagtttataaatttagctttaacttcgaaatatctttccaggctaaaataggtccaacttagatttttaagctaattctcacattttctaagaacataggaaattgaccattttgggtttagaaacagtgctttatgttcagcccacattgcccctggactctgggcgtaatttggaagggatgaaagtaggtttgtcacacaatctttgatgaccatgtaaagccatacattggtatttccttgctgtttaaaccccatctgaatattataaagacttgaaaacattttacctagaattcatttttccaattgaaaccccactgttctaaatgtgtatgcacacattaataaacgtatttaagttgtgcacgaatctggctacgtcatatagagtaggaaagggaacttgtcagggtctgggttttcatgtagacc

SEQ ID NO: 464834 - DNA, 1261 bp, Homo sapiens
tttcattgtctttttaaagtttgcatctcaaagtataagtcgcagaactgaacaggaaattccagcatgttcatcatggagaagtttgaagatgttctgctgctggctttgaagatggaggaagatggaggaaggggccacaaaccaagcaagcctcctctagaaattggaaacggtcgccagtgcgcacgcgcaagattaggtggggcgccagagccggggcacctgcgcaggcttggctgcgccctctcgcgccgcacgctctgcgggttcctcccttcttccgagcctctcctctggccgccgcgcgggagagaggccgagatggcagatgagattgccaaggctcaggtcgctcggcctggtggcgacacgatctttgggaagatcatccgcaaggaaataccagccaaaatcatttttgaggatgaccggtgccttgctttccatgacatttcccctcaagcaccaacacattttctggtgatacccaagaaacatatatcccagatttctgtggcagaagatgatgatgaaagtgtcattactaaggaaaaaccagaaaaaccattaggacttcaactgcccagctgttttccaaagttactgcatcattttgtatcccaccagcaatgaatgagcgttccagcttctccttgggcaaaatcatctaatacagagcctattctgtaacagagtgttgaatatctcatgtaagagtattttactgcatatcaccagtctggaaaaggatcagaattcgaagtatggtttctcctgaatgcatatcgccacaccattgtaaagttgaaaaatcataatttccccaacttacaatttttgtccattgtccatctgtacaatggaccttactgcatgagtaaggtaagcagagtccactgtcctggggcttaataaggtaatgggaatagaaatgtaagactctctcccttccctcttttcttgccaaaggaattaaaggagttccctttcctgagagctttttagaatgttgaagttaaccctcccaacttttttctctcataatgggaaagcataagcagtgaaatgggagttaaagttcttttctcttgccaaccttctcccctttaacttttattagggaagaaagctggcaacatacaaatagactccatgtgtaaatagagacaaattgactgtagatagaaccaaaaaacaaacaggatgacacagagcgagactaggtatttgccacaggatcctgcaagtcccgacaatg

SEQ ID NO: 464835 - DNA, 1664 bp, Homo sapiens
cctgttatttgcaggaccctgtcacccttggctaggccaggtatgttctgcaccgaaaatggccctgccctctgcattggatggctagctcttaggttggtttattttagcaaataagcgttacagggtaggcgaactggctgcatcagaaccacaattacccctgtgtctctgggtgggataaatggcggatggcattctggcagctcagccccacttatctcagaggttatagatctgaggtggtttagatccacccccaaatcacgaacattttacataagccgtgctagagttagcataaaagtctcacagaaaaatttggaaactgagaaatcctaacctattcccacaatcctgtgttcccatttttaggtcttaagatatgaagacaatgggataactgaggctgattttgctgtgtggccattagacctagaaatattggtgtgattctggagttgattgctccacacgtttatttatttattttcctttttttccctcctcttcctcctcctctattctttaaaaacgtatggaaatgtatccggcaatgtttactgtaaaaaataatgtatggaaatgactacaatttgctaaaataaaaatcattgagcacttatgtgtgtcagacactatgctaggtataaagaggggaagatggtgtccctattcaaaagagagtcacacacacttaagttacagtgcagtcataaataccatgatcgcagtatgcacaggtccattttctctatctgggtgatgggaaggttcaaaactaagctaggttttgaatgaggaatagtttcattttgaagcacatccattttgcgatgcctctggagctatctagtgaacaatttagatgcgtggttcagaagctcgatgggaggcttgggaacacagaatgtgtaaaataagcatcagtctccctttcaccctctctgcactttttaagggtcatctgtctttagtatatattggtagaggcagctctaatggcttccatttggccttcccgcttaatagccctcaccctaccagtgaggcagccaatgtgggagttctgccagctcctaagtatatctatgccaatgatgcattctggcactggggaaatgaccacaggatgagtccaggggcccactggacccactacaaaggtggaaaggctgatggcagcatgggtcgaggagaggatgctgctactactggggatggggaagctgttccttctggcaaaaaacgttcatcagagtttacaaactcagtgtccccgacttcatcagggtcctcccacaaatccacattccaagtttcagggtcccagtcttttcccatgaatgccctcactttaacagtagacacctggcaaagctgtacatgtatctttcattggggagaagattgctagcttgtcgtgctccttggagacattttgtagcataagctcttatatttaggtctatgatgcatatcaaattaattttcacatatggtgtgaggtcctaaactgcaaccatctctaaccatctgattaggtttccatgaaccaagcctcagatcgtccatgaatcatgaccattgagtcaacatagcacagggatttcaactttttgtaaagaaaatgttcacgaggtgaatctttacatgttcatttt

SEQ ID NO: 464836 - DNA, 1465 bp, Homo sapiens
ggtaggcccagagcgaggacgggcccggactgggtagtggggatgtaccagggccgggtgcggcgggagacggcccgggaggcggaaggtcgcggacctgcccgacagaagagtagatgaggggagaccgaggacgcccgggtccggggagcttacgaggaggccaggatcgcggggtcttaagatatgaagacaatgggataactgaggctgattttgctgtgtggccattagacctagaaatattggtgtgattctggagttgattgctccacacgtttatttatttattttcctttttttccctcctcttcctcctcctctattctttaaaaacgtatggaaatgtatccggcaatgtttactgtaaaaaataatgtatggaaatgactacaatttgctaaaataaaaatcattgagcacttatgtgtgtcagacactatgctaggtataaagaggggaagatggtgtccctattcaaaagagagtcacacacacttaagttacagtgcagtcataaataccatgatcgcagtatgcacaggtccattttctctatctgggtgatgggaaggttcaaaactaagctaggttttgaatgaggaatagtttcattttgaagcacatccattttgcgatgcctctggagctatctagtgaacaatttagatgcgtggttcagaagctcgatgggaggcttgggaacacagaatgtgtaaaataagcatcagtctccctttcaccctctctgcactttttaagggtcatctgtctttagtatatattggtagaggcagctctaatggcttccatttggccttcccgcttaatagccctcaccctaccagtgaggcagccaatgtgggagttctgccagctcctaagtatatctatgccaatgatgcattctggcactggggaaatgaccacaggatgagtccaggggcccactggacccactacaaaggtggaaaggctgatggcagcatgggtcgaggagaggatgctgctactactggggatggggaagctgttccttctggcaaaaaacgttcatcagagtttacaaactcagtgtccccgacttcatcagggtcctcccacaaatccacattccaagtttcagggtcccagtcttttcccatgaatgccctcactttaacagtagacacctggcaaagctgtacatgtatctttcattggggagaagattgctagcttgtcgtgctccttggagacattttgtagcataagctcttatatttaggtctatgatgcatatcaaattaattttcacatatggtgtgaggtcctaaactgcaaccatctctaaccatctgattaggtttccatgaaccaagcctcagatcgtccatgaatcatgaccattgagtcaacatagcacagggatttcaactttttgtaaagaaaatgttcacgaggtgaatctttacatgttcatttt

SEQ ID NO: 464837 - DNA, 2760 bp, Homo sapiens
gcaaaaagcgctcgtgcccacctcaagcccatgttcggtgggtggcgaatgcgtgcccgtgatctgctgggtctgtagaggagcgcaggcctggtgcaaacagactcaagaggctcggagaaccagcttggagttcacagttaccagccaagaaaacttgaaaatgagcagccgacggaaacgtgctcctccagtgagggtagatgaggaaaagaggcagcagcttcattggaatatgcatgaggacagaaggaatgaacctatcatcataagtgatgatgacgagcagccctgcccaggttcagatacctcttctgctcattatatcattctaagtgatagtctaaaggaagaagtggctcacagagataagaagaggtgttcaaaagtggttggaatttatcttttggaagctggcctagcaaaactagacttcttgagtgatgcaaattcaagaatgaaaaagttcaatcagctcatgaagaaagtaatggaaaagttacacaattctattattccagatgtgttggaagaggatgaagatgatccggagagtgagccagagggacaagacattgacgagctgtatcactttgtgaaacaaacacatcagcaagaaacgcagtccatccaagtggatgtccagcatcctgcattgatccctgtgttgagaccctaccaaagagaggctgtcaattggatgctacaacaagagtgtttcagaagcagtcctgctactgaaatccagaatatcgaatttgaaccaaaagaaaaagttcaatgccctcctacacgtgtgatgatactgacagctgtgaaagaaatgaatggaaaaaaaggagtgtccatcctttccatctataagtatgtcagttctatatatagatacgatgttcaacggaacaggagtcttttgaaacggatgctgaaatgtttaatttttgaaggtctcgtgaaacagatcaaaggccatggtttttctgggacttttacattgggaaagaattacaaggaagaggatatatgtgataaaacaaaaaagcaggcagtagggagtccaaggaaaattcagaaagaaactagaaaatcagggaacaaggacacagattctgaatacttgccatcagacacctctgatgatgatgatgatccttactattattattataagtccaggagaaatcgcagtaaattgaggaaaaagcttgttccatccacaaaaaaaggaaaaagtcaaccatttatcaatcccgattcacaaggtcactgtccagctactagcgactctggaataactgatgttgctatgtctaaaagtacatgtatctctgaattcaaccaagaacatgaaacagaggactgtgctgaatctctaaatcatgctgatagtgatgtaccaccttctaataccatgagtccctttaacacctctgattaccgctttgagtgtatatgtggtgaacttgatcagatagatcgtaagcctcgtgttcaatgcctgaagtgtcacctgtggcaacatgcaaagtgtgtgaattatgatgagaaaaatctgaagatcaagcctttttactgcccccactgccttgttgcaatggaaccagtgtcaacaagagcaactctgatcatctctccaagttccatctgtcaccagtgggtggatgagatcaacaggcatgtgaggtcgtcatctcttcgagtcttggtatatcaaggagtgaagaaagatggctttttacaacctcattttttggcagaacaggatatagttatcattacctatgatgtactgcgttcagaattaaattatgtcgatatcccacatagcaatagtgaggatgggcgtcgcctacggaaccagaagcgctatatggctatcccgagccccctggtagctgtggagtggtggaggatctgccttgatgaagctcagatggttgagtgtcccacagtaaaagctgcagaaatggcccagcgtttgagtgggattaatcgatggtgtatcagtggcactccagtacagagaggattagaggatctttttgggttagtggtctttcttggtattgaaccttactgtgtcaaacactggtgggttcgacttctctatcggccttactgcaagaagaatcctcagcatctctacagctttattgccaagatactgtggaggtctgcaaagaaagatgtgattgaccaaatccaaataccaccacaaaccgaagaaatacactggctccacttttctccagtggaaaggcatttctatcaccgtcagcatgaggtgtgctgccaggatgtggtggtaaaactcaggaagatttctgactgggctctgaagctcagcagcctagacagaaggactgtcacctctatcctcaccatgacaatggaagagctgctgacatctttgcagaagaaatgtggaactgaatgtgaagaagcacatcgacagctagtttgtgctctcaatggcttagcaggcattcatattattaaaggtgagtatgccttggcagcagaattgtacagagaagtgttgcgctcctcggaggaacacaaaggaaaactcaaaactgattcacttcaagaaaagtatttggtgatatgatcttaatgtggtgttagtgttctgtgtgccatattaatattaggttctcttcagagtcttctgcattgactgtcataattactgcctttgatatgtttgtagagacttcatgctacccataacttgatggaattgttgatagccaggca

SEQ ID NO: 464838 - DNA, 1346 bp, Homo sapiens
gcgcggggcgcggcggcggcaccaggcggttcgactggagccctgcgtcagccggcggcacgcgcacacctgcccgccgccgctaccggccgcgtcattggctgccggcgccgagcgcgcgagattgaaccttccattcattccagggccgggcgggcgagcgcggccgcggtggagctttaccgcgggcgcccccgaacccccgaagcgcgtccccgcgcaggccgtgggcgcgcacggccgctgccgccgtttgttctggtggaggctgcgagtgcctgggcctgtgactcccggctctccgcgcgcagcatgccctggacatcattccgaacagcacaattcaagggtggctgaaacaacaaaaatgtaacgtcttacagatctgaaggcttccgggtcgattctggactgtgatgagaatctgtgccaagcctctctcctggcttctggtagactcgggcattccttagcttgtaaatggctgctgcttgtgtcatcacattgtcttccctttctacttatctgtccccatgccccaatttttccttttcaggacaccagtcagattaggacccaccctaatgatctcatcttaacttgattaactacaaggaccctatttttaagtacacatttacagagactggggggtaggacttcaacatctttttggagggatgcagttcaacccataacaagaatcattgttagaaatgattttgcttcttcactgaaaaattaatatcattctgcagagaactgacttgctgcacatggcacagattttttgcatttatcataggctgcatttcacacaactaatgaaaaacaaggttaaaaagaacaaagctggtggcatcacattacccaacttcaaactatactataaggctaaagtaaccaaaacagcatggtacaagtacaaaaaacagacacatagaccaatgaaacagaatggagaacccagaagtaaagctgcacacctacagccatcactacaaaactttgatgtacaaattaaagtatacaatacattattagtaactatagtcaccatgccatatgttagaccaccagaacttattcattttataactgaaagtttataccctttgaccaatatcacttcatttccctgcccccagcccatggcaattactattctgctctgtgcttctatgaattcatttttttaagattccacatgtatttgaagttacttgggtgttgtgatctaagtttttggtcactgcagtcatatctgcattatagggcaccccaatctcagtaaagctatggctcttgcacacttgtagaggtactgccttgctgttctttgatac

SEQ ID NO: 464839 - DNA, 1960 bp, Homo sapiens
  misc_feature (550)..(551): n is a, c, g, or t
  misc_feature (556)..(556): n is a, c, g, or t
  misc_feature (560)..(560): n is a, c, g, or t
  misc_feature (562)..(563): n is a, c, g, or t
ctgctccaggcctctctccgggaggcgaggcggctccgggcaccttgtctccagctgaggctgagcgagcacgcctttgtttagggccccttgtctcggcctgtgtcagagcttgcaggggcgttgggcctctctctgcagggaggactggttttagaggactcccgcttcccccagttgtatcagttcaggtgtaaacccgatatgcaataggatccggcgtggtgtccacactcattagacacatggcatcgtttccaaagatacaggcccccgcacttcagcttgatgccagagggcttacacgtaaactctgcttgacttggaaatcaaagagaggtgagaagagttcagattttctcctgctgaggtaggaggctcgccaagagacaagactggactcataaggtctgcaactggctttatctagttaatagcagcctttgacatcacaaaacatgctatttccttgtgttcatgtctttaagaggagccacggtgaaagcaaacattaaagattttaatctaacaaaaatgtggagtgaaattnnttttnctgnanngattttagcagagaaaaatctggtgcacctaatattagattacagcaaagagagtgagaatggtgtttgttcagaaaagccctcagcatcattgcgaaccattcaggcagcacgggagcttctggaggtgaaggtgtctggtgaggctgatcagacatgggctgagtctccaagttctcatgcacacatgtgcttcctgcgcttggacttctctcctccaggctcagccaatctcaggggaaacagcactccggcaggagtgactccttctcccacagactccttgcagcacacacagacgtttccagtgattcccaagaaaggttaaatttacaagaacatagtcaccactttctattttttatacattttataaaattgagtgtgattttggaacacagacagacattcaaaagatcatactactagaaacattatcatcctgccacccatttagctcagaatctttgagttaggtgagttattttacataaaccataaaattttatcaattgaatttaacaattgtaaaggtaatcccatactatactcaccaatagctaatggctattttaaaaattgtgggatctaatttttccctctattcattttacttgtaataatgtaatctcagtatagcacactggggctaattaattaggacagttcaagttggaatatagttacctgttaatgaaaatgcttgatttcagaaatgatcacctattcaatgacatatgagaattataacacataatttatatttataatataacaattacttgatttcatcatttaaagatattttataaaagtgattcctaatagaaaacaataatttaattttaaaaacataaatcaagaaagtaaacattgtaaagtcaacagcaacttaattaatgtcagtgttttcaatacaatgtattattaagggaactgagcatattaaaataatacatagtatacataagaggacataattttaaaaattgacaatttatgacataatatttactcaaaaactcaattgaatgcctatatgtatattaaaatatatgtaggtccctaattttcaaaaataacttaaatgctgtttataaaatttgtagtccattatctattatctaaacaaatgcaaagagcaagaaactttttttgtacaagcaaatatcaagttacagcacagttaataatttccatttattgtatataacttgaatattgtacctctataaaaattagtcataactttctattcagaatttttatttaaaaagtagagattttattacaaatcatttaacttatgttaattcctcttttgtgttaaattttaaaactgaataagaagttaaataaaaactcaaagaatttctatttgtgtcattccatcagat

SEQ ID NO: 464840 - DNA, 3922 bp, Homo sapiens
ttgcagtgagctgagatcccgccaatgcactccagcctgaactttgaccagaataagctggaagaagaaatgagaaagcgaaaagaaagagtagaaaaatggcgagaagagcaacgtaaaaaggctatggaaaacataggagaactgaaaaaggaaatcgaagagatgaaacaagggaaaaagtggagtttagaggacgatgatgatgacgaagatgatcctgcagaagctgaaaaggagggaaatgaaatggagggtgaggagttagatccattagatgcttacatggaagaagtgaaagaggaagtaaaaaaatttaacatgagaagtgtaaaaggtggtgggggaaatgaaaagaagtctgggccaacggtcacaaaagttgtcactgttgtgacaaccaaaaaagcagttgtggattctgataagaagaaaggtgagctgatggagaatgaccaggatgccatggagtattcttcagaggaggaagaagttgatcttcagacagcccttacagggtatcaaacaaaacagcgaaagcttctagaaccagttgatcatggaaaaattgagtatgagccatttaggaaaaacttctatgttgaagttccagaactagcaaaaatgtctcaagaagaggtaaatgtgtttcgattggaaatggagggcattacagttaaaggaaaaggttgccccaaaccaattaaatcctgggtccagtgtggaatttccatgaagatcttaaattccctcaagaagcatggctatgaaaagcccacgcccatccaaacccaagctattcctgctataatgtctggacgagatttgattggcattgccaaaacaggaagtggaaagaccattgcttttctgttgcccatgtttagacacatcatggatcagaggtcattagaggaaggagaggggccaatagctgtcatcatgactccaactcgagaactggctttacagattactaaagagtgtaagaagttttccaagactttgggacttagagtggtctgtgtttacggaggaacaggaatcagtgagcagattgctgagctgaaaagaggtgctgaaattattgtttgcacacctggtcgaatgattgacatgttagccgctaacagtggtcgggtcacaaatcttcgaagagtgacatatgttgttttagatgaagcagacagaatgtttgacatgggttttgaaccccaggtcatgcgcatcgtggataatgttcgtcctgatcgacagacggttatgttttcagctactttccccagagctatggaggctttggctcgcaggatcctcagtaaacctattgaagtacaagttggaggcaggagtgtggtttgctcagatgtggagcaacaagtgattgtgattgaagaagaaaagaaattcttgaagttacttgagcttctaggccattatcaagagtcaggatctgtcattatatttgtggataagcaggaacatgctgatggtcttcttaaggatttaatgagagcatcttatccttgcatgtctcttcatggagaggatcaagctcgctatgctggtgacataattaaagctcttgaattgtcagggactgcagtacctcctgatttagagaaactgtggagtgatttcaaagatcagcagaaagctggattcaagtttgatgaaacagaacaagctttggctaatgagaggaagaagttacaaaaagcagctcttggtctacaagattcagatgatgaggatgctgcagttgatattgatgagcaaattgaaagcatgtttaattcaaagaagagagtaaaggatatggctgctcctggaacatcaagtgttcctgctccaactgcaggaaatgctgagaaattagaaattgctaagagattggctcttagaatcaatgcccagaagaatttgggcatcgagtctcaggatgtgatgcagcaggccaccaatgcaattcttaggggtggcaccattctggctcccactgtttctgcaaaaaccattgcagaacaacttgctgaaaagatcaatgccaagctcaattatgtgccgttagagaaacaagaagaagagagacaggatggtggacagaatgaatcttttaagagatatgaagaagaattagagatcaatgacttcccacaggcaagtaacaggtggaaagttacctctaaggaagctctgcagagaatcagtgaatactctgaagccgcaattacaatcagaggaacctacttccctcctggcaaagaacccaaggaaggcgagcggaagatttacttggcaattgaaagtgccaatgaactggctgtgcagaaagcaaaggcagaaatcaccaggctcataaaagaagagctgatccggctgcaaaattcataccaaccaacaaataaaggaagatacaaagtcttatagacatccggaaaaaagatttttacctgtgctggtctatgatgtatgtggcagttgctgtctgcagtttacaatgtattgtaaatgaagattttttaaattctatcttgctgattttttttaaatataagaaactggtacttggtaaagaaatctgtccgtaagtacccccacaatcagtcaaactatatttaaagccagcctgttttcagagtatgatgtcctttaatgtaaactcaaatatcaatattttaaatgtccggataatattctagaggtttaaaaaatggaaatatttgaactttctattgaagacaataaagtacacaagtcgttaaggggctattcactttatcctgtactttcaatgaaattgtgatcatttcctaagaaaaggtaaaattcactatcatattttgtgtccccaccttgatgttacatgactctggaacaatatgaactggatttaagaatgttataatagaagtcttacaaaatgggttgagagtttttgtttcaatttttatcatcataaatgggcaaaaagtagttggactaatttcggtttttatacaagtaaagatttaatagtataaggatttttttgcatttctttacactgagtgtaaaactctacaaagagttatagtatttactactttgaggtttccctcacaacttctggctccatacctagcccctcttttataatcttccttaaaagaaagagtgtagcctataaatactaaatatgataccttttccttctagaaagtgtttatttatatatctatacatgttgtatgtacaaatatcctactacttttaatctgatttttcttcaggattattgagtaggttgtgaattttctttcttaaaaattgtaaaacataatggtacccaagttttaaacttagatgtgcttcatcttagtgaaatttaattcacaaggaatcataaattgtgtttttgaggctgggcgcagtgactcacacctgtatcccagcaatttgggaggccgaggtgggcagatcacttgaggtcaggagttcaagactagcctggtcaacatggtgaaaccctgtctctactaaaaatacaaaaattagtcggcatggtggtgggtggctgtaatcccagctactcaggaggctgaggcagaagaatctgagccaagataacaccattgcactccagcctgggcgacagagtgagactatctcaaaaataaataaataaataaataaatagtatttttgagccttcaagatacagttcctgaatattctaatttaaattgttataattggattacctaatattcttttcaagactcctgatgtattaacttcatgttattgtcacttttcaaaaaaggaatttttttcaggagttaaataaagtcagtcttttatatccaagggtttcaaacccacagattaaaccaaccacagatcaaaaatagaaaaaaaaaaaaaaagaaaaaaagaatgt

SEQ ID NO: 464841 - DNA, 3588 bp, Homo sapiens
  misc_feature (1)..(1): n is a, c, g, or t
  misc_feature (3)..(4): n is a, c, g, or t
  misc_feature (9)..(10): n is a, c, g, or t
  misc_feature (14)..(15): n is a, c, g, or t
  misc_feature (17)..(18): n is a, c, g, or t
ntnnaggcnngganncnngtgagggggtggcctgaaatggctggggagtaaactgaaactgcagctggagggacagaaaccggaggagtgggatcagggacaaccagaagagtgacgcaagcaggggagggacctgaaacggaaatgggagccggagggaggggttggcttctggctttctcctcctggagtctaaagggtgaagaaggacaggtccctgctgccaacagagggcataatcgatttcttccttggagacagggctcttatcattaacacgctcgattaagagctgacaaatctgctcctcattagacctaaattttggccagaaaactgaatacacagtgtatcacagtgttgcttctaaaaccggggaatcagggagttgaccaggaacaaagcagggccatcatgactgaaggaagaaaaacaaatggaaagctaaactatgtaagcatccagggagtctgtgagattaagcagaagaaaaatatatttactattcatgaagtggaagtggatcatcataaaggtcttcatcctcaccatcttcatgtggttgaggaggaggagaaagagaagggctcagactctccttgggtggggcttgctgtggctgctgtggtggatgggggtgtggttcttaggccaatggagttatgttcccagggagattatgactacctctgctgcgtcatgcagaacctcatttctaagaagcgtcttgtggaaccagtgttatgtgaaatatattttggaaaatttggcctgggcaaggggaagccagtgaatgttttaaggagggtgacatggtccaaaatattttatagggccttctcttggcaggaatatgatttgatgagaaagaggctagaggcccagagaacagatgagagctcattggcatcagcacttggacatttaagggaactctgtatcaaagctgagatgtggctggagctttaagataggtgacattccttacttaaggggaatatttatatccactaattttcaattttgagggatctcataaagggtagaaaaccatgatggcaacaacatccctccaaaaaaaaaaaaaccacccttgaatcgtgtttatatatatgtatgtatgtatatgcatatgtgcatgcctgtttgtgtgtttattaactccagaaaatggctacttgtggctgagcagaatgataagagaggtgatacatttgagatgtaaacttgtcagagggctgaaaattctatgtgaccattaccaaagcacacaagtgggatgagggatgctgtaatttctcatctggattctttagctcttataaaagcattttttttgcatgaatagttgttttaaattgatgtttccaagagaggataggagctgaaaacttctgttccatcgttgccttagtatattttgagctgttataacagaatgccacagactggatgatttataatgaacagaattttttttgtcccacagttctggaggtcagtaagtccaatatcaaggtgccagcatcaggcattatggccagcacacttcctgcgaatttgtaccaccaccccttatctcatctatgcttctgctcacagcactgcactggagccaggggatggatacctggcacttgtatgtcctatgaagaaagagaggaggatacattgcttccctatgtatccttaagggatagaccagaggaaaagttaagtaatagataaacaatcaataatacctaattggtttcccaatcaattagcacttactgtgttggatttgttcactttcagccatagttacaccttgaatttctgtatttccaaagtgggctcttttttttctaaggaatttcctcaattttttcgtgtaagtaggcttctgaggagtctatttcactgatttttgtgatatatttaatcattccagggctacaaaatttaagctgaatttaaattattcataatataacaatctctcttcctctgtctctctttctttctatatctttcattacatatatgtaataaaatattttcattatatatctgtatatcttttatagaaatcttttcattatatatttcatatatattcatgtatctttcatacattatatatattcacatatatatctttcatatatattcatatatgtttcatatattatgcatattcatatatatctttcatatttctatatttttttttattacatttctagtctcactcctcaagtcctcaaggtcagatactaattcctagagcatggtgatgaaattccaggctagatagacctaagttcaaatcatagttcagctgcttactaattatgtgggccttgacaagttacttatcttttttaagttgactaatatttaaagtaaagataagaacttttttaagttgactaatatttaaagtaaaaataagaacacgacctgacttgtagggtggtagtggaactgagtaagctaatgcatataaaatcattaagaatagaatccagcatataatgtgtgcttcataaatgttagttactgtgattgttgttatttttgcctggattatagcagaattgtcttaacaggtctcctaatgtttatttggagctcttctagttcattctccacactgctgtcagagtaatctttccaaaaattaactgtgattgtgccattcctctgcttaaaaccaattgattttcatagtttttatcgtaatatttagatgccttagcctggcatgcaggcccgttgtaatctcctgctgtctctttagttttgtctcctaccggtcttccccaaattttcattgctcttaacataaacaaatacttaaatttttctgaaagcagcatgctcttttgtttctcctggatgttgtgtatattaactcctattcatagaacacctttgtcctcattttcctctgtttaatttctactcatttttcaaaaccctgtaaaagtatcacagcccctaagaaatcctctaattccctgaatttgactgaggggacctcattctctgctttgctaggcacttgtccacagtctgtcttaacacttttcatatggtgcaattatctctttcctatccgtggacccttttatattgaaagttctccaaggacaaacagcatgtgttatcttatgtcttcaatgcttataagctgccttggaaacaataggtacatgtttgctgaataaatgtctggtagaagaagtcatatcaataagcataattttttaaaagaaagttgtaggcttcttggactcaagtctgctatttagaggaaccatagccaagaatatcctagaagcatggaaagtttattaaattattattagcttttgttattgtacaaaaatcagcatggatcaaattataatacttcagcatagatttcaggatttttttttctttacaaagcctagaaaataagcaattctaaataagtaagtaataaatatttccaataggttagcttacatttgaatcttgtataaaattgaattgttccaatcccttttatttaacatatagcaactcctcagagacctaaggacagaaataccattc

SEQ ID NO: 464842 - DNA, 2059 bp, Homo sapiens
ataccggggggccagtgccatgctgctgagggatgtcccaggctattgcctctacttcatcccctacgtgttcctgagtgagtggatcacacctgaggcctgcacaggccccagcccctgtgccgtgtggctggcgggcggcatggcaggtgcctgtgctcatgcccagctcctagtaagagctcagtcagtaccgactggcagagaggacggcaaggccccatttgctctcacttttgcagagagcagagtaaatcctgccctcagtgagctgcaaaccttcagcctcatgcctcaccctgggctctcttctggtgccctgggaaggtgctcccaagtacctgtggagcctgttactctttctccaataaaaactgctaataaatactgccacgtctcgagcactggctgtggactggcacttgctcaatgcttcacgttcatcaattcatttggtcctcaaaacagccccataaagataggagcaatttcttgggggacagcgactcctatggatgtcgtgaaaagtcgactccaagctgatggggtttatttaaacaaatataaaggtgtcctggactgtatctcccagagttaccagaaggaaggtcttaaagtgtttttcagaggcatcactgtgaacgcggtgcggggcttccccatgagtgcggccatgttccttgggtacgagctgtcgctgcaggctatccgcggggaccacgcagtgacgagcccataagcgccagggtctcatcccattaacaggtcaatgctaaaagtgtctgcagaacccatgatgtgaatttactgaagagaaagactctccaccaggtgggctttcagccaggcaggctgtcctcagaacctcttccttccttcacaattacaagcattctcatccccaccccggctggggcagcggagcttctgccttggagggattcaactgaccattggtcaactgatcaccaactattccagctttggacctgcacctggtaacaaacaaacgaacagaacaaaacaaaactggagtaaaatagaccctccccccatggccattgtaaactcactgtgaattcatggaagagctggagttggctctaagtttcaaaataaaagcattaaaaacctcttcacattgtttctctgtcagatgcctctgcctagcttccaagaggcacctggccactgtcattcctctctctctgttcaggcctctgtgggtgttgcaggcccagagggaaaacccctccacacaggtgtctgagcttttcctagtttctattaatcatcatggcacctcttgatggtagaaggaggcatgcagagagaagcattgctgatccagttcacagatgaaggaactgaggctccaacatacctgagccccagctcaggactttaccaccaatcccatttgataatcttcctgaggctacacttccctgctgtccagcccaggcagcatccatggtccttccaccaacgtgacccctctggcactgtgtccctccctgtgctacagtcatgtctgtgcaccctctctttctcactggcctgtgccccccttcagagccagggctgagtcttcccaatccttagattcagcatagcagcaagaatgaacagggtttagaataaaggaagcataaattaatgggcaaaaatgcaagcatgaccatgttaattgagaattgtttgtaataatgaaaattcagaaagtttctaaatgcctatcaatagaagagggggttgaacaaacagccactaaaaagaatgagatagatctcacatatattgtcatggaaatatgtcagcaacattgtaagtgcagaaatggaggggcagaataacatatatgatgttattcattttcattttaaaatatatatcgtatatggggtggcttctgtataagcatcttcagtcccatttggtccctgtcccgtggtccgagcctgacatatgtgcccatcccaaggcctctccagccttaccatcctccaagacacatcagtgcccctctctgccctgtgtgaaaatctttggtttctcc

SEQ ID NO: 464843 - DNA, 1481 bp, Homo sapiens
cagtttttccgtcggtttgtcagccccatctatttcgagtgtttttcagaggcatcactgtgaacgcggtgcggggcttccccatgagtgcggccatgttccttgggtacgagctgtcgctgcaggctatccgcggggaccacgcagtgacgagcccataagcgccagggtctcatcccattaacaggtcaatgctaaaagtgtctgcagaacccatgatgtgaatttactgaagagaaagactctccaccaggtgggctttcagccaggcaggctgtcctcagaacctcttccttccttcacaattacaagcattctcatccccaccccggctggggcagcggagcttctgccttggagggattcaactgaccattggtcaactgatcaccaactattccagctttggacctgcacctggtaacaaacaaacgaacagaacaaaacaaaactggagtaaaatagaccctccccccatggccattgtaaactcactgtgaattcatggaagagctggagttggctctaagtttcaaaataaaagcattaaaaacctcttcacattgtttctctgtcagatgcctctgcctagcttccaagaggcacctggccactgtcattcctctctctctgttcaggcctctgtgggtgttgcaggcccagagggaaaacccctccacacaggtgtctgagcttttcctagtttctattaatcatcatggcacctcttgatggtagaaggaggcatgcagagagaagcattgctgatccagttcacagatgaaggaactgaggctccaacatacctgagccccagctcaggactttaccaccaatcccatttgataatcttcctgaggctacacttccctgctgtccagcccaggcagcatccatggtccttccaccaacgtgacccctctggcactgtgtccctccctgtgctacagtcatgtctgtgcaccctctctttctcactggcctgtgccccccttcagagccagggctgagtcttcccaatccttagattcagcatagcagcaagaatgaacagggtttagaataaaggaagcataaattaatgggcaaaaatgcaagcatgaccatgttaattgagaattgtttgtaataatgaaaattcagaaagtttctaaatgcctatcaatagaagagggggttgaacaaacagccactaaaaagaatgagatagatctcacatatattgtcatggaaatatgtcagcaacattgtaagtgcagaaatggaggggcagaataacatatatgatgttattcattttcattttaaaatatatatcgtatatggggtggcttctgtataagcatcttcagtcccatttggtccctgtcccgtggtccgagcctgacatatgtgcccatcccaaggcctctccagccttaccatcctccaagacacatcagtgcccctctctgccctgtgtgaaaatctttggtttctcc

SEQ ID NO: 464844 - DNA, 1979 bp, Homo sapiens
aggcggcagtgtccgctgcaacggttggggctgcgcgtgagaaggtggcggtgtaggcacctgcgctcggggaaggctggcggcggcggccgggccatggccagagaccccctcctctgggctccctgaagtcctggggagccgtgacccatgggatcgtcgagcagccgggtgctgggccagccgaggcgagcccttgcccagcaggaacagggtgccagggccagggctcggcccggaggccggacactggagacgatgcggcgagctacggcttctgttactgcccgggcagtcacaagcgcaagcggagcagcggggcctgccgctactgtgacccggactcgcacagggaggagcatgaggaggagggggacaagcagcagccgctcctcaacacccctgcaaggaaaaaattaaggagtacatccaaatatatttatcaaaagcatttacttcttttggaaacttggggttggaacaaagagccaagggttgggaaccacttttcacggaatttttgctgggctttctaggagaagaatggcgattacacaaaatatatttatgtcaatctggctacttttctagtatgttcagtggttcttggaaagaatccagcatgaatattattgaactggagattcctgaccagaacattgatgtagacgcactgcaggttgcgtttggttcactgtatcgagatgatgtcttgataaaacccagtcgagttgttgccattttggcagcagcttgtatgctgcagctggatggtttaatacagcagtgtggtgagacaatgaaggaaacaattaatgtgaaaactgtatgcggttattacacatcagtagagatctatggattagattctgtaaagaaaaagtgccttgaatggcttctaaacaatttgatgactcaccagaatgttaaactttttaaagaactcggtataaatgtcatgaaacagctcattggttcctctaacttatttgtgatgcaagtggagatggatgtatacaccactctaaaaaagtggatgttccttcaacttgtgccttcttggaatggatctttaaaacagcttttgacagaaacagatgtctggttttctaaacagagaaaagattttgaaggtatggcctttcttgaaactgaaccaggaaaaccatttgtgtcagtattcagacatttaaggttacaatatattatcagtgacctagcttctgcaagaattattgaacaagatggtatagtaccttcagaatggctgtcttctgtgtataaacagcagtggtttgctatgctgcgggcagaacaagaccatgaggtagggcctcaagaaatcaataaagaagacctagagggaagtagcatgaggtgtggtagaaagcttgccaaagatggtgaatactactggtgttggacgggttttaacttcggctttgacctacttgtaatttacaccaatggatacatcattttcaaacgcaatacactgaatcagccatgcagcgggtctgtcagtttacggcctcgaaggagcatagcatttagattacgcttggcttcttttgatagtagtggaaaactagtatgtagtagaacaactggctatcaaatacttatacttaaaaaggatcaggaacaagtggtgatgaacttggacagcaggtttctgaccttccctttatatatctgctgtgagctcatccagtttcctggcatgaaatcccacctttatgaaaatgattcaaatctctttctctaatctggtcttttcccctgagctccacaaatagtcttcctctccacttcctgatacattgttcttaaaacctgaggaatctccagagagaaatacaaatatagccttctacctccccgtcaccagactcctcccagggaaagtgtatctaactatgggctccaagacagaacaaaccaagggttaacagttgatttgcaaactgaagcatgcc

SEQ ID NO: 464845 - DNA, 1938 bp, Homo sapiens
aggcggcagtgtccgctgcaacggttggggctgcgcgtgagaaggtggcggtgtaggcacctgcgctcggggaaggctggcggcggcggccgggccatggccagagaccccctcctctgggctccctgaagtcctggggagccgtgacccatgggatcgtcgagcagccgggtgctgggccagccgaggcgagcccttgcccagcaggaacagggtgccagggccagggctcggcccggaggccggacactggagacgatgcggcgagctacggcttctgttactgcccgggcagtcacaagcgcaagcggagcagcggggcctgccgctactgtgacccggactcgcacagggaggagcatgaggaggagggggacaagcagcagccgctcctcaacacccctgcaaggaaaaaattaaggagtacatccaaatatatttatcaaacattatttttgaatggtgaaaacagtgacattaagatttgtgctctaggagaagaatggcgattacacaaaatatatttatgtcaatctggctacttttctagtatgttcagtggttcttggaaagaatccagcatgaatattattgaactggagattcctgaccagaacattgatgtagacgcactgcaggttgcgtttggttcactgtatcgagatgatgtcttgataaaacccagtcgagttgttgccattttggcagcagcttgtatgctgcagctggatggtttaatacagcagtgtggtgagacaatgaaggaaacaattaatgtgaaaactgtatgcggttattacacatcagtagagatctatggattagattctgtaaagaaaaagtgccttgaatggcttctaaacaatttgatgactcaccagaatgttaaactttttaaagaactcggtataaatgtcatgaaacagctcattggttcctctaacttatttgtgatgcaagtggagatggatgtatacaccactctaaaaaagtggatgttccttcaacttgtgccttcttggaatggatctttaaaacagcttttgacagaaacagatgtctggttttctaaacagagaaaagattttgaaggtatggcctttcttgaaactgaaccaggaaaaccatttgtgtcagtattcagacatttaaggttacaatatattatcagtgacctagcttctgcaagaattattgaacaagatggtatagtaccttcagaatggctgtcttctgtgtataaacagcagtggtttgctatgctgcgggcagaacaagaccatgaggtagggcctcaagaaatcaataaagaagacctagagggaagtagcatgaggtgtggtagaaagcttgccaaagatggtgaatactactggtgttggacgggttttaacttcggctttgacctacttgtaatttacaccaatggatacatcattttcaaacgcaatacactgaatcagccatgcagcgggtctgtcagtttacggcctcgaaggagcatagcatttagattacgcttggcttcttttgatagtagtggaaaactagtatgtagtagaacaactggctatcaaatacttatacttaaaaaggatcaggaacaagtggtgatgaacttggacagcaggtttctgaccttccctttatatatctgctgtgagctcatccagtttcctggcatgaaatcccacctttatgaaaatgattcaaatctctttctctaatctggtcttttcccctgagctccacaaatagtcttcctctccacttcctgatacattgttcttaaaacctgaggaatctccagagagaaatacaaatatagccttctacctccccgtcaccagactcctcccagggaaagtgtatctaactatgggctccaagacagaacaaaccaagggttaacagttgatttgcaaactgaagcatgcc

SEQ ID NO: 464846 - DNA, 1136 bp, Homo sapiens
gtggatgggctcctctttagtgggagatttctgttagctctggttggagcagagagacttcttccatggagaagcccctcaccgtcctgcgagtgagcctgtaccatcccacgctgggcccatctgcctttgccaatgtcccaccacggctgcagcatgataccagccctctgcttctcggacgggggcaggacgcccacctccagctgcagctccctcgcctctcccgccgtcacctgtccctggagccctacctggagaaaggcagtgccctgctggccttctgcctcaaggccctgagccgcaagggctgtgtgtgggtcaatgggctgacgctgaggtacctggagcaggtccccctgagcaccgtcaacagggtctccttctcaggcatccagatgctggttcgcgtagaagaaggcacatccctggaggcttttgtctgctatttccatgtcagcccttcacccctgatttacagacctgaggctgaggaaactgacgaatgggaaggcatctcccaggggcagcctccccctggttcagggtagcagatccaggttgcctggggtttctccacggcccttcccagacttgggacagccctctccagccaagacctggaggaggaacagaaatacagctccagagggaacccccagacagtgcactctgctagccctgccactagagcaagcctttgctagatgaaacaggatttgaaatacttgagctgcatcatgcaaggttgacaagcaaaacccactggctgccttgctcataatgaaccaattctgcaaacaccgaacaaacagcccaggggggagaagcaccctctgtggccagagctatgcaatgtaatgggaacatcatatacttttagaggccctgaggggttctggggagcctctctcagcatttccacacatttctccctgttgtctgactaggagttactttatgtggttcattttgtgtgctgcttaagagcaggagtttgaggttgcaccaggaatgcgtggacacatgtaacaattacatttgtggtagcttggggttaccttcagctttcaaatacccacaggcacgcggggcttaggaaagcctgagtgtaataaactgcaagtatttcatta

SEQ ID NO: 464847 - DNA, 1083 bp, Homo sapiens
ctgcggtgggaacaatcctgagatgactcagggagtggagagaaggctagtggaagagggctatgaagaagaggaggggtggcagattcacccatgggagctgaacacccaaagcaagaaaatcaggggctctgggaaaggaagtgagtcaagacaagcaagagagaaggatgagagcgagcacctccaggatctggtttaccagagaagacaagctgcgaggaggccactaaacttctgccctggcacagtttgctgcagggaggcagccccagaactagtggagacggcgtcccgcgtccagcgcccggagagcgggggcggggccctgggggcgggctctgcggcctgtggctgcagagggacgcaagagcataaactgaaatcccacatccccgtggaggaacttggagataagatgcaaagcgcagcaaataggagccactctttcagagatgacagaccacctggtttcgaggagcagcagacagcgtgaatgaatgaagttggccaggtaaagaactgaaatgcagacaggaaatgggacttgcctgacatggagcaggtggtaggtggcagaggaagattggccactccataacctgtgctctctccaattctctggactaactgtccatacagatgattgccctgggactgagcttagggatttccaaactcttgctatttaacaactgtcaaagactgagaaacagggcttatattttattcaagctacccagaatagggcctctctctaatctatacttccttttcggggaagagatatttggcttcaggcagcagtagcgcctgctccctagggaagtggttagaggtacccacttccccatatcagcagaaacaaaacaggcaggagtctctctgcttgaggatctgcctaaatagggaagtgagaattggcaaccacttctccctccaccaatgggaatcctagatggagggaactgggtgggagatggcaggggtgggcagagtggcagcatttctgtttcttaaatccataactccatcttcagacacttgattccacagccatagggaattgtatatattttgctg

SEQ ID NO: 464848 - DNA, 738 bp, Homo sapiens
ttctatttctggttgccagagccttcagttgacacagtactaagatgagactgaagcaaggatcgtttctgtggtacctctatctggacaaaatatactgcttattatccgtgagaaacgtgaaggctttggcagaatattttcatattctggacgtgcacggcaagaacaccttgaatgatgtgctgttctatcacttccttcatcatgtgactgacttgaaaaaggcacagatcaacattgtgtttgacatgctggactggaacgctgtgggcgagatcgactttgagaagttctacatgctgaaccatttggaaggacagtttatgtatcgtcattcccggcctgtctttgacctgcttgacctgaaaggggatctgagaattggtgcaaaaaacttcgaaatgtacagatttctcttcaatattcaaaaacaggaactcaaagatctcttccgtgactttgacattacaggtgacaatcgtcttaattatcaggaatttaagctgtatacaatcatctacactgacaaattacagaagaggcagaaaacagaggagaaagaaaaaggagagagaaagagaagtctctactcaaaatgtcacatcaagtagatacaagctgaaagagtcttggaaaaaaatgggatctgaaagtacagaacatgaacattgatgaagactgttaacatgtctaaaaataaattcagagcatcaaagtagatatctttataatgac

SEQ ID NO: 464849 - DNA, 1396 bp, Homo sapiens
  misc_feature (1395)..(1395): n is a, c, g, or t
acctagccctcgatgccccctcacttctccccctcccgggcgccccgttcggttgaagtttacgtatcttgggacctaattgctcccaattatccgcgcagcctaagtcccgcgtctgcctggctctcgccccgggagcctgaagctaccgggcagttcattgggtgtcctcggggaaaaggttcaagctgtagagatgagagaagtggggctgggggaggggagaggctccagaaggaagaccacgaacacgtgcgaagaaataaaagccaccacgtgtgcacgcgcgcgggggcccaagggcgcgagcgcggagcacgccccagggggccagggacagtggtcccctgcagcgggcatagcagggggcgcgggtactcacacgaaagcgtggtagatgaacgcccagccgcggggtctctccagcacgttgtacagaaattaatcagagaacccaggacaacgtcagagatcatatgagcctcaccagactgcatgagagtcataacacagtaggagtcccaggcctacctcacatggcaaatgggacagtgttcttcagaacaacctctgccccagggatgcagaaaggagggtttcactatgttggccagtctggtgttgaactcctcacctcaaatgatctgcccaccttggcctcccaaagcgttggagttacagacgtgagccaccgcgcccagctggagaagatgtgaaattttgagagctgaccatactttgagaataataagtagttggattctactgaagcccagtggcttttggaggtgtagcaataagcaggaggcagcagaagtaagacaagggctgtatgacaaagtcttggcaagaactttgaattttatcctgatgtgagtggggagagccactgaagaacgtgaagccagaaacactacatgttactacttctactttcagaaaaggcttaatatggattatacacctacaagtggcacacactgttccaagtggagactcaaagatgataacgatacagtgtttatgctataggtttgtgaagctaccaatccatggacagatgttaaacctaacttccaatttcaggtacaaatatctgagtaaatgatggtatcatttactcaatcagtaaaggtcaaagagaaggcagtctgaagaagggaaaggtgttcaattttgcattgagtttgacatacctgttgagacagctcagtggagatatccagttgatgcttggatatatggacttacagctcagggggagctagaaattgaaatttgagaatcatcaacctatatttataatgggtgaaatcaataagtcggaatcaaattacctggggaagcatgcagatttgtttaaaaaggaagaggcctgagaacccaaccctgaanc

SEQ ID NO: 464850 - DNA, 2290 bp, Homo sapiens
gggaggaggaggaggcggctcggatggctggctcggctctcgctcgctctccctcccatgggcaagtccggctcacaaccctgcttctcccgctcactcacagcccccttggctctccctcctcctcctccttcccctgcgggatccgctcgccgccgccgccgccgccgcagacggcaagtcgtggcagccagacgtcggcgcgtaacccggcgctccgtgcctgccgccgcggcggccgccgagcgcgctctttccgcccccttctcgcgcgtgagcgcgccctatcggctcctggcgcgtcaacattccgcgggccaggccttggggcgcgtctgaggagggggatgtctgtggcctctccgcccacacttcctccacccaccgcccacagcgccccagaaggacctattactcgtttggcttctgaaggccgaagccaggctctggcggggatagaaccctgaagggcctgcgccagctccaacttagggcccttatcttttgctgcctcttacgtattgtaggcagtgcctgatggctgagaagaatcgcagaggactagaaaaggtttgagtctgaaattatctggcacagaggattaaagctcagaaataagtgattgcgaaacagttcaacttccctgttaatgacaacaacaacagcaacacgcttattaattcctagctggagcatcaagcttatgaagatttccaagactttattgttgacccttgttgaagagaactctacttggcttctttcctggctttcctaaattgttcacatacaagataaactaccgtcattcagacttacagaagtgagaagacaagctgaaccaaatgtaaaatggtagcaatttacagatgtcagaactaacatgtggatgaacttagagatggagaagaaagctgggcttttccaaagagtggatctatctgaactggatagcactattgaactttgttgcatattttgtggtagctctaaaactcctctgcttgcttacatacaaccagacaccagtgccttctgaagctaatccaggccatttttataacctaatgcagtagcactttgcaattagatgaagaagatcggtgggatttctttctgtggtgattaaaatgtgtcaggggaagaaatcaagacaatactccaagtgaaaaatataaagtcagttatttctttaatattttgtgttatagtaatcatttttatattttgagcatactttttcttgtctacttaaatactcaaaattaattataaaatgtaaatgtaagcacaatgagataccatctcatcccagttaaaatggcttttatcaaaaagatagggaataatgaatactggtggaaggatgtggagaatggggaaccctcgtacactgtcaatgagaatgtaaattagtacagccactatggaaaactgtatggaagtgcctccgaaaacaaagtagaactaccatgtgatccagcaattacactagtgggtatatattcaaaagaaaggaaatcaacatattaaagagatagctgcattctcatgtttattgaagtcctgttgaaatagccaaaatatggaatcaacctaagtgcccatcagtggatgaatggttaaagaaaatgtgattgatatgcaatggaatattattcagccataaaaaagaatgaaatcctggcggggcacagtggctcatgcaagtaatcccagcactgacctcatgaagacagagagtagattggtggttaccagaggttgagaaggggagaggagaggagggatgaagagaggttgattgatggatagaaatatacagtttgataatgataaatcagtagggtgactatagtttataataacctattgtatggttcaaaatagctaaaagagaataattgaaataacgtaagacaaaaatttaagatgatagatatcccaattacactgatttgatctttacaaattatatgaatgtattaaattattacatgtatccccaaaatatgtacaagtattttgtatcaataaaaaataaaatttaagataaagtaaatgtaatgattagcttatatttcctagatcggaaataaatatttacttaagtatgtttatgatgaagagtttttttatattactataaaaatagacaccttacataaacatattacagttggtgtttagatggctcttttttttctggccttgaatttctggaaagtagtctgggcaacaagagtgaaactccgtctcaaaaaaaaaaaaaaaaaaaaaaaaaaaaaaa

SEQ ID NO: 464851 - DNA, 704 bp, Homo sapiens
cgcccccttctcgcgcgtgagcgcgccctatcggctcctggcgcgtcaacattccgcgggccaggccttggggcgcgtctgaggagggggatgtctgtggcctctccgcccacacttcctccacccaccgcccacagcgccccagaaggacctattactcgtttggcttctgaaggccgaagccaggctctggcggggatagaaccctgaagggcctgcgccagctccaacttagggccctgtgcgtcgttgcgacttctgctaccaccctatcacgcggcacccccgccccaactccgcccgggtctctgaagaggcaataggcctttcatctccggggaaagtctcaccttggccctcagacacccgccaagaggggtcggaaggacagaattagcatagagaagagtggctagagcacttttcaggctctggccccaggaatccttgacaggaagcgtggggttgctgcccagcctcccacgcagtgtaatatgttgaagccgggcccctttgagggaatgcgacttccttgggccgagggggaaagggtaaaagttaattttcataaaatgctatgcaagggctaaatgtgaaattataaaatgtcctttaagacagtcttcttgaaatcgtatcaagtttgacaagatttttggtgcacggtaacgcttttgctcgctttctacgctgtcacgtctcca

SEQ ID NO: 464852 - DNA, 2571 bp, Homo sapiens
gggaggaggaggaggcggctcggatggctggctcggctctcgctcgctctccctcccatgggcaagtccggctcacaaccctgcttctcccgctcactcacagcccccttggctctccctcctcctcctccttcccctgcgggatccgctcgccgccgccgccgccgccgcagacggcaagtcgtggcagccagacgtcggcgcgtaacccggcgctccgtgcctgccgccgcggcggccgccgagcgcgctctttccgcccccttctcgcgcgtgagcgcgccctatcggctcctggcgcgtcaacattccgcgggccaggccttggggcgcgtctgaggagggggatgtctgtggcctctccgcccacacttcctccacccaccgcccacagcgccccagaaggacctattactcgtttggcttctgaaggccgaagccaggctctggcggggatagaaccctgaagggcctgcgccagctccaacttagggccctgtgcgtcgttgcgacttctgctaccaccctatcacgcggcacccccgccccaactccgcccgggtctctgaagaggcaataggcctttcatctccggggaaagtctcaccttggccctcagacacccgccaagaggggtcggaaggacagaattagcatagagaagagtggctagagcacttttcaggctctggccccaggaatccttgacaggaagcgtggggttgctgcccagcctcccacgcagtgtaatatgttgaagccgggcccctttgagggaatgcgacttccttgggccgagggggaaagggcagtgcctgatggctgagaagaatcgcagaggactagaaaaggtttgagtctgaaattatctggcacagaggattaaagctcagaaataagtgattgcgaaacagttcaacttccctgttaatgacaacaacaacagcaacacgcttattaattcctagctggagcatcaagcttatgaagatttccaagactttattgttgacccttgttgaagagaactctacttggcttctttcctggctttcctaaattgttcacatacaagataaactaccgtcattcagacttacagaagtgagaagacaagctgaaccaaatgtaaaatggtagcaatttacagatgtcagaactaacatgtggatgaacttagagatggagaagaaagctgggcttttccaaagagtggatctatctgaactggatagcactattgaactttgttgcatattttgtggtagctctaaaactcctctgcttgcttacatacaaccagacaccagtgccttctgaagctaatccaggccatttttataacctaatgcagtagcactttgcaattagatgaagaagatcggtgggatttctttctgtggtgattaaaatgtgtcaggggaagaaatcaagacaatactccaagtgaaaaatataaagtcagttatttctttaatattttgtgttatagtaatcatttttatattttgagcatactttttcttgtctacttaaatactcaaaattaattataaaatgtaaatgtaagcacaatgagataccatctcatcccagttaaaatggcttttatcaaaaagatagggaataatgaatactggtggaaggatgtggagaatggggaaccctcgtacactgtcaatgagaatgtaaattagtacagccactatggaaaactgtatggaagtgcctccgaaaacaaagtagaactaccatgtgatccagcaattacactagtgggtatatattcaaaagaaaggaaatcaacatattaaagagatagctgcattctcatgtttattgaagtcctgttgaaatagccaaaatatggaatcaacctaagtgcccatcagtggatgaatggttaaagaaaatgtgattgatatgcaatggaatattattcagccataaaaaagaatgaaatcctggcggggcacagtggctcatgcaagtaatcccagcactgacctcatgaagacagagagtagattggtggttaccagaggttgagaaggggagaggagaggagggatgaagagaggttgattgatggatagaaatatacagtttgataatgataaatcagtagggtgactatagtttataataacctattgtatggttcaaaatagctaaaagagaataattgaaataacgtaagacaaaaatttaagatgatagatatcccaattacactgatttgatctttacaaattatatgaatgtattaaattattacatgtatccccaaaatatgtacaagtattttgtatcaataaaaaataaaatttaagataaagtaaatgtaatgattagcttatatttcctagatcggaaataaatatttacttaagtatgtttatgatgaagagtttttttatattactataaaaatagacaccttacataaacatattacagttggtgtttagatggctcttttttttctggccttgaatttctggaaagtagtctgggcaacaagagtgaaactccgtctcaaaaaaaaaaaaaaaaaaaaaaaaaaaaaaa

SEQ ID NO: 464853 - DNA, 1716 bp, Homo sapiens
  misc_feature (2)..(2): n is a, c, g, or t
  misc_feature (7)..(7): n is a, c, g, or t
  misc_feature (9)..(10): n is a, c, g, or t
  misc_feature (12)..(14): n is a, c, g, or t
gncaaancnnannnagagcaaggccctaactattcgattctatgaaggctgagagaggtgaggaagctgcagaagacaagtttgacactagcagaggtgctaaggtgggaacccatggtgtgcactgggagcacagaggagggacctcttgcccggtgctaagggaaagggggtcagaggaggcctccccaggaaaggtgacatccaatccaagtcctgatagagagtgggggctaggccagcaaagagatgtgtggaaatgcatttcaggcccgtggaaagtttgtgagatgggagagcatgactcattcatggaaccgcagttatggtttacctgcaaagttcctagtcctaacagtagttcaggaatccacagatgtctgaagtggaaatttctaggaaggggacttccatccagatggcattttccagtagcagaaagagaaaggaacgatgtgactgttagtgcaagcactgtgctgggaactccacgtatgctatgaattcaatctgtacttaaaaataagttttactgagtaccttctaaaaggttttgaattgatatcatatcactttcaatgtaaagaaataaataagtcttcagtactgcttcccttaaagtcttgcaataaccttatcttgagctataagcacacacaaatgaagtatattccttcatttgatcccatttttctttttcccacatttctctaaaataaaccaacataataaagtcataatttggagttctggctaaattaaagattgacacacaatgtcattactcttcattctttgcttttgcaagtcacgtgtgagaaagaaacatatttctatggccttttgactgcccttgataaaatctgtacttagggaaatagcaatatcaataaatgctaaataatattaacacaatgtatgcaggggtttttaagcttcacagaaaaaaaaatttaagacatgaatttccaggaaaattattcttgtaactatcccaaatggtttttctttccatcaaaagaacaaatggaaaaaagtgcaaaagccaaatcaaacaaaatccttagtgtgaaatatattttggagcatgtggaattaaatttgcattttcaaataaaaacaaatgcccgtttaaaaagtcatctaacttttgtcctacgaagacaaccagtaaaatatactgtttcccttttcccagcatactcatgtttgggaaaacatgattatctgaagagaaatttacttttactaaattagagtttgaggggggagtgtggaaggaataattacagattatccttttattcaatctcttctcttggaaagaagagaagaaatgttgaaagccagagaacttttctaaaacgctgtagggaattttttttttctgtaaatatccaagtccaaaaggagatttgcaaaatgtggagttggagatttgaactcatacaatatttcctaatacaaataaaaatctgaaccttttaatggcgacacagtccacaccatgaatggtcaaaatcactggagctaatgtacaggaaggggttcctcagggaactgtggcaaattttagcatcttcctttccttttagggactggacactcatccttaggacttgagaatcatatgtgaaaattatatagacttcccacagtctactgacacattacagagatactggaaatattaaccacacatgttgtctacatact

SEQ ID NO: 464854 - DNA, 3395 bp, Homo sapiens
gagcccacctgtcccactctgggccactccagcgctcgcccagagaaggctccccacatgcccttctcagtttggagaccactgagttagtcaggcccctgggcctcagggcacctccctgcagggtccctcaaggtgtccctgagctcatgtctgtgtgagggctgcagtgggagtcagctccagggacgctggcgggagggcacgatgccccagctgctccccaagcaggcactgggccccgccctggtcgccatcctgcaggcagaggggaagcatggcctcggtacaggagggcgctgggccttcctcaccagccatttcccgattttcctgtcaaccttcagcagacctgaagcacaagaaaggcaggtggagaagccaggagaagccgcagctctgagctgcagcaggtcactcagcacgctccaccgccctggccaccgccactgcacgtgggctggggagagagggctggctcggaatcctcggagaagcacttccgaccagcgggctgtgctgacaagccccttgagaataaaaaatggtacactcagtggtttttgtgaacgtgcgcaaggcggatttgaaaagggtgaggcgagagtgtgacagctgctcccgggacttgagcgtagaccccgtggcctctgcagagcttcttcttcctgtccattgctgagctgtgtttccattgtatgggttccaacgtggccccaagattcccgccctgttaggttgttagccatcttatatggcagaaaggatattttcccgtgtgatcaaggcacggccgaaataaccacctttctccactgaattgcatttgcatcttctttaaaattcccttgaccatatatatttgtgactctatttctagttgttttcagttgatctttgccaatcttgatgtcattactccattctcttgattttgtagctttaaataagtcttgaagacagcataagcccttcaactttgttctactttttcaaaatagttttggctcttccagttcttggcattttgaaataaattttagaatcatcaatttctaaagtctatagatccatttgggaaaactgacatcttataaaactgagttttctaacccacagacacttacttacgtgtttaatttctctcagccgtattttgcagttttccatctacagcccttgtacatctttgctcagattcagccttgagtgtttcattttttatgtagtgtaaatagtgtttttaaatttccatttccaacattttgttgctgataggtagaaatacaattgatgcttacgtattgatctcatatcttggaatcttgctggaatcacctattgattatagtgctcttggtacagattctgtagaatttcctacatagatgatcacattatttgtagataaaaacagttttattccttccttttcaatttggatgccttttgtttctttctttcttttgtcttattatactagactgaacctcccgtacagtgttgaatagaagtattggaagtggattgctgggtattcgtggacataaagatggcaacagtagacactgaggactactagaggggagggaaggaggaagacaagggttgaaaaactattgggtactatgctcagtacctgggggacaggatcattcgtaccccaagcctcagcatcatgccatatacccatgtgacaaacctgcacatgtaccctctgaatctaaaataaatgttgaaattataaaagaagaaaagaaagtggatcaccttgccttttcctgatcttagggagaaagtattccaattttcactgttaagtatgatgtaagtgcaggtttctcaccgatgccttttatccagttggggaacttctcttctattattagttggctgagagtttttattgggaatggattttggattttgtcaatgctttctcacatctatgagatgattatgtggtttttcctttagtcttttaaaatgataaattgcaaaggttctgtaactgccacctctgtctagttctaaaacattttcatcacccccaaagaacattttatactcattagcagttactcactactaccctctcctgccatgacaaccagcagcctgtgttctttccctgtgtatgtacctattctggatatttcatataaatggaatcctgtggcttgtggcctttcgtgtcaagcggctttcacataacataatctttctgaggttcatttatgcagtgacatgtatctgtacttgattcctttttatggctgaatatattccattgtatgtctgtatcacagttatttatccatgcatctgttgatggacatgtgggttgtttcccccttttggctactgaagatagtcctgctatgatcactcatgtacaagtatttgtttgaggatctgttttcagttatttggggcatgtaactgggagtggaattgctgggtcatttgctaatgccatagttgactttttgaggaactgtcaaactgtcctttcacattcccaccagcaacacacaaggtttcccgtttctccacatccttgtcaacacttattactttctgttttgttgattatggccatcctagcgggtgtaaagtggtatttgattgtcttgtgatttgcattttcctaatgactaataatgtggaatatctttttatattcttcttggccatttgtgtatctcttttggaaaaatgtctatttaagtattttgcctgcttcttaaaaaatggggttatttgtattttcttcaagttataggagttatttatatgttcagaatactagactcttacaggtgtataaatttgtgaatatctttccatttatttagattttctttaatttctcttaaataatattttatagttttcagtgttttctcctgagagttttatagttttagctcgtatatataggtctctgatccattttgaattaataattatatatggtaagaggtaggggtccaatttgatttttttgcatgtggatttccagttgtcccagcaacatagagactgttttttccctcattgaattaatgatgttggctcccttttcaaaaatcaactggccagtaccacactgttttgattactgtagctttgtagtaagttttgaaatcaggaagtataacatcacctaatcacaggagtgacatccatcatattcacagtcctgcctatacctaagaggagaggggattgtatggggtgtgtacaccagggagtaggaatccagggccatcttagaactcttctgaccaccacagcttgatcccagtctccctccaggtgatagtgagaggtgaagccagctggacttcctgggtccagtggggacttggagaacttttctgtgtctagct

SEQ ID NO: 464855 - DNA, 3170 bp, Homo sapiens
ctgagcggcagtggaaggagggaagagccccgcctttcagccgaacgcaccaattaaaggtacaaaaaaaaaagtttctcagtacctcgtcccggactgacggactctcgcgagaattcgtggggctccgactgtttccgcgcagatatcgcgaggcgattggtagccgggggagggctgcgccgtggccccgcctttccggagcgcgggcgcgcggtggcgggaatttcgcctgtttgcggtttagaccccaaagattcctgttggtggtctgggtcacaggaggcaggtttcgggagctggaaatgtgagcgggaatctcttcacaccttctctttggagcccttaatgatacgacgaaccccaagtgtttcagaacatgaagtaaacaatggagaactgttctgctgcatcgacgttcctgactgacagcttagagctggagctggggacggaatggtgcaaacctccttacttttcttgtgctgttgacaacagaggaggaggaaaacatttttctggagaatcctacctctgcagcggagcccttaagcgattgattttgaatcttgaccctttaccaactaattttgaagaagataccttggaaatatttggcattcagtgggttactgaaacagcattagtgaattcatctagagaactctttcatttattcaggcaacaactgtacaacttggaaaccttgttacagtccagttgtgattttgctttttccaccgtcatggcatttattacatctccacttggatatacattggctggtgctagaaattctttacatgctgggtgaaaaattgaaacaagttgtatatggtcatcagtttatgaatctggcaagtgacaatttaaccaacatcagcctatttgaagaacattgtgaaactctcctttgtgatttaataagcctgtcactcaacaggtacgacaaggttaggtcttctgaatcattaatgagtgaccagtgtccatgtttatgcattaaagaattatgggttctacttattcatcttctagaccacagaagtaaatggtttgtctcggaaagttatggaggccaagaagtcccgaatctgaggttggcaagctgaagacccagaggagctgatggtatagtttccagtctcagtccaaaggtctgcaaaccaggaaagccaatggtgtaatttccagtctgagtccaagtctgaaggcaggaaaagaacagtgtttcagtatgaagcacagggagtcttctctaccctcggaggactttttgttgtattcaggccactaattgattggatggcacccacccatattagagagggccatctctttactcagcctaccaattaaaatgtaactctcaacgagaaaacctttatagacacactcagaataatatttaaccaaatatcttggcatcctgtggcctgttcaagttgacacataaaattaaccattctatttgtagttgtacaatagaatgaggaagatatctgaactgatacggaaaacgcagcattgaccaaagaagcaagttacaaaagaattagaaacaagccgcttgagaatacagacatgcatttaaaaaaaacaaaatacagatgaagccacacaatatataatataggctggtatacctgtgtggcgaaacaaaaaagcaaggaaatgatttatcatgaaagtcagcaaaattgttaactactggatggaggaggaagatgtggtgacctgtaaggtacttctaaagtactatttatgttctgattcttaacctgggcatttttattatttcagttttatatatgtgttttgtcttttgtatatatgcttcattataaaaatagagaaaaaccacgaaatcaaaggttattgaaactgtcttaatggaatcaaattacttctgtttctatagtcattttggaactggttgaataaactacttaaaacactgcttgaaaaatcaagtgaccgaagaagatcctctatgcctgtaatccagtccagggatccattaggttttagttggtggattattactcatgtagcatcattttacaagtttgatcgccatggagtaccagatgaaatgagaaaagtggaatcaaattggaactttgtagaagaactgctgaaaaagtccatcagtgttcagagctgttaatgtagtgcttcatggcctagaggtcagacttgacctccttttaaaatagttttaaacatgctgttcatcacatttttaaacatattgtatggaagccctgtaaagttttgtaatatgttatcatttttgtaagagtttatggagaattataataaataatattttggaatttgggaaatatttttcttttaagaaataaagattatttaaaacttgaagaggaataaaaaatattgtagtataatattgctttatatgtgtgtgtgtgtgtgtgtgtgtgtgtgtgtgtgtgtgtgtctgtagtagctatgtctttggaaaaattttaattgcttgaaattttcttttacccattatctgcattaactcttacttttttaggaaacataaaggcatttagttataatatgaatcacataattatgaactaaaaattttagcttagaatgccaaagaattctgcatacataaattggatcagaaacaaatctattatctttttataatctttcccataatccctgtaaaagttttgtttattgtattttgtcctatatcatgttcattggttgtcctcattttttttgagaacatattgatttagtaacttaaaaagttttttatgtatattttttatttcagaatgaagggaattactaaaaagtggttgtgaaataagatgcatattacagtggccattgtcatttgtatcagttactaattcagtcttaatgctttaaccaaatccagagaatttcagtaaagtctggataacattattattctattgggagttactgaatctgagtcagtaactaggggtttaattttcagttaggttgtaactgcttgtgttctttaaattgctttctcattgacccatgtttctgttgtatttaataatttttaaactccctttcagctctaacagtgtatgaatttatggttttgcactcagctggttttaagttacagaatatttcttaagaagctttaaagg

SEQ ID NO: 464856 - DNA, 801 bp, Homo sapiens
tttaaacataaaggaaaaaatctccaagtcctctaggcacaaagaccaaacaacttataagagcaaaataattttattggcactagacttgcaaagtcaacttaaaacaaggcctcaatgcagcatttaaaatgactcaatgaaaaagtgtgagccaaggattttgtaactttgaccctagcaatcccacttccaggaatttactctaaatgtgtaccctccaaaattaaaatgcatatgcatacgtttatttattgcagtattgtttttataatagtatagtagaaactaaattcttatatataaaagagtagttgaacaaaccatggtatatctgtactctgaagtattattctgtattagtgtgtgttctccagagaaacagccaataggatatatagatatatatatatatataagatttattataatgaattggctcgcagagttatggaggccaagaagtcccgaatctgaggttggcaagctgaagacccagaggagctgatggtatagtttccagtctcagtccaaaggtctgcaaaccaggaaagccaatggtgtaatttccagtctgagtccaagtctgaaggcaggaaaagaacagtgtttcagtatgaagcacagggagtcttctctaccctcggaggactttttgttgtattcaggccactaattgattggatggcacccacccatattagagagggccatctctttactcagcctaccaattaaaatgtaactctcaacgagaaaacctttatagacacactcagaataatatttaaccaaatatct

SEQ ID NO: 464857 - DNA, 2531 bp, Homo sapiens
atgagcttcatggattactcttgtatattggacacctatctgaacttcccagtgttaatataggagcatttgtaaatcaaaaccagattaagctttttccaccgtcatggcatttattacatctccacttggatatacattggctggtgctagaaattctttacatgctgggtgaaaaattgaaacaagttgtatatggtcatcagtttatgaatctggcaagtgacaatttaaccaacatcagcctatttgaagaacattgtgaaactctcctttgtgatttaataagcctgtcactcaacaggtacgacaaggttaggtcttctgaatcattaatgagtgaccagtgtccatgtttatgcattaaagaattatgggttctacttattcatcttctagaccacagaagtaaatggtttgtctcggaaagttatggaggccaagaagtcccgaatctgaggttggcaagctgaagacccagaggagctgatggtatagtttccagtctcagtccaaaggtctgcaaaccaggaaagccaatggtgtaatttccagtctgagtccaagtctgaaggcaggaaaagaacagtgtttcagtatgaagcacagggagtcttctctaccctcggaggactttttgttgtattcaggccactaattgattggatggcacccacccatattagagagggccatctctttactcagcctaccaattaaaatgtaactctcaacgagaaaacctttatagacacactcagaataatatttaaccaaatatcttggcatcctgtggcctgttcaagttgacacataaaattaaccattctatttgtagttgtacaatagaatgaggaagatatctgaactgatacggaaaacgcagcattgaccaaagaagcaagttacaaaagaattagaaacaagccgcttgagaatacagacatgcatttaaaaaaaacaaaatacagatgaagccacacaatatataatataggctggtatacctgtgtggcgaaacaaaaaagcaaggaaatgatttatcatgaaagtcagcaaaattgttaactactggatggaggaggaagatgtggtgacctgtaaggtacttctaaagtactatttatgttctgattcttaacctgggcatttttattatttcagttttatatatgtgttttgtcttttgtatatatgcttcattataaaaatagagaaaaaccacgaaatcaaaggttattgaaactgtcttaatggaatcaaattacttctgtttctatagtcattttggaactggttgaataaactacttaaaacactgcttgaaaaatcaagtgaccgaagaagatcctctatgcctgtaatccagtccagggatccattaggttttagttggtggattattactcatgtagcatcattttacaagtttgatcgccatggagtaccagatgaaatgagaaaagtggaatcaaattggaactttgtagaagaactgctgaaaaagtccatcagtgttcagagctgttaatgtagtgcttcatggcctagaggtcagacttgacctccttttaaaatagttttaaacatgctgttcatcacatttttaaacatattgtatggaagccctgtaaagttttgtaatatgttatcatttttgtaagagtttatggagaattataataaataatattttggaatttgggaaatatttttcttttaagaaataaagattatttaaaacttgaagaggaataaaaaatattgtagtataatattgctttatatgtgtgtgtgtgtgtgtgtgtgtgtgtgtgtgtgtgtgtgtctgtagtagctatgtctttggaaaaattttaattgcttgaaattttcttttacccattatctgcattaactcttacttttttaggaaacataaaggcatttagttataatatgaatcacataattatgaactaaaaattttagcttagaatgccaaagaattctgcatacataaattggatcagaaacaaatctattatctttttataatctttcccataatccctgtaaaagttttgtttattgtattttgtcctatatcatgttcattggttgtcctcattttttttgagaacatattgatttagtaacttaaaaagttttttatgtatattttttatttcagaatgaagggaattactaaaaagtggttgtgaaataagatgcatattacagtggccattgtcatttgtatcagttactaattcagtcttaatgctttaaccaaatccagagaatttcagtaaagtctggataacattattattctattgggagttactgaatctgagtcagtaactaggggtttaattttcagttaggttgtaactgcttgtgttctttaaattgctttctcattgacccatgtttctgttgtatttaataatttttaaactccctttcagctctaacagtgtatgaatttatggttttgcactcagctggttttaagttacagaatatttcttaagaagctttaaagg

SEQ ID NO: 464858 - DNA, 1093 bp, Homo sapiens
ggaacttccagagccggtcacagaggccagatccacgatcaggtgcatggcaggggcttgtccgcaggaccggaaccttggtgagcatcagcgatgggcactgtgtttccccaagatctttatgtctcattggacaacgtgaagattcaacttccagggctgctcagtagagccaagtctggaaaacaagctcgtgggcaccacatcacaagcacgttttccctggagcccgcggacgagccagggctcaccacccccgcgacaccgcaggcctctgtgcggagactgtgctcaggcccagcgcttgcgctggagaaaaggcggagacattcagaacccaggggattccaggctgccttctccacaagggtcaggagtccaaacacagtctctgctgctctccacgcacggcaatgggaaggcagccctttcccctccatcactccggggagctcacgtgcggacggggtcctctgtagcatctttaaattggaggtacctcactccggattctattaaaatcgtaatctctagaagatggattcagcaaatgccaggcgtggagccatgaatgtttccataagaaacaagaaaaatagaaagaatgtgtgttagccagacgacaccttgatggcacccctgccacctccccagccctcctcagtggcaaagtgatttagctcagttgggcttctccaaaatggaaatagtcacttgtttgagcaaataaatgtaatgaaagttgttccggaaaaattctagtactctgcactaatacatatcatcttaaaaacttatctctgaattgtttccaaatgacaaatgtgtaaagtttctaagtactttttgtttccttatccttgtagtggaagatactacattcaacacagacgtactgtgtgcctcctgcgtgtgaggcctggtgctcatggcgcgtgtccttgcatgcaaaattctactcttcatcttgacgtttctagacattcagctgttcctcaggaaacgatttaccttccctctgccttttctgtaaaatgcatggactgaggaattactaatgcataacactttgtttgctggataccaagtagac

SEQ ID NO: 464859 - DNA, 678 bp, Homo sapiens
ggaacttccagagccggtcacagaggccagatccacgatcaggtgcatggcaggggcttgtccgcaggaccggaaccttggtacctcactccggattctattaaaatcgtaatctctagaagatggattcagcaaatgccaggcgtggagccatgaatgtttccataagaaacaagaaaaatagaaagaatgtgtgttagccagacgacaccttgatggcacccctgccacctccccagccctcctcagtggcaaagtgatttagctcagttgggcttctccaaaatggaaatagtcacttgtttgagcaaataaatgtaatgaaagttgttccggaaaaattctagtactctgcactaatacatatcatcttaaaaacttatctctgaattgtttccaaatgacaaatgtgtaaagtttctaagtactttttgtttccttatccttgtagtggaagatactacattcaacacagacgtactgtgtgcctcctgcgtgtgaggcctggtgctcatggcgcgtgtccttgcatgcaaaattctactcttcatcttgacgtttctagacattcagctgttcctcaggaaacgatttaccttccctctgccttttctgtaaaatgcatggactgaggaattactaatgcataacactttgtttgctggataccaagtagac

SEQ ID NO: 464860 - DNA, 711 bp, Homo sapiens
tctggtggagagctgattttcatgtttgtgccctgacaggagatgtctctgtgttgttgatgccaaaaaagatccttcacaagataaagtcccaggctttgcggcaattaacagagcataattctttacatatttatgaggttttccattttatatataacttcttgcacctttgtaatgttatggtatttgacccactctgtgagttaagtacacctgccaccatttcacccactcagcagctttcatctcaaggattctgggacaagtttttgtcaatgaggtttaattggagatctatgagaggcatcccattgggtaccatgctgaagtcttccttgacatctatagttgcttccatatgttcctcttgggcttctgccatcagtaggagaagaacatgcctcatggcactcactggtcccaagagaatgagagatacgtggagctgagcagctacggccaatgcctgcagcctgagcaaagccattgtagctgacctgggagcaggttaatacatgcttgttaccgcatgcacctgagattctgtgattggagcctgaagatgtgtgtggctgccttgtggctatgacggctgtggctgtaaaggctctgtactgaaggcatggccacctcactgagtatgacagcagggagatgggaagagccagatttctcatgcggatatgaagacattaactgagccctgga

SEQ ID NO: 464861 - DNA, 3324 bp, Homo sapiens
gttgtttgtttcactgggacgttccccactcccggaccgggaaagttgtaaatatggggacgatcagggcacatttgctgttaattccgctggcccgcggcctgcactctccgccgggcctacgcctccccggccgcccagcaggagcccagtccccgccaccggagccggccgggagagggtacaaaaccaccgctacccaaggcggctgccaccagagaggagcgaactctagactcgcctgtggaagagacctggggccgctaaggaaacggcggggaggggagcgaggaggagagacgctgaggacctggcgccggcgccgccgccgccgccgccgaaataaagagcaggaatttacctgggcgaatcggctgcggggaacatgtagagccggggggagaccagccgagaagacaaatcgttgcttcttcttcctcctcctcctccttctcccacatagaaacactcacaaacacccgaccacgggcccgagctaccgggggggcatcgccgcgggcccgggaaccaattctcctgtcggcgggggcgtccctccctgcggcttggtggtgtcggaacaaaatgccgaccggaagtgcagctgcaggaatgactccctccgccggcgccaaacactaacaaccaccccctcttccccactccacttccgccaccgccgcagccgccgctgccgccacttgggctcgcgtcctcggccgcgccgcgcggcacccgggcccagcagccgggaggcggcagctctcctctacgcccgtcccctcagggcggctgtggatgttgccagtattgtcgatgcttcagagcgacgtttgccctgcgacacaggcgggccggctctcctctgtctttattttcctggaggccgacaggagcggggcccgagttcggtggtggtcgtgagcgtggggggcactcaggcccggacgggctctcaggtcgccgacggcggcggctggaggccgcgctggctgtcccaggtcgtcgttagctttagggagccgatctccgggcggccccacagaggacgcccgcgattcgatggcgatgatgcccgttttaaatggtgtccctgcagccgggtggatggatggatcgtacaccttgccttttgagagccgggaccttacgcccgactgcgtgttatttctgcggaataagaacgcaacctttggaggtgaagacgactgtcggctggattgaattggaatcgtgtttgtgatgatgcgtttatttctggaaatacgcggtctccgctgcttttgctttttgtcggcagaggtttgggttcttctctaacggtcaggataaaggcctgtaggcgacgctgcgcgagcgagaagctcgcccgcggctgcccgggcgcccccctctaggtgtgggtggagccgagcgcgcggggagaaccgccggccccgactcagccaccggtgactgcgggcgacccgcgggcctgcggccagctgatttcaaacatcgttttcctctttaggttcggaaaactgaggcgctggacaaggctggaatacaatatgtgattatacgtacagtactatggttgttgtagtttttaaattgtaaaacaagaagtaaccattgttccaccgttctctattaagtttgtgtaaattaaaaaggggctattttcggtaaaaagtgcagtaggtgtggtggtgtcgacctgtcatcccagctacttgagaggctgaagggggaggatcgcttgagcccaggaggtagaggctgcagtgagtcatgatggcaccactgcactccagcctgggtgacagagtgagagcctgtctcaacaaccagaaaaaaagtatttagttttacagtattacaaagtagtgtcacattagtttaatgaggtttatttatacaaaggtgtaaaattatgggccaagtactagccttcaagtaatttcgaagtcagcgagaatactggtatataacggatcaaactttgttcaagaaccaaaggctattgttcaacgaatggtgctgagacaactgcaaaagactaggacccttacctcacatgcaaaagactgggacccttacctcacaccattttgcaaaaattagctcaaaatggatcaatgacctaaatgtaagagaaaacctataaaattctcagaaaaaaacagaaggataaatttgtataaccttggatttgacaggattcttagctatgacaacaaaaacacaagcctccagaagcaagcaaacaaaaacaccataaactggacttcatcaaaattgaaaactttagtggttcaaaagacaccatcaagaaagtgaaaaaatccacagaataggaaagatatttgcaaatcatgtatctgataagggatctatgtctataatatgtaacgaactcttaataaaaaataaccccacttaaaatgggcaatgaatctaaatagacatttctccaaagaagaaatgcaaatggccaataagtacatgaaaagatgcttgacatcaccagagaaaagcaaataaagaaactgcaaggttttcattcttcttcacttacaaggcttcattctcactatgatagccagaataaaaaagtcagataacaacaattattggcaaagatatagaggaaaactgcaaaccttatacattctgataggagtgtaaaatggtgcagccactttggaaaacagtctggcagttcctcaagtgattaaacatctagttactatatgacccagcaattctactactaggtatatacccaagagaaatgaaaccatatgtccacacagaaacttgtacacatttgtttacagaagcattattcagaatcaccaaaaggtggaaacaacccaaatgtccatcaactgacacatgcaaaagtaaaatatggtatccatataatggtatattatggtatataaaagaatgaagtactgatacatgctgcaacatgaatggatcctgaaatcattatgttaagtgaaggaagctagtcacaaaagaccatatgttatatgattgcattcaaatgaatggaatatggaaatctatgcagacagaaagtagattactggctgtttaaagctgagggtgggagcatgggtgggcaggggaatagctaaagggtacagagtttctttccgaggtaatgaaaatgctctaaaattgactgtagtgatgattgcacatatctgtgaatatactaaaaaccactgaattgtacactttaaatgggtgaattgtatggtatgtgaattctatttcaatgaaactgttaaaaaaaaaaaaaagcggggggggggaactgaatat

SEQ ID NO: 464862 - DNA, 2680 bp, Homo sapiens
gttgtttgtttcactgggacgttccccactcccggaccgggaaagttgtaaatatggggacgatcagggcacatttgctgttaattccgctggcccgcggcctgcactctccgccgggcctacgcctccccggccgcccagcaggagcccagtccccgccaccggagccggccgggagagggtacaaaaccaccgctacccaaggcggctgccaccagagaggagcgaactctagactcgcctgtggaagagacctggggccgctaaggaaacggcggggaggggagcgaggaggagagacgctgaggacctggcgccggcgccgccgccgccgccgccgaaataaagagcaggaatttacctgggcgaatcggctgcggggaacatgtagagccggggggagaccagccgagaagacaaatcgttgcttcttcttcctcctcctcctccttctcccacatagaaacactcacaaacacccgaccacgggcccgagctaccgggggggcatcgccgcgggcccgggaaccaattctcctgtcggcgggggcgtccctccctgcggcttggtggtgtcggaacaaaatgccgaccggaagtgcagctgcaggaatgactccctccgccggcgccaaacactaacaaccaccccctcttccccactccacttccgccaccgccgcagccgccgctgccgccacttgggctcgcgtcctcggccgcgccgcgcggcacccgggcccagcagccgggaggcggcagctctcctctacgcccgtcccctcagggcggctgtggatgttgccagtattgtcgatgcttcagagcgacgtttgccctgcgacacaggcgggccggctctcctctgtctttattttcctggaggccgacaggagcggggcccgagttcggtggtggtcgtgagcgtggggggcactcaggcccggacgggctctcaggtcgccgacggcggcggctggaggccgcgctggctgtcccaggtcgtcgttagctttagggagccgatctccgggcggccccacagaggacgcccgcgattcgatggcgatgatgcccgttttaaatggtgtccctgcagccgggtggatggatggatcgtacaccttgccttttgagagccgggaccttacgcccgactgcgtgttatttctgcggaataagaacgcaacctttggaggtgaagacgactgtcggctggattgaattggaatcgtgtttgtgatgatgcgtttatttctggaaatacgcggtctccgctgcttttgctttttgtcggcagaggtttgggttcttctctaacggtcaggataaaggcctgtaggcgacgctgcgcgagcgagaagctcgcccgcggctgcccgggcgcccccctctaggtgtgggtggagccgagcgcgcggggagaaccgccggccccgactcagccaccggtgactgcgggcgacccgcgggcctgcggccagctgatttcaaacatcgttttcctctttaggttcggaaaactgaggcgctggacaaggctggaatacaatatgtgattatacgtacagtactatggttgttgtagtttttaaattgtaaaacaagaagtaaccattgttccaccgttctctattaagtttgtgtaaattaaaaaggggctattttcggtaaaaagtgcagtaggtaagcggaattttactcaaccgggacgaaattcgtgttatatgaattgtattgtgtatttgtgtgtgtaccagtgcgctaaaagtaagtaggaaaacttgcttagattattccttttgcctcaggccactcagggggccaagatcctgtcactccttttctctaggccctgcgaatggcttcccgtcttgaggggagtgagccaaagccttgactgcggcagaagtccccgcgcgccgttgagggtgggggcgggcctgccctggcatccttgcgagtaggactcttccctgagcgtcgtccacagggcttgctccttcaccttcaggattttgctcgtgtcactcggtgcttccgcggctacttttaaactgaaagttccctagcccccttctcattttatcctttggacagtctacatatccatacttgtttatcttcttatctctccttccccagtgcaatgtaagctctaagaggacaagaggttgtgtttttctgcactggtgttacggcccccgcctagaatgccacacagtagatgcgtagtatgtggttaaggaatgaatgcgattataagggccttgatgctcccccatttctgtctttaatatgtacttatatgctacagagagctttataaaagatttaaaacacgtttattacagaattctataaaaatatattgcttctaaacattggaaagccctccacaacaccagaaacccacaaatgagggataaaatttgtttttaggcttctgtaaatgagcatgcccgaggacagtgcatcaaatgatcatatccatactgggccgattatgtttgctcttctgagtctcaaactgcattcttcatcttgtcgtcctctgtctttcaaaatacattaaaagtgagaatttggttggctcagagcaaatccagcactattggaaaagttcattcagcaagtatttattgtggacatggcctgcagggatcctctgaacgccatc

SEQ ID NO: 464863 - DNA, 3128 bp, Homo sapiens
gttgtttgtttcactgggacgttccccactcccggaccgggaaagttgtaaatatggggacgatcagggcacatttgctgttaattccgctggcccgcggcctgcactctccgccgggcctacgcctccccggccgcccagcaggagcccagtccccgccaccggagccggccgggagagggtacaaaaccaccgctacccaaggcggctgccaccagagaggagcgaactctagactcgcctgtggaagagacctggggccgctaaggaaacggcggggaggggagcgaggaggagagacgctgaggacctggcgccggcgccgccgccgccgccgccgaaataaagagcaggaatttacctgggcgaatcggctgcggggaacatgtagagccggggggagaccagccgagaagacaaatcgttgcttcttcttcctcctcctcctccttctcccacatagaaacactcacaaacacccgaccacgggcccgagctaccgggggggcatcgccgcgggcccgggaaccaattctcctgtcggcgggggcgtccctccctgcggcttggtggtgtcggaacaaaatgccgaccggaagtgcagctgcaggaatgactccctccgccggcgccaaacactaacaaccaccccctcttccccactccacttccgccaccgccgcagccgccgctgccgccacttgggctcgcgtcctcggccgcgccgcgcggcacccgggcccagcagccgggaggcggcagctctcctctacgcccgtcccctcagggcggctgtggatgttgccagtattgtcgatgcttcagagcgacgtttgccctgcgacacaggcgggccggctctcctctgtctttattttcctggaggccgacaggagcggggcccgagttcggtggtggtcgtgagcgtggggggcactcaggcccggacgggctctcaggtcgccgacggcggcggctggaggccgcgctggctgtcccaggtcgtcgttagctttagggagccgatctccgggcggccccacagaggacgcccgcgattcgatggcgatgatgcccgttttaaatggtgtccctgcagccgggtggatggatggatcgtacaccttgccttttgagagccgggaccttacgcccgactgcgtgttatttctgcggaataagaacgcaacctttggaggtgaagacgactgtcggctggattgaattggaatcgtgtttgtgatgatgcgtttatttctggaaatacgcggtctccgctgcttttgctttttgtcggcagaggtttgggttcttctctaacggtcaggataaaggcctgtaggcgacgctgcgcgagcgagaagctcgcccgcggctgcccgggcgcccccctctaggtgtgggtggagccgagcgcgcggggagaaccgccggccccgactcagccaccggtgactgcgggcgacccgcgggcctgcggccagctgatttcaaacatcgttttcctctttaggttcggaaaactgaggcgctggacaaggctggaatacaatatgtgattatacgtacagtactatggttgttgtagtttttaaattgtaaaacaagaagtaaccattgttccaccgttctctattaagtttgtgtaaattaaaaaggggctattttcggtaaaaagtgcagtaggtaagcggaattttactcaaccgggacgaaattcgtgttatatgaattgtattgtgtatttgtgtgtgtaccagtgcgctaaaagtaagtaggaaaacttgcttagattattccttttgcctcaggccactcagggggccaagatcctgtcactccttttctctaggccctgcgaatggcttcccgtcttgaggggagtgagccaaagccttgactgcggcagaagtccccgcgcgccgttgagggtgggggcgggcctgccctggcatccttgcgagtaggactcttccctgagcgtcgtccacagggcttgctccttcaccttcaggattttgctcgtgtcactcggtgcttccgcggctacttttaaactgaaagttccctagcccccttctcattttatcctttggacagtctacatatccatacttgtttatcttcttatctctccttccccagtgcaatgtaagctctaagaggacaagaggttgtgtttttctgcactggtgttacggcccccgcctagaatgccacacagtagatgcgtagtatgtggttaaggaatgaatgcgattataagggccttgatgctcccccatttctgtctttaatatgtacttatatgctacagagagctttataaaagatttaaaacacgtttattacagaattctataaaaatatattgcttctaaacattggaaagccctccacaacaccagaaacccacaaatgagggataaaatttgtttttaggcttctgtaaatgagcatgcccgaggacagtgcatcaaatgatcatatccatactgggccgattatgtttgctcttctgagtctcaaactgcattcttcatcttgtcgtcctctgtctttcaaaatacattaaaagtgagaatttggttggctcagagcaaatccagcactattggaaaagttcattcagcaagtatttattgggcacaaatgggtaccaggcacgctaattcaaaaggtgtgtgtttctgaggctagaaggccttacataaaggaccacatgtggctactttggttgctactcaattatgctgtcaagcaaagcaaatgctagtgaaatttatttttagttttcttctgaagaaaaggttcaatgaaagctgaggtcaggcttggtgtggatattttaattcaccatttagtttgctgtttgcttacacttaggttagcattagatatacttaatcatgatttttgagtactataaaacgtgagaaatcttatttcctagtggctggaaaaacaggctttttaaattaaaataagtaaatatatcagtaagctagaagctatgcaataaggctttggctatggtattacaaattttcatatttcatgtattgaatttttggacaagaaaagacagccttgataggtattttataaccattaatacaattaatcaa

SEQ ID NO: 464864 - DNA, 2701 bp, Homo sapiens
  misc_feature (1)..(2): n is a, c, g, or t
  misc_feature (5)..(5): n is a, c, g, or t
  misc_feature (8)..(9): n is a, c, g, or t
nngangtnnaggtcctaattgcaatgcatttaaatgtttgatctccaccccaaagcgaggatgcccatgtgacacgcacgttagcttactatgcatgtgcacgcccaccttcatgaccgtccgtacctcctcctataacctgctgaatatgtggcctttagtgagccagtggctcggatttatgtggtcagattctgagccggcagacacaaggacaagccagcgagaggtgtggcaggactggagattctgtgtagtatgtatgtacagcaaaagcttcagagagaaactccaggccatgcaaactcatgaactaaactctgggagaggtgctggtgatgacctggaagggaaagatgagtgtttggcacaggacgggaccgaccgaaaagagacctggattaccctgtccctgatccttactggctgtggaatccagaaaaattctcctaacctgcagtctcagttttctcatctcaaaaatggggttaatattagtgtatgtatcacattatgttgtgaagattaaatgaaataatgaacatctggagcatagtaaatgctcaataaatgtaggctgaataaaaaagagatccccagaccagcattatacaacttccaagattcctattgtatattccagtaggtagagtagctttttttaaattaatggtacagataataagttactgtgcacagaaaacacccaacaggcagtgccggcatgagtttatgatactgttcctctttcttctgtgcagactctctttatgtctatggatatgtaaatatttaattaaaacatctttgtataaaataaatggtggtataaggaaatggaaaaaaacccttacctgcagagaaaatttgtgaaatatatttttcacacagaagggagtagagtcactacgcatagaatataggcatgttcaagtttggtaagtcattccagaccttttccaagggattccactgatgtacgcccttccacacagcggatgagagctggtgttcctgcataccctcactaatgcttggatttaagatgggccaatttggtggaggtgaagtgcaatgtcaccatggtctccatctgccctgccccagtgccactgaggtgaagcatatgattatgggctattcatcttccctcctctgctaagtgacggctcaaggctcacacttgtttttttctattgggctgtttgccgttttattataatttgtagttctttatatcttctctgcatacattctttattagttttatgtaatacaaacatatctctttcagtttttgtcttttttccaccctttgttgtgttttttgatcaagatacataattaaattgattacttaagttaaaattaaactcttaaattttaatgtggtctaatttatcaagtgttttctttaatatttgtacatccttgtcttgtataatgaatgtctgtgttctaaatttgtaaagatattttcttacataaacttctaaacattttatgaatttgtcttttatagtcatttattctatctgaaattgatttttaagactggtgtaatatagaaattcacgttcattcttttccatttggataagcagcaacattaattttttaaagttttttgaattgataatacattcacacgcagcaaagtatcaaagcaatgtcaaatggcttacagtgaaaagtcttacttcccctccctcacaacccagttctccacctgtgcacctacagacaacgacttttagtcattattttataaatttccttggcatctctgtgtaagtgcaagaaaacatgaaattatatttccattttccttctttgctagactcctaagaaacttgttttttcacaattcgcagtagaccttggcaattgttcaaagtccctaccaagaccttccttgttctttttgagggatggcacagtattccattgtacagtaaagccatatctagagattttcttttcactcatgatgtaacagactggatctgcctccctccccaccttaagcaattggaatttctgaagctaaactctagaacgcaggaagctgtggagacagaagtgataacaaactccagagatgtgtggagcattctccttgagtctctgagttggtcgtgatctgcactggagtaatgtggaatgaatgaagatatgtctcttcaagccttttgcccatttttaattgggtgtttgtgttttgttattgagtcatagagttatttgtatggcctggctagcagacccttatcaaatatatgatttgcaaaatagttctcccattctataggttgtcttttcactttatttataatgtattttaaagcacaaagcttttggttttgatggagcccaatttttctatttttttcttttgctacttgtgcttttggcttcctgtgtaaaaaccccttgcaaaatccaagatcatgaagatttacttctgtgttttcttctaagagttttatagttttagctctcacatttaggttgttggttcattatgagttaattattgtaaatgatgtgatgtaagcatccagcttcattcttttgcatattggtagccagctgttccagcatcatttgttgaagaaactgtgtttcccatttgaattttattggtgtccttgttgaaaatcaattggccttagatgtatgggtttatttttgggctctt

SEQ ID NO: 464865 - DNA, 2265 bp, Homo sapiens
aaatgttagtgagactgtagggtgggcggtgcgagcggcggttagctcccagttcggcctctgaggaaaacgggcgttcgcctgcggttggtccgactgttagcaacatgagcggcctggatggggtcaagaggaccactcccctccaaacccacagcatcattatttctgaccaagtcccgagcgaccaggacgcacaccagtacctgaggctccgcgaccaaagcgaggcgacacaggtgatggcggagccgggtgagggaggctcggagaccgtcgcgctcccgcctccaccgccttcagaggaggggggcgtaccccaggatgccgcgggccgtggcggtactccccagatccgagttgttgggggtcgcggtcatgtggcgatcaaagccgggcaggaagagggccagcctcccgccgaaggcctggcagccgcttctgtggtgatggcagccgaccgcagcctgaaaaagggcgttcagggtggagagaaggccctagaaatctgtggcgcccagagatccgcgtctgagctgacggcgggggcggaggctgaggcggaggaggtgaagacaggaaagtgcgccaccgtctcagcagccgtggctgagagggagagcgctgaggtggtggtgaaggaaggcctggcggagaaggaggtaatggaggagcagatggaggtagaggagcagccgccagaaggtgaagaaatagaaagtggcggaggaggatagattggaggaggaggcgagggaggaagaagggccctggcctttgcatgaggctctccgcatggaccctctggaggccatccagctggaactggacactgtgaatgctcaggccgacagggccttccaacagctggagcacaagtttgggcggatgcgtcgacactacctggagcggaggaactacatcattcagaatatcccgggcttctggatgactgcttttcgaaaccacccccagttgtccgccatgattaggggccaagatgcagagatgttaaggtacataaccaatttagaggtgaaggaactcagacaccctagaaccggttgcaagttcaagttcttctttagaagaaacccctacttcagaaacaagctgattgtcaaggaatatgaggtaagatcctccggccgagtggtgtctctttctactccaattatatggcgcagggggcatgaaccccagtccttcattcgcagaaaccaagacctcatctgcagcttcttcacttggttttcagaccacagccttccagagtccgacaaaattgctgagattattaaagaggatctgtggccaaatccactgcaatactacctgttgcgtgaaggagtccgtagagcccgacctccaactgctcctttccattaccctaaagctgtggatcataaagagtgttctccagaccagcagtatctgcaccacctggatcttgttagaaatgcagattttcaaaccccacccatgagctactgaaacagaactctgaaggggatatttgggaaattttcagtagtaattttggttattacgatgaatagggctgcagctggtattcattaagggcattagggatgctagacatcgtgaatgtgagggatagtgccctatataaaataattttccagctcaaaacattcatgtagatgaaaaattcattattttttaagtctagaacatagcagttcagtcatgtttcacttaacaatgagacattctgagaaatgtgtcattaggcaatttcatcattgtgcaaacatcatacaatatacttacacaaacctaaatgctatagcctactacacatgtaggctctatggtatagtctattgctcctaggctacaagcctgtgcagcatattactgtactgaattctataagcaataggaacacaatggcaagtatttgtgtaactaaacatatctaacatatgttgtgtaactaacatatctacatagaaaaactactgtaaaaagatggcataaaatattttaaaatggtatacctgtataggacacttaccattaatggagcctgtaggactggaagttgatctgggtgagtcagtgagtgagtgcctccagtactcattctgcaagttttgatgctggcactttcttgactttaccagaagatatcaacagaatattttcagggaacaaataaggcttattttccttcctcaaatggctcttaaagagtttactgattgaaacgtcaagaggttgcagttgtccaataatgtc

SEQ ID NO: 464866 - DNA, 2444 bp, Homo sapiens
  misc_feature (620)..(620): n is a, c, g, or t
  misc_feature (626)..(626): n is a, c, g, or t
  misc_feature (629)..(631): n is a, c, g, or t
  misc_feature (633)..(633): n is a, c, g, or t
  misc_feature (635)..(635): n is a, c, g, or t
  misc_feature (637)..(637): n is a, c, g, or t
gccgtgcttccctgctgcagccggcatgagggcagcagacacttccatcagtgggcgagaaatcatgtatgttgcagaaatggccagaaatctttataattcttcatggattataaaggatgctttagtggttctgcccaagcaaatactatttaattttccttttaatatgatattgcaggtatcattctttgatacagaaaattgtatttcaaaatgtgtccttcaggtggtctatatctgcaaggatataggcctccatccgaagagttcaagactttctatttctgtgcggaaaatgaaacagaaaaccgacggtaagtcaagatctttgtatttcttctcctttaccagtcctgagaaggccttcttagcaaactctcatccttactttccagctccaacttcacatcttcagttcaattctccctcttcctttgcagtcttcatagctaatactctccaggatttttgtcaatgcatccttagataactcttctagaagtgtttttttttttttttcaaatggaaaaataatttgcacatctggagaactgagggaaggtcttcatactcataagtgggagttcctcgttccactcttttcaaaaaaggttggnacaggnttnnncntnanaggccatgtggagaagttcacatgcggaggtgatgtgatggctgatctccaatggtgacacattacacggtattgctttgtgcttttgttgccgacttccctttttcctcaccttcaccttcctgggcttatgccacacaagtatcaaaacgctgattcttgagtgtatctgtttttggaggatctaagctaagacagattattttaaaatataaagatatatactcaaagaaatggctgctctggtgagtgaaactgaagtatagggaaggtgaggtagattattactttccattgtaagcccgattttaaaaattattgccatatattactttcattaaataaaaatttaaaagctaatatattgtaactaccattatatgcattttagattgctcacatacctttcaataagttttccccacagattggaggaataaactaacaattattttagtattataataatgttgtgacataaacgtctgcattcatacacattttatagatttttctggaataaaaaacccttttatgaaaagtgaaggaagatgtcaccttcagatcaatacctccttgtatcctgcttaaagtgcgatattcttgaaatggcagcaactgcttcataacagaatagcaataagccaatctatagactcatcttaatgaattatagaggaaagagaagcagataaaaaaagaaaccattttatttttatattgagtgccttttgtaaaatggaacttagggtggaattaatgatttaattaaaccacttaatgttttattaaagtcaatatggcctagagttcctgtgcaatcatcaatttatcaataaaacttcatatttgtttttgccaaagaatttatatttattgttagacatgcctgtattacagagatctaattgttttcagaaaattatatatgcccttgtattccaaaacccttccattagaggagcacaaatttctactaaaaaaaaaaaaaaaagtcaggtcaggctctgaaaccatgatttattcagcttggttactactctccatgaggagttctatttctgctctattcagcagaatacctgctcagcttctacagtgaaggaggggctcaaggtcaccaatgcaaaacccacctgaggtggatgcctcctgtaggacgcactgaagcaccaaagttctgccaggaattcattgatgaaagcagatgacatctgagataatacctggtcagactcacctgaagcccatggaggatttatctttgtttctaccaactgtacaataagattttaaaatagcacattcttaattgtctgtatttatgtatattctcctgaaaaactgttatgtaagcagattttctttaaacatgcatccaaaggaaattcccaagtcaattagttcatactaagagaatacaaacttatttaacatcaacctaagtaaaatccactggagaagataagtgtgtagcttagaattacagattgtattctctagtcaaagatacataaattaggccttaaaaagttactttggatcatgtttacttttattactgtctatctggatagataattggatgttattgctcatccctcattttctagaatgagtgttcttagtgtcaagaataaaaatggacgtatgtacatcaagtcttgttccatgtaatgctgtccttgtgtcaaggagagtaaattgtggtaaatctctgatgtctggatagcctaacactaggatgagaatactgaacttgcttaacaccaaacttgtcacctttcaaacacagtatctcatgtaa

SEQ ID NO: 464867 - DNA, 2532 bp, Homo sapiens
ctctcccaccagtaaaggaaaacagaagagtgataaaaggagctgcagttactgtatgttcagggttgctgcctcgatgaatgcttggaggcagtcgattcttctagcacatgagagggccagcacagctattcctctggcaaagggaccagttacaaattctacattttaccactatccatcagctgctgaaaagctgactgaaacctctgggtgccaacacaacttagtcccagataaagccaaagtcatcacaaaggcctgcaagaccctacaccttctgtatcccagttatttcccgctttgtccactcattccaggtctccttggtcctcaacatgtcctaaccctcctgccaagagtctttgcaggtgctggttcctctgcctggagcatggagtcctcagatccccacactggggatccctcacctccttcaagtcctgactcaaatgttaccttatccgcaagcacatccctaatcaccaccctcattaaaattataacctcgctctccatcctgctgccctgattgaatttgctctatggtctatatcagcatataacataacatacagtgtactatttgctgaatgtttctctttccctgttaaatatcagctccacaaaggcagggatttgggttggctttgttcactgttgtatctgcagcaactagaacagtgcctagcatgtagcaggtgctcagtagatacttgctgaatgaagaaataattaaatgaattagccagtttgtggtgaagattaatggagataattacaggcatataagaagtacttgctaaatgctaactgctagtgctattaatgttattgaagccatcattccaggaggtagtcaagatgaaaagcactaagttggagattttaggtaatttcacagtggatggatccacaagtattacagtttttaagatacattggaatgattgaggctgagatatattcttatgctgtgtgattattgagtttaacccattaagtaaaccatatattttatgttcaccatgtctcattagtccattcaacagctgcctgcctaaatgccaatgccaataaagctgaattgtagcaatttctggacacagaggacttaaactgacataggcatcacctccatgtgagaaaattcctttggcggactatcatcaaaatgtgtttaaactcaaataattgtgtgcctctataataataggacattttccttccaatgaaatggctttttgtccaacggtagaaatatataaattacccggattaaaaagcatgtggagacaagaggatacactcaattcctgtcactgaacatgcagtggatttagagggagcccggactgtgatgtacagtgtgccctacaggtctttctggacctaaggggaaaaaatgtccttcaaaaataacgtagttattgacgtcagtaagtctgaagtaaaacaattacgtgctttcaagtcattttgttgcaaacagctatgcattgagagtcagctgaacgtctgacattatcctagaagttgtgcaaaggcaaaaagtttaagagtcagttcctagccccaagaaatatacaaatgatttgtcaggcaatgtatgcacacatgaaacatggcaatgttcagggcagcatgtgattgactgccaaagtgtctcgagcaggaagtaccaagggaggatggagatggtaataatcagggttgggtggagaatatctgaggaaactgcacttgatttgggccttgaagagtaattgactggatttagatttatctagaaaggtcgttcccagcagaagcaacaagaacaacaagcttggagagcatcctgcactgccttactcaaaatatcaacctcctgcacatctccaaaacatcatgagctgcttgtgtgggtaggattccataggattcagcataaagtatgttcagcatggtttgttcaaaccatgtttttaaacattcagtgaataaaacgtttaacccctgaataaagactaaagtatatcttaaggatatagaattataagagaggctttattgcaaatcaagtattttatcaagtatagggagagggaaagtaaaccaaatgagttagtctgtgtttattagctgctttccccttattgtcaaaaaagggggggtgcacctcagggttggaagatgactttagcaaagtagagaagaggatttatttcctctacttttctgatcgtgcaaaaaaagaaaaaaaaaaagtaaagctcagtaagcatagagaagaaataaatacaagccttcccaaagatcataaggcaactttatttctgaaaaagaaatgtcagttttgagaactggaaaagagcaggaaaaagccaacaagagatctcaaaccaagcatcagataaaaccaaggacatatttacaacatccatagagtgcactggatgctcaccaggtaagaagaaataagagctttctagttggacaaaaaggaaaattaagtgtaacatgatgggggaaaaaaagataaattattct

SEQ ID NO: 464868 - DNA, 2215 bp, Homo sapiens
ctctcccaccagtaaaggaaaacagaagagtgataaaaggagctgcagttactgtatgttcagggttgctgcctcgatgaatgcttggaggcagtcgattcttctagcacatgagagggccagcacagctattcctctggcaaagggaccagttacaaattctacattttaccactatccatcagctgctgaaaagctgactgaaacctctgggtgccaacacaacttagtcccagataaagccaaagtcatcacaaaggcctgcaagaccctacaccttctgtatcccagttatttcccgctttgtccactcattccaggtctccttggtcctcaacatgtcctaaccctcctgccaagagtctttgcaggtgctggttcctctgcctggagcatggagtcctcagatccccacactggggatccctcacctccttcaagtcctgactcaaatgttaccttatccgcaagcacatccctaatcaccaccctcattaaaattataacctcgctctccatcctgctgccctgattgaatttgctctatggtctatatcagcatataacataacatacagtgtactatttgctgaatgtttctctttccctgttaaatatcagctccacaaaggcagggatttgggttggctttgttcactgttgtatctgcagcaactagaacagtgcctagcatgtagcaggtgctcagtagatacttgctgaatgaagaaataattaaatgaattagccagtttgtggtgaagattaatggagataattacaggcatataagaagtacttgctaaatgctaactgctagtgctattaatgttattgaagccatcattccaggaggtagtcaagatgaaaagcactaagttggagattttaggtaatttcacagtggatggatccacaagtattacagtttttaagatacattggaatgattgaggctgagatatattcttatgctgtgtgattattgagtttaacccattaagtaaaccatatattttatgttcaccatgtctcattagtccattcaacagctgcctgcctaaatgccaatgccaataaagctgaattgtagcaatttctggacacagaggacttaaactgacataggcatcacctccatgtgagaaaattcctttggcggactatcatcaaaatgtgtttaaactcaaataattgtgtgcctctataataataggacattttccttccaatgaaatggctttttgtccaacggtagaaatatataaattacccggattaaaaagcatgtggagacaagaggatacactcaattcctgtcactgaacatgcagtggatttagagggagcccggactgtgatgtacagtgtgccctacaggtctttctggacctaaggggaaaaaatgtccttcaaaaataacgtagttattgacgtcagtaagtctgaagtaaaacaattacgtgctttcaagtcattttgttgcaaacagctatgcattgagagtcagctgaacgtctgacattatcctagaagttgtgcaaaggcaaaaagtttaagagtcagttcctagccccaagaaatatacaaatgatttgtcaggcaatgtatgcacacatgaaacatggcaatgttcagggcagcatgtgattgactgccaaagtgtctcgagcaggaagtaccaagggaggatggagatggtaataatcagggttgggtggagaatatctgaggaaactgcacttgatttgggccttgaagagtaattgactggatttagatttatctagaaaggtcgttcccagcagaagcaacaagaacaacaagcttggagctgcgtttcctctgagagaacagcggtcttctgtctgctgtggcaagcaagtcacttcttcttgtagtgagaactgaaaccagaaccatcatgtgccacttcctggacacctcctattaaatattaaagtcctctcaccacagaagccggagtttagtggttaggggcacaggttcttagatatgaacatcagttgcaacctaccaactgcatgctcttggacaatttacatttctgtgtatcagctttcctttttctttagaatgagatattaatagtagcaacccagaattgtcatgaagcctaactaagtttttatatataaagagagttagaagagggcttggaatgtaacaataactcaataaatattggcctatt

SEQ ID NO: 464869 - DNA, 1849 bp, Homo sapiens
tcttccacgggccatttcggctcagactgacaagcatgaacggaacggaattattccctcttctaactgcagccacgatttggcgttttaacaccgggctcaaggtagcctgggtctctcttggccaaagagcccagggatgcctctaactccttttctaaagccggccacggaggccccgccctctgcagggaggctccggatcatgccccctgctcctcccactactgctttgcgcctgcgcggaggctcggggagtcggcgccatgaccccatcgaggcttccctggttgcttagctgggtctcggccacggcgtggagagcggcaagaatccgcgctcctggtccaggctccagcagaaaaggatttgtggcagtttacagtttatcttttaaaaatgggaaaagtgcagaagtgagccaaaggcaaataagtataacgtaaattagatgaagccaggaattgtcagtacagaaaaagcattcatgctttcagtaaaaccaacatttttaaacccattgttgttggaaatttttctcaagataatacagaaaacaagttcttctcaaggaggaaagtctgaacttgtcaaacagtcccttaagaagccgaagttaccagaaggtcgttttgatgcaccagaggattcccatttagagaaagaaccactggaaaaatttccagatgatgttaatccagtgaccaaagaaaaaggtggacccaggggcccagaacctacccgatatggagattgggaacgaaaaggacgctggcttgctgccccgggctgccttggacctctactcctgggcattctggctgctcaagcagctctagctcaggtggtccccagtgtggctcgacctgccactccaaaaggtccaagttgtaaatcttggcagcactgtccagtgatgcaagtggtctcagatgctgctcatgcccccactccagagggcacaagcagtgagccttggcgacctgcacatgctgcttattctgcaggcacacagcaagagctggcaatgctgagtggaaatgtgggaccagagctgctgcagaaagttcccaacagagcagtgcactctggagccgcaggggcaggaccaccctgggacctcagaactgtagagctaccagtatgcaacaccagcctggaaaagctgcaggcacctgactccaacctgtgagagtagccatgtggactacagcaagcaaagccataggcatgagattgcccaatgttttggagacccactccctacctcagtgttcacaggatgccagcatggagtcaaaagagattattttccagcttcaagggtttttttttgtgtgtgtgtgtgatggagtctcattcttcattctgtcactctggctggaatgcatgagcctagatcacaccattgcactccagcctgggtgaaaagagtgaaactccatctcagaaaaaaaaaaaaaatcattttttaataaattacctagtttcagctattcttttataagcaacagaaaatggactaagacaatgtcatggctggcatgcagaacacttcccttctacacatctggctttgttctccattctaaccttttggggagcattttcattctgaaggggttagaatgccacaaattacatttctagtgagttatgcatgcaaattaagttctgccaattagatgcacttattgtgatttgaaagggaatgtgagggaaggctaccttcccactgctggtttttctcgctggctgatacagttgtggagaccgtgaatttgtctgcagcagcactccactctgtagttactagtcttgtgaggaccgtcatttccttgattaggct

SEQ ID NO: 464870 - DNA, 601 bp, Homo sapiens
tgggtggagctgcccaagaccatgggaacccacttcttgcattggcatgacctggatgtgagtcatggagtcaaaggagatcattttggaactttaagacttgactgccccaatgattttggacttgcatgggcctttagccctttgttttgtttcaaaggggagacgctgccaccaggagacacaacaattattccattaaactggaaattaagattgccacctggacactttgggttcctcctacctttaagtcaacaggctaagaagggagttacagtgttggctggggtgattgacccagactatcaagatgaaatcagtctaccactccacaacagagaaatggctgaggaaagagacttactggtatctacagactgggtcatcctatctacttgttttttacaattctcctctactgaggtcatcctttgctgatcatagcgaacttcccatgaggttacagctacaggctgagaagaggagccattgtagcaaagcagaaaccatggacatttgtgccacttcttcatggaccttacttgtgccttcaggacctgcctgggtttgatcatgtatataccacttacattgatga

SEQ ID NO: 464871 - DNA, 333 bp, Homo sapiens
cgggacagagcggagcagctgggcacggcgtccagggcagctagggcctgggccgcggttcggccgcgccggccgaaatggctgaggaaagagacttactggtatctacagactgggtcatcctatctacttgttttttacaattctcctctactgaggtcatcctttgctgatcatagcgaacttcccatgaggttacagctacaggctgagaagaggagccattgtagcaaagcagaaaccatggacatttgtgccacttcttcatggaccttacttgtgccttcaggacctgcctgggtttgatcatgtatataccacttacattgatga

SEQ ID NO: 464872 - DNA, 650 bp, Homo sapiens
cgtcggttccggggcggatgacccctctccaaacggcgcagcgctgcggctctcgtgagctgggaagtagggggcaggggagaggccgcgggtccagaaaccgttactggatgggccgggtgcgcgaggcgggtgccctgggcgcgcccgaactggctgagcagtggagcgggaaagggcgcgggacccgggactgtaaccgccacttccaggccctcgctccccgcgcttggagccctcaagggcactctcagggatcctcgagagccttaaaacagaagtctctggaacctgtgtcctctccctgtctgtcccgccctcgaatccctgtgtcctcctcacccgctccctcctgcagtgagcatcccgggttgttggtaaagatcttggtgcctgggaggtcggagcttcgtctcctgaaatggtttatactagtgaaccctggcgccacgttctgtggcttataatcactttcgtcgtcgccgcatgaggaagcaaatgacaccgccccttaccctggaaaagtggctgcagccttccccggatcttagttttactcaccccgaagtcaatttctcggtaactccaccctgcaaaacctctgtgggactcatcttcagggcagagctaacagttttctttctggaaaa

SEQ ID NO: 464873 - DNA, 671 bp, Homo sapiens
cgtcggttccggggcggatgacccctctccaaacggcgcagcgctgcggctctcgtgagctgggaagtagggggcaggggagaggccgcgggtccagaaaccgttactggatgggccgggtgcgcgaggcgggtgccctgggcgcgcccgaactggctgagcagtggagcgggaaagggcgcgggacccgggactgtaaccgccacttccaggccctcgctccccgcgcttggagccctcaagggcactctcagggatcctcgagagccttaaaacagaagtctctggaacctgtgtcctctccctgtctgtcccgccctcgaatccctgtgtcctcctcacccgctccctcctgcatcgtctctgccttgaaccttggaaacaagtgctttcaacataagcgatgtgaaggcattaaaacatgttgaatggctgtgtgcacaggatatcctacacctgcctgacatctggaatgcaggtgaagcaacctgacctgatggagccacccacactttagaagaatctcaaatacagccaaccctgatcttcctcagctgaaaatcatccatctaccaaactcacaaattaaacataacgtaaatattattacgttatgccttgtgttgtggtgttaggcatgcacagatctgggtttatccccttgtgctaga

SEQ ID NO: 464874 - DNA, 4197 bp, Homo sapiens
gtatcattgcctctcaagaagtgcttcatggtggaaaagaatttaaaggaccagtaattactcagagtttgcttaactgccttttcttttcagtgcctctttaaggcggttatcaacaaacctgcctggactggtacaggtctgtggtttgctaggaaccgggctgcacagcaggcagtgagcagcaggggattaagatgttcctgtgtcatttcttggaagcagttttgtgtctccctccaaatagtccaccacctggctgcaccccacctccatctgtcccccagctaccaggtaatagtgaatggttcagaaggtgctgctctagggcagccaggcctttagctgcaacacagaacaatgaacagcagcaatttccaactcccttcatgggtctgatgcgaggtcattttgatgaccttctagttgcacaggatagagcagtaagacagcagaaacaccgctggcagcacctggcaggggacaagagccaaccttctgataacttaagagagattctccaaaatgtggccagattgcagggagtatcaaatatgagaaagctaggccatctgaataactttactaagcagtatctgctggataacttgttgcagcttctgtatcggcacctactgctttaccttgccattttatgttacggagatgggttctttcctttaacctcgtgaaccattcacacttttcttctgcagcttcctcacctctcagccttcataacatttaagagagttggggtcttgcttgctctggagtatgcagtgtatctctgtaatgaaggctctaaactttttgtactttttgtcttgtttgttttttgttttaccatatcctttttaaaatgattttcatatatccctctggccttggtgcaagctttgtagcagcccctttctttgctatgttgccatgattttaaaatcctgatagccaaacttattagaatttgtctattctaagaaattttaaggaataccagtattgtaatatcagcagtgttgcaatatctgatagcagctattctagtcctgtctcctaccctattctgtttgggaccccctcccctcccctcctctcctctcccctcctctcccctcctctcccctcctctcccctcctctcccctcctctcccctcctctcccctcctctcccttccccttccctccccttatttcctctaaagaaaaaattggacaggaaatttttacagttatcctaccaatagggtagtgaacttttatcagctttttcttagggtccatgcttctcgtggatgtgatgtgatatgttgatcactttggttgctttatactgtatggttacaatgtttataacttcatactgagaaagaatattagcactttggagacccttcttggtcttcagtgttaaataaatgatttatcttctctttaatccatttcagttagccgcaataaatcaattaaggacattatatgtaacttttaggtatatgtagaactagaatttctgggttataaggtacatgtatgtttagctttagtagatattgctaaatagtttgctaaatgattgcactgattatacttctactattatgtataggagtttcagtctccccgtgtccccatcaacacttgctattttcagtttttagttatatcctttcttgtgtggggtctcattgtggttttaacttgtgttccccgattttgaagctttgttgttacttcatgtttagaactgctaaatcttcttattgggcttaatccttttataattataaaataaccctctttattcctaggattattcttcattgcccttttaacagttgttttatactgtaaagtatttttttttttaaatcttcttggttgtttttgggaagacagtcagaacctctcatctctgacatggccaggaatggaattctaagtccatttgaattttaataggattgccttagattaattgtattcagatagaagaaatgctttttgaatcacagactatctatatataaagcattgattagaataatgaactgtctaaataaaaattatgcttctacataaaagactttcaaaactggataatttaataaattttacaaagaaatgtcagtttggtgctatttgtttggacatcaatatttgaagtgaattcagaattcaaattatattttggtaagatagaatttttatggatagtgcctaatttagtttaagccctggtcaaaattgcaattaaatgaaaacagccttgaattatttttcctttacaatttttataaaatgtctgaattttatcagagataagtgaatttttttagtagactttttacactttatgtttattattctttctttatgaatagatgtagtcttgtaaattactatactgttctttcctaacgttttaaaagaaaaaattggtcttttaaatgacagatatttatccctcgagatgtatgggttaattaaataaatatatgctggtactgagaaatcatataccaaaacaataatataccatattgacattgtgaaaatgggtttcatctatcagtattgtgatacaaaaagttgtttaatagaattttatcaatgattaatattttgtgtattgtttaggtgcattgacatacaacagagcaacgaggtagagaggacacaagcacttcgattagtcagaaaggtatgctctatgtgtgagagtaaaaggcaaatttatggtttttatgttaatatttacatttttagattagacttttgtgaaatctttattaagattaaagactaaacttttattaaacatttttattaaagttttatattaaataaattcattaaactttgagttaattgaaaaaactgacttagaaatgaatatgaaagcttttgtagattctacagttattggagatgtatttgatttatgcttgtagaactgtattctgtaatttcaggtgaactttgtaatatgtcttaaaaatgctgtttaaatgacaaaccacttacaactactgatcaaacagatctttcttttgatcttctgtaagacttaattgtgtgtctttcattagttatattacatcctctaattgtttcatctcacaagttttattttatcaacaggacaataaatctagtaatatctgggtcaaattaattttctctaatattttattactatacaaacaaaatattttatttccactccagtaacctgctattttgaattaatttgcaaaatagtctttatttattaaacaataattagctacataattttctgtttcccaaatcaaagacatatgttacctgttttcaatattccaaatgttactgccagttagatctttaatgtgagattcatacaaaattttattacaatatatttccatcaggatttttgaaatattaaaaatagatttggattatgaactctgctttctggtatagcaacaagtgattgatgggagaggtgactagagagtaaggagatcattagatatctattgcagtagtcagagtgagagtgagggcccaagttaattaatttcatgaggagaggggagtagagataaagatgttatggaagtaaattggtaggacttggtgatgatggtatatggagagttggtcaggatcgtaaaagtacagtagtatattgactactattgtcccctctggtttaccttgtctaggtactgaaaaactgtttaagatttaggccctattctagagtaatttaaaatctcagaaacatttggtcagtgaatttatagtctgtactgttagaaaaaaatctaacacattttccatagtaatggctattaacatttgttacatcaattattagttatattaatcttttgaaatatccataagcaaaagattaaaattgatacctagatcttattctggatcttattctgttattaactacttcagtctggacaaaataggtttaagaaatgtattactaaagtaacttctttttctgattccttctgttacagatgattactgtgaatgcttccttgtttcctagttctgtgaccaactcattaattgcagttggaaatgatggacttcaagaaagagacagaatggtccgagcatgcattgccattatctgtgaactaggtcagaattttcttcaagtaatgaaaatgtaatatttt

SEQ ID NO: 464875 - DNA, 605 bp, Homo sapiens
tgacatcacctattggtaagttctgtaatgccccttgagctgcaaaaccagcaagtttttataagggatttcaaaaggggagaggggtacaaacagggagatggcaaaggagatcccagggtgatagctgcaccaggagttgagagtacccagtctagattggagctgtgtgattcaagagacagacatgttaaaggatgtttgagcaatacccctgaagccatggaatggttttgtgaatctgaggacagaatggccagaatgagagctccatgcgggcagaaatttttgtctgctttgttcaatgctgtgtccctagtgcctagaacagtatctggcacatgctcttattctatggctgacctttctgccagcaagttttccttgtgtttaaaagcactacgattgaagcataaatgacaaatggaaagatgaaatacagaagccccacacttacaagcccttccatatgccaggcatgttccttaggttatcatatttagccctcatggcctccctccctttgtctgcaacatcaagaaattcatacaatgttctcacatatttgtgggacctaaaaattaaaacaatggaacttatggaca

SEQ ID NO: 464876 - DNA, 944 bp, Homo sapiens
acaccacaatctgcaagattacttcaacacagagaaggagaccaaatttcagctaagcccctgtcaccaccactgggagcttctgggcaaggggtccgcaaggtttatgtgactttgtggaaaaaaaaacaaacaaaaacacaggatgagggtgccttagatgaggcaaagaccatctggcctcaaaaagaaaaatccattcctggatgctgaaggactggtgatggatggctcaggccttggtagttcagagcaacagccacctggaagggactttgaacatgagtcaggcaggaagaggcagccccagaggtgggcttctcctggagaagatgcacaaagaaggaatggaaaccaccagggacatgtcacgaaggagaagggaggaaccgagggggacctacagagatgagagatgacagcatagcagacccagcaaaccatctctttccctccatcatcactaccaccatccaccaaggaaaccaaaccaaagaagacagatgtaccaaaaatgaaaacacaaagtgtaagaaagaagagataataagtgacatcaatctgatgatctgtgcgagcattaaaatgtcacgggaggacaaccaggagatcatggtgttcaggaaaaccagggaagaaggcatccaaagaataaaagagtgggcaacagtgcaaaatgttctagagggaccaaataagtgcaggcctggaaaggatcacttgaaggccttggctgtcatgggtgatcttgtcacaaaggcagatcctgagggcatctatttcctatgggcttctaagctcagctttggaccccacgctgggcctgatggttccccactttcaactctaggaatctctttctggcagacttcctcacaactcctgcacacttcctgctccctcaacaggaagcactgcaaatgagctgtcctcgcgttctttcc

SEQ ID NO: 464877 - DNA, 2040 bp, Homo sapiens
ttaggaaaagagactgtccccactctgtgacatacgcagggaggagtgtcctgaaagctgggggcccccgccctgctgggggagctgataatccagtcagagaagtcagccaggaggggcacagtggggacggtggggggcctaaggagagacaaagggaaggggctgtctgctgctccttcactagcctgggggctgggaaggacactaggtcatcatgccactgggctgctcctgctttgtcagtgtgtcctgtgggtgaccttgtgcacagctgtatgattgtgtttgctgctggacgtgaccgtctgcaccgtgtcctctaacatgggctctctgtgctgctgggtggggctgacatgtggcacaccgtggcgtgtgtggttgtacgcgctgttgcggccggccctgctggcattgccatgggcagcgtgggcagcctgttggaacggcaggacttctcccctgaagagctgcgggcggcacttgccgggtctcggggctcccgccagcctgatgggctcctccggaagggcttgggccagcgtgagttcctcagctacctgcacctccccaagaaggacagcaagagcaccaagaacaccaagcgggcccctcggaacgagcctgccgactatgccaccctctactaccgggaacattctcgcgcgggtgacttcagcaagacctcgctgccagaacggggtcgctttgacaagtgccgcattcgcccctcagtgttcaagcctacggcgggcaacgggaaaggcttcctatccatgcaaagcctggcgtcccacaaaggccagaagctgtggcgcagcaatggcagcctgcacacgctggcctgccacccgcccctgagccccgggccccgggccagccaggcccgggcacagctgctgcacgccctcagcctagatgagggcggccctgagcccgagcccagcctgtccgactcctccagtgggggtagttttggtcgcagtcctggtactggccctagccccttcagctcctcccttggccaccttaaccacctcgggggctccctggaccgggcctctcaaggacccaaggaggctgggccaccagctgtgctgagctgcctgcccgagccaccacccccctacgagttctcctgctcctctgccgaggaaatgggagccgtgctgcccgagacctgtgaggagctcaagaggggccttggcgatgaggacggctccaaccccttcacgcaggtgctggaggagcgccagcggctgtggctggctgagctgaagcgcctgtatgtggagcggctgcacgaggtgacccagaaggctgagcgcagcgagcgcaacctccagctgcagctgtttatggctcagcaggagcagcggcgcctgcgcaaggagctgcgggctcagcagggcctggctccggagcctcgggcccccggcaccctcccagaggctgaccccagtgcacgaccagaggaggaagcccgatgggagtctgaagacacaacttcggggcagcgggcacaagcccaggctcaggacgcagagctggtccggctgcgcgaggctgtgcgcagcctgcaggagcaggcccctcgggaggaagccccaggcagtgagcgaattcggggccaggagcaggcgctgcgctttgagcaggagcggcggacttggcaggaggagaaggagcgcgtgctgcgctaccagcgggagatccagggagggtacatggacatggcagctcagggaacttctgagaagttatctgcagagagccccccctcactccctttggctaccctggccgtgcctggcagcccctcaggccccacagcccctggcaaccactgatctgctttcacaataaccgtatggggttttttctctttccttttttgcacacagtcctgctgtgggccttctcccctgctatatatcataaggtttttgagccgcagtttccttatgtatacgtggaggacactggcttcttgagtatctctgagtacctcctgtgtgcaaagcatatggtgttggc

SEQ ID NO: 464878 - DNA, 1520 bp, Homo sapiens
gctcccagaaattcttgggatatcatgtacggggctgcagggtccctgcttgagcaagtgggaataagacccctctggcaggaaagtaggagcacccccagggcttctgccccgggcctctgcacagactccaggggcacctgtggggctgagggcaagtggcagcacagtgcctccggccaggactggcccagccctcttccctgtgcccagctcctccccatggaagaaaggggagaacaggactggctacttgaggacaccagggactgggcctgcctgagagtgacagttctgggactctccctgctcccggtgaatgccagccagggtgtggggcccaggaggctccagtgctttcccagtccaaaggtcactaactgcccagccgctgggagtgtgtgcagggggcggttctccagccagggaggtgcaggaataaagggggtgtggggagacaggaagaggctgagcttgtggggcctgagagcctctcccctgggcagggtggggtcattgggctgccttagattcccccccccacctctcagcctgctgcctctggacaaagctctgcagaggagccccatctccttcagccccctcctgcctttggggtgcaagtttcctgaaggacttgagtgagatgtcaccaagcaacaggctgtcaggctcttggcagcaagtactggcccagcgactcgcggcagagtctctccttggggcgtctgtccttatcaggggtggatgctgtcagacttgctaatggtggaatttctggcatgtggcagggccaagtgcagtggctcacacctataatcccagcactttgggaggctgaggcacgaggattgcttgagcccaggagttcatcaccagcctgggcaatatagccagacccggtctccacaaaaaaatttttaaaaattagctgggcatggtggcctgtgcctgtagtcccagctctttgggagactgaggcaggaggatcaacttgagcccagaaggtcgaagctgcagtaagccatggtcatgccagcggagttgagcctggaccacagagcaagacactatagggaagacagccaggtgaaaatgaaggcagagaccagagttatgcatccgaaaggcaaggaatgccgggggctgccagaagctggaagaggcaaggcaggatcccccactaaaggccttggagggagcatggctttagcagcacctcaatttgggatgtctattctcctgctgcccagtgtgcccttctctcatccctccagctggtctctcactgccttcgagccccatcacctgctcgggctccccctctgtgtgtccccagttctggacacttattcagcagacctgtaagttttgctggccagcctatctccctggctagactgaaggctccttcagggcaggcctaacctgtgctagggcagcatgatgcctggtacagaataggggctccttagatgtggggtaaataaaggaatgctcgaagggtgatgggcccctgt

SEQ ID NO: 464879 - DNA, 1614 bp, Homo sapiens
gctcccagaaattcttgggatatcatgtacggggctgcagggtccctgcttgagcaagtgggaataagacccctctggcaggaaagtaggagcacccccagggcttctgccccgggcctctgcacagactccaggggcacctgtggggctgagggcaagtggcagcacagtgcctccggccaggactggcccagccctcttccctgtgcccagctcctccccatggaagaaaggggagaacaggactggctacttgaggacaccagggactgggcctgcctgagagtgacagttctgggactctccctgctcccggtgaatgccagccagggtgtggggcccaggaggctccagtgctttcccagtccaaaggtcactaactgcccagccgctgggagtgtgtgcagggggcggttctccagccagggaggtgcaggaataaagggggtgtggggagacaggaagaggctgagcttgtggggcctgagagcctctcccctgggcagggtggggtcattgggctgccttagattcccccccccacctctcagcctgctgcctctggacaaagctctgcagaggagccccatctccttcagccccctcctgcctttggggtgcaagtttcctgaaggacttgagtgagatgtcaccaagcaacaggctgtcaggctcttggcagcaagtactggcccagcgactcgcggcagagtctctccttggggcgtctgtccttatcaggggtggatgctgtcagacttgctaatggtggaatttctggcatgtggcagggccaagtgcagtggctcacacctataatcccagcactttgggaggctgaggcacgaggattgcttgagcccaggagttcatcaccagcctgggcaatatagccagacccggtctccacaaaaaaatttttaaaaattagctgggcatggtggcctgtgcctgtagtcccagctctttgggagactgaggcaggaggatcaacttgagcccagaaggtcgaagctgcagtaagccatggtcatgccagcggagttgagcctggaccacagagcaagacactatagggaagacagccaggtgaaaatgaaggcagagaccagagttatgcatccgaaaggcaaggaatgccgggggctgccagaagctggaagaggcaaggcaggatcccccactaaaggccttggagggagcatggctttagcagcacctcaatttgggatgtctattttccggaacagcgggaataagtgtctgctgctgtaagccaccctgcctgtggcactttgttacagcagcccaggaacctgacccagccaggctgctcctgctgcccagtgtgcccttctctcatccctccagctggtctctcactgccttcgagccccatcacctgctcgggctccccctctgtgtgtccccagttctggacacttattcagcagacctgtaagttttgctggccagcctatctccctggctagactgaaggctccttcagggcaggcctaacctgtgctagggcagcatgatgcctggtacagaataggggctccttagatgtggggtaaataaaggaatgctcgaagggtgatgggcccctgt

SEQ ID NO: 464880 - DNA, 5954 bp, Homo sapiens
  misc_feature (2)..(2): n is a, c, g, or t
tntctcagatgggaggtctctagccggcagcgactcaagccagcacctctcccacccggggccctttcagctcctggacatagttcctccctgtctcttcattagaacccatctgtcctgggtccttagggagcttagggatttgttaagtgtcccacttattatttattcatctctgatttactgtttttattattatactttaagttctgggatacatgtgcaggatgtgcaggtttgttacgtaggtatacatgtggtttgcagcatggtggtttgctgcacctatcaacccgtcatctacattaggtatttctcctaatgctatccctcccctagccccccaaccccctgacaggcctcagtgtatgatgttcccctccctgtgtccatgtgttctcattgttcaactcctacttttgagtgagaacatgtggtgtttgtttttctgttcctgtgttagtttgctaagaatgatggtttccaggttcatccatgtccctgcaaaggacatgaactcatccttttttatggctgcctagtattccatggtgtatatgtaccacattttctttatccagtctattattaatgggcatttgggttggttccaagtctttgctattgtgaacagtgctgcaataaacatgtgttcatgtgtctttatagtagaatgatttatagccttggggtatatacccagtaatgggattgcagggtcaaatggtatttctggttctagatccttgaggaatcaccacactgtcttccacaatggttgaactaatttacactcccaccaactgtgtaaaagcgttcctgtttctccacatcctctccagtctgtttcctgactttttaatgattgccattctaattggtgtgagatggtatctcattgtggttttgatttgcatttctctgatgaccagtgatgatgagctttttttcatgtttgttggccacatacatgtcttcttttgagaagtgtctgttcatatcctttgcccactttttgatggggctgtttttttcttgtaaatttgtttaagttccttatagattctggatattatccctttgtcagatagatagattgcaaaatttttctcccattctgtaggttgcctgttcactctgatgatagtttcttttgctgtgcagaagctctttagtttaattagatcccttttgtcaattttggcttttgttgccattgcttttggtgttttagtcatgaagtctttgcccatgcctctgtcctgactggtattgcctaggttttcttctaggaattttatggttttaggtcttacgtttaagtctttaatccatcttgagttaatttttgtataaggtgtaaggaaggggtccagtttcagttttctgcatatggctagccagttttcccaacaccatttgttaaatagggaatcttttccccattgcttgtttttgtcaggtttgtcaaagattagatggttgtagatgtgtggtgttatttctgaggcctctgttctgttccattggtctgtatatctgttttggtaccagtaccgtgctgtttttattactgtagacttgtagtgtagtttgaagtcaggtagcgtgatgccttcagctttgttctttttgcttaggattgttttggctatatggctcttttttggttccatatgatatttaaagtagttttttctaattctgtgaagaaagtcagtgatagcttgatgggcatagcattgaatctataaattactttgggcagtctgattacttttgcatatactcacatctggatctgtaaaccataggccagataaggacatttttctgttgttggttaaaaagaaatttctcgatttaccctccccttcccaccgtgctggcctgcgcgcgcggacgtgcgcgctccgccctcgggccgcctgcactgcaattggttggtgtctctgggagggatttgaaacttggcggttaaagctccggctgggacagggcggcgggagaccccgggtgaacggggaagggacatttagtttgagacggtgctgagataggatcatgaaggaagaggtgaagggaattcctgtaagagtggcactgcgttgtcgccctctggtccccaaagagattagcgagggctgccagatgtgcctttccttcgtgcccggggagactcaggtggtggttggtactgataaatccttcacctacgattttgtgtttgacccctgtactgagcaggaagaagtcttcaataaagcagtagcgccgctcataaaaggcatatttaaaggatataatgcaacggtcctggcctatgggcagactggctctggaaaaacctattcaatgggaggtgcatacactgcggagcaggagaatgaaccaacagttggcattattcctagggtaatacaactgctcttcaaagaaattgataaaaagagtgactttgaatttactctgaaagtgtcttacttagagatttacaatgaagaaattttggatcttctatgcccatctcgtgagaaagctcaaataaatatacgggaggatcctaaggaaggcataaagattgtgggactcactgagaagactgttttagttgccttggatactgtttcctgtttggagcagggcaacaactctaggactgtggcctccacagctatgaactcccagtcgtcccgatctcatgccatctttacaatctccatagagcaaagaaagaaaagtgacaagaattgcagctttcgctccaagctgcatcttgtagatctcgctggatcagaaagacagaagaaaaccaaggctgaaggggatcgtctaaaagagggtattaatattaaccgaggcctcctatgcttgggaaatgtaatcagtgctcttggagatgacaaaaagggtagctttgtgccctacagagattccaagttaactcgactgctgcaagattctctaggaggtaacagccacactcttatgatagcctgtgtgagtcctgctgactccaatctagaggaaacattaagtacccttcgctatgctgacagagcaagaaaaatcaagaacaaacctattgttaatattgatccccacacagctgaacttaatcatctaaagcaacaggtacaacagctacaagtcttgttgctacaagcccatggaggtaccctgcctggatctataaatgcagaaccatcagagaatctacaatccctgatggagaagaatcagtccctggtagaggagaatgaaaaattaagtcgttgtctgagcaaggcagctggtcagacagcccagatgttggagaggatcattttgacagagcaagtgaatgaaaaactgaacgccaagctagaagagctcaggcagcatgtggcctgcaagctggatcttcaaaagctagtggagactttggaagaccaggaattgaaagaaaatgtagagataatttgtaacctgcagcaactgattacccagttatcagatgaaactgttgcttgcacggctgcagccattgatactgcggtagaagaagaagctcaagtggaaaccagtccagagacaagcaggtcttctgacgcttttaccactcagcatgctctccatcaagctcagatgtctaaggaggtggttgagttgaataacgcccttgcactgaaagaggccctagttaggaagatgactcagaacgacaaccaactacagcccattcagtttcaataccaggataacataaaaaatctagaattagaagtcatcaatctgcaaaaggaaaaggaagaattggttcgtgaacttcagacagcaaagaagaatgtcaaccaagccaagctgagtgagcaccgccacaaacttctccaggagctggagggtcaaatagctgatctgaagaagaaactgaatgagcagtccaaacttctgaaactaaaggaatccacagagcgtactgtctccaagctgaaccaagagatatggatgatgaaaaaccagcgggtacagttaatgcgtcaaatgaaagaggatgctgagaagtttagacaatggaagcagaaaaaagacaaagaagtaatacagttgaaagaacgagaccgtaagaggcaatatgagctgctcaaacttgaaagaaacttccagaaacaatccagtgtgctcagacgtaaaacggaagaggcagcagctgccaacaagcgactcaaggatgctctccagaaacaacgagaggtcacagataagcggaaagagactcagagccatggaaaggaaggtattgcagctcgagtgaggaattggcttggaaatgaaattgaggttatggtcagtactgaggaagccaaacgccatctgaatgacctccttgaagacagaaagatcctggctcaggatgtggttcaactcaaagaaaaaaaggaatctcgggagaatccacctcctaaactccggaagtgtacattctccctttctgaggtgcatggtcaagttttggagtcagaagattgtattacaaaacagattgaaagcctagagactgaaatggaactcaggagtgctcagattgctgacctacagcagaagctgctggatgcagaaagtgaagataggccaaaacaatgctgggagaatattgccaccattctggaagccaagtgtgccctgaaatatttgattggagagctggtctcctccaaaatacatgtcaccaaacttgaaaacagcctgagacagagcaaggccagctgtgctgacatgcagaagatgctatttgaggaacaaaatcatttttctgagatagagacagagttacaagctgagctggtcagaatggagcaacagcaccaagagaaggtgctataccttgtcagccagctgcaggaaagccaaatggcagagaagcagttagagaaatcagccagtgaaaaggaacaacagctggtgagcacactgcagtgtcaggatgaagaacttgagaagatgcgagaagtgtgtgagcaaaatcagcagcttctccaagagaatgaaatcatcaagcagaaactgatcctcctccaggtagccagcagacagaaacatcttcctaatgatacccttctatctccagactcttcttttgaatatatcccacctaagccaaaaccttctcgtgttaaagaaaagtttctggagcaaagcatggacatcgaggatctaaaatattgttcagagcattctgtgaatgagcatgaagatggtgatggtgatggcgacagtgatgagggggatgatgaggaatggaagccaacaaaattagtcaaggtgtccaggaagaacatccaagggtgttcctgcaagggctggtgtgggaacaagcagtgtgggtgcaggaagcaaaagtcagactgtggtgtggactgtagctgtgaccccacaaagtgtcggaaccgccagcaaggcaaggatagcttgggcactgttgaacagacccaggattccgaaggctccttcaaactggaggatcctaccgaggtgaccccaggattgagcttctttaaccctgtctgtgccacccccaatagcaagatcctgaaagagatgtgtgacatggagcaggtgctgtcaaagaagactgctccagctccctccccttttgacctcccagagtcgaaacatggagcaacagaataccaacaaaataagcctccagggaagaaaaagaaacgagctctggctagcaacaccagcttcttctctggctgctcccctatcgaagaagaggcccactgaagttggagtcatcatctctacccccaatctggcttgggagatgctttccagttgcagccagaaggggttttttaaatgacttctctggatttcaggtttcttgccgttgaaaaaaaggaacaaagcattactaaaaagaaggtaacctttgttggatgttgtccctcagtctccatccccagact

SEQ ID NO: 464881 - DNA, 2238 bp, Homo sapiens
gtgacacccctggcataacccacaccagcaaataggttccctgggcagtgctttttaatactccacaaagccagtaagtagacactgagacctctcctcccgctttcagagcgaaaccagcattccttacccaggtccccacaggactcctcctgcagaacgatgcctcctttgacggtagatagatacgtcagagatgaggtcgttactcagcgcttgtcactgctcaccagctcactatcatatacctgaattcagaacatcccaacatgggccaaaagccaggccccttccttagcagaaagtaccatgaggcagggaaagctggaacggcagagggtggtggggccttgcttggttatcaggacagcctttccctgtgtttggcatttgagggtttagaaaccctcgtggagactcagcgtgcagggttcacctacaaagatcacgtggaccaagtgtgcctggaccaagtgtgcctgaagcggtgctctgcgtgggtacaaaatgtgacagcagtgtttgccagtccacttcactggcaaaggccgacactgttcatgacgtcaaaggccacggtggctttacagctacaatctcaacagcaacaagaatttaatgagggccgattatgtgcaagatactataatttgatgacaaagagccggaactagagatgtccagggcttcctgtggctttgggttgggatttttccaagcttctgtcagaggtcaattctgttattttgagaaaggtgttgcagtgagccttgtttttgtctctccctacccttgtaatgcaaaatatgggaggctttctgttcacagtcctgccctatcctgggagttgggctcccatgagtcttcctccagggtgatgcattctccgacagtagttgaagaatgtacgagattctaaaaaaacatttatctaaatgcattattcttttttttttttaactttgtgtaatggagaatttcaaacaaatatgaaagtagacagaatagtaaataaaccgccacgcacccaccgcacagctcacactatggccaatctcattactctatactcctcacccaccgcacagctcacactacggccaatctcattactctatactccacacccaccacacagctcacactatggccagtctcattactctatactccacacccaccgcacagctcacactatggccaatctcattactctatactcctcacccgccgcacagctcacactatggccagtctcattactctatactcctcacccgccgcacagctcacactatggccagtctcattactctatactcctcacccaccgcacagctcacactatggccaatctcattactctatactcctcacccaccgcacagctcacactatggccaatctcattactctatactccacacccgctgcacagctcacactatggccagtctcattactctatactcctcacccacagcacagctcacactatggcgaatctcattactctatactcctcacccaccgcacagctcacgctatggccaatctcattactctatactcctcacccaccacacagctcacactacggccaatctcattactctatactccacacccaccacacagctcacactatggccagtctcattactctatactccacacccaccgcacagctcacactatggccagtctcattactctatactccacacccaccgcacagctcacactatggccagtctcattactctatactccacacccaccacacagctcacactatggccagtctcattactctatactccacacccacagcacagctcacactatggcgaatctcattactctatactcctcacccaccgcacagctcacgctatggccaatctcattactctatactcctcacccaccacacagctcacactacggccaatctcattactctatactccacacccaccacacagctcacactatggccagtctcattactctatactccacacccactgcacagctcacactatggccagtctcattactctatactccacacccaccgcacagctcacactatggccagtctcattactctatactccacacccaccgcacagctcacactatggccagtctcattactctatactccacacccaccgcacagctcacactatggccagtctcattactctatactcctccccatgcttcccc

SEQ ID NO: 464882 - DNA, 676 bp, Homo sapiens
atacattcagctcggacccacaccacctgagtccctttccgtctggcggcagccatcaggtaagccaagatgggtgcatacaagtacatccaggagctatggagaaagaagcagtctgatgtcatgcgctttcttctgagggtccgctgctggcagtaccgccagctctctgctctccacagggctccccgccccacccggcctgataaagcgcgccgactgggctacaaggccaagcaaggttacgttatatataggattcgtgttcgccgtggtggccgaaaccagctaaagtttgctcgaagccttcagtccgttgcagaggagcgagctggacgccactgtggggctctgagagtcctgaattcttactgggttggtgaagattccacatacaaattttttgaggttatcctcattgatccattccataaagctatcagaagaaatcctgacacccagtggatcaccaaaccagtccacaagcacagggagatgcgtgggctgacatctgcaggccgaaagagccgtggccttggaaagggccataagttccaccacactattggtggctctcgccgggcagcttggagaaggcgcaatactctccagctccaccgttaccgctaatataagtaaaggtaaaattcatacttaataaacaatttaggacagt

SEQ ID NO: 464883 - DNA, 563 bp, Homo sapiens
atacattcagctcggacccacaccacctgagtccctttccgtctggcggcagccatcaggtaagccaagatgggtgcatacaagtacatccaggagctatggagaaagaagcagtctgatgtcatgcgctttcttctgagggtccgctgctggcagtaccgccagctctctgctctccacagggctccccgccccacccggcctgataaagcgcgccgactgggctacaaggccaagcaaggttacgttatatataggattcgtgttcgccgtggtggccgaaaacgcccagttcctaagggtgcaacttacggcaagcctgtccatcatggtgttaaccagctaaagtttgctcgaagccttcagtccgttgcagaggagcgagctggacgccactgtggggctctgagagtcctgaattcttactgggttggtgaagattccacatacaaattttttgaggttatcctcattgatccattccataaagctatcagaagaaatcctgacacccagtggatcaccaaaccagtccacgcatctccctgtcgacagcggccgcg

SEQ ID NO: 464884 - DNA, 1015 bp, Homo sapiens
  misc_feature (170)..(170): n is a, c, g, or t
ccaccaggggcttctgtcagtctagccatagtacccagggcacaaagacttgaaacagcaacctctggggccttgtttaagtgcggcaaaaaaggccactggaggggcccatgtccccacccatgagggccgaagagcctttgcctagtctgccagcagatgggcactgnaagtctgactgtcctctcaacagatgggcagacaagcatgctcctcagagccaccatcctttcaacaagacaaaaagtgaagaatcacttgcactcccatagctccttggcctagccactgaagactgatgaggccagggcccatgggccccggctcccggcccccactgccatcactgcatcggagcccagggtaactctactagtagcaggtaagctgatctcttttttaattgatagtggggccacctactcagctttgcctgagttctcaggacccactcatccctctcaagtctcagttgtgggggttgacggactcatctcttgtccgcttgccaccagacctcttacttgttacgttatatataggattcgtgttcgccgtggtggccgaaaacgcccagttcctaagggtgcaacttacggcaagcctgtccatcatggtgttaaccagctaaagtttgctcgaagccttcagtccgttgcagaggagcgagctggacgccactgtggggctctgagagtcctgaattcttactgggttggtgaagattccacatacaaattttttgaggttatcctcattgatccattccataaagctatcagaagaaatcctgacacccagtggatcaccaaaccagtccacaagcacagggagatgcgtgggctgacatctgcaggccgaaagagccgtggccttggaaagggccataagttccaccacactattggtggctctcgccgggcagcttggagaaggcgcaatactctccagctccaccgttaccgctaatataagtaaaggtaaaattcatacttaataaacaatttaggacagt

SEQ ID NO: 464885 - DNA, 703 bp, Homo sapiens
  misc_feature (8)..(8): n is a, c, g, or t
  misc_feature (11)..(11): n is a, c, g, or t
  misc_feature (23)..(23): n is a, c, g, or t
caggaatncgncacgagcacgtncgaagtcaggtaagccaagatgggtgcatacaagtacatccaggagctatggagaaagaagcagtctgatgtcatgcgctttcttctgagggtccgctgctggcagtaccgccagctctctgctctccacagggctccccgccccacccggcctgataaagcgcgccgactgggctacaaggccaagcaaggttacgttatatataggattcgtgttcgccgtggtggccgaaaacgcccagttcctaagggtgcaacttacggcaagcctgtccatcatggtgttaaccagctaaagtttgctcgaagccttcagtccgttgcagaggagcgagctggacgccactgtggggctctgagagtcctgaattcttactgggttggtgaagattccacatacaaattttttgaggttatcctcattgatccattccataaagctatcagaagaaatcctgacacccagtggatcaccaaaccagtccacaagcacagggagatgcgtgggctgacatctgcaggccgaaagagccgtggccttggaaagggccataagttccaccacactattggtggctctcgccgggcagcttggagaaggcgcaatactctccagctccaccgttaccgctaatataagtaaaggtaaaattcatacttaataaacaatttaggacagt

SEQ ID NO: 464886 - DNA, 256 bp, Homo sapiens
gatacaaataaagaagatggacaggctttcctttccgtctggcggcagccatcaggtaagccaagatgggtgcatacaagtacatccaggagctatggagaaagaagcagtctgatgtcatgcgctttcttctgagggtccgctgctggcagtaccgccagctctctgctctccacagggctccccgccccacccggcctgataaagcgcgccgactgggctacaaggccaagcaaggttacgttatatataggat

SEQ ID NO: 464887 - DNA, 902 bp, Homo sapiens
atacattcagctcggacccacaccacctgagtccctttccgtctggcggcagccatcaggtaagccaagatgggtgcatacaagtacatccaggagctatggagaaagaagcagtctgatgtcatgcgctttcttctgagggtccgctgctggcagtaccgccagctctctgctctccacagggctccccgccccacccggcctgataaagcgcgccgactgggctacaaggccaagcaaggttacgttatatataggattcgtgttcgccgtggtggccgaaaacgcccagttcctaagggtgcaacttacggcaagcctgtccatcatggtgttaaccagctaaagtttgctcgaagccttcagtccgttgcagaggagcgagctggacgccactgtggggctctgagagtcctgaattcttactgggttggtgaagattccacatacaaattttttgaggttatcctcattgatccattccataaagctatcagaagaaatcctgacacccagtggatcaccaaaccagtccacaagcacagggagatgcgtgggctgacatctgcaggccgaaagagccgtggccttggaaagggccataagttccaccacactattggtggctctcgccgggcagcttggagaaggcgcaatactctccagctccaccgttaccgctaatataagtaaaggtaaaattcatacttaataaacaatttaggacagtcaaaaaaaaaaaaaaaaagaagatggacagaaaatgcttttatttgacagattcctcaagagggattaatagtacacagcagtatgagtgtgtttactttttgaaacggaattatgccacgggaggggtgtaggtctgctgatactaaaataaatgcagggtttagcaataa

SEQ ID NO: 464888 - DNA, 553 bp, Homo sapiens
atacattcagctcggacccacaccacctgagtccctttccgtctggcggcagccatcaggtaagccaagatgggtgcatacaagtacatccaggagctatggagaaagaagcagtctgatgtcatgcgctttcttctgagggtccgctgctggcagtaccgccagctctctgctctccacagggctccccgccccacccggcctgataaagcgcgccgactgggctacaaggccaagcaaggttacgttatatataggattcgtgttcgccgtggtggccgaaaacgcccagttcctaagggtgcaacttacggcaagcctgtccatcatggtgttaaccagctaaagtttgctcgaagccttcagtccgttgcagaggagcgagctggacgccactgtggggctctgagagtcctgaattcttactgggttggtgaagattccacatacaaattttttgaggttatcctcattgatccattccataaagctatcagaagaaatcctgacacccagaatgcacccgtatgcccccccgaatgacccccccata

SEQ ID NO: 464889 - DNA, 1021 bp, Homo sapiens
aagttgatatccaaggctaaggggtctaactctgttgatctggctggagtgcagtagcacaatgatggctcactgcagcctcaacgtcctggaaaggcatggcaacatgatcaatcagttgcacaattgggctctaggaaatatcattagagaatcagtattcaaggtttgcacagaagctgttgctgtacgcatcctctgtcttgtggtcagcctacagagcaggatagatcagcacccaaaatttggtttgaatgtcaaggctgatgaggaaccatttacccaccaagtttctagacaccagccaagggccaatctgaccagcagactagaaggactcacagcacccaaaagttgttaccctcaaagatcatcttttgttctaatgaagcaactcttggtgggctcacagagagtctcaagacaggagctggttgccaaggaaaccaaccatgcaataagaggattagaatattcagccccaccccatgacttccagagacagaggaaaggctgaaggttgagttgattaccagtagctcacgatataatcattcatgcctacataacacagctttcataagaacccaataggacagggttcaaggaccctctaaagaatgccacacctatagaggcatggaaactctttgccactttcatctgactattgatctatatcctttgtaatgcctcttataagaaatgggcagattctagcagtgtttgtgagaaaaactgatggatcctgcagattaactatggacagccaaatattgagtaaagtgatgtctacaacagcatcagctatgcctgatatggtgttaattcacattgtgaagttccaaaatcagaagatgatacagaaagattgctctggttgcctggtttctgaagaaatcgtgtaccctgtctggatagtgtcttacttcctatccacaaagttgtgaaataatctggaattaaatggcaacctaaacaaccctagagttgcctgaacacagagccattgctgtgttga

SEQ ID NO: 464890 - DNA, 724 bp, Homo sapiens
gatcatcttttgttctaatgaagcaactcttggtgggctcacagagagtctcaagacaggagctggttgccaaggaaaccaaccatgcaataagaggattagaatattcagccccaccccatgacttccagagacagaggaaaggctgaaggttgagttgattaccagtagctcacgatataatcattcatgcctacataacacagctttcataagaacccaataggacagggttcaaggaccctctaaagaatgccacacctatagaggcatggaaactctttgccactttcatctgactattgatctatatcctttgtaatgcctcttataagaaatgggcagatgtaagtaaagcgtttctctgagctctattagctgctgtagaaattaaccaaaacgcaggaggctgtcttggaaacctcccatttatagttggtcagtcaaaagtataggtgataacctagttctcaagattggtgtctgaagttgggtcaatcttgtgggactgagccttcagtctgtgagatctgatgctgtccccaggttggcagtgtcagaattgagttaaattacaaaacactagtttggtttccactggagaatctggaatcagaaatattcttttgaatgtccatgtaaaagagtagagagaaaaaacgtatgcttttgtctttacaatatcctattgcaaatttttctaacttttacaaaccacatatgt

SEQ ID NO: 464891 - DNA, 490 bp, Homo sapiens
cagaaaacaaagatctcctgttggcactcaggcttcctcctgctctaggtgacacgtgcaccatggccggctacgcccgcttgaagaatgtccttctggcactccagacccgtctgcagccactccaagaaggagacagcagacaagaccctgcctcccagaagcgcctcctggtggaatctctgttcagggacttagatgcagatggcaatggccacctcagcagctccgaactggctcagcatgtgctgaagaagcaggacctggatgaagacttacttggttgctcaccaggtgacctcctccgatttgacgattacaacagtgacagctccctgaccctccgcgagttctacatggccttccaggaaagctggtgaatttgttctgcaacaagcctgagctttaagaaaagactaaacggagagtggatggggccagagagggcttgccctgttcctttttaataaagatttttctcgctctttga

SEQ ID NO: 464892 - DNA, 5597 bp, Homo sapiens
cggtggcacagcagcgggcagcggcggctcaggcagctggagcctcaacagcctccagcgagcccgggacccgccgacagcccgagaaaccagccgaaggacgcggggcggggtcgccgccgccagccacggggtgctcccgtccactcgccgtcccaattgttcagtgccaacctaggtcattcccgctcgagccctcggccagtcatcagactcagtcaagaatgacaaccagggacggcttttggcgtgcatctcacagctgctcgggagccatcccgtgccggcttgcgcatgggactggcatgtgacccagtgaatccatgcagtaggcccggatgtgggtgtgggggagtcacatggcagatggagcccagaacgctttgaagtcacaagaagagaagggctttccagccacaacgagctgctggcctcctgcgggaagaagttctgcagccgagggagccggtgcgtgctcagcaggaagacaggggagcccgaatgcccgtgcctggaggcatgcaggcccagctacgtgcctgtgtgcggctctgatgggaggttttatgaaaaccactgtaagctccaccgtgctgcttgcctcctgggaaagaggatcaccgtcatccacagcaaggactgtttcctcaaaggtgacacgtgcaccatggccggctacgcccgcttgaagaatgtccttctggcactccagacccgtctgcagccactccaagaaggagacagcagacaagaccctgcctcccagaagcgcctcctggtggaatctctgttcagggacttagatgcagatggcaatggccacctcagcagctccgaactggctcagcatgtgctgaagaagcaggacctggatgaagacttacttggttgctcaccaggtgacctcctccgatttgacgattacaacagtgacagctccctgaccctccgcgagttctacatggccttccaagtggttcagctcagcctcgcccccgaggacagggtcagtgtgaccacagtgaccgtggggctgagcacagtgctgacctgcgccgtccatggagacctgaggccaccaatcatctggaagcgcaacgggctcaccctgaacttcctggacttggaagacatcaatgactttggagaggatgattccctgtacatcaccaaggtgaccaccatccacatgggcaattacacctgccatgcttccggccacgagcagctgttccagacccacgtcctgcaggtgaatgtgccgccagtcatccgtgtctatccagagagccaggcacaggagcctggagtggcagccagcctaagatgccatgctgagggcattcccatgcccagaatcacttggctgaaaaacggcgtggatgtctcaactcagatgtccaaacagctctcccttttagccaatgggagcgaactccacatcagcagtgttcggtatgaagacacaggggcatacacctgcattgccaaaaatgaagtgggtgtggatgaagatatctcctcgctcttcattgaagactcagctagaaagacccttgcaaacatcctgtggcgagaggaaggcctcagcgtgggaaacatgttctatgtcttctccgacgacggtatcatcgtcatccatcctgtggactgtgagatccagaggcacctcaaacccacggaaaagattttcatgagctatgaagaaatctgtcctcaaagagaaaaaaatgcaacccagccctgccagtgggtatctgcagtcaatgtccggaaccggtacatctatgtggcccagccagcactgagcagagtccttgtggtcgacatccaagcccagaaagtcctacagtccataggtgtggaccctctgccggctaagctgtcctatgacaagtcacatgaccaagtgtgggtcctgagctggggggacgtgcacaagtcccgaccaagtctccaggtgatcacagaagccagcaccggccagagccagcacctcatccgcacaccctttgcaggagtggatgatttcttcattcccccaacaaacctcatcatcaaccacatcaggtttggcttcatcttcaacaagtctgatcctgcagtccacaaggtggacctggaaacaatgatgcccctcaagaccatcggcctgcaccaccatggctgcgtgccccaggccatggcacacacccacctgggcggctacttcttcatccagtgccgacaggacagccccgcctctgctgcccgacagctgctcgttgacagtgtcacagactctgtgcttggccccaatggtgatgtaacaggcaccccacacacatcccccgacgggcgcttcatagtcagtgctgcagctgacagcccctggctgcacgtgcaggagatcacagtgcggggcgagatccagaccctgtatgacctgcaaataaactcgggcatctcagacttggccttccagcgctccttcactgaaagcaatcaatacaacatctacgcggctctgcacacggagccggacctgctgttcctggagctgtccacggggaaggtgggcatgctgaagaacttaaaggagccacccgcagggccagctcagccctgggggggtacccacagaatcatgagggacagtgggctgtttggacagtacctcctcacaccagcccgagagtcactgttcctcatcaatgggagacaaaacacgctgcggtgtgaggtgtcaggtataaagggggggaccacagtggtgtgggtgggtgaggtatgaagggcccagagcagagccctgggccaaggaacaccccctagtcctgacactgcagcctcaagcaggtacgctgtacatttttacagacaaaagcaaaaacctgtactcgctttgtggttcaacactggtctccttgcaagtttcctagtataaggtatgcgctgctaccaagattggggttttttcgttaggaagtatgatttatgccttgagctacgatgagaacatatgctgctgtgtaaagggatcatttctgtgccaagctgcacaccgagtgacctggggacatcatggaaccaagggatcctgctctccaagcagacacctctgtcagttgccttcacatagtcattgtcccttactgccagacccagccagactttgccctgacggagtggcccggaagcagaggccgaccaggagcaggggcctccctcccgaactgaaagcccatccgtcctcgcgtgggaccgcatcttctccctcgcagctgcttcttgcttttctttccatttgacttgctgtaagcctgagggagagccaacaagacttactgcatcttgggggatggggaaatcactcactttattttggaaatttttgattaaaaaaaaattttataatctcaaatgctagtaagcagaaagatgctctccgaggtccaactatatccttccctgccttaggccgagtctcgggggtggtcacaaccccacatcccacagccagaaagaacaatggtcatctgagaatactggccctgtcgactattgccaccctgcttctccaagagcagaccaggccacctcatccgtaaggactcggttctgtgttgggaccccaaaaaaccagaacaagttctgtgtgcctcctttcagcacagaagggagacatctcattagtcaggtctggtaccccagattcagggcagactgggcttgcctggcaaggtatgggtggcctccaggctcaatgcagaaaccccaaggacacgagtggggccaggtgagttcctgaagctataccttttcaaaacagattttgttttcctacctgtggcccatccactcctctctggtaccccatccccgcatcagcactgcagagagaacacatttcggcgagggttttcttacccacattccccaatcaatacacacacactgcagaacccagaacagaaggccacaggctggcactactgcattctccttatgtgtctcaggctgtggtgactctcacatgggcatcgaagaagtacaacccacatagccctctggagaccgcctagatcagagactcagcaaaaacaggctcgccttccctctcccacatatgagtggaacttacatgtgtcctggtttgaatgatcattttgcaagccacacgggttgggagaggtggtctcaccacagacgtctttgctaatttggccaccttcacctactgacatgaccaggattttcctttgccattaaggaatgaactctttcaaggagaggaaaccctagactctgtgtcactctcaacacacacagctcctttcactcctgcctgactgccaagccacctgcatcccccgccccagatctcatgagatcaatcacttgtatgtctcacgcaacttggtccaccaaacgcctgtcccctgtaactcctaggggtgcgcctagacaggtacgtctgttttttattttaaaagatatgctatgtagatataagttgaggaagctcacctcaaaagcctagaatgcagtttcacagtagctgggatgcatggatgacccatctcacccctttttttttcctgcctcaatatcttgatatgttatgtttactcccaatctcccatttttaccactaaaattctccaactttcataaacttttttttggaaaaatttccattgtatcagcccctgacagaaaaaggatctctgagcctaaaggaggaaaagtcccaccaactaccagaccagaacacgagcccctctgggcagcaggattcctaagtcaaagaccagtttgacccaaactggccttttaaaataatcaggagtgacagagtcaacttctgcagcacctgcttctcccccactgtcccttccatcttggaatgtgtctaaaaaagcatagctgccctttgctgtcctcagagtgcatttcctggagacggcaggcttaggtctcactgacagcatgccagacacaactgaatcgaagcaggcctgaagcctaggtcagggtttcaggagtccagccccaggaggcaaagtcaccaatgcagggaggtaaatgccttttggcaggaaaaccaatagagttggttgggtggggagtcaggggtgggaggagaaggaggaagaggaggaagccagactggcctgccctttctcccatacttcaccccagcagaggttcatgggacacagttggaaagccactgggaggaaatgcctcactacaggggggcctcctgtagcaagcccagccggtaatcctcctaatgaacccacaaggtcaattcacaactgatatcttagctattaaagaagtactgactttaccaaaagaatcatcaagaaagctatttatataaaccccctcagtcattttgaaataaaattaattttacaaaaattcgatagttttttttttcccaaaatgacaaaaaatctgcacctgtggtgacaggaaggctttgaaatagaggccctcattcttctgctccagtgggcagaaccttgcataaaggctccgggtccaaaagcccacccaggcagccccagacggatggcaggaagggggactgtcagcttcgggac

SEQ ID NO: 464893 - DNA, 4516 bp, Homo sapiens
  misc_feature (4243)..(4243): n is a, c, g, or t
  misc_feature (4248)..(4248): n is a, c, g, or t
cggtggcacagcagcgggcagcggcggctcaggcagctggagcctcaacagcctccagcgagcccgggacccgccgacagcccgagaaaccagccgaaggacgcggggcggggtcgccgccgccagccacggggtgctcccgtccactcgccgtcccaattgttcagtgccaacctaggtcattcccgctcgagccctcggccagtcatcagactcagtcaagaatgacaaccagggacggcttttggcgtgcatctcacagctgctcgggagccatcccgtgccggcttgcgcatgggactggcatgtgacccagtgaatccatgcagtaggcccggatgtgggtgtgggggagtcacatggcagatggagcccagaacgctttgaagtcacaagaagagaagggctttccagccacaacgagctgctggcctcctgcgggaagaagttctgcagccgagggagccggtgcgtgctcagcaggaagacaggggagcccgaatgcccgtgcctggaggcatgcaggcccagctacgtgcctgtgtgcggctctgatgggaggttttatgaaaaccactgtaagctccaccgtgctgcttgcctcctgggaaagaggatcaccgtcatccacagcaaggactgtttcctcaaaggtgacacgtgcaccatggccggctacgcccgcttgaagaatgtccttctggcactccagacccgtctgcagccactccaagaaggagacagcagacaagaccctgcctcccagaagcgcctcctggtggaatctctgttcagggacttagatgcagatggcaatggccacctcagcagctccgaactggctcagcatgtgctgaagaagcaggacctggatgaagacttacttggttgctcaccaggtgacctcctccgatttgacgattacaacagtgacagctccctgaccctccgcgagttctacatggccttccaacctgttgaatcatcacccagtttttcctactaccgttcctcctcccgggaaaagtggtcctgagacatgggattgggaagactccacgtgtggagacacagcacaggagcccaccctgcccaactggcaggccagaccctccacctgtgtgacttgtggggacctttgtgctcttagaaggcactgggggcagcgacgtgcacatccttttctggttcccatgggggagatccagaaacgtcaggaccctcccaaagctgaggacactgagtgaggagcccacaagggggaagctgtggtcactgctccggacctccactgcccaggcttctctctgagcagggcagcagaggctgctttgtctgctgcaggctgaccaagagggagtcctaggcctgatccagctttcctggctcccaggacaccaggcaagcagaggacaggagtggacagtgtcctttaccatctgctgccacagactcccccactccttaatcagtgagagactgcagagctaggcagctgcctcacctgcttctcacagagggacagaggcatcctgaagcccaggttctgctgatatgcagcgatttgctccacagcattcctggctcaccaccttctttccgagcccatgtggacggcagccctggggaagggtggagaggcaggagccgggcagggcctcggcctcagccgggagagggccaagcctccttccaaaccacatgcattttaatgggcagatttcactgacaattgccctgcattccctacttgcagagcagctctccaatgtcagttctcatagcagggcgtcagtccctctgtgggcacagacttctgcccagtagtgccagacaagctccctgatgggctgctctgacccccaacccagccctctctttccaaagacaccagcctcagtgtgtagacacattctcaccccagacacagcgtctggctgagccctctctcactgacccctgatcacactctgagtgctgggcatatcacgtttggtcgtccagggaccttggaaaccttcccacatagtggctaatgagcccacagatggtcagtcaacacaggggcattggagccacagccaggagccagaaggaccactcgttgccccctagagggctgcatgtggcatcttcatcttcctctcatgtggcctggctccccaccagagcagagaccaggcctggggcttaactggtccacagccctgcagatgtggccagcgcagggctctcaggcaagatttgttcccttcctctgggatcccacatacagaaacaattctgaccacagatcagacgtgcagggaaaatctgattccttttgtaactaacctgactttacaagcctcaccccaatgggagaaaagcacaactaaatgctcaatccattgtaaagattagcacgagctgacgattttaacagtccacaagtggttcagctcagcctcgcccccgaggacagggtcagtgtgaccacagtgaccgtggggctgagcacagtgctgacctgcgccgtccatggagacctgaggccaccaatcatctggaagcgcaacgggctcaccctgaacttcctggacttggaagacatcaatgactttggagaggatgattccctgtacatcaccaaggtgaccaccatccacatgggcaattacacctgccatgcttccggccacgagcagctgttccagacccacgtcctgcaggtgaatgtgccgccagtcatccgtgtctatccagagagccaggcacaggagcctggagtggcagccagcctaagatgccatgctgagggcattcccatgcccagaatcacttggctgaaaaacggcgtggatgtctcaactcagatgtccaaacagctctcccttttagccaatgggagcgaactccacatcagcagtgttcggtatgaagacacaggggcatacacctgcattgccaaaaatgaagtgggtgtggatgaagatatctcctcgctcttcattgaagactcagctagaaagacccttgcaaacatcctgtggcgagaggaaggcctcagcgtgggaaacatgttctatgtcttctccgacgacggtatcatcgtcatccatcctgtggactgtgagatccagaggcacctcaaacccacggaaaagattttcatgagctatgaagaaatctgtcctcaaagagaaaaaaatgcaacccagccctgccagtgggtatctgcagtcaatgtccggaaccggtacatctatgtggcccagccagcactgagcagagtccttgtggtcgacatccaagcccagaaagtcctacagtccataggtgtggaccctctgccggctaagctgtcctatgacaagtcacatgaccaagtgtgggtcctgagctggggggacgtgcacaagtcccgaccaagtctccaggtgatcacagaagccagcaccggccagagccagcacctcatccgcacaccctttgcaggagtggatgatttcttcattcccccaacaaacctcatcatcaaccacatcaggtttggcttcatcttcaacaagtctgatcctgcagtccacaaggtggacctggaaacaatgatgcccctcaagaccatcggcctgcaccaccatggctgcgtgccccaggccatggcacacacccacctgggcggctacttcttcatccagtgccgacaggacagccccgcctctgctgcccgacagctgctcgttgacagtgtcacagactctgtgcttggccccaatggtgatgtaacaggcaccccacacacatcccccgacgggcgcttcatagtcagtgctgcagctgacagcccctggctgcacgtgcaggagatcacagtgcggggcgagatccagaccctgtatgacctgcaaataaactcgggcatctcagacttggccttccagcgctccttcactgaaagcaatcaatacaacatctacgcggctctgcacacggagccggacctgctgttcctggagctgtccacggggaaggtgggcatgctgaagaacttaaaggagccacccgcagggccagctcagccctgggggggtacccacagaatcatgagggacagtgggctgtttggacagtacctcctcacaccagcccgagagtcactgttcctcatcaatgggagacaaaacacgctgcggtgtgaggtgtcaggtataaagggggggaccacagtggtgtgggtgggtgaggtatgaagggccccctngcgancggttgttcatgaatcacggctgtgttctgaaaatgcaatttttaccatttctgcttcgcctgagggatggataaaaagcaaccccttaagaccattttgattaaaggtccaatttttgggatcatggccagaatagggcccccgtttgcaagggccccattggtttgagttacgggctttttaccgacctctaagagcttcaacaatcaccaatttctgggtcttcactctgacccatcccccgggaatttcaacggggggttgcgg

SEQ ID NO: 464894 - DNA, 336 bp, Homo sapiens
ggtacaaagtctgacatgtttattatctgcaatctattttatagccctttcttttagagcttgcgttgctggacaggattattataatttggttaaacacagaactccagtcacctacttgggttcaccccctctggagcagggtctcaggttgggccacaggcccaagtccaggtcagggccgtctctttctcaccagcactgactctcacccacagtgccgccagtcatccgtgtctatccagagagccaggcacaggagcctggagtggcagccagcctaagatgccatgctgagggcattcccatgcccagaatcacttggctgaaaaacgg

SEQ ID NO: 464895 - DNA, 6609 bp, Homo sapiens
ctcccatatcccctccgacttccctgcctggtgactgacctctagtccagcactactgcttctgctcttggggctggtgacagggagagtgggaggagggctgagctgctggacagggcaaagggggagccggagcccctcctgagagccagtcagctctcaagcaaggtggccaagtgagccctgtcaggtagggggaagctttccgggcctcaccccatacttgctacccttctagaagctgaaaatttgtttctaacagacctgcagaccttctagaggtacccctcaaggcccactgagctgtccctggattccctcttggcctgagtcattttcatcaatgcctatgactctaaactcatctgattctggccttgttctcctcctcaccccacagcatgtgctgaagaagcaggacctggatgaagacttacttggttgctcaccaggtgacctcctccgatttgacgattacaacagtgacagctccctgaccctccgcgagttctacatggccttccaacctgttgaatcatcacccagtttttcctactaccgttcctcctcccgggaaaagtggtcctgagacatgggattgggaagactccacgtgtggagacacagcacaggagcccaccctgcccaactggcaggccagaccctccacctgtgtgacttgtggggacctttgtgctcttagaaggcactgggggcagcgacgtgcacatccttttctggttcccatgggggagatccagaaacgtcaggaccctcccaaagctgaggacactgagtgaggagcccacaagggggaagctgtggtcactgctccggacctccactgcccaggcttctctctgagcagggcagcagaggctgctttgtctgctgcaggctgaccaagagggagtcctaggcctgatccagctttcctggctcccaggacaccaggcaagcagaggacaggagtggacagtgtcctttaccatctgctgccacagactcccccactccttaatcagtgagagactgcagagctaggcagctgcctcacctgcttctcacagagggacagaggcatcctgaagcccaggttctgctgatatgcagcgatttgctccacagcattcctggctcaccaccttctttccgagcccatgtggacggcagccctggggaagggtggagaggcaggagccgggcagggcctcggcctcagccgggagagggccaagcctccttccaaaccacatgcattttaatgggcagatttcactgacaattgccctgcattccctacttgcagagcagctctccaatgtcagttctcatagcagggcgtcagtccctctgtgggcacagacttctgcccagtagtgccagacaagctccctgatgggctgctctgacccccaacccagccctctctttccaaagacaccagcctcagtgtgtagacacattctcaccccagacacagcgtctggctgagccctctctcactgacccctgatcacactctgagtgctgggcatatcacgtttggtcgtccagggaccttggaaaccttcccacatagtggctaatgagcccacagatggtcagtcaacacaggggcattggagccacagccaggagccagaaggaccactcgttgccccctagagggctgcatgtggcatcttcatcttcctctcatgtggcctggctccccaccagagcagagaccaggcctggggcttaactggtccacagccctgcagatgtggccagcgcagggctctcaggcaagatttgttcccttcctctgggatcccacatacagaaacaattctgaccacagatcagacgtgcagggaaaatctgattccttttgtaactaacctgactttacaagcctcaccccaatgggagaaaagcacaactaaatgctcaatccattgtaaagattagcacgagctgacgattttaacagtccacaagtggttcagctcagcctcgcccccgaggacagggtcagtgtgaccacagtgaccgtggggctgagcacagtgctgacctgcgccgtccatggagacctgaggccaccaatcatctggaagcgcaacgggctcaccctgaacttcctggacttggaagacatcaatgactttggagaggatgattccctgtacatcaccaaggtgaccaccatccacatgggcaattacacctgccatgcttccggccacgagcagctgttccagacccacgtcctgcaggtgaatgtgccgccagtcatccgtgtctatccagagagccaggcacaggagcctggagtggcagccagcctaagatgccatgctgagggcattcccatgcccagaatcacttggctgaaaaacggcgtggatgtctcaactcagatgtccaaacagctctcccttttagccaatgggagcgaactccacatcagcagtgttcggtatgaagacacaggggcatacacctgcattgccaaaaatgaagtgggtgtggatgaagatatctcctcgctcttcattgaagactcagctagaaagacccttgcaaacatcctgtggcgagaggaaggcctcagcgtgggaaacatgttctatgtcttctccgacgacggtatcatcgtcatccatcctgtggactgtgagatccagaggcacctcaaacccacggaaaagattttcatgagctatgaagaaatctgtcctcaaagagaaaaaaatgcaacccagccctgccagtgggtatctgcagtcaatgtccggaaccggtacatctatgtggcccagccagcactgagcagagtccttgtggtcgacatccaagcccagaaagtcctacagtccataggtgtggaccctctgccggctaagctgtcctatgacaagtcacatgaccaagtgtgggtcctgagctggggggacgtgcacaagtcccgaccaagtctccaggtgatcacagaagccagcaccggccagagccagcacctcatccgcacaccctttgcaggagtggatgatttcttcattcccccaacaaacctcatcatcaaccacatcaggtttggcttcatcttcaacaagtctgatcctgcagtccacaaggtggacctggaaacaatgatgcccctcaagaccatcggcctgcaccaccatggctgcgtgccccaggccatggcacacacccacctgggcggctacttcttcatccagtgccgacaggacagccccgcctctgctgcccgacagctgctcgttgacagtgtcacagactctgtgcttggccccaatggtgatgtaacaggcaccccacacacatcccccgacgggcgcttcatagtcagtgctgcagctgacagcccctggctgcacgtgcaggagatcacagtgcggggcgagatccagaccctgtatgacctgcaaataaactcgggcatctcagacttggccttccagcgctccttcactgaaagcaatcaatacaacatctacgcggctctgcacacggagccggacctgctgttcctggagctgtccacggggaaggtgggcatgctgaagaacttaaaggagccacccgcagggccagctcagccctgggggggtacccacagaatcatgagggacagtgggctgtttggacagtacctcctcacaccagcccgagagtcactgttcctcatcaatgggagacaaaacacgctgcggtgtgaggtgtcaggtataaagggggggaccacagtggtgtgggtgggtgaggtatgaagggcccagagcagagccctgggccaaggaacaccccctagtcctgacactgcagcctcaagcaggtacgctgtacatttttacagacaaaagcaaaaacctgtactcgctttgtggttcaacactggtctccttgcaagtttcctagtataaggtatgcgctgctaccaagattggggttttttcgttaggaagtatgatttatgccttgagctacgatgagaacatatgctgctgtgtaaagggatcatttctgtgccaagctgcacaccgagtgacctggggacatcatggaaccaagggatcctgctctccaagcagacacctctgtcagttgccttcacatagtcattgtcccttactgccagacccagccagactttgccctgacggagtggcccggaagcagaggccgaccaggagcaggggcctccctcccgaactgaaagcccatccgtcctcgcgtgggaccgcatcttctccctcgcagctgcttcttgcttttctttccatttgacttgctgtaagcctgagggagagccaacaagacttactgcatcttgggggatggggaaatcactcactttattttggaaatttttgattaaaaaaaaattttataatctcaaatgctagtaagcagaaagatgctctccgaggtccaactatatccttccctgccttaggccgagtctcgggggtggtcacaaccccacatcccacagccagaaagaacaatggtcatctgagaatactggccctgtcgactattgccaccctgcttctccaagagcagaccaggccacctcatccgtaaggactcggttctgtgttgggaccccaaaaaaccagaacaagttctgtgtgcctcctttcagcacagaagggagacatctcattagtcaggtctggtaccccagattcagggcagactgggcttgcctggcaaggtatgggtggcctccaggctcaatgcagaaaccccaaggacacgagtggggccaggtgagttcctgaagctataccttttcaaaacagattttgttttcctacctgtggcccatccactcctctctggtaccccatccccgcatcagcactgcagagagaacacatttcggcgagggttttcttacccacattccccaatcaatacacacacactgcagaacccagaacagaaggccacaggctggcactactgcattctccttatgtgtctcaggctgtggtgactctcacatgggcatcgaagaagtacaacccacatagccctctggagaccgcctagatcagagactcagcaaaaacaggctcgccttccctctcccacatatgagtggaacttacatgtgtcctggtttgaatgatcattttgcaagccacacgggttgggagaggtggtctcaccacagacgtctttgctaatttggccaccttcacctactgacatgaccaggattttcctttgccattaaggaatgaactctttcaaggagaggaaaccctagactctgtgtcactctcaacacacacagctcctttcactcctgcctgactgccaagccacctgcatcccccgccccagatctcatgagatcaatcacttgtatgtctcacgcaacttggtccaccaaacgcctgtcccctgtaactcctaggggtgcgcctagacaggtacgtctgttttttattttaaaagatatgctatgtagatataagttgaggaagctcacctcaaaagcctagaatgcagtttcacagtagctgggatgcatggatgacccatctcacccctttttttttcctgcctcaatatcttgatatgttatgtttactcccaatctcccatttttaccactaaaattctccaactttcataaacttttttttggaaaaatttccattgtatcagcccctgacagaaaaaggatctctgagcctaaaggaggaaaagtcccaccaactaccagaccagaacacgagcccctctgggcagcaggattcctaagtcaaagaccagtttgacccaaactggccttttaaaataatcaggagtgacagagtcaacttctgcagcacctgcttctcccccactgtcccttccatcttggaatgtgtctaaaaaagcatagctgccctttgctgtcctcagagtgcatttcctggagacggcaggcttaggtctcactgacagcatgccagacacaactgaatcgaagcaggcctgaagcctaggtcagggtttcaggagtccagccccaggaggcaaagtcaccaatgcagggaggtaaatgccttttggcaggaaaaccaatagagttggttgggtggggagtcaggggtgggaggagaaggaggaagaggaggaagccagactggcctgccctttctcccatacttcaccccagcagaggttcatgggacacagttggaaagccactgggaggaaatgcctcactacaggggggcctcctgtagcaagcccagccggtaatcctcctaatgaacccacaaggtcaattcacaactgatatcttagctattaaagaagtactgactttaccaaaagaatcatcaagaaagctatttatataaaccccctcagtcattttgaaataaaattaattttacaaaaattcgatagttttttttttcccaaaatgacaaaaaatctgcacctgtggtgacaggaaggctttgaaatagaggccctcattcttctgctccagtgggcagaaccttgcataaaggctccgggtccaaaagcccacccaggcagccccagacggatggcaggaagggggactgtcagcttcgggac

SEQ ID NO: 464896 - DNA, 4859 bp, Homo sapiens
cggtggcacagcagcgggcagcggcggctcaggcagctggagcctcaacagcctccagcgagcccgggacccgccgacagcccgagaaaccagccgaaggacgcggggcggggtcgccgccgccagccacggggtgctcccgtccactcgccgtcccaattgttcagtgccaacctaggtcattcccgctcgagccctcggccagtcatcagactcagtcaagaatgacaaccagggacggcttttggcgtgcatctcacagctgctcgggagccatcccgtgccggcttgcgcatgggactggcatgtgacccagtgaatccatgcagtaggcccggatgtgggtgtgggggagtcacatggcagatggagcccagaacgctttgaagtcacaagaagagaagggctttccagccacaacgagctgctggcctcctgcgggaagaagttctgcagccgagggagccggtgcgtgctcagcaggaagacaggggagcccgaatgcccgtgcctggaggcatgcaggcccagctacgtgcctgtgtgcggctctgatgggaggttttatgaaaaccactgtaagctccaccgtgctgcttgcctcctgggaaagaggatcaccgtcatccacagcaaggactgtttcctcaaaggtgacacgtgcaccatggccggctacgcccgcttgaagaatgtccttctggcactccagacccgtctgcagccactccaagaaggagacagcagacaagaccctgcctcccagaagcgcctcctggtggaatctctgttcagggacttagatgcagatggcaatggccacctcagcagctccgaactggctcagcatgtgctgaagaagcaggacctggatgaagacttacttggttgctcaccaggtgacctcctccgatttgacgattacaacagtgacagctccctgaccctccgcgagttctacatggccttccaacctgttgaatcatcacccagtttttcctactaccgttcctcctcccgggaaaagtggtcctgagacatgggattgggaagactccacgtgtggagacacagcacaggagcccaccctgcccaactggcaggccagaccctccacctgtgtgacttgtggggacctttgtgctcttagaaggcactgggggcagcgacgtgcacatccttttctggttcccatgggggagatccagaaacgtcaggaccctcccaaagctgaggacactgagtgaggagcccacaagggggaagctgtggtcactgctccggacctccactgcccaggcttctctctgagcagggcagcagaggctgctttgtctgctgcaggctgaccaagagggagtcctaggcctgatccagctttcctggctcccaggacaccaggcaagcagaggacaggagtggacagtgtcctttaccatctgctgccacagactcccccactccttaatcagtgagagactgcagagctaggcagctgcctcacctgcttctcacagagggacagaggcatcctgaagcccaggttctgctgatatgcagcgatttgctccacagcattcctggctcaccaccttctttccgagcccatgtggacggcagccctggggaagggtggagaggcaggagccgggcagggcctcggcctcagccgggagagggccaagcctccttccaaaccacatgcattttaatgggcagatttcactgacaattgccctgcattccctacttgcagagcagctctccaatgtcagttctcatagcagggcgtcagtccctctgtgggcacagacttctgcccagtagtgccagacaagctccctgatgggctgctctgacccccaacccagccctctctttccaaagacaccagcctcagtgtgtagacacattctcaccccagacacagcgtctggctgagccctctctcactgacccctgatcacactctgagtgctgggcatatcacgtttggtcgtccagggaccttggaaaccttcccacatagtggctaatgagcccacagatggtcagtcaacacaggggcattggagccacagccaggagccagaaggaccactcgttgccccctagagggctgcatgtggcatcttcatcttcctctcatgtggcctggctccccaccagagcagagaccaggcctggggcttaactggtccacagccctgcagatgtggccagcgcagggctctcaggcaagatttgttcccttcctctgggatcccacatacagaaacaattctgaccacagatcagacgtgcagggaaaatctgattccttttgtaactaacctgactttacaagcctcaccccaatgggagaaaagcacaactaaatgctcaatccattgtaaagattagcacgagctgacgattttaacagtccacaagtggttcagctcagcctcgcccccgaggacagggtcagtgtgaccacagtgaccgtggggctgagcacagtgctgacctgcgccgtccatggagacctgaggccaccaatcatctggaagcgcaacgggctcaccctgaacttcctggacttggaagacatcaatgactttggagaggatgattccctgtacatcaccaaggtgaccaccatccacatgggcaattacacctgccatgcttccggccacgagcagctgttccagacccacgtcctgcaggtgaatgtgccgccagtcatccgtgtctatccagagagccaggcacaggagcctggagtggcagccagcctaagatgccatgctgagggcattcccatgcccagaatcacttggctgaaaaacggcgtggatgtctcaactcagatgtccaaacagctctcccttttagccaatgggagcgaactccacatcagcagtgttcggtatgaagacacaggggcatacacctgcattgccaaaaatgaagtgggtgtggatgaagatatctcctcgctcttcattgaagactcagctagaaagacccttgcaaacatcctgtggcgagaggaaggcctcagcgtgggaaacatgttctatgtcttctccgacgacggtatcatcgtcatccatcctgtggactgtgagatccagaggcacctcaaacccacggaaaagattttcatgagctatgaagaaatctgtcctcaaagagaaaaaaatgcaacccagccctgccagtgggtatctgcagtcaatgtccggaaccggtacatctatgtggcccagccagcactgagcagagtccttgtggtcgacatccaagcccagaaagtcctacagtccataggtgtggaccctctgccggctaagctgtcctatgacaagtcacatgaccaagtgtgggtcctgagctggggggacgtgcacaagtcccgaccaagtctccaggtgatcacagaagccagcaccggccagagccagcacctcatccgcacaccctttgcaggagtggatgatttcttcattcccccaacaaacctcatcatcaaccacatcaggtttggcttcatcttcaacaagtctgatcctgcagtccacaaggtggacctggaaacaatgatgcccctcaagaccatcggcctgcaccaccatggctgcgtgccccaggccatggcacacacccacctgggcggctacttcttcatccagtgccgacaggacagccccgcctctgctgcccgacagctgctcgttgacagtgtcacagactctgtgcttggccccaatggtgatgtaacaggcaccccacacacatcccccgacgggcgcttcatagtcagtgctgcagctgacagcccctggctgcacgtgcaggagatcacagtgcggggcgagatccagaccctgtatgacctgcaaataaactcgggcatctcagacttggccttccagcgctccttcactgaaagcaatcaatacaacatctacgcggctctgcacacggagccggacctgctgttcctggagctgtccacggggaaggtgggcatgctgaagaacttaaaggagccacccgcagggccagctcagccctgggggggtacccacagaatcatgagggacagtgggctgtttggacagtacctcctcacaccagcccgagagtcactgttcctcatcaatgggagacaaaacacgctgcggtgtgaggtgtcaggtataaagggggggaccacagtggtgtgggtgggtgaggtatgaagggcccagagcagagccctgggccaaggaacaccccctagtcctgacactgcagcctcaagcaggtacgctgtacatttttacagacaaaagcaaaaacctgtactcgctttgtggttcaacactggtctccttgcaagtttcctagtataaggtatgcgctgctaccaagattggggttttttcgttaggaagtatgatttatgccttgagctacgatgagaacatatgctgctgtgtaaagggatcatttctgtgccaagctgcacaccgagtgacctggggacatcatggaaccaagggatcctgctctccaagcagacacctctgtcagttgccttcacatagtcattgtcccttactgccagacccagccagactttgccctgacggagtggcccggaagcagaggccgaccaggagcaggggcctccctcccgaactgaaagcccatccgtcctcgcgtgggaccgcatcttctccctcgcagctgcttcttgcttttctttccatttgacttgctgtaagcctgagggagagccaacaagacttactgcatcttgggggatggggaaatcactcactttattttggaaatttttgattaaaaaaaaattttataatctc

SEQ ID NO: 464897 - DNA, 2710 bp, Homo sapiens
tgtaagagtatggcaatactgttttttttcattttgtattgtttcttaggagtgatgatggctcgtcagtgttccactgcactatggggaagggagtgtcttggtggtaaacaaggcctttacccttgctaagcttggcctgctggctccttcctcagctcctccctacgtgacctgttctcatcatttagttttcagctcaactacaacctcctcagcaagaccttctctgaccatagcaatcactgccatctgcctgtgcctctttcagtgtctggttctcccaggagaatgtcagttccatgacaatggacactacaacggactctcttgctcatcactattcccagggcatagtctatacagagtgctcaggaattcctggttaaatgaataaatgactaatacatttaattttgtgaacatttattaaatttgtgttactgatgaaatgaccaacacatggttcccagtagacaggtaacaaacaaaaagcagatgtcacatttacctgaacaaggaacacatttgaaaagtgattaaccaacaagggagtaaagcctcctgcagttctgtagttccttacattggtgcagggtttgagaatttctgaagtgcttttcaaccgcttctttctttggactcttatactaactgcatgaggaaggcatgcgtggtgcaggagctcctctgcaaaggatgaaacagagagaaggagacagaagtgcaaatcaaggtgttgacagggttggaagcagcctgactactgcagaagtggctgttgggaagaagtggaagatgaggctagaagttctgaacggaaggacagagccctgtgtcatcaagattgcattgaccacaaatcacaaaaccccagttaacactgactggagtgataaggaaatttgccatctcacaaaacactgcatctgtggatacggctgggttgtttctgtgggatatcgggaaataatgtgcatagaacaaggcttggaacactaccttagtcctggtactgtgattttgatttttaatatgctgagtttgaaattacgaaggagcttaaatgaaaacattcagtcagttgttgctcgatgagagttgttttaacgtttcttatgagccagctctagacttagatattttataggattatctcatcttaaaccttgtaacaattctacgaggaaggcattgttacctgaaatttgtggatgaggaaacagaggtagagaggacttaggtaacttttcagtgtctgagcatcccagtaccctaagcaactcccccgcattcccgctattgcttgactcatccaattgcagtctccatctcaaaggggacagggctctgtgcttcagcacttcagggacagtggtagcttccacttcccacgcacccctcgcatctgctaactctctctggggttggccccaaatgcatactattggcctctgtctgtttccacctctccatcctgctcccttggatggagtgcttcatggtgactctctccctgggtcctgactcactccttctccccacagtcatgacaaactgtgttcttccttcactacttgtaatgggttctagaagctcagtccaagttagagagaaggctctaacccactggattactctaagctcactgagctggtgagagatagagccaggattcaacccaccttctttgtcctacctcattctggctccctggttgaccatcaaagtaaacacttaattcaaactctgaactcaaacactattttcggattattctctccatggtctaaataatctcagtttgatgaaatatgtaaaatggagtggaagaaatgaataacattcctatgatggctgtagggatgtcactgttgggagtggaggtcaggataggagtggtgggcaccaggaactcggagcaatggtagggagaggcagcagggtgcaggcaccacgcacaccccaggggtttaattccactgctcctcttgggggaaaaggtgtctctacctctggttatgttcctgccattgccagaatgcctgagacaccaagcacaggacccagcaggagcctcacccacaaaaccatgcgtctgcctgaaaggatgaaagacaaacgtgttttccaagttgatttcagaaaaagataagcaaagcaaagaaagaaacagtcattctgctcctcatgctacttcataagaagcagattggggatcttgtgcagcacttctaaaagttctcagtaccagtgcaggaactccagcgcccatgttcactacttcagtcatcccggtggggctccagctgggctcaaagagccctgcatttgctaaatagagtatcatcataattaaaaatggtgacatgattttacaaagttttgtgatcaatggtcctcttagataaattattagttgtgggtttttttttccttttcaactcattttcagtgtatccttctaaggaaaaaatgaaggtctgggtcagggtcagggtcagggttaggatcagagtataggttaggattcttctacaggtttggcatcctagatacaattaattcaacgagcattttccccctctggaaacctgctagtctcctggccccaggggcacctcttgctaataactctcttcctatcttatgcactgctccctctcagtcttctgtggggctccttcacttttttcaggctctacctacc

SEQ ID NO: 464898 - DNA, 638 bp, Homo sapiens
tgtaagagtatggcaatactgttttttttcattttgtattgtttcttaggagtgatgatggctcgtcagtgttccactgcactatggggaagggagtgtcttggtggtaaacaaggtaaagagaaacaggtgttttgctaaattcccttaagccatcccacatctctgacttccatccctgctctttgcagacactgaagagaaaactcaaaggattcccagcctgtggcaaacacttttgttacaaagcactggatgtatgcctttttcttgatggtagaattctgattagtttggggtaccaatgtatccagccaaacacccacattttcagcctcttttgctgctacatgtagccatgcagcatgtttcgatcaatgcaaagtatgtaaaattattttgctttcctggtaataggagacaaaagtggctgaaccctgtctttccccttaattccaatttgggtgtgatggcaggagcttcagcagcaatattataactatgaagaaatggacaagagaattacagcaatggcaacactaacatttttcataaatagcaaatattcagaaaggcaataaaaaataaaaccatgagactaacaagagaagtaataataatagtacaacagtgatact

SEQ ID NO: 464899 - DNA, 2666 bp, Homo sapiens
tacttaatttaatgacatcttcaaagcctcttgtcatatataacatagtcagaggttccggaatctcaacagttatcttctggaggccattattctgcctactacatagctctgtgaacttacatgatgaacatgctggaatttcctgttcaaataacatagatcacagagaaagaaaagggccttggaaatccattggtccagatctttcatttttaataagaagtcaattttacctaaaagttaacctgaaaggctacacgggtgatttccgttctcttctggccagtaattgggctctgcggctcctcgcgattttaccagttcccatccgtttagcaaacgcctttagcaaacgcccgtttagcaaacgcctcctccgtcctttggaggagggcggggctaaaagggagatgctgcctagtgattcgttgtggcgcattagtaacgcgactacagggggctggaaacagttcagtctttgattggttgctgagaggcggggctactcgactgctctggaggtagcggccgcggtgaggagagccatgggacgggcagtcaaggttttacagctctttaaaacactgcacaggaccagacaacaagtttttaaaaatgatgccagagcattagaagcagccagaataaagataaatgaagaattcaaaaataataaaagtgaaacttcttctaagaaaatagaagagaactggtccctaggaaagaccttcttgtagaaaatgtgccatattgtgatgcaccaactcagaagcaatgagttttctagaatacaacaagtctttgtactttttaactttaaaatctacaactctggcaaaagtcctggaaatgcagacattttccctgaactggcatattgaaaatgaatgaattacagaatagcttcatatttaaatttcatgttaaaaggtcattactgagaactaaagaacataattaagtatttctaaaggaaattagataagaaaacatttcattttcattgaaaatcaaatttcataaagcaaagtaaatgcttagggagatatattcaatctttgaccttgatgagtatttgatcttaccatagctatttgagaatgtggtgcttttacaaattggtgagttttcctgccatgtgaaatgcaattattacatttaaattgttagattaaaatgatatttagtcctgaaaaatattaaattggtcaaaaaaatcacagtgtatgccagctctctacagaaagtggcctttgttttctaaagcactgggattatttctgtagctaatatataattgtacagtttctttttagagatagagagtatctctgtgttcttatgaagacattttttatcagttttctgaaaatagatgaataaaatattatagtcacctagggtcactatggaataaagaaatcctagtttaaagaggaaatagtggcccttgatcaaactatttaatatggccttagtagaattagctgtatttagacaaagttagactttagtgtgaaatgtaatcggtggctacattctcatcgttttaattaatgaaacttaaatggcttctcttcttccacatgtcctgtccttgacaagatgggcagtatcacaaaaggtcctggcattctaccatctaacactaggaactgtaaaatactgtttaatattcttcttgtttctcttttatctgtgtatctttgccattctattttctcagtgaatagtatgttttctcccattcactgataaattctctcatttgatgatgatacagggtttttaatttttgcaagattctcaatgcaagcattgttatgtatctagaaattatacctagagaaaaatgaaagtcgtttcaaatttgaaatttgcccttttaagagaatgctgaatgtcatcgcagtatataatcactatataaatgtgctgacttacagttattttagtgtctatatgacatattttgaggaaagttggctgacgttatttaaatttaatatatattctatattttagtgttattgaatattttatcactgagcttttttctttaacctgaattccctgttccatttttcattcatattaatttaaataactccagatttctttcttatagtcattattagtagcagatgagattaataattcacatgtttattaaagatagtggcttagaaattttaagatatattgatataggcccgggcgctgtggctcacacctgtaatcccgcactttgggaggctgaggcgggcagatcacaaggtcaggagttcgagaccagcctggccaatgtggtgaaaccccatctctactaaaaacacaaaaattagccaggtatggtggcgggcgcctgtagtcccagctactcgggaggctgaggcaggaaaatcacttgaacccgggaggtggaggttgcagtgaactgagattgtgccactgcactccagcctgggggacagagtgagactctgtctcaaaaaaaaaaaagaaaaaaaaaggaaaaaggaaaaaaaaaagatatattgatacagataggtagatatgatattgtactttcatgccataagactacacaataaagttcctgaaagttcctggctgggcgcagtggctcacgcctgtaatcccagcactttgggaggccgagg

SEQ ID NO: 464900 - DNA, 2098 bp, Homo sapiens
aagcagtggtatcaacgcagagggcccattatggccgggcttcttctaagaaaatagaagctaatgaaaataggttctgatgttgaattattactcagaacatctgttatacaaggtattcacacagaccacaatacactgaaactggtccctaggaaagaccttcttgtagaaaatgtgccatattgtgatgcaccaactcagaagcaatgagttttctagaatacaacaagtctttgtactttttaactttaaaatctacaactctggcaaaagtcctggaaatgcagacattttccctgaactggcatattgaaaatgaatgaattacagaatagcttcatatttaaatttcatgttaaaaggtcattactgagaactaaagaacataattaagtatttctaaaggaaattagataagaaaacatttcattttcattgaaaatcaaatttcataaagcaaagtaaatgcttagggagatatattcaatctttgaccttgatgagtatttgatcttaccatagctatttgagaatgtggtgcttttacaaattggtgagttttcctgccatgtgaaatgcaattattacatttaaattgttagattaaaatgatatttagtcctgaaaaatattaaattggtcaaaaaaatcacagtgtatgccagctctctacagaaagtggcctttgttttctaaagcactgggattatttctgtagctaatatataattgtacagtttctttttagagatagagagtatctctgtgttcttatgaagacattttttatcagttttctgaaaatagatgaataaaatattatagtcacctagggtcactatggaataaagaaatcctagtttaaagaggaaatagtggcccttgatcaaactatttaatatggccttagtagaattagctgtatttagacaaagttagactttagtgtgaaatgtaatcggtggctacattctcatcgttttaattaatgaaacttaaatggcttctcttcttccacatgtcctgtccttgacaagatgggcagtatcacaaaaggtcctggcattctaccatctaacactaggaactgtaaaatactgtttaatattcttcttgtttctcttttatctgtgtatctttgccattctattttctcagtgaatagtatgttttctcccattcactgataaattctctcatttgatgatgatacagggtttttaatttttgcaagattctcaatgcaagcattgttatgtatctagaaattatacctagagaaaaatgaaagtcgtttcaaatttgaaatttgcccttttaagagaatgctgaatgtcatcgcagtatataatcactatataaatgtgctgacttacagttattttagtgtctatatgacatattttgaggaaagttggctgacgttatttaaatttaatatatattctatattttagtgttattgaatattttatcactgagcttttttctttaacctgaattccctgttccatttttcattcatattaatttaaataactccagatttctttcttatagtcattattagtagcagatgagattaataattcacatgtttattaaagatagtggcttagaaattttaagatatattgatataggcccgggcgctgtggctcacacctgtaatcccgcactttgggaggctgaggcgggcagatcacaaggtcaggagttcgagaccagcctggccaatgtggtgaaaccccatctctactaaaaacacaaaaattagccaggtatggtggcgggcgcctgtagtcccagctactcgggaggctgaggcaggaaaatcacttgaacccgggaggtggaggttgcagtgaactgagattgtgccactgcactccagcctgggggacagagtgagactctgtctcaaaaaaaaaaaagaaaaaaaaaggaaaaaggaaaaaaaaaagatatattgatacagataggtagatatgatattgtactttcatgccataagactacacaataaagttcctgaaagttcctggctgggcgcagtggctcacgcctgtaatcccagcactttgggaggccgagg

SEQ ID NO: 464901 - DNA, 2748 bp, Homo sapiens
tacttaatttaatgacatcttcaaagcctcttgtcatatataacatagtcagaggttccggaatctcaacagttatcttctggaggccattattctgcctactacatagctctgtgaacttacatgatgaacatgctggaatttcctgttcaaataacatagatcacagagaaagaaaagggccttggaaatccattggtccagatctttcatttttaataagaagtcaattttacctaaaagttaacctgaaaggctacacgggtgatttccgttctcttctggccagtaattgggctctgcggctcctcgcgattttaccagttcccatccgtttagcaaacgcctttagcaaacgcccgtttagcaaacgcctcctccgtcctttggaggagggcggggctaaaagggagatgctgcctagtgattcgttgtggcgcattagtaacgcgactacagggggctggaaacagttcagtctttgattggttgctgagaggcggggctactcgactgctctggaggtagcggccgcggtgaggagagccatgggacgggcagtcaaggttttacagctctttaaaacactgcacaggaccagacaacaagtttttaaaaatgatgccagagcattagaagcagccagaataaagataaatgaagaattcaaaaataataaaagtgaaacttcttctaagaaaatagaagagctaatgaaaataggttctgatgttgaattattactcagaacatctgttatacaaggtattcacacagaccacaatacactgaaactggtccctaggaaagaccttcttgtagaaaatgtgccatattgtgatgcaccaactcagaagcaatgagttttctagaatacaacaagtctttgtactttttaactttaaaatctacaactctggcaaaagtcctggaaatgcagacattttccctgaactggcatattgaaaatgaatgaattacagaatagcttcatatttaaatttcatgttaaaaggtcattactgagaactaaagaacataattaagtatttctaaaggaaattagataagaaaacatttcattttcattgaaaatcaaatttcataaagcaaagtaaatgcttagggagatatattcaatctttgaccttgatgagtatttgatcttaccatagctatttgagaatgtggtgcttttacaaattggtgagttttcctgccatgtgaaatgcaattattacatttaaattgttagattaaaatgatatttagtcctgaaaaatattaaattggtcaaaaaaatcacagtgtatgccagctctctacagaaagtggcctttgttttctaaagcactgggattatttctgtagctaatatataattgtacagtttctttttagagatagagagtatctctgtgttcttatgaagacattttttatcagttttctgaaaatagatgaataaaatattatagtcacctagggtcactatggaataaagaaatcctagtttaaagaggaaatagtggcccttgatcaaactatttaatatggccttagtagaattagctgtatttagacaaagttagactttagtgtgaaatgtaatcggtggctacattctcatcgttttaattaatgaaacttaaatggcttctcttcttccacatgtcctgtccttgacaagatgggcagtatcacaaaaggtcctggcattctaccatctaacactaggaactgtaaaatactgtttaatattcttcttgtttctcttttatctgtgtatctttgccattctattttctcagtgaatagtatgttttctcccattcactgataaattctctcatttgatgatgatacagggtttttaatttttgcaagattctcaatgcaagcattgttatgtatctagaaattatacctagagaaaaatgaaagtcgtttcaaatttgaaatttgcccttttaagagaatgctgaatgtcatcgcagtatataatcactatataaatgtgctgacttacagttattttagtgtctatatgacatattttgaggaaagttggctgacgttatttaaatttaatatatattctatattttagtgttattgaatattttatcactgagcttttttctttaacctgaattccctgttccatttttcattcatattaatttaaataactccagatttctttcttatagtcattattagtagcagatgagattaataattcacatgtttattaaagatagtggcttagaaattttaagatatattgatataggcccgggcgctgtggctcacacctgtaatcccgcactttgggaggctgaggcgggcagatcacaaggtcaggagttcgagaccagcctggccaatgtggtgaaaccccatctctactaaaaacacaaaaattagccaggtatggtggcgggcgcctgtagtcccagctactcgggaggctgaggcaggaaaatcacttgaacccgggaggtggaggttgcagtgaactgagattgtgccactgcactccagcctgggggacagagtgagactctgtctcaaaaaaaaaaaagaaaaaaaaaggaaaaaggaaaaaaaaaagatatattgatacagataggtagatatgatattgtactttcatgccataagactacacaataaagttcctgaaagttcctggctgggcgcagtggctcacgcctgtaatcccagcactttgggaggccgagg

SEQ ID NO: 464902 - DNA, 880 bp, Homo sapiens
  misc_feature (880)..(880): n is a, c, g, or t
tacttaatttaatgacatcttcaaagcctcttgtcatatataacatagtcagaggttccggaatctcaacagttatcttctggaggccattattctgcctactacatagctctgtgaacttacatgatgaacatgctggaatttcctgttcaaataacatagatcacagagaaagaaaagggccttggaaatccattggtccagatctttcatttttaataagaagtcaattttacctaaaagttaacctgaaaggctacacgggtgatttccgttctcttctggccagtaattgggctctgcggctcctcgcgattttaccagttcccatccgtttagcaaacgcctttagcaaacgcccgtttagcaaacgcctcctccgtcctttggaggagggcggggctaaaagggagatgctgcctagtgattcgttgtggcgcattagtaacgcgactacagggggctggaaacagttcagtctttgattggttgctgagaggcggggctactcgactgctctggaggtagcggccgcggtgaggagagccatgggacgggcagtcaaggttttacagctctttaaaacactgcacaggaccagacaacaagtttttaaaaatgatgccagagcattagaagcagccagaataaagataaatgaagaattcaaaaataataaaagtgaaacttcttctaagaaaatagaagagaactggtccctaggaaagaccttcttgtagaaaatgtgccatattgtgatgcaccaactcagaagcaatgagttttctagaatacaacaagtctttgtactttttaactttaaaatctacaactctggcaaaaaggggtttcccccccccttttttgggggggggggggn

SEQ ID NO: 464903 - DNA, 2595 bp, Homo sapiens
tacttaatttaatgacatcttcaaagcctcttgtcatatataacatagtcagaggttccggaatctcaacagttatcttctggaggccattattctgcctactacatagctctgtgaacttacatgatgaacatgctggaatttcctgttcaaataacatagatcacagagaaagaaaagggccttggaaatccattggtccagatctttcatttttaataagaagtcaattttacctaaaagttaacctgaaaggctacacgggtgatttccgttctcttctggccagtaattgggctctgcggctcctcgcgattttaccagttcccatccgtttagcaaacgcctttagcaaacgcccgtttagcaaacgcctcctccgtcctttggaggagggcggggctaaaagggagatgctgcctagtgattcgttgtggcgcattagtaacgcgactacagggggctggaaacagttcagtctttgattggttgctgagaggcggggctactcgactgctctggaggtagcggccgcggtgaggagagccatgggacgggcagtcaaggttttacagctctttaaaacactgcacaggaccagacaacaagtttttaaaaatgatgccagagcattagaagaactggtccctaggaaagaccttcttgtagaaaatgtgccatattgtgatgcaccaactcagaagcaatgagttttctagaatacaacaagtctttgtactttttaactttaaaatctacaactctggcaaaagtcctggaaatgcagacattttccctgaactggcatattgaaaatgaatgaattacagaatagcttcatatttaaatttcatgttaaaaggtcattactgagaactaaagaacataattaagtatttctaaaggaaattagataagaaaacatttcattttcattgaaaatcaaatttcataaagcaaagtaaatgcttagggagatatattcaatctttgaccttgatgagtatttgatcttaccatagctatttgagaatgtggtgcttttacaaattggtgagttttcctgccatgtgaaatgcaattattacatttaaattgttagattaaaatgatatttagtcctgaaaaatattaaattggtcaaaaaaatcacagtgtatgccagctctctacagaaagtggcctttgttttctaaagcactgggattatttctgtagctaatatataattgtacagtttctttttagagatagagagtatctctgtgttcttatgaagacattttttatcagttttctgaaaatagatgaataaaatattatagtcacctagggtcactatggaataaagaaatcctagtttaaagaggaaatagtggcccttgatcaaactatttaatatggccttagtagaattagctgtatttagacaaagttagactttagtgtgaaatgtaatcggtggctacattctcatcgttttaattaatgaaacttaaatggcttctcttcttccacatgtcctgtccttgacaagatgggcagtatcacaaaaggtcctggcattctaccatctaacactaggaactgtaaaatactgtttaatattcttcttgtttctcttttatctgtgtatctttgccattctattttctcagtgaatagtatgttttctcccattcactgataaattctctcatttgatgatgatacagggtttttaatttttgcaagattctcaatgcaagcattgttatgtatctagaaattatacctagagaaaaatgaaagtcgtttcaaatttgaaatttgcccttttaagagaatgctgaatgtcatcgcagtatataatcactatataaatgtgctgacttacagttattttagtgtctatatgacatattttgaggaaagttggctgacgttatttaaatttaatatatattctatattttagtgttattgaatattttatcactgagcttttttctttaacctgaattccctgttccatttttcattcatattaatttaaataactccagatttctttcttatagtcattattagtagcagatgagattaataattcacatgtttattaaagatagtggcttagaaattttaagatatattgatataggcccgggcgctgtggctcacacctgtaatcccgcactttgggaggctgaggcgggcagatcacaaggtcaggagttcgagaccagcctggccaatgtggtgaaaccccatctctactaaaaacacaaaaattagccaggtatggtggcgggcgcctgtagtcccagctactcgggaggctgaggcaggaaaatcacttgaacccgggaggtggaggttgcagtgaactgagattgtgccactgcactccagcctgggggacagagtgagactctgtctcaaaaaaaaaaaagaaaaaaaaaggaaaaaggaaaaaaaaaagatatattgatacagataggtagatatgatattgtactttcatgccataagactacacaataaagttcctgaaagttcctggctgggcgcagtggctcacgcctgtaatcccagcactttgggaggccgagg

SEQ ID NO: 464904 - DNA, 1220 bp, Homo sapiens
attcatccgctctgaaaattacgtctttggtggacatcagcgtggacttggatacatgatttctaaatatatatttcccattctataggttgtcttttcactttcttgctaatgtccttggatgatccacaacttttccaaagcagaattaacttttgcagtgataaaagccagagttgtggagagagaagaaggagaagcagaaggagaaagaggagaagaaaaggaaaaattcttggcataaattgttcatcaacaggcgattttcattaaaacaaggctaggatcaactctggaaagcttgataaatccctgataaggtgcccagatgttctaatgaactttgttgggagttttgccatttcaagtttatgcgttttgcccaaaggccaatgattgggatggcctcagcatctgatactgattcttcaaaaagcgccccctccttgccctgggacattgagtgcctgctggagaggttgcaaattggatcagcctaacagaaactgcagtcaggcctggaagcaatattcaggctcacttttccaggaatagtgttccaagaaagaaaggattcttgggatcttttcactgcctgacagtgatgagtatgtttttccggacagagtgcaggctgccttctaagacccccaaaacattttcaagtctgcttcttgaaggcccgaacacagaagattcactcaaaaaccaatttatccacagttctttggttgatctcaagcagtctctctcctggaggaacttactgtcctatagagacatgtgccaactgtcgaagaccgtgacgtggccaaagcacaataagactgttatctttctaaggctccgagagcctcagcctaaagctcccatgggagcacacaccgcaaaggaggagctgagtcaaccaggggagcgaacagccggcagggaggacacgcacacggatcagccccggctgcacacaccacaccgtgcactggggagctggccatgtcccctccttactggcctggaacctctcactcttcagggccaaacatgcccaggacagctgccacctctgggcactgtgggccagcgcagggcctggggcctccttggcatttgctgaatttaatcgagaagaaaacaaaggatatattcctcaaagtagaatttccaggtgaaaggggatgcagatttttaaagcttcaaatagtcataccaaatacagttcc

SEQ ID NO: 464905 - DNA, 1245 bp, Homo sapiens
ttgagacagtcccagcctggagtgtggcagcacaaccttggctcactgcaacctatgcctcctgggttcaaacgattctcctgcctcagcctcccaagtagctgggactacaggttgtcttttcactttcttgctaatgtccttggatgatccacaacttttccaaagcagaattaacttttgcagtgataaaagccagagttgtggagagagaagaaggagaagcagaaggagaaagaggagaagaaaaggaaaaattcttggcataaattgttcatcaacaggcgattttcattaaaacaaggctaggatcaactctggaaagcttgataaatccctgataaggtgcccagatgttctaatgaactttgttgggagttttgccatttcaagtttatgcgttttgcccaaaggccaatgattgggatggcctcagcatctgatactgattcttcaaaaagcgccccctccttgccctgggacattgagtgcctgctggagaggttgcaaattggatcagcctaacagaaactgcagtcaggcctggaagcaatattcaggctcacttttccaggaatagtgttccaagaaagaaaggattcttgggatcttttcactgcctgacagtgatgagtatgtttttccggacagagtgcaggctgccttctaagacccccaaaacattttcaagtctgcttcttgaaggcccgaacacagaagattcactcaaaaaccaatttatccacagttctttggttgatctcaagcagtctctctcctggaggaacttactgtcctatagagacatgtgccaactgtcgaagaccgtgacgtggccaaagcacaataagactgttatctttctaaggctccgagagcctcagcctaaagctcccatgggagcacacaccgcaaaggaggagctgagtcaaccaggggagcgaacagccggcagggaggacacgcacacggatcagccccggctgcacacaccacaccgtgcactggggagctggccatgtcccctccttactggcctggaacctctcactcttcagggccaaacatgcccaggacagctgccacctctgggcactgtgggccagcgcagggcctggggcctccttggcatttgctgaatttaatcgagaagaaaacaaaggatatattcctcaaagtagaatttccaggtgaaaggggatgcagatttttaaagcttcaaatagtcataccaaatacagttcc

SEQ ID NO: 464906 - DNA, 304 bp, Homo sapiens
gggccggtacctatatcgcaagggcagatcttggacaacatcctgttttgctggcattgagaaacacagccactattccaccaatatcatctctaaagaaatgcattgtgcaagtcataaggtacatctaaatattaaatataggtggtatgtacaaattattaagctctattaaagtgataaagtggcatttcaaacatattggcaacccttaggatactagtagttcagaagctttttgttttcctgagaagcattatctaagattttattaaaatgacatttgcttatggcagcctaagac

SEQ ID NO: 464907 - DNA, 1160 bp, Homo sapiens
aaaatctggaagaggcagttgaaaaagagtacatgaaacagttggtcaaactgacaagattactatttaatctctcagaagtaaagagtattttctcaaaggcccaagttgaatatttatccatctcagaagaccctaaaaaagcacttgttcgattctttgaggctgttggtgtaacttacgggaacgtccagacactttctgataaatctgccatggtcacaaagtccttggaataccttggtgaagtattaaaatatattaagccttatttgggaaaaaaagttttcagtgcagggctgcagctgacttatggaatgatgggaattcttgtgaaatcatgggcacaaatctttgccacttctaaagcccaaaaattactattccggatcatagattgtttactgctgccacatgcagtattacagcaagagaaggaactgcctgcacctatgttgtcagcaattcagaaaagtcttcctttgtatctccagggcatgtgtatcgtgtgttgtcaatctcaaaatccgaatgcctatttgaatcaattgctagggaatgttattgagcagtatattgggcgatttcttccagcttcaccatatgtttcagatcttggacaacatcctgttttgctggcattgagaaacacagccactattccaccaatatcatctctaaagaaatgcattgtgcaagtcataaggaaatcctaccttgagtataaggggtcctcacctcctcctcgcttagcatccattctggccttcatcctccaactcttcaaggaaactaacacagacatttatgaagttgaactactcctccctggcattttaaaatgcttggtgttagtcagtgaaccacaagttaaaaggctggccacagagaacctgcaatacatggtaaaagcctgccaagtggggtcagaagaagaaccttcctcccagctgacttctgtgtttaggtaactggaaaatatgccacctggcaaggaaactattgccagccatttgacagccaacatgttttttaaataactaattatccaaaacataatgtgttactacttgtttatagtatttcaattattgtatttttggcagtagttttgttacactgtgatgttttattgaaaaataaaagtgccagtgaaaaag

SEQ ID NO: 464908 - DNA, 1488 bp, Homo sapiens
aaaatctggaagaggcagttgaaaaagagtacatgaaacagttggtcaaactgacaagattactatttaatctctcagaagtaaagagtattttctcaaaggcccaagttgaatatttatccatctcagaagaccctaaaaaagcacttgttcgattctttgaggctgttggtgtaacttacgggaacgtccagacactttctgataaatctgccatggtcacaaagtccttggaataccttggtgaagtattaaaatatattaagccttatttgggaaaaaaagttttcagtgcagggctgcagctgacttatggaatgatgggaattcttgtgaaatcatgggcacaaatctttgccacttctaaagcccaaaaattactattccggatcatagattgtttactgctgccacatgcagtattacagcaagagaaggaactgcctgcacctatgttgtcagcaattcagaaaagtcttcctttgtatctccagggcatgtgtatcgtgtgttgtcaatctcaaaatccgaatgcctatttgaatcaattgctagggaatgttattgagcagtatattgggcgatttcttccagcttcaccatatgtttcagatcttggacaacatcctgttttgctggcattgagaaacacagccactattccaccaatatcatctctaaagaaatgcattgtgcaagtcataaggaaatcctaccttgagtataaggggtcctcacctcctcctcgcttagcatccattctggccttcatcctccaactcttcaaggaaactaacacagacatttatgaagttgaactactcctccctggcattttaaaatgcttggtgttagtcagtgaaccacaagttaaaaggctggccacagagaacctgcaatacatggtaaaagcctgccaagtggggtcagaagaagaaccttcctcccagctgacttctgtgtttaggcagtttatccaggattatggtatgaggtactattaccaggtttacagcattttagaaacagtagcaacattggaccagcaggttgtcatccacttgatttctacccttactcagtctctgaaggattcagagcagaaatggggccttggcaggaatatagcacaaagggaagcctatagcaaacttttgtctcaccttggacagatgggacaagatgagatgcagagactggaaaatgataatacttaatatattttgtgattcatcctgtctattaattatcagtatctaaagccacattgttccactctaattcctacttttaattaattgtataatgttctgtttaaaataatttctaggattttttttccttttatatctgtaagtaaaaaatgtataaataaggaactgaaggttaattagcaactgtgtaataggatccttggaactttttacaaaactgcattctaccttgatgaaattttagttaaactaaattaaagaaacattttctgag

SEQ ID NO: 464909 - DNA, 5825 bp, Homo sapiens
catctgagcaaaccaggatgagttaaatatattcaaaattccatcaaaaaagaatggaagaactaactgaagttggtctacagaacttttttagcctttttctactgttagcagctgttgcagaggtagaagatgttgcaagtcatgttttagacctcctgaatttcctcaagcctgcttttgtaacgtctcagagagccctcatttggaagggtcacatggccttcctcttgatgtatgcccagaaaaatctggacattggtgttttggctgagaaattttcatgtgctttccgggagaaagcaaaggaattcttggtgtctaagaatgaggaaatggtacagagacagactatctggacccttctttccatatacattgatggtgttcaagaagtgtttgagaccagctattgcttgtatccttcccatgaaaaactgcttaatgatggatttagtatgcttctgcgagcatgtcgagaatctgaacttaggacagtattgagcttcctacaagctgttctggccagaatcaggagtatgcatcaacaattgtgtcaggaacttcaaagggacaatgtggacctatttgtacagtcttcattatcggctaaagagcgccaccttgctgcagttgccagtgcactgtggagacatttcttttcatttttgaagagtcagagaatgtcacaggtagtgcctttctcacaacttgcggatgcagctgcagaaaaagagtacatgaaacagttggtcaaactgacaagattactatttaatctctcagaagtaaagagtattttctcaaaggcccaagttgaatatttatccatctcagaagaccctaaaaaagcacttgttcgattctttgaggctgttggtgtaacttacgggaacgtccagacactttctgataaatctgccatggtcacaaagtccttggaataccttggtgaagtattaaaatatattaagccttatttgggaaaaaaagttttcagtgcagggctgcagctgacttatggaatgatgggaattcttgtgaaatcatgggcacaaatctttgccacttctaaagcccaaaaattactattccggatcatagattgtttactgctgccacatgcagtattacagcaagagaaggaactgcctgcacctatgttgtcagcaattcagaaaagtcttcctttgtatctccagggcatgtgtatcgtgtgttgtcaatctcaaaatccgaatgcctatttgaatcaattgctagggaatgttattgagcagtatattgggcgatttcttccagcttcaccatatgtttcagatcttggacaacatcctgttttgctggcattgagaaacacagccactattccaccaatatcatctctaaagaaatgcattgtgcaagtcataaggaaatcctaccttgagtataaggggtcctcacctcctcctcgcttagcatccattctggccttcatcctccaactcttcaaggaaactaacacagacatttatgaagttgaactactcctccctggcattttaaaatgcttggtgttagtcagtgaaccacaagttaaaaggctggccacagagaacctgcaatacatggtaaaagcctgccaagtggggtcagaagaagaaccttcctcccagctgacttctgtgtttaggcagtttatccaggattatggtatgaggtactattaccaggtttacagcattttagaaacagtagcaacattggaccagcaggttgtcatccacttgatttctacccttactcagtctctgaaggattcagagcagaaatggggccttggcaggaatatagcacaaagggaagcctatagcaaacttttgtctcaccttggacagatgggacaagatgagatgcagagactggaaaatgataatacttaatatattttgtgattcatcctgtctattaattatcagtatctaaagccacattgttccactctaattcctacttttaattaattgtataatgttctgtttaaaataatttctaggattttttttccttttatatctgtaagtaaaaaatgtataaataaggaactgaaggttaattagcaactgtgtaataggatccttggaactttttacaaaactgcattctaccttgatgaaattttagttaaactaaattaaagaaacattttctgagagtgttttctgtgtgtgagtattaagcagatacttcatccatagactttttgttgtagtatgacttcctgcctccctgccttgtgactgatttgtcatgtttattttttatttttacaataatagttatgttttaaaatgatactttttcaaagtacctggctaccctatactgtgtttttggtgggggaaaggtgttgggaaatgtgactgtgtatttgtttttcttttttatatgtgtgaggcaagttaacaaagaaaacccttacaaagcacacttaactgtgttaggaatgagactgaatctggctaaaggattatacagctgatatccaaaaagaagtgtaaacatgccaacagggtttatatttaggttccaagagttgccaaattttttttttattcatcctttcttttggagttgtcattaaaaaaaaaatcatatcaggaggaggaaataaaggagactttaagaggagagtaaataaaaatattctagaaaagtaacaatagtagtggtctgagaagtcagctgatccatcttcttgctctttagccagagcttcttataacttagcattttatccaagaaacctgtttagtttcctttaacaacattgtttctcaacttttgaactcttaactcatccagattgttttaccagttggagcttgtccttgactccttttcctattgagcattatttggttgaaagagctccagtcctagttttgggaacccacctgggtctcaaactcagctttgctttatgatcttgagctagttacgtaacctttctcagtctagtttcttcatggagaagaaaagaagaatccctttactatttgacagtgttgttgtgagaatcaatgggataataaattgaagacacttaaataggaagaaaattaaaatatacatttggatacatgagtattccagtcaaataatatctataaaataccagatagagtataaaagacaactgaaggacaacagagtgatgaaaggactttattaggcatttggatttggttatgatttaaatttcaatttaattagaacgtttccatggcaaggaaggaagcatggaggactgtggaaaagtcattcagtattgagttcatttgcattagaggaatttcatagtttaaaacttgtatatctttacctatccttcgtatgttttcttcttaagcatatttgactttttctacctcagcatctgtataagaaaatatttgtgagtcagatgtttgtgggttttccttacctattattattttcttccatgctttacaacacattttttaaactaccttgttcttaaataattacacggacctgcttctgtgtactttcacagaatctttgacagttaaaaattgtatgttatataaaaatttgacaagcttctacagttaggaaaagcctttagaaatctgccttccccaaaccgtatgttatcatagcactcatgtctccccatgtctaaaaggtaaatagatacagaaacctcaccaaaagttgaatcatctgtactaaaccactgcttttttatccagactttttatataaatcttttattttccaaaaaactgatcttttacctacccctcttagagttaaaaatattgcctgtcaggcaagagtatagtatgccaatataaataatatgctttatttggttagaaacagttggtttgggaagctagcaacatagcatattctttacaaatttaataaggtgtattttgatactgtgataacctgcattgtaaattaccaaatggttggaattgaccagtttatacttattaaaatttttgatgtgccaatggctatccaattcattgcatttgtgaattgtgcttttagaaaaattgtggacattttagttttatatacatatttatgagttatttgtgcatatgataaaattatatataataataaaagtatatatgtaacttacattgtgcccttgattattgaaaacttcctttttataacagattcactgtttggaagctaaagtaaaaatgagccatgttaccagaagtaataatttctatcttattactgatgtttttatactttgtggtaaaactatggaaagttaggttttcagatgctgtggtagctgaaagagtttgatgtacatgtggttaaagtgtgaagaaaatatgaaggaaaaagtatgaaaagtaccctagtcattacctaattgctattttgtttttaaggatctaagaagtgttattgcattgtacagattattttagaaattcacatctttgctggcttttcctttaacaccaagaatatctgttatcatctgtttggtactgtgttttgtttcctcttttaaagtaaaatattgaagtgatatttaaatgtttgcaagtctcatgaccttcctatagaaattcacattagtataataatttacattacaaatacaatatagcctttaattttgaagagtaaaaatggaaatggaagatgaattactatagtgtagttcacttaaatcgaaaatgtatatttgaatagtttcagtgaaatttggctcatatgaccatagtttaatagaattcttatttctattattgataaccttgaataaaaggatctaattataagttatctaggttttttcccttttagggaagagatgttatgtttttgtactactcttggctatagctgtaaaggatgtgtctgaacctggtaaaactttttaaaattctgagttcagttctgtaatattaatgaatattacattataaagatcacttaggaggggtttaatatatgctgatttgttttatatgaattgttagaaatatatacagaaataagggtagtttcaggctacctttcaggctattattagttgggcaagcttatttttagagcttttccctttcattggttggatgtagggcctgggaatacaaatagattttaatagttttactaggtaaaactgctagagagaaaattcatgtcccaagtagaaaaattaatatagctgaatacttaagtccttgttgaaaagttttctgaaatactggagttcattttcctgccttggtaaggcatttttaaaatttagtttagatggcttaaaccatttaaagaagctgtcttcattgtaaatatcaattgtcaatatcaattttcactgttcagaactgtccaaatactcttaaggtttgtctatactaaattcctattctttttaaaatttacctgttttccttctccctagtcccctttcctgccctttaaatctgaataaccagaagccatatattcaatgttttatgtattttcaatgttttgtgtataacgatatatgaagttagtgaattctgtaagacaaaaagatcgtttttattcacttttgattacaaaaaaaggttacatgaataaaataacaatttcctttaagagagggattcctgaatgattaaactgccaaggaaaaaagagtgaattcttccttttaataaaggtgacctaggtcctgaggaagttaggaaaaaagaaaaactcacattatacttgttaaatttgttttcaaatgtgattattaagttgttgtatttattttttgttat

SEQ ID NO: 464910 - DNA, 1111 bp, Homo sapiens
  misc_feature (1)..(2): n is a, c, g, or t
  misc_feature (5)..(5): n is a, c, g, or t
  misc_feature (7)..(8): n is a, c, g, or t
nntcntnngcccggtacgtcccacccgctttctgcctccgaatttgcctacactggggacctcatctgagcgaatcaagcaggctttgactttgtttcactccgcagagtcgtcaaggtggatccgagccacagtgcgtgtccatttccttccttccttctttatccccctcccacacccccggcccctggtaaccactgactctctgtttcgatgagttccacttttttagattccacatatgatgcacgagggtccccttctctccacaccctcatcaacgactgccttcccgccaacagtgcacgagggtccccttctctccacaccctcaacaacgactgccttcccgccaacagtgcacgagggtccccttctctccacaccctcaacaacgactgccttcccgccaacagtgcacgagggtccccttctctccacaccctcatcaacgactgccttcccgccaacagccctgggctggcgccaatggaggtcagggactttgtggccatggagggaccatgggccaatcccacccccttcgcaagtggtgatgcagacagggagcaacccagaaagcctggcccagagccggcacctgtggcatcgaggccctttctctacagcggctcccatcttaggggccagcagctgtgtctggaactaggggacccaaactaccactgtgcctcaggctggcccctcaggctggcatccacccctcagactcctgcagcccctccctccccttggatttaggcagagacagggtgagatgacgtggggtgcaccccaaggggttgttagaaaacaggtgagaacgtgaagcagccgggggccatgtggcctggggggcatctgctgaaagggaacagagttgccatccaactgcccgctctgagccgggcagtggtgacactgaggggcctcactcccgccccacacgggctggaggggtgtgcaccagggcctcgggtcctcagcccccagcccttcctggcactgctgggagaggtctgtgcccgccggctcctgccacagcttttcccaattcagcggttgccacatactgatgatgtcctactaataatagttcaaagaccaaaga

SEQ ID NO: 464911 - DNA, 3703 bp, Homo sapiens
ctctggcagacctgcacgaccatgaccatgaagaaccttcatgatctttatctttttcatgtggctcaattgcaaatagcagaacttaccaaatcattgttaaatgggggcatgttagcaagctgccatgtaggttttccttattgttacaccatgcttctaattgctttcatttggaaagagagctccccatcagcatcccatcagacttgtcatggaactaaaggagtgtttgagcttctgtccggatggcggagaaccaaagagaacttgcccttcaaagacaggatagcagatgcctattctgatgtgatggtcacctataccatgaccagctccctgtacttcatcacttttggcatgggtgccagcccattcacaaacatagaggctgtgaaggtcttctgtcaaaacatgtgtgtctctattctgttgaactacttctacattttctccttctttggctcctgtctggtctttgctggccaactagagcaaaaccgctaccacagcatcttttgctgtaagatcccttctgcagaatacctggatcgcaaacctgtgtggttccagacagtgatgagtgatgggcatcaacagacgtcccatcatgagacgaacccctaccagcaccacttcattcagcacttcctccgtgaacattataatgaatggattaccaatatatatgtgaagccatttgttgtcatcctctatctcatttatgcctccttctccttcatggggtgcttacagatcagtgacggagccaacatcatcaatctactagccagtgattcgccaagtgtttcctatgccatggttcagcagaaatatttcagcaactatagccctgtgataggattctacgtctatgagcccctagagtactggaacagcagcgtccaggatgacctaagaagactctgtagtggattcactgcagtgtcctgggtggagcagtactaccagttcctgaaagtcagcaacgtcagtgccaataacaaaagtgacttcatcagtgtcctgcaaagctcatttttaaaaaagccagaattccagcattttcgaaatgatatcatcttctccaaggcaggggatgaaagcaatatcattgcttctcgcttgtatctggtggccaggactagcagagacaagcagaaagaaatcacagaagtgttggaaaagctgaggcccctatccctctcaaagagcatccgattcatcgtgttcaacccctcctttgtcttcatggaccattacagcttgtctgtcacagtgcctgttctgattgcaggctttggtgttctcctggtgttaatcctgacttttttcctagtgatccaccctctgggaaacttctggctaattcttagcgtcacctcaattgagctgggcgttctgggcttaatgacattatggaacgtcgacatggattgcatttctatcttgtgccttatctacaccttgaatttcgccattgaccactgtgcaccactgcttttcacatttgtattagcaactgagcacacccgaacacaatgtataaaaagctccttgcaagaccatgggacagccattttgcaaaatgttacttcttttcttattggggtacattgacgtttatgtggagggagctgtccatttgaagataggctggcttttccctagaaagtcaaatcaaccttagccaaatttatagattcattaatagccgttctaaatcaacccaagtgtctcagcagtcagtgtgtcattcaactgtgggatgagcaaaataaacagagatgtgagttcattagattatgcatatcatgtcagcagtcatctagacttttgctttggatgacttcacaagaaaacacaaaaggcatttgaattaattaccacatggacaaggtttactgtttcatattagaaataaacagttgatatggattttcgttggcttttactgtatttggaagactgatatggctgctttcagtgagctcacccaattgcaaatgagcgctttacacagattatccatacatgagtctaagggtgcacaaaagaaatttattaatggagtaaggtgaatatgataaactcaaatcagattttcttcttatgtctgcccctgaatccaaaattgggggtgcctgctataaaatcaagtatgtttatgaaaaccttccctctcctataattgctggagtattcattcagagctctcacttgctatataatttctaaccaaacactttccagggaatgtacaacaaggaagtacatggacaacactcaaattcaaatgtccatagatggtggaattttaccactctttagcttacaagctcaatcaactgaaacgtttcagaaatgtttgtgtttggggtttgggtttgagatgtgaaacaaatgacatccttaaacatgttattgttagtcttcaaggtacatatgtgtaccttgatatagaactatttatagttacagtttgctaaaaaattattataatgaaattaactttgggaggtagatgttaaagtaccagcttgtaaaaagaatgtttaatgccaatcatttgtatgtttaatacctgtgtgctcaatgtagtgtcatctttactagatgatttacttcacaatgttttcattcctgttccccaaatgaaaataagtagtctattaactaatttacagctcttagttttggatactattgcagagacacaggagcacttttaactcaaacactatggtttaccatagttttgcggtggtatgaaattgagttagcactgcaatgcaatattgaaaaaatcagaatgcaataaagaaatgtagatatcacctgtgactacttcatgtactacccagactcctcatttattgtttgaacccaagggttagttttttatcttgccaaaaggacatgatcaggaagtcagtgtgataccgtcttgctgcagtgcagaagttttaagaagcaagatactttttaatgatgtactatcacaggatagaagttatgccctacatgaaactacgtattcgcagaaactttgtgtcgtcaatgtgcatctgttcttactagtctggagggaaacaaataagatttccagttttctgctgatccaacaccatttcccataggcagcacaatacaccagcacacagttagcagcactttgggacaaaactgttgaaaggaaagaaacagtgattattctgaaaacatgtaaagcaacactgatcataagtaatttttgttaggtgggacaatactatataatatgatttcttgtgtctaaattttctctaaaagattatttgggctgggtccagaaggctccaatttccctaagcaaccttgatcatcaatgttgtcatgcttcagcttttggcagttttgattcattaccaattattaatatcattatttaaatatgaatattgtcccttcccattatgaaaagctattacaaacatatatggatttatataaaggttgatgactatatgcttttttatattagaaaatcatgtgaaaacaaaattaatctgatgaatgctgttaattattttaacttttttattaggtataaaatgttcataaaattattctctctataacttaccaagatttattagcttgtgtaatttttataatcagaggagtctggttttctaattaaagttttgtcaaagaaaatgaa

SEQ ID NO: 464912 - DNA, 1757 bp, Homo sapiens
ccactttctctttgttttaattattttagttagaagtatatttctggggacagatcccaggtctaaaccctagccaaaaccccttgtgttagaggagctcaccctttactgctgatgaaatctccatgatgaagtgctttcctggtgacacccagagatcgtttgctatgtgaatgcttttcttgctcaaatttcaacaaacatgattgccaaaaaagaaaaaaaaaagaagagaaaagagaacagaaaagaagaaaagaaaagaaagaaaggagaagagagagaaagagagaagagaagagaagagaaaagaagaaaagaaaagaaaagaccagaccagacccatagaatcctatgggatctgctgacatgtttgtctgaacttcgtcttccatatcactgtcaagatagtttttctaactcaccactccaaaatctatgaaaagcctccataagcccctagttgccctccaaattataactgcatttggttcacacttttccctcctcctgaagtgactttccttcttattccgcttttaaaaactttatcacctgcaaaattcacttcaaaaagagctccctccatgaaggtttaattactctcttggccctaaaggaatgacatctcctgtttggcctgttcacattgctgcactgcactggtaactcttcaacgaaacccatttttactcttacctcttattgttacttatgtacaggtcttattgcctctctcaacctcaactaaactatttaagagaagtgtactcatctgtttatttcctgctgagtctagtccaatctcttataatttttagaccattaaaaagctatttgctgaagtgaattgagttgaaattggtatagacaagccagtatgtctggtcatcttaatctatatgttattgaacaatgtgccagctggaatctccttttatgtagtgtccttctcagtattctttttcctttcccatggcattttgagtcctactgctaaagtagaaaatttaagaaagcatgttttccatagtgaaagaaacataggtaaaattctgataaaaataaagcattagaactgaacattcaattagtaaatgctaataaatccatggactaaaacaaaagttatcataaaagtagctagcaatgcacaaggacatgtttagataatattatacaatttatgcttattttctttctccagtgctcattctttccaaatgtttgttatctatgctggatcttgatgagaggaagaaaaaaagaaaaatgaataaaccatatcttacaaaatgatttccagactgtaatttgtaacctgaaataaaatatatgtatctatttatattgacttcctagtcaggaaaaaatgataagcaaacagcagcaacaaaagagctgcaaccctttgaccaccgagagtgttatgaaggcttagtgctgccatccagcacccagcagtcagactgtcaaagcatagcatgtaaagtctgagacagcatagcatttctaaatcaataaaacatcaacttgtgtcaaatattgttcagtgtctgcctagttttgattgccctccagtgccttcaaatagctttacaaaaaatattttgtctaggatttataattgctatctgcaggaaggctagtccaatacaagaaacttcatcattactataactagaaagctgactcgtttttcaaaggataagaataagcttttaaaggataactttgccttctgtgttgaaaatata

SEQ ID NO: 464913 - DNA, 1556 bp, Homo sapiens
ggcacgttagagagtgtgctagactaaaagatggctcccaagatttccaaactctggtgagtgcttataaaagactatgaagatatttgaacctgagagagtttctctagctggccttggtgaaacaaacttctgtgttatggagagggcaagggacaacagttgcaaggacctggattctgccaacaacctgaacaagcttggaaaaggatccctggcctttgatgatatcatggcccaccaacaccttgattacaatttcatacgacccaaaaaaaaaagggctcagcatgatttttgtgacctggaggaggaagatgagaaaaaagaaaaggaaaacttcttggcaatgacaacagtggtaattatgacaataacggtgtacaaagtgatggcgctgatgatgctgatgacaaaatacacgtttactaattcatgtcatgctttaaataattcaaggaattataatgctaaaaatgattttccctctctttattgatttagtttattcattttataaaattaagctgtatctgaactgaaatatataaaaggatgttcaccatgaaaatatatttcattacatatgctgtagtatattgtgggtatatacttggggattgagagaacagaaaaaaggccgaggcatcatcctcttctatgactctgaggatcaaaggcattttcttgtatttcttgaacaaagatttgtggaggacctactctgtgcagacattattagacaataaaggaagccaagagtctcaggcccttcgcccttgcttctcagaaaagaacagctaaccattgccaaccagaatgcatagaaactgaactacttctgtgtctgcaattgtcatcttggacaaattacctaaactgcttgggctgagatatgtgaattcagatattgaagcttatttataccttcataattctatgcttccataatgattaaatccaccatagtaataaataaaggccttaaccacatgaagaaatatttggattttaaataatttcattatgtacttcttttacggctagttagcaaggatagacacagcctgtacatatactttctactttacattctcactaatttgaattgttatcccttccacaggcagcaagtaaactaagcaatcactataaaatcaaggtgctttcacacaggtctgatctgtcattgtgggctttctaaatctagtcagatcatattccttctctgtcctgggacagatcccaggtctaaaccctagccaaaaccccttgtgttagaggagctcaccctttactgctgatgaaatctccatgatgaagtgctttcctggtgacacccagagatcgtttgctatgtgaatgcttttcttgctcaaatttcaacaaacatgattgtactaaatcgctaacacctggaatttcaaagacaacagtggaaaggaaatgagacttggaatcaaaagacttcagtttcaatctaaagtccctgaatgtgtaaactattgtgatttttcttagctacagtcctctcacttataaaatgtttactgtcc

SEQ ID NO: 464914 - DNA, 2946 bp, Homo sapiens
ggcacgttagagagtgtgctagactaaaagatggctcccaagatttccaaactctggtgagtgcttataaaagactatgaagatatttgaacctgagagagtttctctagctggccttggtgaaacaaacttctgtgttatggagagggcaagggacaacagttgcaaggacctggattctgccaacaacctgaacaagcttggaaaaggatccctggcctttgatgatatcatggcccaccaacaccttgattacaatttcatacgacccaaaaaaaaaagggctcagcatgatttttgtgacctggaggaggaagatgagaaaaaagaaaaggaaaacttcttggcaatgacaacagtggtaattatgacaataacggtgtacaaagtgatggcgctgatgatgctgatgacaaaatacacgtttactaattcatgtcatgctttaaataattcaaggaattataatgctaaaaatgattttccctctctttattgatttagtttattcattttataaaattaagctgtatctgaactgaaatatataaaaggatgttcaccatgaaaatatatttcattacatatgctgtagtatattgtgggtatatacttggggattgagagaacagaaaaaaggccgaggcatcatcctcttctatgactctgaggatcaaaggcattttcttgtatttcttgaacaaagatttgtggaggacctactctgtgcagacattattagacaataaaggaagccaagagtctcaggcccttcgcccttgcttctcagaaaagaacagctaaccattgccaaccagaatgcatagaaactgaactacttctgtgtctgcaattgtcatcttggacaaattacctaaactgcttgggctgagatatgtgaattcagatattgaagcttatttataccttcataattctatgcttccataatgattaaatccaccatagtaataaataaaggccttaaccacatgaagaaatatttggattttaaataatttcattatgtacttcttttacggctagttagcaaggatagacacagcctgtacatatactttctactttacattctcactaatttgaattgttatcccttccacaggcagcaagtaaactaagcaatcactataaaatcaaggtgctttcacacaggtctgatctgtcattgtgggctttctaaatctagtcagatcatattccttctctgtcctgggacagatcccaggtctaaaccctagccaaaaccccttgtgttagaggagctcaccctttactgctgatgaaatctccatgatgaagtgctttcctggtgacacccagagatcgtttgctatgtgaatgcttttcttgctcaaatttcaacaaacatgattgccaaaaaagaaaaaaaaaagaagagaaaagagaacagaaaagaagaaaagaaaagaaagaaaggagaagagagagaaagagagaagagaagagaagagaaaagaagaaaagaaaagaaaagaccagaccagacccatagaatcctatgggatctgctgacatgtttgtctgaacttcgtcttccatatcactgtcaagatagtttttctaactcaccactccaaaatctatgaaaagcctccataagcccctagttgccctccaaattataactgcatttggttcacacttttccctcctcctgaagtgactttccttcttattccgcttttaaaaactttatcacctgcaaaattcacttcaaaaagagctccctccatgaaggtttaattactctcttggccctaaaggaatgacatctcctgtttggcctgttcacattgctgcactgcactggtaactcttcaacgaaacccatttttactcttacctcttattgttacttatgtacaggtcttattgcctctctcaacctcaactaaactatttaagagaagtgtactcatctgtttatttcctgctgagtctagtccaatctcttataatttttagaccattaaaaagctatttgctgaagtgaattgagttgaaattggtatagacaagccagtatgtctggtcatcttaatctatatgttattgaacaatgtgccagctggaatctccttttatgtagtgtccttctcagtattctttttcctttcccatggcattttgagtcctactgctaaagtagaaaatttaagaaagcatgttttccatagtgaaagaaacataggtaaaattctgataaaaataaagcattagaactgaacattcaattagtaaatgctaataaatccatggactaaaacaaaagttatcataaaagtagctagcaatgcacaaggacatgtttagataatattatacaatttatgcttattttctttctccagtgctcattctttccaaatgtttgttatctatgctggatcttgatgagaggaagaaaaaaagaaaaatgaataaaccatatcttacaaaatgatttccagactgtaatttgtaacctgaaataaaatatatgtatctatttatattgacttcctagtcaggaaaaaatgataagcaaacagcagcaacaaaagagctgcaaccctttgaccaccgagagtgttatgaaggcttagtgctgccatccagcacccagcagtcagactgtcaaagcatagcatgtaaagtctgagacagcatagcatttctaaatcaataaaacatcaacttgtgtcaaatattgttcagtgtctgcctagttttgattgccctccagtgccttcaaatagctttacaaaaaatattttgtctaggatttataattgctatctgcaggaaggctagtccaatacaagaaacttcatcattactataactagaaagctgactcgtttttcaaaggataagaataagcttttaaaggataactttgccttctgtgttgaaaatata

SEQ ID NO: 464915 - DNA, 537 bp, Homo sapiens
gctactggagcaagcctttgatctgccatattgaactcctccagctgtgcggattcactgcactataagaaaaacatttctacgaccactttaaagctaaactcatttcaggtttgtgctgaagagagattgagaaaaggctaaaaggctagcccaggcttccattttgagacagcaagagtacccagcaatatgacggacgtaactagtggcaagcaggattgtgtgggttttttctttgaagatcttctgtagtaaaacagaatggaacttgtctatttatgacatttttcaatttttctgggcagtcaatgaaacataacattaccaacatcattttctctcacctgatctaagagatttttctttttgtcattttttaatacttcacccgttacaaaagtttttccacctcttacattttgcagttactaatattaggaaatgcaatgccaatttgtttgcaagccatgtaaaaggaacatcttaacaggatagcaaatgattaaatacatggtatattgtgtggcatatatt

SEQ ID NO: 464916 - DNA, 1095 bp, Homo sapiens
gccgctattggggatgtgctggtgaagatggtggtctttggagaagaagtagatctggcctatcaggaagccatgctcaatatggctaccatcaacagaactgctgctggattaatgcacaaatttaatgcccatgtggccacagatatcacaggctttggcattctaggacactctcagaacctcgtgaagcaacaaagaaatgatgtgtcctttgtcatttgcaatctgccagtcattgccaagatggctgccatcagcaaggccagggggcaggtcatggaagttgggaagtccaaaatcaaggtgctggctgattcagttcctcatgaggaccttcatcctgaaatatgggtgaaggagccttcagatgattctagtgaccaagactttgagcagccccagctgatgctgagtggagcagagacaaaccagccccagtgggctctgaccaaatcgcagattcacaatgctcaatctcattgactagctgttatgccacagatagaaatttccactctgtattaacttctcttgtgaaatggcatctggaacacggattacaacaatccatttaactactatgaaacggttctggagtgacactgttgtgaagaggaaattccagcggagctactggagcaagcctttgatctgccatattgaactcctccagctgtgcggattcactgcactataagaaaaacatttctacgaccactttaaagctaaactcatttcaggctgtacaagcatggcaaccgtatctgctcagctcctggtgaggcctcaagaagcttttcatcatggtggaagatgaaaggggagcaggcatgtcatatggattgctttaaatttagcaacatcatctcactggcaatacatgagttgtatttcttgaatacaggaagctacattcacttcagtgaaggcttgacgtcatcaggcagcattagcatcacctgggacttttcaagcctcacctcagacctactaaatccgagtctgcattttaagaagctccccaggtgattaatccccacaataaagtttcagaagcattgatttaaaggatccacgtgtcctgttgtgtcc

SEQ ID NO: 464917 - DNA, 983 bp, Homo sapiens
gagttacttctggtcctgtgtgtggggctgaagcttcagctgccaccagacatccctgccatgtccctcttgagagtcctaacctcactctcaagactcaccccgatgctctccatgaaaataaaacgcaccttccatgaagtgtccccagaaagctccacgggggaggaagtgccacttagaaatgagaaccaatcccagatggaacgaagtctgtttgtggaaacacccttcccctctgtttacttggacctgattttgaaagtaacaagtcactttatttgggctggaggaaaaagcactaaaccagatgttgagaggcactgccgaatgtctaagaagcaacctcattgtattcccaagacctgggaatccaggtctcgcagatacgatgatacaatctatagccaggacatctcttcatgtgtagttttcaatgaatactaggataagcaactatcccagtcttcccaggattgaggggcttctccagatgctgcacttctggtgctaaaaatgagaaactgaaatgaattagtcacccaaggaatgctgaccctgtgctatatgatcacatttactctttaaagcaatgctttgagacatgaaagccagatagggaagaatttgcagcctcatactgattggccagttgaggagtcaactcatctctcttatagaaaaaagaagattacatttacggaatacagaatatactgtgctctctacttaccaagagatttctttctctactgacaactttctgttgacgtggttactgtgcaggttctgacagtcgattctttccacctagttcactgctgaagctataatgatttccattttgcaaaaagaggatgattacttattatctgtgaccatttctcaattccagaacaattgagctgcatagtccctgcaatcttataaaggcatttggcctggaagatgctctgcagccatgtgccaagaataacggctat

SEQ ID NO: 464918 - DNA, 651 bp, Homo sapiens
ggatgctgagggtagctccctatggacctgcagacgcccctccacaagaacagcctgagcgccttggacaacatgattgatgatggtgggaggcagacaggctcctgggcagaaaggggaggagctgtaccctgcagagccacaggggaggagcttctcaaggccttggcagactacctcttgcatcgatgtgccctggatgatgccttgggtctcatgtcccactgcattgtcatcttgaagatttgtcacactttgagagaaaaacttgttgccatgacaatgggctcagaggctgaaaagaagacttcaaccactgtcagcagcatcattgtggtggccaagtggatcatccccagagtagatgatgttgtgaaatcagtgtaccatctgttaagcaccaagctcctggatgctccatcagcagagagcagagaagagaagcaactggatatccaagagaagcagcttgacttcaaagagacaacttgacaacgtggcttcagagaggagtctggccaaggactgctgaactccaggggaggattgccctcccactccatctgctttccagctcccctccccacagagagccattttcatcagcaataaaatcctccacattcaccaccctccaattcgttagtaaga

SEQ ID NO: 464919 - DNA, 597 bp, Homo sapiens
ggatgctgagggtagctccctatggacctgcagacgcccctccacaagaacagcctgagcgccttggacaacatgattgatgatggtgggaggcagacaggctcctgggcagaaaggggaggagctgtaccctgcagagccacaggggaggagcttctcaaggccttggcagactacctcttgcatcgatgtgccctggatgatgccttgggtctcatgtcccactgcattgtcatcttgaagatttgtcacactttgagagaaaaacttgttgccatgacaatgggctcagaggctgaaaagaagacttcaaccactgtcagcagcatcattgtggtggccaagtggatcatccccagagtagatgatgttgtgaaatcagtgtaccatctgttaagcaccaagctcctggatatgaaactgtagttgccctatgttaaaaacaggaaagcagaagtaaatggatcctagacattgaattgcctgccccaaatgaatcctcgaatttacgttaagatcacattttggaattaatcttaacaagactaagagtttgtagtattactaatataaataacatcgaattttcagacagtt

SEQ ID NO: 464920 - DNA, 2450 bp, Homo sapiens
ggaggctgcaggcgccatgggcagagtgaggaaccgcgccactgctcagcggcggaggcgaaagcggcccggggatcctcccgccgcctgcgcggccatcgcggtcacgggcgccagccgcgcgcagtgcccccgggtccaagtcggggtcgggagccacgcggcggccaagaggtggctgggtaggtggcgacggaagcgccgctggcggcgggtccggaaggcgggccccagagacctgctgccctccgcgccaaccccgtacccgccggggcccgccccgtcccccaaggatctggacctgggcgcacagcgggagcgctgggagacgttcaggaagctgcggggcctcagctgcgagggcgccgccaaggtcctgctggacaccttcgagtacccgggcctcgtgcatcacaccgggggctgccactgcggcgcggtccgctttgcggtctgggcccctgcagatctgcgcgtcgtggattgcagctgcaggctgtgcaggaagaagcagcaccgccacttcctcgtcccggcctcgcgcttcacgctgctccagggcgcagaaagcatcgtcacctatcggtccaacacgcacccggcgctgcacagcttctgcagcaggtgcggggtgcagagtttccacgcagctgtctctgacccccgcgtgtacggcgtcgccccgcactgcctggacgagggcaccgtgcgcagcgtggtcatcgaggaggtcggcggtggcgacccgggggaggaggccgccgaggagcacaaggccatccacaagacgtcctcccagtcagcccctgcctgtccccgcgaacaggagcagtgattggggccgcaagcccgcctgaaaccggcccgggcggcctggcggccctgcggggagcgtccgagtacctgcacagatcccatgctgtgaaagaggtgtttctggcctggtcacaccggggattcccttccagtatttgcccttcccctccgctagttttcagtgaactcgcttacgatccaaatcttgaacacacctttgtctgcgtagtacaacgttaatcttgcaattcggtaaggaagaagagtgtctctgatttttcaaaccatccattgtatctctcgcttttactgttctgcctacagttgtcacaaatcacctgcagatgattcctgtgtactgtacgttcctggtgctattgtgaacaggcttgttgttttcagcgctttgcctctggtgtgtaggacggcaacacacaaccagtttgtaaacatgtgctaggacgtcttccattgattatggtgtgcgtgggctcccgcacctgtgagtttcaggtagacgttcatattttcactgcttagattcgagttatgctatttactggtttttaaatgatatatttcaagatttggtcgtgttacatacctcattactctttatttcctgtaacagcgaaagctgttactatttcgcttgttgtttgggaagtgtctctgggtaaggagatggggatacaggaatgagaaagacatctgtgcacacaggaatgagaaagacatctgcgcactgtctgccctctttaatcttttgaaatacctgtcttgtacatgtgttaagtatatagaaatcagtaaataccttctaggaaactatgtgtgttggtgtgtctataaagtccggcttggctatgtatggcaaggcttggtttttgaaggtacttggtctcagattatttcagaaggtggtggtgactctggcttttgtagtagagaaagcttccccagggtcccctaccttttgatgaggggaattagcagagggtttacacatttggcctctggggacacactacctgtgtttgaatcctggacctgccgcctgctcgctgtataaccggtatcgagtagattaaaccccattcctcaacttgctctttcctcaagaatgttaacagctaacagagtgtttgttcttggggtaaacacagtgccttgccttgactacctgatccatgaatgcttgttttctcaatttcaggcccccaaaactcctcctatcaaggcacccagacaatatgaaaccgcattgtttaggggcgtccatacacatgggaaaaccatgaattaggcagtgaaataatttaagccagcatcagattagggtttaactctatggaggaggaatggctttgagtgggggtggggggaggggagggtgtcctgcattcctgttcctcttgctgtgtaacaaacagccccacagctccaagcggcacttttccatatccaaggtgaatgttgcatcacctctcataggcaagactcagaagtcatgttgagtcaactgtgtcatactctattgattagagaaatctttaacttcctgctagttgcatatgctggactgcctcagccccacgccactgactgtcccttcccctctcctttttaagccc

SEQ ID NO: 464921 - DNA, 578 bp, Homo sapiens
taaaaatgttaattatacattttaatgtacgctatcaaaatatctcatgtaacccataaatatatacacctactatacacccataaaaaataaaaagtgataaaaccacagaaaaaaatgtcagttcaatcaaaacaaagttgattatcactctcaatcaaggttcgcatctggaagatcgagaactgcacgtcagagttctcttggaaaagctctaggaatcctgggcttccaacgagttgaaggaacataggatgaaaccatggaagtcttcctcagatctggggagggagcctggcccaagagcccgtggagctaatgaaaacaggtagtaggggacgctctacagtagtcctctcagttattcaattagaggtcccaattttgaacgatataactgggatttcaataccctgagtgatttagacacatcagaaaaaaatacgacagaaaactatagtttctttacagccttagaaaaggaaaacgcgtaatttctaactccaggaggacagtattcgagtacgtgggtttctttcacccccgacgtgcacttcaacttttaaaatgcttgctct

SEQ ID NO: 464922 - DNA, 4768 bp, Homo sapiens
acttccggttgtcagaatttacccctgacgcggcggcggccgacgggaagctgtgtgtgcttaggtcgtggtggccccggtggtggtgggctccgggcgggctcgcgtcatcctgcccccgctgcgatgcatccgcggcgcccggacggatttgatggcttgggctaccggggtggtgcccgggacgagcagggctttggcggcgccttccctgcaaggtccttcagcaccgggtcggacctgggccactgggtgacgactcccccagatatccccggcagccgcaacctgcactggggcgagaagagcccgccctacggcgtgcccaccacctccaccccgtacgaaggccccacggaggaacccttttccagtggcggcggcggcagtgtgcaggggcagagcagtgaacagctgaatagatttgctggatttggtattggacttgcaagtctctttacagaaaatgtattggcacatccttgcattgttctacgccgccaatgtcaggttaattaccatgctcagcattaccatctcactccatttacagtcatcaatattatgtacagtttcaacaaaactcagggacctagagccctgtggaaaggaatgggaagtacatttattgtccagggagtcacacttggagcagaaggcataattagtgaatttacacctttgccaagggaggttttacataaatggagtcctaaacaaataggagaacaccttctactgaaatccctaacttacgtggtggcaatgcctttttattcagcaagtctgattgaaacagtgcagagtgagataattcgagataatactggcattttggagtgtgttaaagaaggaattggaagagtgataggcatgggagtgcctcatagcaaacgacttcttccgcttctttccttgatcttccctacggtgcttcatggagttcttcattacatcatcagctcagttattcagaagtttgtcctactaattctaaagagaaagacttacaatagccacctagctgagagcactagccctgtgcagagtatgttggatgcttattttccagaacttattgctaactttgctgccagtctttgttctgacgttatactttacccattggaaacagttttgcaccgccttcacattcaaggaacacgcacaataattgacaatacagaccttggctatgaagtgcttccaattaatacacaatatgagggaatgagagactgtatcaataccataaggcaggaggaaggagtgtttggtttttataaagggtttggtgctgttataatacagtacacactgcatgcagctgttttacagattaccaaaattatttactctacacttcttcaaaataacatttgagatttaggttccttcactgagtagtctggaagatataatctggataatttgctatgaagttatgagggatacaagtgaaatactggggaagaaaatggattggaaagtaaaattggtactaaagcccatactgattatcttgactttgttttttaaggcataggtatatattttggatcaaaatccttccaaatttgaaaactcaataaaaataacacttattaaattctagttagtgtagcactcatgctgaagtaaacatgatcgtaggcagaagcaaaattttattataaaatctaaaacaaaactttatagagttgaatctattccatctgacttcaatatttgccaaacgtttattttacctcctagattgatgttggtatagtatccttaatacagtgtagtatattaatgtccttaatacaatcaggaggtttttacctttaagcaaataaattatgtcattattgaaaaagacttaagggatgattagacttggcaatctgtaagcaggagtataaatgttttaaattgcattgtccctatgtaactatcttaatggctatatatatgtattttataaagccatttatgtatacacatgtaacttggaatttccttcatccctacacattttctacacttacatcaccttattgcataaaacaaagtcacgcgctttctgcttgaacatcaaaatatcaaaaaccaaggtacccaaaagatacaagtcagagacaacatccttgtccatatccaaacccagtgtttcagtgctagcaacttaatttctcatacatttatagagtttggtttgctttgctagttgtgtgaatcattgggctgtttttagagccactgttaagagagaatataaaataatcatgacaattactactgtttccacatttacaaattgtgtacttaaatgaacctcatttcccttttatttctgaatggcttgtctgagaggaaacaaaattaaaattcatctgggaatttgtgcctcttgtctagtatatagtcaccactaaataatggcttccgtttttattttctttcaggttttgctttaaattttgttttccaaaatagatgtacgtggagggaaaagcaattattcttatcaccttttatttaaacttctttagatgaatactgaagaaaaatccaaaccttaaaggaaatgtgcccttgtattttatgggtgaggggaaaaagtacatttgtacatttcaacatataataagcaaaaaaattactaatcagtttaataaaaacattttgtctattcctaaatgtaatttggtgggttaagcactttgtgtagtaaaatgatatgtgtctgctctatcattagacattttaaagtttcatgtcttcacgtgaataatcacagttgtatcatgaaccatttagcgctctgaagcacagtgactttgcactgatattgtccaaccaagaatgcatacgaatagaaattcattttacttgctaaatgtcacagaaatggttactttttgcaaatagtagtgttggaacaaaaaagtgatatccaaaaagtgtaaaaacagtaataagtagcaaatctctcgtgtgtgtgtgtgtgtagttactgaaacacctacattttccatttttaaattccaccaaaagggggaaaataaaattaaacaccactgatcacattttatattttatggtgactattttagattaaggtttactttgtccaaccaatagcatttaaattgttttcaattaggatagtttcagataagagtaaaccagaaaatttcaagtttgaaaaatttctagaaaagaatctgaatagaatcaagtatttactagtgaaaatctgtaggatcctttgtttagctaaaaattaaatatttcaggatattttttggaagttagcatgaaaatagttagttacataaattcattttattgtagaataattataagaccgataggctgaaccatacacaaataaggttgatcttgttttcctttttggagaaagagaatacaaattaacattaaaattgaaatgtagaaagtaaaatatgaataattttttacaaccactccaaattagttgaaacaaaatcttgaacggtcacgcacttaaatttaagctagccaaatatgttgcactgaattttgaaaagaatgagtgagataactgtaagatacgctcgttcccttttaaaaattgttatttttctttaacatgggtgccaaatcaaatatccatgggctatacttcttaagataataacagctcaaaataatattttttaattcagtagaactaatagcattatggaaaagattctattaaatgttccacaggcccactggtcctcttatataagccaaattttggccatggagcttgtgatacacttgccttacattgtagggtttcttaatttgagtcaagtacactgaaagcaattaaaaactggtaaatattaatttactatgtaaagtgaacttacgaattaacttactaaatacatatatgtagaccttcccgaaatgccattctcaattttattttatgggctccaaaaaaaattatctgggttaataaggttatctattaaagcccccagaatctcagcactagatgtcataaatatgaaatagtaaaaacaaggtcacttgaaaatgggtatttaataccttagctggtgttttcagaagcatacagaactggaaaggtaagaacttgcttactattgcagatatacctgaccactcacaactgtctttttagcagcagctttgttaaaactgcacaaagcattcactttattgattgagtacaaatgctttagtgtttctacctaagtattagtacatctgttcaggaaatggaaaaaaaaaatgctgcttaaatttgttttatcagctgaggttgtggaggatttttgtccactgatcttttgcaacagaaaagcatactttgtcagcttctaataagatagccaggtttgaattatttgcaaaatttatataagcaaataagatctcttggtaacaattgacattgcactagaatttgaatgatactgttgttggcatttctgtttctctttcaagtagttgtaaataatctctttttctcatataaacggaatgcataatgtcttactcttgagtcatttagtagcattgatatggtaccaagttgtatagcagagtaacaaaatcatgatttgacaatgaaatttacatattgcctcacctagagatgttttgtctgtatgacttttttttttttaagtttgtcttactgttactttaaatgttttgggtaaattgtgtaatatgaaaagttcaataaaatgtcgaaataaaaaaaaaactg

SEQ ID NO: 464923 - DNA, 4717 bp, Homo sapiens
acttccggttgtcagaatttacccctgacgcggcggcggccgacgggaagctgtgtgtgcttaggtcgtggtggccccggtggtggtgggctccgggcgggctcgcgtcatcctgcccccgctgcgatgcatccgcggcgcccggacggatttgatggcttgggctaccggggtggtgcccgggacgagcagggctttggcggcgccttccctgcaaggtccttcagcaccgggtcggacctgggccactgggtgacgactcccccagatatccccggcagccgcaacctgcactggggcgagaagagcccgccctacggcgtgcccaccacctccaccccgtacgaaggccccacggaggaacccttttccagtggcggcggcggcagtgtgcaggggcagagcagtgaacagctgaatagatttgctggatttggtattggacttgcaagtctctttacagaaaatgtattggcacatccttgcattgttctacgccgccaatgtcaggttaattaccatgctcagcattaccatctcactccatttacagtcatcaatattatgtacagtttcaacaaaactcagggacctagagccctgtggaaaggaatgggaagtacatttattgtccagggagtcacacttggagcagaaggcataattagtgaatttacacctttgccaagggaggttttacataaatggagtcctaaacaaataggagaacaccttctactgaaatccctaacttacgtggtggcaatgcctttttattcagcaagtctgattgaaacagtgcagagtgagataattcgagataatactggcattttggagtgtggacttcttccgcttctttccttgatcttccctacggtgcttcatggagttcttcattacatcatcagctcagttattcagaagtttgtcctactaattctaaagagaaagacttacaatagccacctagctgagagcactagccctgtgcagagtatgttggatgcttattttccagaacttattgctaactttgctgccagtctttgttctgacgttatactttacccattggaaacagttttgcaccgccttcacattcaaggaacacgcacaataattgacaatacagaccttggctatgaagtgcttccaattaatacacaatatgagggaatgagagactgtatcaataccataaggcaggaggaaggagtgtttggtttttataaagggtttggtgctgttataatacagtacacactgcatgcagctgttttacagattaccaaaattatttactctacacttcttcaaaataacatttgagatttaggttccttcactgagtagtctggaagatataatctggataatttgctatgaagttatgagggatacaagtgaaatactggggaagaaaatggattggaaagtaaaattggtactaaagcccatactgattatcttgactttgttttttaaggcataggtatatattttggatcaaaatccttccaaatttgaaaactcaataaaaataacacttattaaattctagttagtgtagcactcatgctgaagtaaacatgatcgtaggcagaagcaaaattttattataaaatctaaaacaaaactttatagagttgaatctattccatctgacttcaatatttgccaaacgtttattttacctcctagattgatgttggtatagtatccttaatacagtgtagtatattaatgtccttaatacaatcaggaggtttttacctttaagcaaataaattatgtcattattgaaaaagacttaagggatgattagacttggcaatctgtaagcaggagtataaatgttttaaattgcattgtccctatgtaactatcttaatggctatatatatgtattttataaagccatttatgtatacacatgtaacttggaatttccttcatccctacacattttctacacttacatcaccttattgcataaaacaaagtcacgcgctttctgcttgaacatcaaaatatcaaaaaccaaggtacccaaaagatacaagtcagagacaacatccttgtccatatccaaacccagtgtttcagtgctagcaacttaatttctcatacatttatagagtttggtttgctttgctagttgtgtgaatcattgggctgtttttagagccactgttaagagagaatataaaataatcatgacaattactactgtttccacatttacaaattgtgtacttaaatgaacctcatttcccttttatttctgaatggcttgtctgagaggaaacaaaattaaaattcatctgggaatttgtgcctcttgtctagtatatagtcaccactaaataatggcttccgtttttattttctttcaggttttgctttaaattttgttttccaaaatagatgtacgtggagggaaaagcaattattcttatcaccttttatttaaacttctttagatgaatactgaagaaaaatccaaaccttaaaggaaatgtgcccttgtattttatgggtgaggggaaaaagtacatttgtacatttcaacatataataagcaaaaaaattactaatcagtttaataaaaacattttgtctattcctaaatgtaatttggtgggttaagcactttgtgtagtaaaatgatatgtgtctgctctatcattagacattttaaagtttcatgtcttcacgtgaataatcacagttgtatcatgaaccatttagcgctctgaagcacagtgactttgcactgatattgtccaaccaagaatgcatacgaatagaaattcattttacttgctaaatgtcacagaaatggttactttttgcaaatagtagtgttggaacaaaaaagtgatatccaaaaagtgtaaaaacagtaataagtagcaaatctctcgtgtgtgtgtgtgtgtagttactgaaacacctacattttccatttttaaattccaccaaaagggggaaaataaaattaaacaccactgatcacattttatattttatggtgactattttagattaaggtttactttgtccaaccaatagcatttaaattgttttcaattaggatagtttcagataagagtaaaccagaaaatttcaagtttgaaaaatttctagaaaagaatctgaatagaatcaagtatttactagtgaaaatctgtaggatcctttgtttagctaaaaattaaatatttcaggatattttttggaagttagcatgaaaatagttagttacataaattcattttattgtagaataattataagaccgataggctgaaccatacacaaataaggttgatcttgttttcctttttggagaaagagaatacaaattaacattaaaattgaaatgtagaaagtaaaatatgaataattttttacaaccactccaaattagttgaaacaaaatcttgaacggtcacgcacttaaatttaagctagccaaatatgttgcactgaattttgaaaagaatgagtgagataactgtaagatacgctcgttcccttttaaaaattgttatttttctttaacatgggtgccaaatcaaatatccatgggctatacttcttaagataataacagctcaaaataatattttttaattcagtagaactaatagcattatggaaaagattctattaaatgttccacaggcccactggtcctcttatataagccaaattttggccatggagcttgtgatacacttgccttacattgtagggtttcttaatttgagtcaagtacactgaaagcaattaaaaactggtaaatattaatttactatgtaaagtgaacttacgaattaacttactaaatacatatatgtagaccttcccgaaatgccattctcaattttattttatgggctccaaaaaaaattatctgggttaataaggttatctattaaagcccccagaatctcagcactagatgtcataaatatgaaatagtaaaaacaaggtcacttgaaaatgggtatttaataccttagctggtgttttcagaagcatacagaactggaaaggtaagaacttgcttactattgcagatatacctgaccactcacaactgtctttttagcagcagctttgttaaaactgcacaaagcattcactttattgattgagtacaaatgctttagtgtttctacctaagtattagtacatctgttcaggaaatggaaaaaaaaaatgctgcttaaatttgttttatcagctgaggttgtggaggatttttgtccactgatcttttgcaacagaaaagcatactttgtcagcttctaataagatagccaggtttgaattatttgcaaaatttatataagcaaataagatctcttggtaacaattgacattgcactagaatttgaatgatactgttgttggcatttctgtttctctttcaagtagttgtaaataatctctttttctcatataaacggaatgcataatgtcttactcttgagtcatttagtagcattgatatggtaccaagttgtatagcagagtaacaaaatcatgatttgacaatgaaatttacatattgcctcacctagagatgttttgtctgtatgacttttttttttttaagtttgtcttactgttactttaaatgttttgggtaaattgtgtaatatgaaaagttcaataaaatgtcgaaataaaaaaaaaactg

SEQ ID NO: 464924 - DNA, 4687 bp, Homo sapiens
taaaaatgttaattatacattttaatgtacgctatcaaaatatctcatgtaacccataaatatatacacctactatacacccataaaaaataaaaagtgataaaaccacagaaaaaaatgtcagttcaatcaaaacaaagttgattatcactctcaatcaaggttcgcatctggaagatcgagaactgcacgtcagagttctcttggaaaagctctaggaatcctgggcttccaacgagttgaaggaacataggatgaaaccatggaagtcttcctcagatctggggagggagcctggcccaagagcccgtggagctaatgaaaacagaacagctgaatagatttgctggatttggtattggacttgcaagtctctttacagaaaatgtattggcacatccttgcattgttctacgccgccaatgtcaggttaattaccatgctcagcattaccatctcactccatttacagtcatcaatattatgtacagtttcaacaaaactcagggacctagagccctgtggaaaggaatgggaagtacatttattgtccagggagtcacacttggagcagaaggcataattagtgaatttacacctttgccaagggaggttttacataaatggagtcctaaacaaataggagaacaccttctactgaaatccctaacttacgtggtggcaatgcctttttattcagcaagtctgattgaaacagtgcagagtgagataattcgagataatactggcattttggagtgtgttaaagaaggaattggaagagtgataggcatgggagtgcctcatagcaaacgacttcttccgcttctttccttgatcttccctacggtgcttcatggagttcttcattacatcatcagctcagttattcagaagtttgtcctactaattctaaagagaaagacttacaatagccacctagctgagagcactagccctgtgcagagtatgttggatgcttattttccagaacttattgctaactttgctgccagtctttgttctgacgttatactttacccattggaaacagttttgcaccgccttcacattcaaggaacacgcacaataattgacaatacagaccttggctatgaagtgcttccaattaatacacaatatgagggaatgagagactgtatcaataccataaggcaggaggaaggagtgtttggtttttataaagggtttggtgctgttataatacagtacacactgcatgcagctgttttacagattaccaaaattatttactctacacttcttcaaaataacatttgagatttaggttccttcactgagtagtctggaagatataatctggataatttgctatgaagttatgagggatacaagtgaaatactggggaagaaaatggattggaaagtaaaattggtactaaagcccatactgattatcttgactttgttttttaaggcataggtatatattttggatcaaaatccttccaaatttgaaaactcaataaaaataacacttattaaattctagttagtgtagcactcatgctgaagtaaacatgatcgtaggcagaagcaaaattttattataaaatctaaaacaaaactttatagagttgaatctattccatctgacttcaatatttgccaaacgtttattttacctcctagattgatgttggtatagtatccttaatacagtgtagtatattaatgtccttaatacaatcaggaggtttttacctttaagcaaataaattatgtcattattgaaaaagacttaagggatgattagacttggcaatctgtaagcaggagtataaatgttttaaattgcattgtccctatgtaactatcttaatggctatatatatgtattttataaagccatttatgtatacacatgtaacttggaatttccttcatccctacacattttctacacttacatcaccttattgcataaaacaaagtcacgcgctttctgcttgaacatcaaaatatcaaaaaccaaggtacccaaaagatacaagtcagagacaacatccttgtccatatccaaacccagtgtttcagtgctagcaacttaatttctcatacatttatagagtttggtttgctttgctagttgtgtgaatcattgggctgtttttagagccactgttaagagagaatataaaataatcatgacaattactactgtttccacatttacaaattgtgtacttaaatgaacctcatttcccttttatttctgaatggcttgtctgagaggaaacaaaattaaaattcatctgggaatttgtgcctcttgtctagtatatagtcaccactaaataatggcttccgtttttattttctttcaggttttgctttaaattttgttttccaaaatagatgtacgtggagggaaaagcaattattcttatcaccttttatttaaacttctttagatgaatactgaagaaaaatccaaaccttaaaggaaatgtgcccttgtattttatgggtgaggggaaaaagtacatttgtacatttcaacatataataagcaaaaaaattactaatcagtttaataaaaacattttgtctattcctaaatgtaatttggtgggttaagcactttgtgtagtaaaatgatatgtgtctgctctatcattagacattttaaagtttcatgtcttcacgtgaataatcacagttgtatcatgaaccatttagcgctctgaagcacagtgactttgcactgatattgtccaaccaagaatgcatacgaatagaaattcattttacttgctaaatgtcacagaaatggttactttttgcaaatagtagtgttggaacaaaaaagtgatatccaaaaagtgtaaaaacagtaataagtagcaaatctctcgtgtgtgtgtgtgtgtagttactgaaacacctacattttccatttttaaattccaccaaaagggggaaaataaaattaaacaccactgatcacattttatattttatggtgactattttagattaaggtttactttgtccaaccaatagcatttaaattgttttcaattaggatagtttcagataagagtaaaccagaaaatttcaagtttgaaaaatttctagaaaagaatctgaatagaatcaagtatttactagtgaaaatctgtaggatcctttgtttagctaaaaattaaatatttcaggatattttttggaagttagcatgaaaatagttagttacataaattcattttattgtagaataattataagaccgataggctgaaccatacacaaataaggttgatcttgttttcctttttggagaaagagaatacaaattaacattaaaattgaaatgtagaaagtaaaatatgaataattttttacaaccactccaaattagttgaaacaaaatcttgaacggtcacgcacttaaatttaagctagccaaatatgttgcactgaattttgaaaagaatgagtgagataactgtaagatacgctcgttcccttttaaaaattgttatttttctttaacatgggtgccaaatcaaatatccatgggctatacttcttaagataataacagctcaaaataatattttttaattcagtagaactaatagcattatggaaaagattctattaaatgttccacaggcccactggtcctcttatataagccaaattttggccatggagcttgtgatacacttgccttacattgtagggtttcttaatttgagtcaagtacactgaaagcaattaaaaactggtaaatattaatttactatgtaaagtgaacttacgaattaacttactaaatacatatatgtagaccttcccgaaatgccattctcaattttattttatgggctccaaaaaaaattatctgggttaataaggttatctattaaagcccccagaatctcagcactagatgtcataaatatgaaatagtaaaaacaaggtcacttgaaaatgggtatttaataccttagctggtgttttcagaagcatacagaactggaaaggtaagaacttgcttactattgcagatatacctgaccactcacaactgtctttttagcagcagctttgttaaaactgcacaaagcattcactttattgattgagtacaaatgctttagtgtttctacctaagtattagtacatctgttcaggaaatggaaaaaaaaaatgctgcttaaatttgttttatcagctgaggttgtggaggatttttgtccactgatcttttgcaacagaaaagcatactttgtcagcttctaataagatagccaggtttgaattatttgcaaaatttatataagcaaataagatctcttggtaacaattgacattgcactagaatttgaatgatactgttgttggcatttctgtttctctttcaagtagttgtaaataatctctttttctcatataaacggaatgcataatgtcttactcttgagtcatttagtagcattgatatggtaccaagttgtatagcagagtaacaaaatcatgatttgacaatgaaatttacatattgcctcacctagagatgttttgtctgtatgacttttttttttttaagtttgtcttactgttactttaaatgttttgggtaaattgtgtaatatgaaaagttcaataaaatgtcgaaataaaaaaaaaactg

SEQ ID NO: 464925 - DNA, 4720 bp, Homo sapiens
acttccggttgtcagaatttacccctgacgcggcggcggccgacgggaagctgtgtgtgcttaggtcgtggtggccccggtggtggtgggctccgggcgggctcgcgtcatcctgcccccgctgcgatgcatccgcggcgcccggacggatttgatggcttgggctaccggggtggtgcccgggacgagcagggctttggcggcgccttccctgcaaggtccttcagcaccgggtcggacctgggccactgggtgacgactcccccagatatccccggcagccgcaacctgcactggggcgagaagagcccgccctacggcgtgcccaccacctccaccccgtacgaaggccccacggaggaacccttttccagtggcggcggcggcagtgtgcaggggcagagcagtgaacagctgaatagatttgctggatttggtattggacttgcaagtctctttacagaaaatgtattggcacatccttgcattgttctacgccgccaatgtcaggttaattaccatgctcagcattaccatctcactccatttacagtcatcaatattatgtacagtttcaacaaaactcagggagtcacacttggagcagaaggcataattagtgaatttacacctttgccaagggaggttttacataaatggagtcctaaacaaataggagaacaccttctactgaaatccctaacttacgtggtggcaatgcctttttattcagcaagtctgattgaaacagtgcagagtgagataattcgagataatactggcattttggagtgtgttaaagaaggaattggaagagtgataggcatgggagtgcctcatagcaaacgacttcttccgcttctttccttgatcttccctacggtgcttcatggagttcttcattacatcatcagctcagttattcagaagtttgtcctactaattctaaagagaaagacttacaatagccacctagctgagagcactagccctgtgcagagtatgttggatgcttattttccagaacttattgctaactttgctgccagtctttgttctgacgttatactttacccattggaaacagttttgcaccgccttcacattcaaggaacacgcacaataattgacaatacagaccttggctatgaagtgcttccaattaatacacaatatgagggaatgagagactgtatcaataccataaggcaggaggaaggagtgtttggtttttataaagggtttggtgctgttataatacagtacacactgcatgcagctgttttacagattaccaaaattatttactctacacttcttcaaaataacatttgagatttaggttccttcactgagtagtctggaagatataatctggataatttgctatgaagttatgagggatacaagtgaaatactggggaagaaaatggattggaaagtaaaattggtactaaagcccatactgattatcttgactttgttttttaaggcataggtatatattttggatcaaaatccttccaaatttgaaaactcaataaaaataacacttattaaattctagttagtgtagcactcatgctgaagtaaacatgatcgtaggcagaagcaaaattttattataaaatctaaaacaaaactttatagagttgaatctattccatctgacttcaatatttgccaaacgtttattttacctcctagattgatgttggtatagtatccttaatacagtgtagtatattaatgtccttaatacaatcaggaggtttttacctttaagcaaataaattatgtcattattgaaaaagacttaagggatgattagacttggcaatctgtaagcaggagtataaatgttttaaattgcattgtccctatgtaactatcttaatggctatatatatgtattttataaagccatttatgtatacacatgtaacttggaatttccttcatccctacacattttctacacttacatcaccttattgcataaaacaaagtcacgcgctttctgcttgaacatcaaaatatcaaaaaccaaggtacccaaaagatacaagtcagagacaacatccttgtccatatccaaacccagtgtttcagtgctagcaacttaatttctcatacatttatagagtttggtttgctttgctagttgtgtgaatcattgggctgtttttagagccactgttaagagagaatataaaataatcatgacaattactactgtttccacatttacaaattgtgtacttaaatgaacctcatttcccttttatttctgaatggcttgtctgagaggaaacaaaattaaaattcatctgggaatttgtgcctcttgtctagtatatagtcaccactaaataatggcttccgtttttattttctttcaggttttgctttaaattttgttttccaaaatagatgtacgtggagggaaaagcaattattcttatcaccttttatttaaacttctttagatgaatactgaagaaaaatccaaaccttaaaggaaatgtgcccttgtattttatgggtgaggggaaaaagtacatttgtacatttcaacatataataagcaaaaaaattactaatcagtttaataaaaacattttgtctattcctaaatgtaatttggtgggttaagcactttgtgtagtaaaatgatatgtgtctgctctatcattagacattttaaagtttcatgtcttcacgtgaataatcacagttgtatcatgaaccatttagcgctctgaagcacagtgactttgcactgatattgtccaaccaagaatgcatacgaatagaaattcattttacttgctaaatgtcacagaaatggttactttttgcaaatagtagtgttggaacaaaaaagtgatatccaaaaagtgtaaaaacagtaataagtagcaaatctctcgtgtgtgtgtgtgtgtagttactgaaacacctacattttccatttttaaattccaccaaaagggggaaaataaaattaaacaccactgatcacattttatattttatggtgactattttagattaaggtttactttgtccaaccaatagcatttaaattgttttcaattaggatagtttcagataagagtaaaccagaaaatttcaagtttgaaaaatttctagaaaagaatctgaatagaatcaagtatttactagtgaaaatctgtaggatcctttgtttagctaaaaattaaatatttcaggatattttttggaagttagcatgaaaatagttagttacataaattcattttattgtagaataattataagaccgataggctgaaccatacacaaataaggttgatcttgttttcctttttggagaaagagaatacaaattaacattaaaattgaaatgtagaaagtaaaatatgaataattttttacaaccactccaaattagttgaaacaaaatcttgaacggtcacgcacttaaatttaagctagccaaatatgttgcactgaattttgaaaagaatgagtgagataactgtaagatacgctcgttcccttttaaaaattgttatttttctttaacatgggtgccaaatcaaatatccatgggctatacttcttaagataataacagctcaaaataatattttttaattcagtagaactaatagcattatggaaaagattctattaaatgttccacaggcccactggtcctcttatataagccaaattttggccatggagcttgtgatacacttgccttacattgtagggtttcttaatttgagtcaagtacactgaaagcaattaaaaactggtaaatattaatttactatgtaaagtgaacttacgaattaacttactaaatacatatatgtagaccttcccgaaatgccattctcaattttattttatgggctccaaaaaaaattatctgggttaataaggttatctattaaagcccccagaatctcagcactagatgtcataaatatgaaatagtaaaaacaaggtcacttgaaaatgggtatttaataccttagctggtgttttcagaagcatacagaactggaaaggtaagaacttgcttactattgcagatatacctgaccactcacaactgtctttttagcagcagctttgttaaaactgcacaaagcattcactttattgattgagtacaaatgctttagtgtttctacctaagtattagtacatctgttcaggaaatggaaaaaaaaaatgctgcttaaatttgttttatcagctgaggttgtggaggatttttgtccactgatcttttgcaacagaaaagcatactttgtcagcttctaataagatagccaggtttgaattatttgcaaaatttatataagcaaataagatctcttggtaacaattgacattgcactagaatttgaatgatactgttgttggcatttctgtttctctttcaagtagttgtaaataatctctttttctcatataaacggaatgcataatgtcttactcttgagtcatttagtagcattgatatggtaccaagttgtatagcagagtaacaaaatcatgatttgacaatgaaatttacatattgcctcacctagagatgttttgtctgtatgacttttttttttttaagtttgtcttactgttactttaaatgttttgggtaaattgtgtaatatgaaaagttcaataaaatgtcgaaataaaaaaaaaactg

SEQ ID NO: 464926 - DNA, 4761 bp, Homo sapiens
acttccggttgtcagaatttacccctgacgcggcggcggccgacgggaagctgtgtgtgcttaggtcgtggtggccccggtggtggtgggctccgggcgggctcgcgtcatcctgcccccgctgcgatgcatccgcggcgcccggacggatttgatggcttgggctaccggggtggtgcccgggacgagcagggctttggcggcgccttccctgcaaggtccttcagcaccgggtcggacctgggccactgggtgacgactcccccagatatccccggcagccgcaacctgcactggggcgagaagagcccgccctacggcgtgcccaccacctccaccccgtacgaaggccccacggaggaacccttttccagtggcggcggcggcagtgtgcaggggcagagcagtgaacagctgaatagatttgctggatttggtattggacttgcaagtctctttacagaaaatgtattggcacatccttgcattgttctacgccgccaatgtcaggttaattaccatgctcagcattaccatctcactccatttacagtcatcaatattatgtacagtttcaacaaaactcagggacctagagccctgtggaaaggaatgggaagtacatttattgtccagggagtcacacttggagcagaaggcataattagtgaatttacacctttgccaagggaggttttacataaatggagtcctaaacaaataggagaacaccttctactgaaatccctaacttacgtggtggcaatgcctttttattcagcaagtctgattgaaacagtgcagagtgagataattcgagataatactggcattttggagtgtgttaaagaaggaattggaagagtgataggcatgggagtgcctcatagcaaacgacttcttccgcttctttccttgatcttccctacggtgcttcatggagttcttcattacatcatcagctcagttattcagaagtttgtcctactaattctaaagagaaagacttacaatagccacctagctgagagcactagccctgtgcagagtatgttggatgcttattttccagaacttattgctaactttgctgccagtctttgttctgacgttatactttacccattggaaacagttttgcaccgccttcacattcaaggaacacgcacaataattgacaatacagaccttggctatgaagtgcttccaattaatacacaatatgagggaatgagagactgtatcaataccataaggcaggaggaaggagtgtttggtttttataaagggtttggtgctgttataatacagtacacactgcatgcagctgttttacagattaccaaaattatttactctacacttcttcaaaataacatttgagatttaggttccttcactgagtagtctggaagatataatctggataatttgctatgaagttatgagggatacaagtgaaatactggggaagaaaatggattggaaagtaaaattggtactaaagcccatactgattatcttgactttgttttttaaggcataggtatatattttggatcaaaatccttccaaatttgaaaactcaataaaaataacacttattaaattctagttagtgtagcactcatgctgaagtaaacatgatcgtaggcagaagcaaaattttattataaaatctaaaacaaaactttatagagttgaatctattccatctgacttcaatatttgccaaacgtttattttacctcctagattgatgttggtatagtatccttaatacagtgtagtatattaatgtccttaatacaatcaggaggtttttacctttaagcaaataaattatgtcattattgaaaaagacttaagggatgattagacttggcaatctgtaagcaggagtataaatgttttaaattgcattgtccctatgtaactatcttaatggctatatatatgtattttataaagccatttatgtatacacatgtaacttggaatttccttcatccctacacattttctacacttacatcaccttattgcataaaacaaagtcacgcgctttctgcttgaacatcaaaatatcaaaaaccaaggtacccaaaagatacaagtcagagacaacatccttgtccatatccaaacccagtgtttcagtgctagcaacttaatttctcatacatttatagagtttggtttgctttgctagttgtgtgaatcattgggctgtttttagagccactgttaagagagaatataaaataatcatgacaattactactgtttccacatttacaaattgtgtacttaaatgaacctcatttcccttttatttctgaatggcttgtctgagaggaaacaaaattaaaattcatctgggaatttgtgcctcttgtctagtatatagtcaccactaaataatggcttccgtttttattttctttcaggttttgctttaaattttgttttccaaaatagatgtacgtggagggaaaagcaattattcttatcaccttttatttaaacttctttagatgaatactgaagaaaaatccaaaccttaaaggaaatgtgcccttgtattttatgggtgaggggaaaaagtacatttgtacatttcaacatataataagcaaaaaaattactaatcagtttaataaaaacattttgtctattcctaaatgtaatttggtgggttaagcactttgtgtagtaaaatgatatgtgtctgctctatcattagacattttaaagtttcatgtcttcacgtgaataatcacagttgtatcatgaaccatttagcgctctgaagcacagtgactttgcactgatattgtccaaccaagaatgcatacgaatagaaattcattttacttgctaaatgtcacagaaatggttactttttgcaaatagtagtgttggaacaaaaaagtgatatccaaaaagtgtaaaaacagtaataagtagcaaatctctcgtgtgtgtgtgtgtgtagttactgaaacacctacattttccatttttaaattccaccaaaagggggaaaataaaattaaacaccactgatcacattttatattttatggtgactattttagattaaggtttactttgtccaaccaatagcatttaaattgttttcaattaggatagtttcagataagagtaaaccagaaaatttcaagtttgaaaaatttctagaaaagaatctgaatagaatcaagtatttactagtgaaaatctgtaggatcctttgtttagctaaaaattaaatatttcaggatattttttggaagttagcatgaaaatagttagttacataaattcattttattgtagaataattataagaccgataggctgaaccatacacaaataaggttgatcttgttttcctttttggagaaagagaatacaaattaacattaaaattgaaatgtagaaagtaaaatatgaataattttttacaaccactccaaattagttgaaacaaaatcttgaacggtcacgcacttaaatttaagctagccaaatatgttgcactgaattttgaaaagaatgagtgagataactgtaagatacgctcgttcccttttaaaaattgttatttttctttaacatgggtgccaaatcaaatatccatgggctatacttcttaagataataacagctcaaaataatattttttaattcagtagaactaatagcattatggaaaagattctattaaatgttccacaggcccactggtcctcttatataagccaaattttggccatggagcttgtgatacacttgccttacattgtagggtttcttaatttgagtcaagtacactgaaagcaattaaaaactggtaaatattaatttactatgtaaagtgaacttacgaattaacttactaaatacatatatgtagaccttcccgaaatgccattctcaattttattttatgggctccaaaaaaaattatctgggttaataaggttatctattaaagcccccagaatctcagcactagatgtcataaatatgaaatagtaaaaacaaggtcacttgaaaatgggtatttaataccttagctggtgttttcagaagcatacagaactggaaaggtaagaacttgcttactattgcagatatacctgaccactcacaactgtctttttagcagcagctttgttaaaactgcacaaagcattcactttattgattgagtacaaatgctttagtgtttctacctaagtattagtacatctgttcaggaaatggaaaaaaaaaatgctgcttaaatttgttttatcagctgaggttgtggaggatttttgtccactgatcttttgcaacagaaaagcatactttgtcagcttctaataagatagccaggtttgaattatttgcaaaatttatataagcaaataagatctcttggtaacaattgacattgcactagaatttgaatgatactgttgttggcatttctgtttctctttcaagtagttgtaaataatctctttttctcatataaacggaatgcataatgtcttactcttgagtcatttagtagcattgatatggtccagtgttaccgagtacaaatctgttgccatgaattactttgtcactaaaagttgctgttggctttttagtgctaggctaagtggggacgggttgaagtcatggccaaaaaaaaaatggcggccaaattaacttgggggcagaaaggagcaacggaggggtccaaggggggacaagggt

SEQ ID NO: 464927 - DNA, 3897 bp, Homo sapiens
cggctgcgcagatgatgggtcggcttatttcattccttttcttttaccactttactttcagagacttcagcgtccatgtctagcggtgctgtggaacccagagtgctcttgcctggataggctgagaatcccttggagcctggaaccacctagctgagagcactagccctgtgcagagtatgttggatgcttattttccagaacttattgctaactttgctgccagtctttgttctgacgttatactttacccattggaaacagttttgcaccgccttcacattcaaggaacacgcacaataattgacaatacagaccttggctatgaagtgcttccaattaatacacaatatgagggaatgagagactgtatcaataccataaggcaggaggaaggagtgtttggtttttataaagggtttggtgctgttataatacagtacacactgcatgcagctgttttacagattaccaaaattatttactctacacttcttcaaaataacatttgagatttaggttccttcactgagtagtctggaagatataatctggataatttgctatgaagttatgagggatacaagtgaaatactggggaagaaaatggattggaaagtaaaattggtactaaagcccatactgattatcttgactttgttttttaaggcataggtatatattttggatcaaaatccttccaaatttgaaaactcaataaaaataacacttattaaattctagttagtgtagcactcatgctgaagtaaacatgatcgtaggcagaagcaaaattttattataaaatctaaaacaaaactttatagagttgaatctattccatctgacttcaatatttgccaaacgtttattttacctcctagattgatgttggtatagtatccttaatacagtgtagtatattaatgtccttaatacaatcaggaggtttttacctttaagcaaataaattatgtcattattgaaaaagacttaagggatgattagacttggcaatctgtaagcaggagtataaatgttttaaattgcattgtccctatgtaactatcttaatggctatatatatgtattttataaagccatttatgtatacacatgtaacttggaatttccttcatccctacacattttctacacttacatcaccttattgcataaaacaaagtcacgcgctttctgcttgaacatcaaaatatcaaaaaccaaggtacccaaaagatacaagtcagagacaacatccttgtccatatccaaacccagtgtttcagtgctagcaacttaatttctcatacatttatagagtttggtttgctttgctagttgtgtgaatcattgggctgtttttagagccactgttaagagagaatataaaataatcatgacaattactactgtttccacatttacaaattgtgtacttaaatgaacctcatttcccttttatttctgaatggcttgtctgagaggaaacaaaattaaaattcatctgggaatttgtgcctcttgtctagtatatagtcaccactaaataatggcttccgtttttattttctttcaggttttgctttaaattttgttttccaaaatagatgtacgtggagggaaaagcaattattcttatcaccttttatttaaacttctttagatgaatactgaagaaaaatccaaaccttaaaggaaatgtgcccttgtattttatgggtgaggggaaaaagtacatttgtacatttcaacatataataagcaaaaaaattactaatcagtttaataaaaacattttgtctattcctaaatgtaatttggtgggttaagcactttgtgtagtaaaatgatatgtgtctgctctatcattagacattttaaagtttcatgtcttcacgtgaataatcacagttgtatcatgaaccatttagcgctctgaagcacagtgactttgcactgatattgtccaaccaagaatgcatacgaatagaaattcattttacttgctaaatgtcacagaaatggttactttttgcaaatagtagtgttggaacaaaaaagtgatatccaaaaagtgtaaaaacagtaataagtagcaaatctctcgtgtgtgtgtgtgtgtagttactgaaacacctacattttccatttttaaattccaccaaaagggggaaaataaaattaaacaccactgatcacattttatattttatggtgactattttagattaaggtttactttgtccaaccaatagcatttaaattgttttcaattaggatagtttcagataagagtaaaccagaaaatttcaagtttgaaaaatttctagaaaagaatctgaatagaatcaagtatttactagtgaaaatctgtaggatcctttgtttagctaaaaattaaatatttcaggatattttttggaagttagcatgaaaatagttagttacataaattcattttattgtagaataattataagaccgataggctgaaccatacacaaataaggttgatcttgttttcctttttggagaaagagaatacaaattaacattaaaattgaaatgtagaaagtaaaatatgaataattttttacaaccactccaaattagttgaaacaaaatcttgaacggtcacgcacttaaatttaagctagccaaatatgttgcactgaattttgaaaagaatgagtgagataactgtaagatacgctcgttcccttttaaaaattgttatttttctttaacatgggtgccaaatcaaatatccatgggctatacttcttaagataataacagctcaaaataatattttttaattcagtagaactaatagcattatggaaaagattctattaaatgttccacaggcccactggtcctcttatataagccaaattttggccatggagcttgtgatacacttgccttacattgtagggtttcttaatttgagtcaagtacactgaaagcaattaaaaactggtaaatattaatttactatgtaaagtgaacttacgaattaacttactaaatacatatatgtagaccttcccgaaatgccattctcaattttattttatgggctccaaaaaaaattatctgggttaataaggttatctattaaagcccccagaatctcagcactagatgtcataaatatgaaatagtaaaaacaaggtcacttgaaaatgggtatttaataccttagctggtgttttcagaagcatacagaactggaaaggtaagaacttgcttactattgcagatatacctgaccactcacaactgtctttttagcagcagctttgttaaaactgcacaaagcattcactttattgattgagtacaaatgctttagtgtttctacctaagtattagtacatctgttcaggaaatggaaaaaaaaaatgctgcttaaatttgttttatcagctgaggttgtggaggatttttgtccactgatcttttgcaacagaaaagcatactttgtcagcttctaataagatagccaggtttgaattatttgcaaaatttatataagcaaataagatctcttggtaacaattgacattgcactagaatttgaatgatactgttgttggcatttctgtttctctttcaagtagttgtaaataatctctttttctcatataaacggaatgcataatgtcttactcttgagtcatttagtagcattgatatggtaccaagttgtatagcagagtaacaaaatcatgatttgacaatgaaatttacatattgcctcacctagagatgttttgtctgtatgacttttttttttttaagtttgtcttactgttactttaaatgttttgggtaaattgtgtaatatgaaaagttcaataaaatgtcgaaataaaaaaaaaactg

SEQ ID NO: 464928 - DNA, 3312 bp, Homo sapiens
atgcgtactagctacatcaagtcttaaaaacaagtaaaattggtactaaagcccatactgattatcttgactttgttttttaaggcataggtatatattttggatcaaaatccttccaaatttgaaaactcaataaaaataacacttattaaattctagttagtgtagcactcatgctgaagtaaacatgatcgtaggcagaagcaaaattttattataaaatctaaaacaaaactttatagagttgaatctattccatctgacttcaatatttgccaaacgtttattttacctcctagattgatgttggtatagtatccttaatacagtgtagtatattaatgtccttaatacaatcaggaggtttttacctttaagcaaataaattatgtcattattgaaaaagacttaagggatgattagacttggcaatctgtaagcaggagtataaatgttttaaattgcattgtccctatgtaactatcttaatggctatatatatgtattttataaagccatttatgtatacacatgtaacttggaatttccttcatccctacacattttctacacttacatcaccttattgcataaaacaaagtcacgcgctttctgcttgaacatcaaaatatcaaaaaccaaggtacccaaaagatacaagtcagagacaacatccttgtccatatccaaacccagtgtttcagtgctagcaacttaatttctcatacatttatagagtttggtttgctttgctagttgtgtgaatcattgggctgtttttagagccactgttaagagagaatataaaataatcatgacaattactactgtttccacatttacaaattgtgtacttaaatgaacctcatttcccttttatttctgaatggcttgtctgagaggaaacaaaattaaaattcatctgggaatttgtgcctcttgtctagtatatagtcaccactaaataatggcttccgtttttattttctttcaggttttgctttaaattttgttttccaaaatagatgtacgtggagggaaaagcaattattcttatcaccttttatttaaacttctttagatgaatactgaagaaaaatccaaaccttaaaggaaatgtgcccttgtattttatgggtgaggggaaaaagtacatttgtacatttcaacatataataagcaaaaaaattactaatcagtttaataaaaacattttgtctattcctaaatgtaatttggtgggttaagcactttgtgtagtaaaatgatatgtgtctgctctatcattagacattttaaagtttcatgtcttcacgtgaataatcacagttgtatcatgaaccatttagcgctctgaagcacagtgactttgcactgatattgtccaaccaagaatgcatacgaatagaaattcattttacttgctaaatgtcacagaaatggttactttttgcaaatagtagtgttggaacaaaaaagtgatatccaaaaagtgtaaaaacagtaataagtagcaaatctctcgtgtgtgtgtgtgtgtagttactgaaacacctacattttccatttttaaattccaccaaaagggggaaaataaaattaaacaccactgatcacattttatattttatggtgactattttagattaaggtttactttgtccaaccaatagcatttaaattgttttcaattaggatagtttcagataagagtaaaccagaaaatttcaagtttgaaaaatttctagaaaagaatctgaatagaatcaagtatttactagtgaaaatctgtaggatcctttgtttagctaaaaattaaatatttcaggatattttttggaagttagcatgaaaatagttagttacataaattcattttattgtagaataattataagaccgataggctgaaccatacacaaataaggttgatcttgttttcctttttggagaaagagaatacaaattaacattaaaattgaaatgtagaaagtaaaatatgaataattttttacaaccactccaaattagttgaaacaaaatcttgaacggtcacgcacttaaatttaagctagccaaatatgttgcactgaattttgaaaagaatgagtgagataactgtaagatacgctcgttcccttttaaaaattgttatttttctttaacatgggtgccaaatcaaatatccatgggctatacttcttaagataataacagctcaaaataatattttttaattcagtagaactaatagcattatggaaaagattctattaaatgttccacaggcccactggtcctcttatataagccaaattttggccatggagcttgtgatacacttgccttacattgtagggtttcttaatttgagtcaagtacactgaaagcaattaaaaactggtaaatattaatttactatgtaaagtgaacttacgaattaacttactaaatacatatatgtagaccttcccgaaatgccattctcaattttattttatgggctccaaaaaaaattatctgggttaataaggttatctattaaagcccccagaatctcagcactagatgtcataaatatgaaatagtaaaaacaaggtcacttgaaaatgggtatttaataccttagctggtgttttcagaagcatacagaactggaaaggtaagaacttgcttactattgcagatatacctgaccactcacaactgtctttttagcagcagctttgttaaaactgcacaaagcattcactttattgattgagtacaaatgctttagtgtttctacctaagtattagtacatctgttcaggaaatggaaaaaaaaaatgctgcttaaatttgttttatcagctgaggttgtggaggatttttgtccactgatcttttgcaacagaaaagcatactttgtcagcttctaataagatagccaggtttgaattatttgcaaaatttatataagcaaataagatctcttggtaacaattgacattgcactagaatttgaatgatactgttgttggcatttctgtttctctttcaagtagttgtaaataatctctttttctcatataaacggaatgcataatgtcttactcttgagtcatttagtagcattgatatggtaccaagttgtatagcagagtaacaaaatcatgatttgacaatgaaatttacatattgcctcacctagagatgttttgtctgtatgacttttttttttttaagtttgtcttactgttactttaaatgttttgggtaaattgtgtaatatgaaaagttcaataaaatgtcgaaataaaaaaaaaactg

SEQ ID NO: 464929 - DNA, 2354 bp, Homo sapiens
acttccggttgtcagaatttacccctgacgcggcggcggccgacgggaagctgtgtgtgcttaggtcgtggtggccccggtggtggtgggctccgggcgggctcgcgtcatcctgcccccgctgcgatgcatccgcggcgcccggacggatttgatggcttgggctaccggggtggtgcccgggacgagcagggctttggcggcgccttccctgcaaggtccttcagcaccgggtcggacctgggccactgggtgacgactcccccagatatccccggcagccgcaacctgcactggggcgagaagagcccgccctacggcgtgcccaccacctccaccccgtacgaaggccccacggaggaacccttttccagtggcggcggcggcagtgtgcaggggcagagcagtgaacagctgaatagatttgctggatttggtattggacttgcaagtctctttacagaaaatgtattggcacatccttgcattgttctacgccgccaatgtcaggttaattaccatgctcagcattaccatctcactccatttacagtcatcaatattatgtacagtttcaacaaaactcagggacctagagccctgtggaaaggaatgggaagtacatttattgtccagggagtcacacttggagcagaaggcataattagtgaatttacacctttgccaagggaggttttacataaatggagtcctaaacaaataggagaacaccttctactgaaatccctaacttacgtggtggcaatgcctttttattcagcaagtctgattgaaacagtgcagagtgagataattcgagataatactggcattttggagtgtgttaaagaaggaattggaagagtgataggcatgggagtgcctcatagcaaacgacttcttccgcttctttccttgatcttccctacggtgcttcatggagttcttcattacatcatcagctcagttattcagaagtttgtcctactaattctaaagagaaagacttacaatagccacctagctgagagcactagccctgtgcagagtatgttggatgcttattttccagaacttattgctaactttgctgccagtctttgttctgacgttatactttacccattggaaacagttttgcaccgccttcacattcaaggaacacgcacaataattgacaatacagaccttggctatgaagtgcttccaattaatacacaatatgagggaatgagagactgtatcaataccataaggcaggaggaaggagtgtttggtttttataaagggtttggtgctgttataatacagtacacactgcatgcagctgttttacagattaccaaaattatttactctacacttcttcaaaataacatttgagatttaggttccttcactgagtagtctggaagatataatctggataatttgctatgaagttatgagggatacaagtgaaatactggggaagaaaatggattggaaagtaaaattggtactaaagcccatactgattatcttgactttgttttttaaggcataggtatatattttggatcaaaatccttccaaatttgaaaactcaataaaaataacacttattaaattctagttagtgtagcactcatgctgaagtaaacatgatcgtaggcagaagcaaaattttattataaaatctaaaacaaaactttatagagttgaatctattccatctgacttcaatatttgccaaacgtttattttacctcctagattgatgttggtatagtatccttaatacagtgtagtatattaatgtccttaatacaatcaggaggtttttacctttaagcaaataaattatgtcattattgaaaaagacttaagggatgattagacttggcaatctgtaagcaggagtataaatgttttaaattgcattgtccctatgtaactatcttaatggctatatatatgtattttataaagccatttatgtatacacatgtaacttggaatttccttcatccctacacattttctacacttacatcaccttattgcataaaacaaagtcacgcgctttctgcttgaacatcaaaatatcaaaaaccaaggtacccaaaagatacaagtcagagacaacatctgtcatatcaaccaggttcagtggtacacttatttcctaattatgaagtggtgctgcagggtaaccggcggttgagcccggaaaaataaaaggaacatgtggccttcagtgcagaaaccccttgaggggggggaaacgggaacaaaaaaaagggggccgcgctctctttttcctggtcttcctctcactcttcttttcctctcgctctaaaaagaaaacaccc

SEQ ID NO: 464930 - DNA, 1357 bp, Homo sapiens
acttccggttgtcagaatttacccctgacgcggcggcggccgacgggaagctgtgtgtgcttaggtcgtggtggccccggtggtggtgggctccgggcgggctcgcgtcatcctgcccccgctgcgatgcatccgcggcgcccggacggatttgatggcttgggctaccggggtggtgcccgggacgagcagggctttggcggcgccttccctgcaaggtccttcagcaccgggtcggacctgggccactgggtgacgactcccccagatatccccggcagccgcaacctgcactggggcgagaagagcccgccctacggcgtgcccaccacctccaccccgtacgaaggccccacggaggaacccttttccagtggcggcggcggcagtgtgcaggggcagagcagtgaacagctgaatagatttgctggatttggtattggacttgcaagtctctttacagaaaatgtattggcacatccttgcattgttctacgccgccaatgtcaggttaattaccatgctcagcattaccatctcactccatttacagtcatcaatattatgtacagtttcaacaaaactcagggacctagagccctgtggaaaggaatgggaagtacatttattgtccagggagtcacacttggagcagaaggcataattagtgaatttacacctttgccaaggtaccatttttagcatttcttcagtattagtttcatgtggtgatgtgtttttagatgcaggcggtacatgtgcaggcttgttacatgggtatattgtgtgatgctaaagtttggacttctaatgatcctctcatccaacaattctcaattgtgtaaacatcatacccaataggtagctttcaacccttgtccccatccctcccctattatattgttttaataataaataaaaaataccttgaatctgaaaacttgtctgaagtaactaaaagaaaaaacaaagaataaaattaattatatattattaaattagtatgtgataaagaaaatgtgtcttggcttagtatctattgagatgtatctttcagcttctactgctatgtgccagcaactgccagctgaggaacaaatgtgggtatgtgagcaattcccgctctttaagtattcatttaatgaaggagacacatgtaagcaagaagaggtaacatgtccaatgtcacggggttggacagtctaggtaataaaagaagtgtcttatgtttggaatattgggtatgtatgaaattgaatatcaggaaaagaagctgaggtgctacattaaaatacgattgtgcctttttaagtttattctctatgggtttggaatgtgtttctttttttaatatata

SEQ ID NO: 464931 - DNA, 423 bp, Homo sapiens
gcgactactactactactaaaattagcggccgctcgatagccaggtttgaattatttgcaaaatttatataagcaaataagatctcttggtaacaattgacattgcactagaatttgaatgatactgttgttggcatttctgtttctctttcaagtagttgtaaataatctctttttctcatataaacggaatgcataatgtcttactcttgagtcatttagtagcattgatatggtaccaagttgtatagcagagtaacaaaatcatgatttgacaatgaaatttacatattgcctcacctagagatgttttgtctgtatgacttttttttttttaagtttgtcttactgttactttaaatgttttgggtaaattgtgtaatatgaaaagttcaataaaatgtcgaaataaaaaaaaaactg

SEQ ID NO: 464932 - DNA, 2149 bp, Homo sapiens
acttccggttgtcagaatttacccctgacgcggcggcggccgacgggaagctgtgtgtgcttaggtcgtggtggccccggtggtggtgggctccgggcgggctcgcgtcatcctgcccccgctgcgatgcatccgcggcgcccggacggatttgatggcttgggctaccggggtggtgcccgggacgagcagggctttggcggcgccttccctgcaaggtccttcagcaccgggtcggacctgggccactgggtgacgactcccccagatatccccggcagccgcaacctgcactggggcgagaagagcccgccctacggcgtgcccaccacctccaccccgtacgaaggccccacggaggaacccttttccagtggcggcggcggcagtgtgcaggggcagagcagtgaacagctgaatagatttgctggatttggtattggacttgcaagtctctttacagaaaatgtattggcacatccttgcattgttctacgccgccaatgtcaggttaattaccatgctcagcattaccatctcactccatttacagtcatcaatattatgtacagtttcaacaaaactcagggacctagagccctgtggaaaggaatgggaagtacatttattgtccagggagtcacacttggagcagaaggcataattagtgaatttacacctttgccaagggaggttttacataaatggagtcctaaacaaataggagaacaccttctactgaaatccctaacttacgtggtggcaatgcctttttattcagcaagtctgattgaaacagtgcagagtgagataattcgagataatactggcattttggagtgtgttaaagaaggaattggaagagtgataggcatgggagtgcctcatagcaaacgacttcttccgcttctttccttgatcttccctacggtgcttcatggagttcttcattacatcatcagctcagttattcagaagtttgtcctactaattctaaagagaaagacttacaatagccacctagctgagagcactagccctgtgcagagtatgttggatgcttattttccagaacttattgctaactttgctgccagtctttgttctgacgttatactttacccattggaaacagttttgcaccgccttcacattcaaggaacacgcacaataattgacaatacagaccttggctatgaagtgcttccaattaatacacaatatgagggaatgagagactgtatcaataccataaggcaggaggaaggagtgtttggtttttataaagggtttggtgctgttataatacagtacacactgcatgcagctgttttacagattaccaaaattatttactctacacttcttcaaaataacatttgagatttaggttccttcactgagtagtctggaagatataatctggataatttgctatgaagttatgagggatacaagtgaaatactggggaagaaaatggattggaaagtaaaattggtactaaagcccatactgattatcttgactttgttttttaaggcataggtatatattttggatcaaaatccttccaaatttgaaaactcaataaaaataacacttattaaattctagttagtgtagcactcatgctgaagtaaacatgatcgtaggcagaagcaaaattttattataaaatctaaaacaaaactttatagagttgaatctattccatctgacttcaatatttgccaaacgtttattttacctcctagattgatgttggtatagtatccttaatacagtgtagtatattaatgtccttaatacaatcaggaggtttttacctttaagcaaataaattatgtcattattgaaaaagacttaagggatgattagacttggcaatctgtaagcaggagtataaatgttttaaattgcattgtccctatgtaactatcttaatggctatatatatgtattttataaagccatttatgtatacacatgtaacttggaatttccttcatccctacacattttctacacttacatcaccttattgcataaaacaaagtcacgcgctttctgcttgaacatcaaaatatcaaaaaccaaggtaccctgcttgcaacttaattctcaatcttaattgaggtggggttgttt

SEQ ID NO: 464933 - DNA, 2384 bp, Homo sapiens
acttccggttgtcagaatttacccctgacgcggcggcggccgacgggaagctgtgtgtgcttaggtcgtggtggccccggtggtggtgggctccgggcgggctcgcgtcatcctgcccccgctgcgatgcatccgcggcgcccggacggatttgatggcttgggctaccggggtggtgcccgggacgagcagggctttggcggcgccttccctgcaaggtccttcagcaccgggtcggacctgggccactgggtgacgactcccccagatatccccggcagccgcaacctgcactggggcgagaagagcccgccctacggcgtgcccaccacctccaccccgtacgaaggccccacggaggaacccttttccagtggcggcggcggcagtgtgcaggggcagagcagtgaacagctgaatagatttgctggatttggtattggacttgcaagtctctttacagaaaatgtattggcacatccttgcattgttctacgccgccaatgtcaggttaattaccatgctcagcattaccatctcactccatttacagtcatcaatattatgtacagtttcaacaaaactcagggacctagagccctgtggaaaggaatgggaagtacatttattgtccagggagtcacacttggagcagaaggcataattagtgaatttacacctttgccaagggaggttttacataaatggagtcctaaacaaataggagaacaccttctactgaaatccctaacttacgtggtggcaatgcctttttattcagcaagtctgattgaaacagtgcagagtgagataattcgagataatactggcattttggagtgtgttaaagaaggaattggaagagtgataggcatgggagtgcctcatagcaaacgacttcttccgcttctttccttgatcttccctacggtgcttcatggagttcttcattacatcatcagctcagttattcagaagtttgtcctactaattctaaagagaaagacttacaatagccacctagctgagagcactagccctgtgcagagtatgttggatgcttattttccagaacttattgctaactttgctgccagtctttgttctgacgttatactttacccattggaaacagttttgcaccgccttcacattcaaggaacacgcacaataattgacaatacagaccttggctatgaagtgcttccaattaatacacaatatgagggaatgagagactgtatcaataccataaggcaggaggaaggagtgtttggtttttataaagggtttggtgctgttataatacagtacacactgcatgcagctgttttacagattaccaaaattatttactctacacttcttcaaaataacatttgagatttaggttccttcactgagtagtctggaagatataatctggataatttgctatgaagttatgagggatacaagtgaaatactggggaagaaaatggattggaaagtaaaattggtactaaagcccatactgattatcttgactttgttttttaaggcataggtatatattttggatcaaaatccttccaaatttgaaaactcaataaaaataacacttattaaattctagttagtgtagcactcatgctgaagtaaacatgatcgtaggcagaagcaaaattttattataaaatctaaaacaaaactttatagagttgaatctattccatctgacttcaatatttgccaaacgtttattttacctcctagattgatgttggtatagtatccttaatacagtgtagtatattaatgtccttaatacaatcaggaggtttttacctttaagcaaataaattatgtcattattgaaaaagacttaagggatgattagacttggcaatctgtaagcaggagtataaatgttttaaattgcattgtccctatgtaactatcttaatggctatatatatgtattttataaagccatttatgtatacacatgtaacttggaatttccttcatccctacacattttctacacttacatcaccttattgcataaaacaaagtcacgcgctttctgcttgaacatcaaaatatcaaaaaccaaggtacccaaaagatacaagtcagagacaacatccttgtccatatccaaacccagtgtttcagtgctagcaacttaatttctcatacatttatagagtttggtttgctttgctagttgtgtgaatcattgggctgtttttagagccactgttaagagagaatataaaataatcatgacaattactactgtttccacatttacaaattgtgtacttaaatgaacctcatttcccttttatttctgaatggcttgtctgagaggaaacaaaattaaaattcatctggga

SEQ ID NO: 464934 - DNA, 4562 bp, Homo sapiens
acttccggttgtcagaatttacccctgacgcggcggcggccgacgggaagctgtgtgtgcttaggtcgtggtggccccggtggtggtgggctccgggcgggctcgcgtcatcctgcccccgctgcgatgcatccgcggcgcccggacggatttgatggcttgggctaccggggtggtgcccgggacgagcagggctttggcggcgccttccctgcaaggtccttcagcaccgggtcggacctgggccactgggtgacgactcccccagatatccccggcagccgcaacctgcactggggcgagaagagcccgccctacggcgtgcccaccacctccaccccgtacgaaggccccacggaggaacccttttccagtggcggcggcggcagtgtgcaggggcagagcagtggtgagaagcatggggaccgacacagggatgaggggttactggggccgcggcttgcggcctgcagaccccggaagcggcgcagaggatcccgcctcctattccttctcatcctatcgcgcgccacaccctttgccctcctttgcttctactgctatgtgccagcaactgccagctgaggaacaaatgtggagtgagataattcgagataatactggcattttggagtgtgttaaagaaggaattggaagagtgataggcatgggagtgcctcatagcaaacgacttcttccgcttctttccttgatcttccctacggtgcttcatggagttcttcattacatcatcagctcagttattcagaagtttgtcctactaattctaaagagaaagacttacaatagccacctagctgagagcactagccctgtgcagagtatgttggatgcttattttccagaacttattgctaactttgctgccagtctttgttctgacgttatactttacccattggaaacagttttgcaccgccttcacattcaaggaacacgcacaataattgacaatacagaccttggctatgaagtgcttccaattaatacacaatatgagggaatgagagactgtatcaataccataaggcaggaggaaggagtgtttggtttttataaagggtttggtgctgttataatacagtacacactgcatgcagctgttttacagattaccaaaattatttactctacacttcttcaaaataacatttgagatttaggttccttcactgagtagtctggaagatataatctggataatttgctatgaagttatgagggatacaagtgaaatactggggaagaaaatggattggaaagtaaaattggtactaaagcccatactgattatcttgactttgttttttaaggcataggtatatattttggatcaaaatccttccaaatttgaaaactcaataaaaataacacttattaaattctagttagtgtagcactcatgctgaagtaaacatgatcgtaggcagaagcaaaattttattataaaatctaaaacaaaactttatagagttgaatctattccatctgacttcaatatttgccaaacgtttattttacctcctagattgatgttggtatagtatccttaatacagtgtagtatattaatgtccttaatacaatcaggaggtttttacctttaagcaaataaattatgtcattattgaaaaagacttaagggatgattagacttggcaatctgtaagcaggagtataaatgttttaaattgcattgtccctatgtaactatcttaatggctatatatatgtattttataaagccatttatgtatacacatgtaacttggaatttccttcatccctacacattttctacacttacatcaccttattgcataaaacaaagtcacgcgctttctgcttgaacatcaaaatatcaaaaaccaaggtacccaaaagatacaagtcagagacaacatccttgtccatatccaaacccagtgtttcagtgctagcaacttaatttctcatacatttatagagtttggtttgctttgctagttgtgtgaatcattgggctgtttttagagccactgttaagagagaatataaaataatcatgacaattactactgtttccacatttacaaattgtgtacttaaatgaacctcatttcccttttatttctgaatggcttgtctgagaggaaacaaaattaaaattcatctgggaatttgtgcctcttgtctagtatatagtcaccactaaataatggcttccgtttttattttctttcaggttttgctttaaattttgttttccaaaatagatgtacgtggagggaaaagcaattattcttatcaccttttatttaaacttctttagatgaatactgaagaaaaatccaaaccttaaaggaaatgtgcccttgtattttatgggtgaggggaaaaagtacatttgtacatttcaacatataataagcaaaaaaattactaatcagtttaataaaaacattttgtctattcctaaatgtaatttggtgggttaagcactttgtgtagtaaaatgatatgtgtctgctctatcattagacattttaaagtttcatgtcttcacgtgaataatcacagttgtatcatgaaccatttagcgctctgaagcacagtgactttgcactgatattgtccaaccaagaatgcatacgaatagaaattcattttacttgctaaatgtcacagaaatggttactttttgcaaatagtagtgttggaacaaaaaagtgatatccaaaaagtgtaaaaacagtaataagtagcaaatctctcgtgtgtgtgtgtgtgtagttactgaaacacctacattttccatttttaaattccaccaaaagggggaaaataaaattaaacaccactgatcacattttatattttatggtgactattttagattaaggtttactttgtccaaccaatagcatttaaattgttttcaattaggatagtttcagataagagtaaaccagaaaatttcaagtttgaaaaatttctagaaaagaatctgaatagaatcaagtatttactagtgaaaatctgtaggatcctttgtttagctaaaaattaaatatttcaggatattttttggaagttagcatgaaaatagttagttacataaattcattttattgtagaataattataagaccgataggctgaaccatacacaaataaggttgatcttgttttcctttttggagaaagagaatacaaattaacattaaaattgaaatgtagaaagtaaaatatgaataattttttacaaccactccaaattagttgaaacaaaatcttgaacggtcacgcacttaaatttaagctagccaaatatgttgcactgaattttgaaaagaatgagtgagataactgtaagatacgctcgttcccttttaaaaattgttatttttctttaacatgggtgccaaatcaaatatccatgggctatacttcttaagataataacagctcaaaataatattttttaattcagtagaactaatagcattatggaaaagattctattaaatgttccacaggcccactggtcctcttatataagccaaattttggccatggagcttgtgatacacttgccttacattgtagggtttcttaatttgagtcaagtacactgaaagcaattaaaaactggtaaatattaatttactatgtaaagtgaacttacgaattaacttactaaatacatatatgtagaccttcccgaaatgccattctcaattttattttatgggctccaaaaaaaattatctgggttaataaggttatctattaaagcccccagaatctcagcactagatgtcataaatatgaaatagtaaaaacaaggtcacttgaaaatgggtatttaataccttagctggtgttttcagaagcatacagaactggaaaggtaagaacttgcttactattgcagatatacctgaccactcacaactgtctttttagcagcagctttgttaaaactgcacaaagcattcactttattgattgagtacaaatgctttagtgtttctacctaagtattagtacatctgttcaggaaatggaaaaaaaaaatgctgcttaaatttgttttatcagctgaggttgtggaggatttttgtccactgatcttttgcaacagaaaagcatactttgtcagcttctaataagatagccaggtttgaattatttgcaaaatttatataagcaaataagatctcttggtaacaattgacattgcactagaatttgaatgatactgttgttggcatttctgtttctctttcaagtagttgtaaataatctctttttctcatataaacggaatgcataatgtcttactcttgagtcatttagtagcattgatatggtaccaagttgtatagcagagtaacaaaatcatgatttgacaatgaaatttacatattgcctcacctagagatgttttgtctgtatgacttttttttttttaagtttgtcttactgttactttaaatgttttgggtaaattgtgtaatatgaaaagttcaataaaatgtcgaaataaaaaaaaaactg

SEQ ID NO: 464935 - DNA, 4714 bp, Homo sapiens
acttccggttgtcagaatttacccctgacgcggcggcggccgacgggaagctgtgtgtgcttaggtcgtggtggccccggtggtggtgggctccgggcgggctcgcgtcatcctgcccccgctgcgatgcatccgcggcgcccggacggatttgatggcttgggctaccggggtggtgcccgggacgagcagggctttggcggcgccttccctgcaaggtccttcagcaccgggtcggacctgggccactgggtgacgactcccccagatatccccggcagccgcaacctgcactggggcgagaagagcccgccctacggcgtgcccaccacctccaccccgtacgaaggccccacggaggaacccttttccagtggcggcggcggcagtgtgcaggggcagagcagtgaacagctgaatagatttgctggatttggtattggacttgcaagtctctttacagaaaatgtattggcacatccttgcattgttctacgccgccaatgtcaggttaattaccatgctcagcattaccatctcactccatttacagtcatcaatattatgtacagtttcaacaaaactcagggacctagagccctgtggaaaggaatgggaagtacatttattgtccagggagtcacacttggagcagaaggcataattagtgaatttacacctttgccaagggaggttttacataaatggagtcctaaacaaataggagaacaccttctactgaaatccctaacttacgtggtggcaatgcctttttattcagcaagtctgattgaaacagtgcagagtgagataattcgagataatactggcattttggagtgtgttaaagaaggaattggaagagtgataggcatgggagtgcctcatagcaaacgacttcttccgcttctttccttgatcttccctacggtgcttcatggagttcttcattacatcatcagctcagttattcagaagtttgtcctactaattctaaagagaaagacttacaatagccacctagctgagagcactagccctgtgcagagtatgttggatgcttattttccagaacttattgctaactttgctgccagtctttgttctgacgttatactttacccattggaaacagttttgcaccgccttcacattcaaggaacacgcacaataattgacaatacagaccttggctatgaagtgcttccaattaatacacaatatgagggaatgagagactgtatcaataccataaggcaggaggaaggagtgtttggtttttataaagggtttggtgctgttataatacagtacacactgcatgcagctgttttacagattaccaaaattatttactctacacttcttcaaaataacatttgagatttaggttccttcactgagtagtctggaagatataatctggataatttgctatgaagttatgagggatacaagtgaaatactggggaagaaaatggattggaaagtaaaattggtactaaagcccatactgattatcttgactttgttttttaaggcataggtatatattttggatcaaaatccttccaaatttgaaaactcaataaaaataacacttattaaattctagttagtgtagcactcatgctgaagtaaacatgatcgtaggcagaagcaaaattttattataaaatctaaaactattttacctcctagattgatgttggtatagtatccttaatacagtgtagtatattaatgtccttaatacaatcaggaggtttttacctttaagcaaataaattatgtcattattgaaaaagacttaagggatgattagacttggcaatctgtaagcaggagtataaatgttttaaattgcattgtccctatgtaactatcttaatggctatatatatgtattttataaagccatttatgtatacacatgtaacttggaatttccttcatccctacacattttctacacttacatcaccttattgcataaaacaaagtcacgcgctttctgcttgaacatcaaaatatcaaaaaccaaggtacccaaaagatacaagtcagagacaacatccttgtccatatccaaacccagtgtttcagtgctagcaacttaatttctcatacatttatagagtttggtttgctttgctagttgtgtgaatcattgggctgtttttagagccactgttaagagagaatataaaataatcatgacaattactactgtttccacatttacaaattgtgtacttaaatgaacctcatttcccttttatttctgaatggcttgtctgagaggaaacaaaattaaaattcatctgggaatttgtgcctcttgtctagtatatagtcaccactaaataatggcttccgtttttattttctttcaggttttgctttaaattttgttttccaaaatagatgtacgtggagggaaaagcaattattcttatcaccttttatttaaacttctttagatgaatactgaagaaaaatccaaaccttaaaggaaatgtgcccttgtattttatgggtgaggggaaaaagtacatttgtacatttcaacatataataagcaaaaaaattactaatcagtttaataaaaacattttgtctattcctaaatgtaatttggtgggttaagcactttgtgtagtaaaatgatatgtgtctgctctatcattagacattttaaagtttcatgtcttcacgtgaataatcacagttgtatcatgaaccatttagcgctctgaagcacagtgactttgcactgatattgtccaaccaagaatgcatacgaatagaaattcattttacttgctaaatgtcacagaaatggttactttttgcaaatagtagtgttggaacaaaaaagtgatatccaaaaagtgtaaaaacagtaataagtagcaaatctctcgtgtgtgtgtgtgtgtagttactgaaacacctacattttccatttttaaattccaccaaaagggggaaaataaaattaaacaccactgatcacattttatattttatggtgactattttagattaaggtttactttgtccaaccaatagcatttaaattgttttcaattaggatagtttcagataagagtaaaccagaaaatttcaagtttgaaaaatttctagaaaagaatctgaatagaatcaagtatttactagtgaaaatctgtaggatcctttgtttagctaaaaattaaatatttcaggatattttttggaagttagcatgaaaatagttagttacataaattcattttattgtagaataattataagaccgataggctgaaccatacacaaataaggttgatcttgttttcctttttggagaaagagaatacaaattaacattaaaattgaaatgtagaaagtaaaatatgaataattttttacaaccactccaaattagttgaaacaaaatcttgaacggtcacgcacttaaatttaagctagccaaatatgttgcactgaattttgaaaagaatgagtgagataactgtaagatacgctcgttcccttttaaaaattgttatttttctttaacatgggtgccaaatcaaatatccatgggctatacttcttaagataataacagctcaaaataatattttttaattcagtagaactaatagcattatggaaaagattctattaaatgttccacaggcccactggtcctcttatataagccaaattttggccatggagcttgtgatacacttgccttacattgtagggtttcttaatttgagtcaagtacactgaaagcaattaaaaactggtaaatattaatttactatgtaaagtgaacttacgaattaacttactaaatacatatatgtagaccttcccgaaatgccattctcaattttattttatgggctccaaaaaaaattatctgggttaataaggttatctattaaagcccccagaatctcagcactagatgtcataaatatgaaatagtaaaaacaaggtcacttgaaaatgggtatttaataccttagctggtgttttcagaagcatacagaactggaaaggtaagaacttgcttactattgcagatatacctgaccactcacaactgtctttttagcagcagctttgttaaaactgcacaaagcattcactttattgattgagtacaaatgctttagtgtttctacctaagtattagtacatctgttcaggaaatggaaaaaaaaaatgctgcttaaatttgttttatcagctgaggttgtggaggatttttgtccactgatcttttgcaacagaaaagcatactttgtcagcttctaataagatagccaggtttgaattatttgcaaaatttatataagcaaataagatctcttggtaacaattgacattgcactagaatttgaatgatactgttgttggcatttctgtttctctttcaagtagttgtaaataatctctttttctcatataaacggaatgcataatgtcttactcttgagtcatttagtagcattgatatggtaccaagttgtatagcagagtaacaaaatcatgatttgacaatgaaatttacatattgcctcacctagagatgttttgtctgtatgacttttttttttttaagtttgtcttactgttactttaaatgttttgggtaaattgtgtaatatgaaaagttcaataaaatgtcgaaataaaaaaaaaactg

SEQ ID NO: 464936 - DNA, 4715 bp, Homo sapiens
acttccggttgtcagaatttacccctgacgcggcggcggccgacgggaagctgtgtgtgcttaggtcgtggtggccccggtggtggtgggctccgggcgggctcgcgtcatcctgcccccgctgcgatgcatccgcggcgcccggacggatttgatggcttgggctaccggggtggtgcccgggacgagcagggctttggcggcgccttccctgcaaggtccttcagcaccgggtcggacctgggccactgggtgacgactcccccagatatccccggcagccgcaacctgcactggggcgagaagagcccgccctacggcgtgcccaccacctccaccccgtacgaaggccccacggaggaacccttttccagtggcggcggcggcagtgtgcaggggcagagcagtgaacagctgaatagatttgctggatttggtattggacttgcaagtctctttacagaaaatgtattggcacatccttgcattgttctacgccgccaatgtcaggttaattaccatgctcagcattaccatctcactccatttacagtcatcaatattatgtacagtttcaacaaaactcagggacctagagccctgtggaaaggaatgggaagtacatttattgtccagggagtcacacttggagcagaaggcataattagtgaatttacacctttgccaagggaggttttacataaatggagtcctaaacaaataggagaacaccttctactgaaatccctaacttacgtggtggcaatgcctttttattcagcaagtctgattgaaacagtgcagagtgagataattcgagataatactggcattttggagtgtgttaaagaaggaattggaagagtgataggcatgggagtgcctcatagcaaacgacttcttccgcttctttccttgatcttccctacggtgcttcatggagttcttcattacatcatcagctcagttattcagaagtttgtcctactaattctaaagagaaagacttacaatagccacctagctgagagcactagccctgtgcagagtatgttggatgcttattttccagaacttattgctaactttgctgccagtctttgttctgacgttatactttacccattggaaacagttttgcaccgccttcacattcaaggaacacgcacaataattgacaatacagaccttggctatgaagtgcttccaattaatacacaatatgagggaatgagagactgtatcaataccataaggcaggaggaaggagtgtttggtttttataaagggtttggtgctgttataatacagtacacactgcatgcagctgttttacagattaccaaaattatttactctacacttcttcaaaataacatttgagatttaggttccttcactgagtagtctggaagatataatctggataatttgctatgaagttatgagggatacaagtgaaatactggggaagaaaatggattggaaagtaaaattggtactaaagcccatactgattatcttgactttgttttttaaggcataggtatatattttggatcaaaatccttccaaatttgaaaactcaataaaaataacacttattaaattctagttagtgtagcactcatgctgaagtaaacatgatcgtaggcagaagcaaaattttattataaaatctaaaacaaaactttatagagttgaatctattccatctgacttcaatatttgccaaacgtttattttacctcctagattgatgttggtatagtatccttaatacagtgtagtatattaatgtccttaatacaatcaggaggtttttacctttaagcaaataaattatgtcattattgaaaaagacttaagggatgattagacttggcaatctgtaagcaggagtataaatgttttaaattgcattgtccctatgtaactatcttaatggctatatatatgtattttataaagccatttatgtatacacatgtaacttggaatttccttcatccctacacattttctacacttacatcaccttattgcataaaacaaagtcacgcgctttctgcttgaacatcaaaatatcaaaaaccaagtgtttcagtgctagcaacttaatttctcatacatttatagagtttggtttgctttgctagttgtgtgaatcattgggctgtttttagagccactgttaagagagaatataaaataatcatgacaattactactgtttccacatttacaaattgtgtacttaaatgaacctcatttcccttttatttctgaatggcttgtctgagaggaaacaaaattaaaattcatctgggaatttgtgcctcttgtctagtatatagtcaccactaaataatggcttccgtttttattttctttcaggttttgctttaaattttgttttccaaaatagatgtacgtggagggaaaagcaattattcttatcaccttttatttaaacttctttagatgaatactgaagaaaaatccaaaccttaaaggaaatgtgcccttgtattttatgggtgaggggaaaaagtacatttgtacatttcaacatataataagcaaaaaaattactaatcagtttaataaaaacattttgtctattcctaaatgtaatttggtgggttaagcactttgtgtagtaaaatgatatgtgtctgctctatcattagacattttaaagtttcatgtcttcacgtgaataatcacagttgtatcatgaaccatttagcgctctgaagcacagtgactttgcactgatattgtccaaccaagaatgcatacgaatagaaattcattttacttgctaaatgtcacagaaatggttactttttgcaaatagtagtgttggaacaaaaaagtgatatccaaaaagtgtaaaaacagtaataagtagcaaatctctcgtgtgtgtgtgtgtgtagttactgaaacacctacattttccatttttaaattccaccaaaagggggaaaataaaattaaacaccactgatcacattttatattttatggtgactattttagattaaggtttactttgtccaaccaatagcatttaaattgttttcaattaggatagtttcagataagagtaaaccagaaaatttcaagtttgaaaaatttctagaaaagaatctgaatagaatcaagtatttactagtgaaaatctgtaggatcctttgtttagctaaaaattaaatatttcaggatattttttggaagttagcatgaaaatagttagttacataaattcattttattgtagaataattataagaccgataggctgaaccatacacaaataaggttgatcttgttttcctttttggagaaagagaatacaaattaacattaaaattgaaatgtagaaagtaaaatatgaataattttttacaaccactccaaattagttgaaacaaaatcttgaacggtcacgcacttaaatttaagctagccaaatatgttgcactgaattttgaaaagaatgagtgagataactgtaagatacgctcgttcccttttaaaaattgttatttttctttaacatgggtgccaaatcaaatatccatgggctatacttcttaagataataacagctcaaaataatattttttaattcagtagaactaatagcattatggaaaagattctattaaatgttccacaggcccactggtcctcttatataagccaaattttggccatggagcttgtgatacacttgccttacattgtagggtttcttaatttgagtcaagtacactgaaagcaattaaaaactggtaaatattaatttactatgtaaagtgaacttacgaattaacttactaaatacatatatgtagaccttcccgaaatgccattctcaattttattttatgggctccaaaaaaaattatctgggttaataaggttatctattaaagcccccagaatctcagcactagatgtcataaatatgaaatagtaaaaacaaggtcacttgaaaatgggtatttaataccttagctggtgttttcagaagcatacagaactggaaaggtaagaacttgcttactattgcagatatacctgaccactcacaactgtctttttagcagcagctttgttaaaactgcacaaagcattcactttattgattgagtacaaatgctttagtgtttctacctaagtattagtacatctgttcaggaaatggaaaaaaaaaatgctgcttaaatttgttttatcagctgaggttgtggaggatttttgtccactgatcttttgcaacagaaaagcatactttgtcagcttctaataagatagccaggtttgaattatttgcaaaatttatataagcaaataagatctcttggtaacaattgacattgcactagaatttgaatgatactgttgttggcatttctgtttctctttcaagtagttgtaaataatctctttttctcatataaacggaatgcataatgtcttactcttgagtcatttagtagcattgatatggtaccaagttgtatagcagagtaacaaaatcatgatttgacaatgaaatttacatattgcctcacctagagatgttttgtctgtatgacttttttttttttaagtttgtcttactgttactttaaatgttttgggtaaattgtgtaatatgaaaagttcaataaaatgtcgaaataaaaaaaaaactg

SEQ ID NO: 464937 - DNA, 4446 bp, Homo sapiens
acttccggttgtcagaatttacccctgacgcggcggcggccgacgggaagctgtgtgtgcttaggtcgtggtggccccggtggtggtgggctccgggcgggctcgcgtcatcctgcccccgtacgaaggccccacggaggaacccttttccagtggcggcggcggcagtgtgcaggggcagagcagtgaacagctgaatagatttgctggatttggtattggacttgcaagtctctttacagaaaatgtattggcacatccttgcattgttctacgccgccaatgtcaggttaattaccatgctcagcattaccatctcactccatttacagtcatcaatattatgtacagtttcaacaaaactcagggaggttttacataaatggagtcctaaacaaataggagaacaccttctactgaaatccctaacttacgtggtggcaatgcctttttattcagcaagtctgattgaaacagtgcagagtgagataattcgagataatactggcattttggagtgtgttaaagaaggaattggaagagtgataggcatgggagtgcctcatagcaaacgacttcttccgcttctttccttgatcttccctacggtgcttcatggagttcttcattacatcatcagctcagttattcagaagtttgtcctactaattctaaagagaaagacttacaatagccacctagctgagagcactagccctgtgcagagtatgttggatgcttattttccagaacttattgctaactttgctgccagtctttgttctgacgttatactttacccattggaaacagttttgcaccgccttcacattcaaggaacacgcacaataattgacaatacagaccttggctatgaagtgcttccaattaatacacaatatgagggaatgagagactgtatcaataccataaggcaggaggaaggagtgtttggtttttataaagggtttggtgctgttataatacagtacacactgcatgcagctgttttacagattaccaaaattatttactctacacttcttcaaaataacatttgagatttaggttccttcactgagtagtctggaagatataatctggataatttgctatgaagttatgagggatacaagtgaaatactggggaagaaaatggattggaaagtaaaattggtactaaagcccatactgattatcttgactttgttttttaaggcataggtatatattttggatcaaaatccttccaaatttgaaaactcaataaaaataacacttattaaattctagttagtgtagcactcatgctgaagtaaacatgatcgtaggcagaagcaaaattttattataaaatctaaaacaaaactttatagagttgaatctattccatctgacttcaatatttgccaaacgtttattttacctcctagattgatgttggtatagtatccttaatacagtgtagtatattaatgtccttaatacaatcaggaggtttttacctttaagcaaataaattatgtcattattgaaaaagacttaagggatgattagacttggcaatctgtaagcaggagtataaatgttttaaattgcattgtccctatgtaactatcttaatggctatatatatgtattttataaagccatttatgtatacacatgtaacttggaatttccttcatccctacacattttctacacttacatcaccttattgcataaaacaaagtcacgcgctttctgcttgaacatcaaaatatcaaaaaccaaggtacccaaaagatacaagtcagagacaacatccttgtccatatccaaacccagtgtttcagtgctagcaacttaatttctcatacatttatagagtttggtttgctttgctagttgtgtgaatcattgggctgtttttagagccactgttaagagagaatataaaataatcatgacaattactactgtttccacatttacaaattgtgtacttaaatgaacctcatttcccttttatttctgaatggcttgtctgagaggaaacaaaattaaaattcatctgggaatttgtgcctcttgtctagtatatagtcaccactaaataatggcttccgtttttattttctttcaggttttgctttaaattttgttttccaaaatagatgtacgtggagggaaaagcaattattcttatcaccttttatttaaacttctttagatgaatactgaagaaaaatccaaaccttaaaggaaatgtgcccttgtattttatgggtgaggggaaaaagtacatttgtacatttcaacatataataagcaaaaaaattactaatcagtttaataaaaacattttgtctattcctaaatgtaatttggtgggttaagcactttgtgtagtaaaatgatatgtgtctgctctatcattagacattttaaagtttcatgtcttcacgtgaataatcacagttgtatcatgaaccatttagcgctctgaagcacagtgactttgcactgatattgtccaaccaagaatgcatacgaatagaaattcattttacttgctaaatgtcacagaaatggttactttttgcaaatagtagtgttggaacaaaaaagtgatatccaaaaagtgtaaaaacagtaataagtagcaaatctctcgtgtgtgtgtgtgtgtagttactgaaacacctacattttccatttttaaattccaccaaaagggggaaaataaaattaaacaccactgatcacattttatattttatggtgactattttagattaaggtttactttgtccaaccaatagcatttaaattgttttcaattaggatagtttcagataagagtaaaccagaaaatttcaagtttgaaaaatttctagaaaagaatctgaatagaatcaagtatttactagtgaaaatctgtaggatcctttgtttagctaaaaattaaatatttcaggatattttttggaagttagcatgaaaatagttagttacataaattcattttattgtagaataattataagaccgataggctgaaccatacacaaataaggttgatcttgttttcctttttggagaaagagaatacaaattaacattaaaattgaaatgtagaaagtaaaatatgaataattttttacaaccactccaaattagttgaaacaaaatcttgaacggtcacgcacttaaatttaagctagccaaatatgttgcactgaattttgaaaagaatgagtgagataactgtaagatacgctcgttcccttttaaaaattgttatttttctttaacatgggtgccaaatcaaatatccatgggctatacttcttaagataataacagctcaaaataatattttttaattcagtagaactaatagcattatggaaaagattctattaaatgttccacaggcccactggtcctcttatataagccaaattttggccatggagcttgtgatacacttgccttacattgtagggtttcttaatttgagtcaagtacactgaaagcaattaaaaactggtaaatattaatttactatgtaaagtgaacttacgaattaacttactaaatacatatatgtagaccttcccgaaatgccattctcaattttattttatgggctccaaaaaaaattatctgggttaataaggttatctattaaagcccccagaatctcagcactagatgtcataaatatgaaatagtaaaaacaaggtcacttgaaaatgggtatttaataccttagctggtgttttcagaagcatacagaactggaaaggtaagaacttgcttactattgcagatatacctgaccactcacaactgtctttttagcagcagctttgttaaaactgcacaaagcattcactttattgattgagtacaaatgctttagtgtttctacctaagtattagtacatctgttcaggaaatggaaaaaaaaaatgctgcttaaatttgttttatcagctgaggttgtggaggatttttgtccactgatcttttgcaacagaaaagcatactttgtcagcttctaataagatagccaggtttgaattatttgcaaaatttatataagcaaataagatctcttggtaacaattgacattgcactagaatttgaatgatactgttgttggcatttctgtttctctttcaagtagttgtaaataatctctttttctcatataaacggaatgcataatgtcttactcttgagtcatttagtagcattgatatggtaccaagttgtatagcagagtaacaaaatcatgatttgacaatgaaatttacatattgcctcacctagagatgttttgtctgtatgacttttttttttttaagtttgtcttactgttactttaaatgttttgggtaaattgtgtaatatgaaaagttcaataaaatgtcgaaataaaaaaaaaactg

SEQ ID NO: 464938 - DNA, 3366 bp, Homo sapiens
acttccggttgtcagaatttacccctgacgcggcggcggccgacgggaagctgtgtgtgcttaggtcgtggtggccccggtggtggtgggctccgggcgggctcgcgtcatcctgcccccgctgcgatgcatccgcggcgcccggacggatttgatggcttgggctaccggggtggtgcccgggacgagcagggctttggcggcgccttccctgcaaggtccttcagcaccgggtcggacctgggccactgggtgacgactcccccagatatccccggcagccgcaacctgcactggggcgagaagagcccgccctacggcgtgcccaccacctccaccccgtacgaaggccccacggaggaacccttttccagtggcggcggcggcagtgtgcaggggcagagcagtgaacagctgaatagatttgctggatttggtattggacttgcaagtctctttacagaaaatgtattggcacatccttgcattgttctacgccgccaatgtcaggttaattaccatgctcagcattaccatctcactccatttacagtcatcaatattatgtacagtttcaacaaaactcagggacctagagccctgtggaaaggaatgggaagtacatttattgtccagggagtcacacttggagcagaaggcataattagtgaatttacacctttgccaagggaggttttacataaatggagtcctaaacaaataggagaacaccttctactgaaatccctaacttacgtggtggcaatgcctttttattcagcaagtctgattgaaacagtgcagagtgagataattcgagataatactggcattttggagtgtgttaaagaaggaattggaagagtgataggcatgggagtgcctcatagcaaacgacttcttccgcttctttccttgatcttccctacggtgcttcatggagttcttcattacatcatcagctcagttattcagaagtttgtcctactaattctaaagagaaagacttacaatagccacctagctgagagcactagccctgtgcagagttttgctttaaattttgttttccaaaatagatgtacgtggagggaaaagcaattattcttatcaccttttatttaaacttctttagatgaatactgaagaaaaatccaaaccttaaaggaaatgtgcccttgtattttatgggtgaggggaaaaagtacatttgtacatttcaacatataataagcaaaaaaattactaatcagtttaataaaaacattttgtctattcctaaatgtaatttggtgggttaagcactttgtgtagtaaaatgatatgtgtctgctctatcattagacattttaaagtttcatgtcttcacgtgaataatcacagttgtatcatgaaccatttagcgctctgaagcacagtgactttgcactgatattgtccaaccaagaatgcatacgaatagaaattcattttacttgctaaatgtcacagaaatggttactttttgcaaatagtagtgttggaacaaaaaagtgatatccaaaaagtgtaaaaacagtaataagtagcaaatctctcgtgtgtgtgtgtgtgtagttactgaaacacctacattttccatttttaaattccaccaaaagggggaaaataaaattaaacaccactgatcacattttatattttatggtgactattttagattaaggtttactttgtccaaccaatagcatttaaattgttttcaattaggatagtttcagataagagtaaaccagaaaatttcaagtttgaaaaatttctagaaaagaatctgaatagaatcaagtatttactagtgaaaatctgtaggatcctttgtttagctaaaaattaaatatttcaggatattttttggaagttagcatgaaaatagttagttacataaattcattttattgtagaataattataagaccgataggctgaaccatacacaaataaggttgatcttgttttcctttttggagaaagagaatacaaattaacattaaaattgaaatgtagaaagtaaaatatgaataattttttacaaccactccaaattagttgaaacaaaatcttgaacggtcacgcacttaaatttaagctagccaaatatgttgcactgaattttgaaaagaatgagtgagataactgtaagatacgctcgttcccttttaaaaattgttatttttctttaacatgggtgccaaatcaaatatccatgggctatacttcttaagataataacagctcaaaataatattttttaattcagtagaactaatagcattatggaaaagattctattaaatgttccacaggcccactggtcctcttatataagccaaattttggccatggagcttgtgatacacttgccttacattgtagggtttcttaatttgagtcaagtacactgaaagcaattaaaaactggtaaatattaatttactatgtaaagtgaacttacgaattaacttactaaatacatatatgtagaccttcccgaaatgccattctcaattttattttatgggctccaaaaaaaattatctgggttaataaggttatctattaaagcccccagaatctcagcactagatgtcataaatatgaaatagtaaaaacaaggtcacttgaaaatgggtatttaataccttagctggtgttttcagaagcatacagaactggaaaggtaagaacttgcttactattgcagatatacctgaccactcacaactgtctttttagcagcagctttgttaaaactgcacaaagcattcactttattgattgagtacaaatgctttagtgtttctacctaagtattagtacatctgttcaggaaatggaaaaaaaaaatgctgcttaaatttgttttatcagctgaggttgtggaggatttttgtccactgatcttttgcaacagaaaagcatactttgtcagcttctaataagatagccaggtttgaattatttgcaaaatttatataagcaaataagatctcttggtaacaattgacattgcactagaatttgaatgatactgttgttggcatttctgtttctctttcaagtagttgtaaataatctctttttctcatataaacggaatgcataatgtcttactcttgagtcatttagtagcattgatatggtaccaagttgtatagcagagtaacaaaatcatgatttgacaatgaaatttacatattgcctcacctagagatgttttgtctgtatgacttttttttttttaagtttgtcttactgttactttaaatgttttgggtaaattgtgtaatatgaaaagttcaataaaatgtcgaaataaaaaaaaaactg

SEQ ID NO: 464939 - DNA, 3336 bp, Homo sapiens
gtgggggtgcgcgccagtacgagagtggggaggacagcattactcccttgacatccctcaaagctgttgcatgtatcgatagtttgttcctttttattgcacagtagcattccatagtatggatgaatcacagctttttagtcatttacccattgaagggcatttaggttgtttccagtttgggctatttatgaacaaagatgctagatgctacaatcatttatgtacaagtttttgtatgagcatgagttttcatttccctgagataattgtctgagagtgcaattgctgggtcaaaagataagtgtatttttagttttataaaaaatctgagtaatccagtttgtctgcattgtcatttggtggtgtcaatattttttatttttatcttagctattctgataagtatgtagtgatatctcattatggttttaatttgtatttccttaatggttagtgaagtttaacattttcatgtgcttattattagccatagtgtatcttctttagtggcatctcctttcctatcttttgcccattttctaattgaattgtttaggtttttactgttgaattgtacacattctagtcttttgttggatatgtgatttgcaaatattttctcccggactgtagtttgtcttttcatccagttaacagagttgcagagcaaaaggttttaattttgatgtggttcaatttatcagtttctccttttatgaattgtgcttttgtgattttaagagctatagtgccttctcagcctgaatccaaagtgattcctgtagtaaaggaaatgcagctctttcttcactactattgccatatgtttaaaggaaaagaattactcctatgtgacccagttcacaccttgccaaatccttttactcagcctatggcagttctcaataattttatgagatatagtattgactatatcaagttgaagaaaggccacagatctccatgtaagaatttactgaaaaagaaaaaacaagccaaacaaaatgcagagacagcctcagctgtagctacaaggactcatactgggaaggaagataataatacagtagttttagagccagacaagtgcaacattgctgtggaagaggaatatatgactgatgagaaaaaaaagagaaaaagtaatcagttaaaggagatcaggcgtacagaactaaagagatattatagtattgtagagttactgatggtcctgtgctgtcagcctcctgaacccccttcagatgctcttatgatagaaatagatggaggagagagctggtcgttcatggggctatcaacgtggcccagtgcaatcacaagggaccttaaaagtgaaagagggaggcaggagagagcacgtgagactactcaggcagcgttgctggctctgcgggtgaaagcagggccttggctgaagcttcctgcagacgcagaactggctagatatgctgatgccaactctccttccagtaccttaaggctatcatcatccagtcctggtgctactgtctctccttcatcatcagatgcagaatatgataaattgcctgatgctgacttagcacgaaaggccttgaaacccattgaaagagtcttatcgtctacttctgaagaagatgagccaggtgtggtgaaatttttaaaaatgaattgtcgatacttcaccgatggaaagggtgtggttggcggtgttatgatagtgactcctaacaacatcatgtttgaccctcataaatctgatcctctggttattgaaaatgggtgtgaggagtatggtctcatctgccccatggaagaggttgtttccattgcgctctacaatgacatttctcacatgaagatcaaagatgccttgccatcgcctggagaatgggaagacctggcttcagaaaaggatatcaacccattcagtaagttcaaatctatcaacaaggaaaaacgacagcagaatggagagaaaattatgacttcggattccagaccaatagtacctttggagaagtccacaggacatacacctacaaagccctcaggcagctctgtgtcagagaaattaaagaaactggactcctctagggagacatcccatggttctcccacagtgactaagctcagcaaggaaccttccgacacttcttctgcatttgaatctacagccaaagaaaactttctaggggaagatgatgattttgttgacttggaagaactttcttctcaaactggtggtggaatgcacaaaaaagacaccttgaaggagtgcctttctcttgacccagaggaacgaaagaaagctgagtcacaaataaacaattctgccgtggaaatgcaggtgcagtcagccctagcctttttgggaacagagaatgatgttgaactgaagggggcgctagatttagaaacctgtgagaagcaagatataatgccagaagtggacaagcagtctggttcgccagaaagccgagtagaaaacacactgaacatacatgaagatttagataaagttaaactcattgaatattacctgactaagaacaaagaagggccacaggtatctgaaaatttgcagaaaacagaattaagtgatggaaaaagtattgaaccagggggaatagacattacccttagtagttctctttcccaggcgggtgatcccataactgagggcaataaagagccagataagacctgggtgaaaaagggagagcccctcccggtaaaactgaactcttctacagaagcaaatgtgattaaagaggctctagactcctctttggaatctactctggacaacagctgtcaaggtgcacaaatggataataaatctgaagttcagttgtggctgttaaagagaattcaggtacccattgaagatatacttccttcaaaagaagaaaaaagcaagaccccacccatgttcctgtgcatcaaagtgggaaaaccaatgagaaaatcctttgccactcacactgcagccatggtccagcagtacggcaaacggagaaagcagccagagtactggtttgctgttcctcgggagaggtgaggaaaacaaagcgctgaaactttcagttacattgtgggttgtgtaaacttgatcatctatcagaaaaactacctatcatatatatcactttttctctgggaaaatgtattctttataatataagacaattgtgtttttttcaattgtgttatctttgctgcaactgtctgcaccaaggactctcgtagaataattgaagcaatcccacacatgtaattattttactgtcatttttaacccagaagaaatctttaatggtaaaatagtacttctctttcacttcttat

SEQ ID NO: 464940 - DNA, 2931 bp, Homo sapiens
gggtcatcgggtcttctcatggaaagggtcagtaactcgcgggtattgccatggcgatggaacgtttcttggtctccacgaaaagcagcttaagtgcttcacactcccagagagagggaaagagacatggtagtggggcggctaccccattaaagaatgtcagatcatctactccaagccttcaagttagagacaagcaaaaggagacccagcaagttatagtcgcacagggagttacagccatacaggccatttcagttgcacagatagtttcagtcacacaggcaattacagcttcaaagatcatttcagccacacaggtcatttcatttgcacagcacgcttcagtcacagagctagtttcagtcacacagggtgtttcagccacacaggtagttacaatctcacaggacatttcaaccacacaggtagttacagtctcacaggttgttcagtcacacaggtagttacagtctcacagggttgtttagtcacacagaatgaagccatggtggccatggttgaccagaacgcgtggccttgtctgtacaagctccatttcttcatgtgtccccatcacattacacttagtgtcagtgtttcaggcaccttcatgcttttccaaaagtgtttcataccatttctcaaatgttttcagtttggccatatcccaaatgtatttttgccaaatttcttcctcttcaatctgtctacatttcaaagaaaatttgagccatctgtttctgtttcattggcttcattgttcaaaattctctgtggtagaaactaagtgcaagaagtctttcaaatctctacttaagccttccacacctttctctgaagcacttcataaccaaagggtctgtggaattaagttcttattagaacatctcattttaactcaatgccttccctgtttctactgggatcgcacacctgctcaccagtgaaatgttaactgggagatgagtctgggggagccagggcccttatagcatgagtggatcactcacccagattaccctcctctccctccatgcctaacctgctctctgtgtgcttagggcatgtactccaggagaacacagacagcatctcttctctatatacttctctgcgttggaataaatgcaataaaataggtgccatttatgttgttatactaaaaattaaaagcagaagaatacaatgaaactgcaattctcattttaagcaaaataagcatacatctaaaatgagaagtagtttgtttcatactaaatcacatttattaagaatagaaggaacttggaatcaaattgcgtgtatatttttgtgtcctgaaatcttttcattcaatattgtaccttgggcacttttattaaacctattctttgaaaacatggttttatggctatattgcatttaattttacaattatcttttaaactctttccaattttttatatttataaatcatgctctgtctcagaggacttgagtaatttatttaacagctcccttagaagttgggcattttggttcttacacattttccctactacaaataacaattgattcttaatggcattaattttaaaacacattaattttactcagtgagagggtataaaataactaagaatccatttcctgagcctctctaacatactagaggaaaaattaagagagaaataataatttccatttaaaaagacaactggaaattttcaaccaaaagattaatcacagtgattagccaaagaattaaatcatgtgaagaaaaaaatttaaaaaatcttcattgaataatgcatttcaaggtggagctagaaacagatgctgggaatcatagacgcatgatccagaagggcttgtgagcatgagagcactggacaaataacgtccaggaaagtcacagaggaaaagtaacaactcataaaccagtacagcggaactgaattcaaaaagcaaataataataataaatcacaattgtttataaaatgtgtatttgatgagaaagataaaaataatggtgaaaaatgacaaagtaatgagagaccatagaacaggacttaacaagagggagaatgtgaactaccatgtgtggataattctggatgtacaattcagattccgatgacatgtatcctgaaacctagaggttgacaagattgccaaacattttaagcattaagaacattccgcctttcccagttactacttccaggattacaaacagaattgcttcaggatgctcaggaacatcgtacccttcccattaatgggatgcactctgttttgaaagcagttggaataatggagcaaaaacaaacagctaatgaaaaataaatttaaataaaaccttttacacagaaaacaaaacactagaagaaattttactactttactggaatattacgcaaataatctgtttattaaacaaactctcattggtgtccaaagaagaaacaaaacaaattaagtatcacaagcaagagcataagagggaatgccaatgaattttaggaaaatgactcgataactgcaacggtgatgtcatgtgtgtgtctactttagagagcagatggtcgatctggtgctaatttgcccaatacggtagctacgcggcaatgaaattccaaaactggcacaaggcgggcctggttccagggatcactggatctaaaagaaaaaatccaatgaatgatgcatcccactggcattccaaagagcaagtaaacaaaagaaattatgggtttgggctcagaaaccccaacccttgagatttcagaaaacaaaacgactcattggcaagaggcactgtaacgactcaggttcaaatcccacctctgttatttaccaattgcataactttcagcttcagtgtgacctgaccctgagctttccaatccaaaaatagaagtaatgtctatgtcatggagtagtc

SEQ ID NO: 464941 - DNA, 1128 bp, Homo sapiens
  misc_feature (70)..(70): n is a, c, g, or t
cattggtccgagagaaattagatttgacctgtgcaggacctcagcagcttggacacagcccactgcagangatgaaaggagaagctggacatatgctacacaatgaaaagtcaaagcaggagggacacatctggggctctatgaggaggacagctttcatcctgggctctggacttctctcatttgtggccttctggaactcagtgacatggcatcttcagagattttggggtgcttctggctacttttggcaagcccagtgggagaggctgctgactacatttgaagggaaggagtggatcctcttctttataggtgccatccaagtgccttgtctcttcttctggagcttcaatgggcttctattggtggttgacacaacaggaaaacctaacttcatctctcgctaccgaattcaggtcggcaagaatgaacctgtggatcctgtgaaactgcgccagtctatccgcacagttcttttcaaccagtgcatgatatctttccccatggtggtcttcctctatcccttcctcaaatggtggagagacccctgccgccgtgagctacccaccttccactggttcctcctggagctggccatcttcacgctgatcgaggaagtcttgttctactattcacaccgatctgggtcaaggaagtttgcctctggtaccaccttgggactaagtgtatacccaactaagtcccttcatctccctggaccctgccttcaatcatccctcctcttgcaggtctccaacatgctaccggtgatagtgggcccattagtaatgggctcccacttgtcctccatcaccatgtggttttccttggccctcatcatcaccaccatctcccactgtggctaccaccttcccttcctgccttcgcctgaattccacgactaccaccatctcaagttcaaccagtgctatggggtgctgggtgtgctggaccacctccatgggactgacaccatgttcaagcagaccaaggcctacgagagacatgtcctcctgctgggcttcaccccgctctctgagagcatcccagactccccaaagaggatggagtgagagacagcctaagtgtcatcctggctgtccctcagccatgggatgcagacac

SEQ ID NO: 464942 - DNA, 1085 bp, Homo sapiens
cttgctagaactactctttgagttctggatgaaaggagaagctggacatatgctacacaatgaaaagtcaaagcaggagggacacatctggggctctatgaggaggacagctttcatcctgggctctggacttctctcatttgtggccttctggaactcagtgacatggcatcttcagagattttggggtgcttctggctacttttggcaagcccagtgggagaggctgctgactacatttgaagggaaggagtggatcctcttctttataggtgccatccaagtgccttgtctcttcttctggagcttcaatgggcttctattggtggttgacacaacaggaaaacctaacttcatctctcgctaccgaattcaggtcggcaagaatgaacctgtggatcctgtgaaactgcgccagtctatccgcacagttcttttcaaccagtgcatgatatctttccccatggtggtcttcctctatcccttcctcaaatggtggagagacccctgccgccgtgagctacccaccttccactggttcctcctggagctggccatcttcacgctgatcgaggaagtcttgttctactattcacaccgatctgggtcaaggaagtttgcctctggtaccaccttgggactaagtgtatacccaactaagtcccttcatctccctggaccctgccttcaatcatccctcctcttgcaggtctccaacatgctaccggtgatagtgggcccattagtaatgggctcccacttgtcctccatcaccatgtggttttccttggccctcatcatcaccaccatctcccactgtggctaccaccttcccttcctgccttcgcctgaattccacgactaccaccatctcaagttcaaccagtgctatggggtgctgggtgtgctggaccacctccatgggactgacaccatgttcaagcagaccaaggcctacgagagacatgtcctcctgctgggcttcaccccgctctctgagagcatcccagactccccaaagaggatggagtgagagacagcctaagtgtcatcctggctgtccctcagccatgggatgcagacac

SEQ ID NO: 464943 - DNA, 2548 bp, Homo sapiens
ctgtgtgtgtctgttgctaaggtcaccatggctgaccgggctgctgccgaaagggcctgcaaggatcccaatcccatcattgatggcagaaaggccaacgtgaacctggcatacttaggagcaaaaccaaggatcatgcaaccaggttttgcctttggtgttcaacaacttcatccagcccttatacaaagacctttcgggatacctgcccactatgtctatccgcaggcttttgtgcagccgggagtggtcattccacacgtccagccgacagcagctgccgcctccaccaccccttacattgattacactggagctgcatacgcacaatactcagcagctgctgctgctgccgccgccgctgctgcctatgaccagtacccctatgcagcctctccagctgctgcaggatatgttactgctgggggctatggctacgcagtccagcagccaatcaccgcagcggcacctgggacagctgccgccgccgctgcagcagctgctgccgctgcagcatttggccagtaccagcctcagcagctgcagacagaccgaatgcaatagaccagccatctgatcaaagttgaattgttttctctttccctcccaattttccaatttttagtagctaataagagagttaacattgacttaacagctttaaaaaaaaaaacagccatgctattgtgaagcagagttattattttttttatactccaggtagtgttctagatgagaaagaggtaagaatgaggggaatgggcacaattttggaaatcaatcccaaagagcctgagtaaatgaaaggccactacgaaatgacgccaggagtaacaacggaacttcacttttgtaacgggatttttatttttgctctttttatagtatcagggaagcaaactgccttttacaagttagaaaatgctgtttgaatctagttgaaccaggaatacagagcgagcaatatgtagcttgaattacatttaaaagcagattttttacaaacaaaatggcgaaagcactgattgtcatttttagcagtcacttaaggcctatagaacttttttcaagtcggaaggtcctgttcttactatctcaaaaatgggcatcgaacaatcaatctaggagcgtggcagtgggtaaaatggtggacaggcaccaaagctattttctcatctgtcctgtggatgagtggaactgtggaacaagtgatgtggaattaatgggtgcaacagctgtacagacaatcaataacacacacagttctggaaagaacacatcacttgtgcttgtttgatgagcttgtcacattctaatccctctccccatcctgtttcaattttgggaaacttgtatctgctggtgtcagcaattctgattctgaaataggatcaggcttttactacaacagccttctctttctatttattgtgtcgactcgtggcttatgaataaaggcaggcaaagtttgcagaactgtcttaaggacatttattttttttccctttttaagtaattttacactttagtatctatttcagagtcatatttaaaactatttattagtgactacagtacatgagacaacaaggttactgagattacaattcttcaaaggttaatgataatgtggtttatactgtgccttaatagtaatgctatttaagatatttatttttaagttttactatgctgcactctaaagaaaggaactttagatgtgacactgtaaaattatgtattcatctcatggcataaattatttagtaagtctagatgtagcgtattaaatattaacctattcaactaaagatgttgacttggatttatttaaattcatatgtgcactgtataagagagtactcttacattaacacattttagtttagtttttagatttttttttaaacgatatattgctagtttcatgcttcctcctctgattttgcctgtgtagatttcatttattggtaattcattagtttaacactattatgtagtttttaaatgctgctttacatttttcttctgaaactgcaatacttgcaatttttattcttaaactaaattgaatactattttacactgtattggatttttatacttgaacaatttcatacaagggaagacaggttagcatttttatggactttctccattatcactggatttactttaagtattcccatactagacagtgttatgtaatgtagacatgactctcctgtgcaaattatttattcgttgtgtatattgctttataacatttcagatcttctaatctattcacttgtattaaatataatttttaaaaacttctgttgcattggctgtttctaattctgtagtaaaggtcaatgatttctcttttgaacttgaatcaatagccatgattgatacgtaacattttcagtgagcataatactctcttggatgtcctggttttgtgcctttaaagaaaaaaaaaagctataagatgcctgatgaaatgctttaggttgtcacccaaatggagttgcagaatatgtcccgaaagccccaaagcctg

SEQ ID NO: 464944 - DNA, 2460 bp, Homo sapiens
gtgcatgaccacgcgcctggtttctgacaagcagttaagaacatctctgagtgtcctcagaaacacttgatgacgtcgtttctcctggcactgggaaacatctacaagtctggatacctgcccactatgtctatccgcaggcttttgtgcagccgggagtggtcattccacacgtccagccgacagcagctgccgcctccaccaccccttacattgattacactggagctgcatacgcacaatactcagcagctgctgctgctgccgccgccgctgctgcctatgaccagtacccctatgcagcctctccagctgctgcaggatatgttactgctgggggctatggctacgcagtccagcagccaatcaccgcagcggcacctgggacagctgccgccgccgctgcagcagctgctgccgctgcagcatttggccagtaccagcctcagcagctgcagacagaccgaatgcaatagaccagccatctgatcaaagttgaattgttttctctttccctcccaattttccaatttttagtagctaataagagagttaacattgacttaacagctttaaaaaaaaaaacagccatgctattgtgaagcagagttattattttttttatactccaggtagtgttctagatgagaaagaggtaagaatgaggggaatgggcacaattttggaaatcaatcccaaagagcctgagtaaatgaaaggccactacgaaatgacgccaggagtaacaacggaacttcacttttgtaacgggatttttatttttgctctttttatagtatcagggaagcaaactgccttttacaagttagaaaatgctgtttgaatctagttgaaccaggaatacagagcgagcaatatgtagcttgaattacatttaaaagcagattttttacaaacaaaatggcgaaagcactgattgtcatttttagcagtcacttaaggcctatagaacttttttcaagtcggaaggtcctgttcttactatctcaaaaatgggcatcgaacaatcaatctaggagcgtggcagtgggtaaaatggtggacaggcaccaaagctattttctcatctgtcctgtggatgagtggaactgtggaacaagtgatgtggaattaatgggtgcaacagctgtacagacaatcaataacacacacagttctggaaagaacacatcacttgtgcttgtttgatgagcttgtcacattctaatccctctccccatcctgtttcaattttgggaaacttgtatctgctggtgtcagcaattctgattctgaaataggatcaggcttttactacaacagccttctctttctatttattgtgtcgactcgtggcttatgaataaaggcaggcaaagtttgcagaactgtcttaaggacatttattttttttccctttttaagtaattttacactttagtatctatttcagagtcatatttaaaactatttattagtgactacagtacatgagacaacaaggttactgagattacaattcttcaaaggttaatgataatgtggtttatactgtgccttaatagtaatgctatttaagatatttatttttaagttttactatgctgcactctaaagaaaggaactttagatgtgacactgtaaaattatgtattcatctcatggcataaattatttagtaagtctagatgtagcgtattaaatattaacctattcaactaaagatgttgacttggatttatttaaattcatatgtgcactgtataagagagtactcttacattaacacattttagtttagtttttagatttttttttaaacgatatattgctagtttcatgcttcctcctctgattttgcctgtgtagatttcatttattggtaattcattagtttaacactattatgtagtttttaaatgctgctttacatttttcttctgaaactgcaatacttgcaatttttattcttaaactaaattgaatactattttacactgtattggatttttatacttgaacaatttcatacaagggaagacaggttagcatttttatggactttctccattatcactggatttactttaagtattcccatactagacagtgttatgtaatgtagacatgactctcctgtgcaaattatttattcgttgtgtatattgctttataacatttcagatcttctaatctattcacttgtattaaatataatttttaaaaacttctgttgcattggctgtttctaattctgtagtaaaggtcaatgatttctcttttgaacttgaatcaatagccatgattgatacgtaacattttcagtgagcataatactctcttggatgtcctggttttgtgcctttaaagaaaaaaaaaagctataagatgcctgatgaaatgctttaggttgtcacccaaatggagttgcagaatatgtcccgaaagccccaaagcctg

SEQ ID NO: 464945 - DNA, 1219 bp, Homo sapiens
tgcatttcacaccactgaaccgtacattttaaaatgtttaagatggtgaatttacattatgtgtatttaccacaactaaatttttttaagttaaagagacagaagagtattaaagtgattcaaaaaacatcatcaagggcttcttcagccgtctcttctttccaaagccagtatatccacagtttaaggcaggaacggcaaacagattccaattcatggacagtccctgatctctggtcactggcacatcctactgaggattctcaggggcacggaatgcagcgaatcactgcacatctgccctggcattgggaggagggggtggtggcctgcatgccaattttttgccatgcatggtttatggtttacagatggacacactggatgtttcagtggacacaaccagccttcaagaagcatgtggacctagagaaagctctgccacctacatgccagcgcatgttcatgctgagaactgcagggaaaaaagaaatggcttatattgactgactaccatcaatgtgccagagaggtcttcttatctcatcttagaggtgagagaacaagtcaacccgctggtaaatgggccaatcagaaatgaaatcagctcatcaccagttccagtcacttttccattttgaaaagcctcctgcatcattctctgcacatatgcagcagatatagacacccaagcacacccctaaggagacagcccacttggactcaaggacattccctgtggcagctctctgaagacagaattatttctttggcagagaaaagcatgctgttccttaagaggacattagaggagaacaacttttctccctactgaaccctttgcacaaatatcttctagaaggacttgttcctcacccactggcccttgattctgtctcactattgaatgaggcttttccaccaaacagctttaaggatggatgtgtgctctggagagagcaagaaacatgtgagagccggtttgctttctgtgggtcagccaacgtctccgccagtcctatgactgtcatttcactgaggattgatatgcctgaagtcactacaaaaacaaatgatgctctgaagctcattccgcccttgcacaaagaagccaaaaaaatagggctctaatttattttagaattggcataatgagacaaaagagtccactgtgggaaatttttgcttatgcaatgaaatttttactctccagctcttt

SEQ ID NO: 464946 - DNA, 1392 bp, Homo sapiens
  misc_feature (1175)..(1175): n is a, c, g, or t
  misc_feature (1178)..(1178): n is a, c, g, or t
  misc_feature (1180)..(1180): n is a, c, g, or t
cgtaacacattacttacaagtttggatgaggttaaaacaaaatgttaactataaaacaacgtcagtcaggtccttcaggaggtatcccagaagaagacattgttaccataggagatgacagttccatgcacactattgtccctgaagaccttatgggacaggatgtggaggtgaaagacagtgatattgatgatcctgaccctgtaggcaaatgctacgctacgctgaattttgtgaatatcattccatgcttttctttgcagctttaccacggtaaatgtatctctacttcattcattttaaatgctatatattcagtataccgtgacagcagtatcatatactttcagggcactgccaatatttcttcaacaattgccatttccgtatacaccagcccttcacctgccaatgcctccattttttgcctgaaggctttctctggccatcagtgactactcagtctgaacacacaacgggctgaaaataccaaggaattaacgtttctcgggagcagttctcaaccaataacttggataaactggaaaaaaatagacaagcttttctttaactttccctacatcctgtcttccttcccggttggaaagcaagctttctgagttcactaccattgactgaagggacatcctttctatactacggtagaactctgtgttctaggtcatccaggctcagccctgggagactataaaacccctgccccatcctcatttgggctgatgccattttcagcctcagcacgcctgcacccaggcgctcattaaaacagcatgttgctccccactgcctcgtgttgtctgttggcgcgctgtcggggttcgaaccgatacaagaaccttccacctacctggtgctttggcctcatctataagcttttccactgtcctgaaacaagatagagaatctgagcggccagtcatctgccctaagtgctgccgccgaagactgaatgtcctggaaagtttgctgtcacatctccattatgacaaaagcattgtgccgaacagatgaaaaaatgcattgtcaacggaatcttttatgtttgtttgtcttcctttaagcaacattgccttacttgttataaaagataaataaatatttgttcatttcaaaaaaaaaaaaaaaaaaaaaaaaaaaaaatttggggggggccnggngncctagaaaaagtttcctaaaacattgcggggggcgcgcgggcaccccgagtatagtgacacggtcccaacggtcttccaaggaaaccggcccagaacagggctggatttctcccaataaaaaagcgcgcgggaacacgaggtttggaacaatccagaggggttgcgaggcccagagggtctatcaccgaggagtccagcgagcgattcaatc

SEQ ID NO: 464947 - DNA, 263 bp, Homo sapiens
tgcaggccattcagtgttccaggtacctaatgagtcattttcttcttcccagtctaccaagcaggatctcaaagcctcctttatctttctgggtgtatacagagtcattaagctcaaatatgtcctttgccaatggacttgagggttgggtttagttattaacttggtgagtctccacccagctaactattctaggaaatcatttggtgagtcaggcattcttgtattcacattgcagcggccagtcatctgccctaagtgct

SEQ ID NO: 464948 - DNA, 1156 bp, Homo sapiens
cgtaacacattacttacaagtttggatgaggttaaaacaaaatgttaactataaaacaacgtcagtcaggtccttcaggaggtatcccagaagaagacattgttaccataggagatgacagttccatgcacactattgtccctgaagaccttatgggacaggatgtggaggtgaaagacagtgatattgatgatcctgaccctgtaggcaaatgctacgctacgctgaattttgtgaatatcattccatgcttttctttgcagctttaccacggtaaatgtatctctacttcattcattttaaatgctatatattcagtataccgtgacagcagtatcatatactttcagggcactgccaatatttcttcaacaattgccatttccgtatacaccagcccttcacctgccaatgcctccattttttgcctgaaggctttctctggccatcagtgactactcagtctgaacacacaacgggctgaaaataccaaggaattaacgtttctcgggagcagttctcaaccaataacttggataaactggaaaaaaatagacaagcttttctttaactttccctacatcctgtcttccttcccggttggaaagcaagctttctgagttcactaccattgactgaagggacatcctttctatactacggtagaactctgtgttctaggtcatccaggctcagccctgggagactataaaacccctgccccatcctcatttgggctgatgccattttcagcctcagcacgcctgcacccaggcgctcattaaaacagcatgttgctccccactgcctcgtgttgtctgttggcgcgctgtcggggttcgaaccgatacaagaaccttccacctacctggtgctttggcctcatctataagcttttccactgtcctgaaacaagatagagaatctgagcggccagtcatctgccctaagtgctgccgccgaagactgaatgtcctggaaagtttgctgtcacatctccattatgacaaaagcattgtgccgaacagatgaaaaaatgcattgtcaacggaatcttttatgtttgtttgtcttcctttaagcaacattgccttacttgttataaaagataaataaatatttgttcatttcaattctgatgagtctgtgagctgtt

SEQ ID NO: 464949 - DNA, 1887 bp, Homo sapiens
tcagttgaatggctgggagagacacttggctgtttatgagaaatattccattacaatctgacgcaaaattagacttttttgggaccttgcttgtatggatgaaaatgaatttaataactgccaacagttggtttgagtttgaggctgggttccactgtgacttcttgttctttgagccgtgctctggggcaaaactcagctgcagcgtggaaatagtaaggcagaaagaggctgaaatccagaagggtgctggtaagattgaccatggtaatgaagaggatcagcacagtttaccgtgtttgcagtgttcttactccactcccgtctcctttctgatgccaaggctcttctatccatccttgactttttaacaaaggacttccctcattaaactgaagagacaaaggagactcctgagggatttagaaattcaatggaaaaagcaaaaaaaacaaaacaaaaaaactctcagagcacttaacttctctcccaaaggaccagagagcctgccaattccccagcaatgccagagctaagcattttcccagtgtcaacattaaatcccttttttgtttttctcttttaaagtgtgtttacaattgaccattatgggaaagatgatggatgtggcctggccccgtttaaaataataaggctaataatgatacagttgtttcgtgcatacggactctttctgaaagcctgtgagcagaaggaaagggttgaggagcccagtgttttcaacttaagtgtagccagctgccgatcatccccacgacccattgctagctataacacttatgctccggcagacttcggaacctcttggctcctgcatgctcttttggagaaaagagcacagaagttttgaatgaatctccagaccctgtccctgagatagcaaggcttagatggacaagcctggagtggacagcttgcattgtgccccatggggactctgccagagaagcgcatgatccttaagacagagatatggctcagtcctgtattccaggagaaagtagactcaatgtttgctcatgaaatgtccctgcgtccagctctgctggtcgtgtccctggcgaagactccccacctatgtagccagcagcatctgtccttggatacaccatcccggctctagcttttccccagtaatcagctggctttcgctggcaggaggacccaggagataggtaaagtgggttgattcagtccttgctgtggaattcagattagactgggaaaggaaaaaattctcctgaccagggatgcaacagtcaggcagtgagaatgaccttcgtgacaatgagccgagataagcctcttggcatgaaacagctcggcaggcaatgatcagtggtctagggattggctacaagtggcccgacccgacccggggagcaaccgagcaccaggaaactaaccagcatgtgaggaacaaaaaaaatctcccaatatgccgaaaacagcctggtgcacagcaaaacttcgttaacaggcggcctggagctgagtgctgtgaagctgaccagaatgaaattgccctgaaagcaacgggactgggtaaaagaaaccggagtaaaatccacctgcctgctagtgtgcaactaaccactgcgagggatgggagaagggagggtctcggagggccgcagggtggaccgggaggagacaggactcctggtgttctggagaacctgaccgagctgcttcggggatgggggagggaggtgtccagtgccttttgatttacaatcgctgcgccccaagcgatcccataaatttgggggccgttttcaccaaaaccgtgacaagactgcaccccccaccaagtcatttagggagggacatgggggtggagggtggaatctggaactggaattc

SEQ ID NO: 464950 - DNA, 2098 bp, Homo sapiens
  misc_feature (1)..(2): n is a, c, g, or t
  misc_feature (4)..(6): n is a, c, g, or t
  misc_feature (8)..(10): n is a, c, g, or t
nntnnntnnnaggggaagaatgccgttattatgttaattaatctggaattgtcactgagaaagttaaagaaattcgagatcgaatacaacgtagagcaaaggagcttaaaaaacactggaccctggggccttctcagccaatgggtgccctggattctccccttcttaggacctccagcagctataatattgcgactcttctttggaccctgtatctttaacctccttgttaagtttgtctcttccagaatcgaagctgtaaaactactaattgttcttcaaaaggagccccagatgcagtccatgactaagatctaccacagacccctggaccggcctgctagcccatgcaccgatgttaatgatatcgaaagcactcccccaaggaaatttcaactgcacaacccctactatgccccaattcagcaggaagcagttagagcggtcgtcggccaacctccccaacagcacttgggttttcctgttgagaggggggattgagagacaggactagctggatttcctaggctgactaagaatccctaagcctagctgggaagaacttatgccccatttttattatgtaactcaacagaatgactcaaagggtgatatttcaggcagcagaatgagctggggtgggggtttgggatcgggagaggaactacctgggcttgagggtttgtttcagcaaaaatctagaataggccacatcattttgcacttaaccatgatgaggacttttattgcatgtatgaatgtccccagaggctattactcaaaagggctcagctaataaataggagaactaataattatcttttttcagattgctgactgtgtgcaactgccgcaaggggtcaaaagtgcttggtttgcacaacatctccccggcattcttacacgtgtggttatggaatcagggtgcagggaagggtcatggagcagagggaattgcatgtgctcgatctttttcacattggagctgctttctgaaacccggcacggggaaggtgagggtgctggatagtttgggggggccacagagtcctgtgggtgttaaatctcggtccccctctggggacttgtccttgcagggtgctcatccaggccttaaaagttggcagcatcccccaggaactaccctgtgaacaaatccaggctttcggaagcacgtgattctgcagaaatgccacattctcttccacatgggctgtgggctctgagtccccctttgcttcctcggcctatgtacctgctgaagaagacagttgtgtcgtgtacatgcaacctaaggaggtaaccttttacccagcctgagacttcagagggtattcatattggggaccagcagcccgtgatgtttgtcccccagagagggggagagagctgctgcctgcagagtggctgctcctgctttgcacggcccctggcttctgcatccctccatcctccagctgggcacagaggttgccaaaagggccagtaggaggagaaggcttcatggaggacgggggcaagagcgggccgaccatgctggcttcctcgccttgtgtctggctgactgcacaggcctgaggaggctgtgtgtaagttggcaaatgacaggaagagcatgtgcttctaatcacccacccatcttaataacgtcgaacagatacagtgcagaaactattgcacaaccaccagcatttcattacatcagaatccttgccaatttgaaagaggtccttgaatccagggagagttacatctttacgtttttgatcacgatcctcttggaagatacttattagggccatttgttgatgacaatattaagaattagcaaatatcttcttaaatataacaaaaattgaattgtttcattagagaactataaagactgtcttcacgtatcagtgcagacaagaaaacagtggctttacaaaaaagatgttcaagtaggctgcactttgcctctgtgggtgaggcacactgtgggagagacaaggtcccctggaaccagaggtgggaaggacagagctggctgactccctgctctcccgcattctctcctccatgtgttttgaagagggaagcaacatgttgaggtctg

SEQ ID NO: 464951 - DNA, 1043 bp, Homo sapiens
cggtaatgaaggctgcggcaggagacccgcctcttaataaggcagcagccaattaacagagcaaatgtttgaggtgtccccgccgagtgatgggatgtcttgtcttctcccagggccctggggcctgtcagtcagacaggcaggaaaggacacgtccttcagaaaggctctcctctcccccgaccctagcaccaccactgagactctctggttgggagtttctagccccaggaatctcaaagccaaagagcacagctgcgcatctgagaaccaagagaattttggcaggagaaggcgaacctccttcctgagagagtggctctccccaccccttcagatggtacctgggaagcacctgctgagcccaccagggtctgggctctggaatggccaggaggaagtgcaggatgtgggccacaggaagagctgtgactgggagacatttgaaactcaggtgttactgccctgtcacaccagcagtagagtctccatcttatgagtcagagctgagtggaagatgagagccccagactgctcagttgcatttgcctggaatttagtctccacagcctggagctggcagggattagttgtgctggcatcctgacctcccagggaaatattatataccttgactggaagctggggaagagggaaccctgtctccttggcacttccatccagaatgaagcttccttcacatttagctggcaaagagagagggagcaagcagatcatggctcaactcaattccacagagaagagatggtgaactcaggcttgtctctggtaaaatcactgtgtgccctgggcccagaacccctgtgtggacccctttcctcccttcagctccaccagtacaatggacccttgtccagaaagggacttctcgtgaataaatttgcctccataatgaccgaataggagaaagttgcacatctaaccacctgtaattatcaaataaaatcctttgtgcccaggtcagctttaatgtatgaattctggggagacacattcggtccatagcagccagccatgatgtt

SEQ ID NO: 464952 - DNA, 693 bp, Homo sapiens
tgtgtatttcaaagaatgcctctcattatgttttctctagatacctcacaagcaccagataaaataaaatgccttcttacattatttcccattttaatattaaaaaaacaaattatttattcacttaaacatagaatctttataagaatctgccaattgttattagagcacaacagattaattattaatgggagtgaaccagatgctttcgcagaggcattgaggaagagaacaggctcttctactgagttgctaaggaaagaacaactaagaggtggagtctctagatttgcccatctgcatctgtctgatccactccacaggaaggcaagaaaacaggggtcccaggaatcttctgcccttctgcccatgactctgcctgcaccagacgacacttactggtgttcactcaagcacagtgtacgtaaactttttggtgtaaagcatgtgtattagtccgtttccatactgctgataaagacacacctgagactgggtaatttataaagaaaaagaggtataatggattcacagttccactttgctgaagaagcctcacaatcatgatggaaggtgaaaggcatgtcttacatggtggccagcaaaagaaaatgagagccaagtgaaaagggaaaccccttataaaaccatcagatctcaggagacttattcactaccacaagaacagtatgc

SEQ ID NO: 464953 - DNA, 2375 bp, Homo sapiens
  misc_feature (6)..(7): n is a, c, g, or t
  misc_feature (13)..(13): n is a, c, g, or t
agtccnnctatcncagctgcagcagtcctgaaggttgatggagggccatgctattcaaacagcaggcgtggctgagacagaagctcctggtgctgggaagccttgccgttgggagtctcctgtatctagtcgccagagttgggagcttggataggctacaacccatttgccccattgaaggtcgactgggtggagcccgcactcaggctgaattcccacttcgcgccctgcagtttaagcgtggcctgctgcacgagttccggaagggcaacgcttccaaggagcaggttcgcctccatgacctggtccagcagctccccaaggccattatcattggggtgaggaaaggaggcacaagggccctgcttgaaatgctgaacctacatccggcagtagtcaaagcctctcaagaaatccacttttttgataatgatgagaattatggtaagggcattgagtggtataggaaaaagatgcctttttcctaccctcagcaaatcacaattgaaaagagcccagcatattttatcacagaggaggttccagaaaggatttacaaaatgaactcatccatcaagttgttgatcattgtcagggagccaaccacaagagctatttctgattatactcaggtgctagaggggaaggagaggaagaacaaaacttattacaagtttgagaagctggccatagaccctaatacatgcgaagtgaacacaaaatacaaagcagtaagaaccagcatctacaccaaacatctggaaaggtggttgaaatactttccaattgagcaatttcatgtcgtcgatggagatcgcctcatcacggaacctctgccagaacttcagctcgtggagaagttcctaaatctgcctccaaggataagtcaatacaatttatacttcaatgctaccagagggttttactgcttgcggtttaatattatctttaataagtgcctggcgggcagcaaggggcgcattcatccagaggtggacccctctgtcattactaaattgcgcaaattctttcatccttttaatcaaaaattttaccagatcactgggaggacattgaactggccctaaaataatatgtcatacaacactatgtgttgtgcctggagacacacaatgtctcctgtagattaaaatatgcacttttcctaggcagagctatccaagtcatttttccatgtatatttgtacatacgcagtgtgtgaccaaatataagatcagttctttttctactgaaaatttacgaaaaaaaaaaaattgctgtctgcatagtcgcatcttttaagctatttacaaaagagaagaggtggtggtattgggggaaagtgacttcagctattctcaaagagttagtcttcctttgattcagaatttgtcacccgccattttcatagatttaagccaaaagataaatgtgtgaaaatgtaccaatggctgcgaagcttcaggaagtagaggatccagtgatgcattttttttttcctaagggaaagctggctctttaattcagatgctgaattggtgccatgaaaacagaaaatgctattttcttattatttaaaagaacgtcttatctcataaaattgacattgttccaaagttcttgtggtgattttgcactattgttttctcgtatggaccatggtgtcacttgtagcatgtcaatcacacattggaaagtcaagtccttttacttccatgttgtatgtcaacagagagaaatgtcatgtacataatgtatattgttgtaaatactggtttcacactaagtaattctattttgtaaactgaatatggctatttaatttattgtgaaaattaaatttattgtggtatttaaaaatggaatggattaaaattactctatgtgcaattttttttttttttactcattttgttttacgtgccccctgctggcttccaaaatggaagctgtttacgtgcatatgagagcacttggaaagatgtgcttccctgctggatttctgtaccccagtgaaaatgtatttatgaagtgaggttgagtatattaaaaaagaaaaacctcaaccatctggaaatcaagtataatagccacctcaaagaaccctagtgctgctctgctacaactttgtaacaattaatttactcgcagttgctgctgctcaggaagagagacaaggaatattttaacagaatcaaggcatagaagaatcaccattttatttgaacctctaatcagagtcagaccagtagagaaattaaataagattagaaaactctgtactgaaagctgctgatgcttcaaaaatgaaaacaagatctcacaactctccctgttagttgaaaatatatcaatttgctctgaaaggattcag

SEQ ID NO: 464954 - DNA, 1125 bp, Homo sapiens
catctagtgaacagaggcccagaatgttgctgaacattctgtgggacgacattccctcaacaacaaagaattgtctggctcataatgtcaatagttccaaagttgaaaaaccctgcactaaaacaattatcaccttgtacccctggggacaaaggtgtttcgatcctagaactgaggcaataaatcaaaagcaagcaaaatggaaaactggtgtgttagtttggattaatcatcctcctctaattgagatttctaatcaaactgagaatacacataatcagccagatcaaaatatcggcttcagtagtggtgaagctggcttggagagcatgtcttgggtgcaaatggaaaaagggttttcctacccttcacatctgcatccccccatggcaagtagctggagatctgcaggcctccctccagtggttctctgaactccaggcttcaagctcaagagagatgggaatgcagtagaaagaaacagagagaaatggaccactcaacctattaacctcagttaataggagtctcatggccatcaaactttcaccaacagaagcaccctctcctgccctgggaggagcatgtaaaagggttatcataaagaccccaaagggatatctcaatactatccactctggaagtggaggattcatgcccctatgggaaagagttcccaggtgatattgatgcagctattctgaagaattacacttggagaaccacggctctaacctagcctcttcaattgaagaagcagacacctctggtgcccatgtcacattcccgaaggcccatttaagttctgtatgtgctcaaagtccccttgcctcaagcacatgccatgcatctatctgccctctgttccagagcaccctcacctatgcacagctctgaagtgcaaaggagttaagaccactgggcctcccatgcttcagatgcaccaatctgggaggattctgcatgctttgtatgaggtcccagcattgttgagccccagttgcccacagcagcaagctctataacacactgccagatttgcctttcttcttcccgtctcacccttcctattctcttgcttttatttcctaagatcacctcctaaataaactacttgcatccaag

SEQ ID NO: 464955 - DNA, 2830 bp, Homo sapiens
ttcacagggagagtcccgcggagcaggagggccgtgcgatgatagtgaaaaacaagaaccatctgccaaagggcttcagcgacctgggtccaggtcatgatggagcactgggcgttgcagaggggccatcccagggcttcggtgccaagaactgcctgggcctggttctcagccctcccaagcgcccgtggactcactcccgtgtgacggccatgggttcctgcatctactacttcttctcggctgttgacggctgtcaccctcgtcttcctgggaagcccagtcaccaagcacctccgcagggggatcctgcccccaccaggatcctgcccccacgcggtcctgcccccatgagaccctgcccccatgcggcccagcccccaccaggatcctgcccctgcatcctccgctgggttggcatctgcatttttggtgtcttccagggaaagggcaacatggctgacaaggccaagcctgccaaagctgccaacaggacgccccccaagtccccgggggacccctcgaaggactgggcagccaagaagctgtcgctggagttggaggacatgtgcaccgagtggtgtggacggccgtctcgcggggctgtggtgctggtcagacctcgtgccactactgcgctttcgatgcagaataattcagcatttggcgacttgaagtcggacgagttggagctgctctactcagcctacggagatgagacaggcgtgcagtgtgcgccgaggcaggtgttggccccggggagcccttggctgctgtccagcttcagctgcgccctggtgtgggacccggagccccacatgtgtgtgggtggggagagggccatcccgcagccgtccagatggcagctcaggtcttcccgttgctttcagtcatccacccagatggacacccgctccgggagccagtgttccgtcaccccagaagccatacgcaacaatgaagagctggtcttgccgccccgcatctccagagtgaacggctggtcgttacccctgcactacttccgggtgcgggaggggttcctggaggaccctgcgatggacctggctgtggggtctgggccatggctgcccggtggcaccagtcacctgtcctgggccagactatgtcccccgagcctgcagtgcagcagtgggctgaagggcccctcgagtgtggccagagtgggcaccgaggccgaggaggtgccgagagtgagcgagggctgccagggctgccagcgtgctgtcacctctcaacaccactgcgtggtccttgggctgggccatcccgggcaagtctctggtaaatggacggcatccccggctgcactccccatgcctgcacctcagcgaccccctcgggccccttggccagcagcatgtggctttgcattgtggcggctggagggtgcctgtgctatccggcacctgcagggacccgggcggctctgggaagtgacctcccaggcccagtggctgcagcccctgaccccaagggaggtgaccggggggatcttctcgttccacctcgtcgtccacctgatcgcgtcctgcatcgacccggccgactccaatgtcagactcatgaagaactattctcagcccatgcccctcttcgacagatcaaaacatgcacacgtgatccagaatcagttctgccacctgtgcaaggtcaccgtgaacaagaaaaccaaacactgcatttcctgcaataagtgtgtgtccggcttcgaccaccactgcaaatggatcaacaactgcgtgggaagccggaattattggttcttcttcagcactgtggcctcggccacagctggcatgctctgcctgatcgccatcctgctgtatgtcctcgtccagtacctcgtgaaccccagggtgctccgcacggaccccaggtatgaagatgtcaagaatatgaacacgtggctgctgttcctccccctgttcccggtgcaggtgcagactctgatagtcgtgatcatcaggatgctcgtgctcctgctggaccttcttggcttggtgcagctgggccagctgctcatcttccacatctacctgaaggccaagaagatgaccacctttgagtatctcattaatacccgcaaagaagagagttcaaaacatcaagcagtgaggaaagatccatacgtgcaaatggacaaaggatttctccagcaaggagctggcgccctgggctcatctgcacagggagtcaaggccaagagctccctgctgatttacaaatgcccatgtcacttctgcacttcagtaaaccaggacggggattcgaaggcacaggaagcagatgatgccccgagtacatctacacttgggctgcaacaagaaacaacagagcccatgaaaactgacagtgctgaaagtgaagactgagattcgggtaagatacgtggcagtgcaggtcatgttgaaatctacccaagtttggttctctagagagtgaaatatcttctttaaaaaatcaccagtgcaaactcaagggctgggctgcttgtcgtttgtctcttgatgtcaacagtaaccccagaacaggaaccgtgtgtccatctttagaagtagtgcatggcagccgagctgggggatcagtcatttcaagccctagagctgaaagaaaaagagaaaaatcactgccgagtatttggagcaacaggttctccctaaatttgtgtgaggtgggtgaccaaaagtccccaagctgagaatttaatagagagtgattctgaactggtcattcccaggagccaagcataattccttctgagtaacaaaccttcatcctaagcctcaaagatttctcacaaataaaa

SEQ ID NO: 464956 - DNA, 2316 bp, Homo sapiens
cagcacttaggaaggggtgggcactgtgaccccggcacttagtgaggaagaggtgggccctgtgaccccagaacttaggaaggggtggatgctggagccctggcacttagtgaccctgttggagcgtcacctcccagatccataaagcagggatcatgaaaaccaacctcagtcagcagggcccatggggcactcaggtaaggaaggtgtccaccagggcagggaggcatccctcgtgctggctgtctccacgccgccccatccccagcaagctctggtctgtgacatccacctgatgtggcacccgtcagcaggtgctggacacagtgtctctcccttgtctccccagatgtcaagaatatgaacacgtggctgctgttcctccccctgttcccggtgcaggtgcagactctgatagtcgtgatcatcaggatgctcgtgctcctgctggaccttcttggcttggtgcagctgggccagctgctcatcttccacatctacctgaaggccaagaagatgaccacctttgagtatctcattaatacccgcaaagaagagagttcaaaacatcaagcagtgaggaaagatccatacgtgcaaatggacaaaggatttctccagcaaggagctggcgccctgggctcatctgcacagggagtcaaggccaagagctccctgctgatttacaaatgcccatgtcacttctgcacttcagtaaaccaggacggggattcgaaggcacaggaagcagatgatgccccgagtacatctacacttgggctgcaacaagaaacaacagagcccatgaaaactgacagtgctgaaagtgaagactgagattcgggagctcaggtgcccctgtgatccaggtcttctaccctgaaaccccaccctccatcaaggtcctgcctgtagagtctaccttgcaaagcctcctgctcctacccatgctacaggccaggaaccagagcccatcatctcagaggcccctggatgtccttcgaaggaaccaggaccctcagagcccagcatccatctctgtcatcatcttcatcacacccaaagaagagccagccttgcaggagggtttacatctccaggaagatgggctgccagcaactgcagaggatgcagccacctgcttaactgtgctgtccagccagccagccagctgcagggcctcttgctgcttaagagctgatgggccgggcatgttggctcacacctgtgagcacagtactgggaaatgggagcatagtactgggaaatgggagcacagtactgagaaatgggagcacagtactgggaaatggtagcacagtactaggaaatgggatcacagtgctgggaaatgggagcacagtaatgggaaatgggagcacagtgctgggaaatgggagcacaaagtactgggaaatgggagcacagagtactggggaataggagcacagtactgggaaatgggagcaaacagcactgggagataggagtatacagcactgggaaatgggagcacggcactgggaaatgggagcacagtactgggaaatgggagcacagtgctaggaaatgagagcacagttttgggaaatgggagcacagtactgggaaatatgagcacagtactgggaaatggaagcacatggcactgggaaataggagtatacagcactgggaaatgggagcacagtactgggaattgggagcacagcactgggaaatgggagcacagtactaggaaatgggagctcacagcactgggaaatgggaacatagtactgggaaatgggagcacagtactgggaaaggggagcccacagtactgggaattgggagcacagtactgggaaatgggagttcacagcactaggaaatgggagcacagtattgggaaatgggagcacaagtactggaaaatgggagctcacagcactgggaaatgggagcatagcattgggaaatgggagcacagtactgggaattgggagcacagcgctgagaaatgggagctcacagtactgggaaatggagcacagtatttggaaatgggagcacagtactgggaaatgggagctcacagcactgggaaatgggacacagtactgggaattgggagcacagtactgggaaatgggagctcacagtactgggaaatgggagctcacagtactgggaaatgggagcacagtattcggaaatgggagcacagtactgggaaatgggagctcacagcactgggaaatggagcatagcattgggaaatgggagcacagtactgggaaatggaagctcacagtcctgggaaatgggagcata

SEQ ID NO: 464957 - DNA, 429 bp, Homo sapiens
gcacccgtcagcaggtgctggacacagtgtctctcccttgtctccccagatgtcaagaatatgaacacgtggctgctgttcctccccctgttcccggtgcaggtgcagactctgatagtcgtgatcatcaggatgctcgtgctcctgctggaccttcttggcttggtgcagctgggccagctgctcatcttccacatctacctgagtatgtcccccaccctaagcccccgatccccccaagcctggttggtcagagctgctcatcttacacctctacttgagtatgtccctaaccctgagccccccacacctggggccagagtctttgtcccccgtgtgcgcatgtgttcagggtcagcctctcccagaagtgagatcatggacaaaaagggcaaatcacaggaagaaattaaatccatgagggcccag

SEQ ID NO: 464958 - DNA, 618 bp, Homo sapiens
cagtcttccctctgtctgtgtctttgttataatctccccttcataaaaggacaccagtcactctggattagggctcactctagtagcctcatctaacatccattacctctttcaagaccctgtctccacatatagtcacattctgaggtactgggtgtcaggatgtcaacctatgaatttggaggaggatatagttcagcccataatacaaggattgggaggaagcgtgctgtgccaccactgagatcctattccatgatccaggcattcttgaagtaccattactcagaactgactagtaatgaacttgaattttgtttaagaataagtttaatgtcaacaaggtctttgttcatcctaagaattttgcttcccttccccccacaggaagcagatgatgccccgagtacatctacacttgggtaagttcgtaagtttaatgggaacgttttatctgtctgtacacttgcctgaactcaaattacctaggaaaatatgttctctatttaacatgttcaaatattctgatgacataagggaaagtagaaatgcttcactgaacatttatagccattcatgtggcttattgcactgatcttacttgaaaaaattatagaa

SEQ ID NO: 464959 - DNA, 1710 bp, Homo sapiens
cccttcgagtgggcccagggctgcagacagcattgtccaaagaagacaccctgactcgatgaatggaacaaactggaaactccagaaacaagcccttctttacatttctggtgtttggcctaaatggaaggtgccaaggaagcagatgatgccccgagtacatctacacttgggctgcaacaagaaacaacagagcccatgaaaactgacagtgctgaaagtgaagactgagattcgggagctcaggtgcccctgtgatccaggtcttctaccctgaaaccccaccctccatcaaggtcctgcctgtagagtctaccttgcaaagcctcctgctcctacccatgctacaggccaggaaccagagcccatcatctcagaggcccctggatgtccttcgaaggaaccaggaccctcagagcccagcatccatctctgtcatcatcttcatcacacccaaagaagagccagccttgcaggagggtttacatctccaggaagatgggctgccagcaactgcagaggatgcagccacctgcttaactgtgctgtccagccagccagccagctgcagggcctcttgctgcttaagagctgatgggccgggcatgttggctcacacctgtgagcacagtactgggaaatgggagcatagtactgggaaatgggagcacagtactgagaaatgggagcacagtactgggaaatggtagcacagtactaggaaatgggatcacagtgctgggaaatgggagcacagtaatgggaaatgggagcacagtgctgggaaatgggagcacaaagtactgggaaatgggagcacagagtactggggaataggagcacagtactgggaaatgggagcaaacagcactgggagataggagtatacagcactgggaaatgggagcacggcactgggaaatgggagcacagtactgggaaatgggagcacagtgctaggaaatgagagcacagttttgggaaatgggagcacagtactgggaaatatgagcacagtactgggaaatggaagcacatggcactgggaaataggagtatacagcactgggaaatgggagcacagtactgggaattgggagcacagcactgggaaatgggagcacagtactaggaaatgggagctcacagcactgggaaatgggaacatagtactgggaaatgggagcacagtactgggaaaggggagcccacagtactgggaattgggagcacagtactgggaaatgggagttcacagcactaggaaatgggagcacagtattgggaaatgggagcacaagtactggaaaatgggagctcacagcactgggaaatgggagcatagcattgggaaatgggagcacagtactgggaattgggagcacagcgctgagaaatgggagctcacagtactgggaaatggagcacagtatttggaaatgggagcacagtactgggaaatgggagctcacagcactgggaaatgggacacagtactgggaattgggagcacagtactgggaaatgggagctcacagtactgggaaatgggagctcacagtactgggaaatgggagcacagtattcggaaatgggagcacagtactgggaaatgggagctcacagcactgggaaatggagcatagcattgggaaatgggagcacagtactgggaaatggaagctcacagtcctgggaaatgggagcata

SEQ ID NO: 464960 - DNA, 811 bp, Homo sapiens
cccttcgagtgggcccagggctgcagacagcattgtccaaagaagacaccctgactcgatgaatggaacaaactggaaactccagaaacaagcccttctttacatttctggtgtttggcctaaatggaaggtgccaaggaagcagatgatgccccgagtacatctacacttgggctgcaacaagaaacaacagagcccatgaaaactgacagtgctgaaagtgaagactgagattcgggagctcaggtgcccctgtgatccaggtcttctaccctgaaaccccaccctccatcaaggtcctgcctgtagagtctaccttgcaaagcctcctgctcctacccatgctacaggccaggaaccagagcccatcatctcagaggcccctggatgtccttcgaaggaaccaggaccctcagagcccagcatccatctctgtcatcatcttcatcacacccaaagaagagccagccttgcaggagggtttacatctccaggaagatgggctgccagcaactgcagaggatgcagccacctgcttaactgtgctgtccagccagccagccagctgcagggcctcttgctgcttaagagctgatgggccgggcatgttggctcacacctgtgagcacagtactgggaaatgggagcatagtactgggaaatgggagcacagtactgagaaatgggagcacagtactgggaaatggtagcacagtactaggaaatgggatcacagtgctgggaaatgggagcacagtaatgggaaatgggagcacagtgctcgtaccggtatcctcttccgtcctttaca

SEQ ID NO: 464961 - DNA, 772 bp, Homo sapiens
  misc_feature (1)..(2): n is a, c, g, or t
  misc_feature (4)..(4): n is a, c, g, or t
  misc_feature (6)..(6): n is a, c, g, or t
  misc_feature (9)..(9): n is a, c, g, or t
  misc_feature (11)..(11): n is a, c, g, or t
nncngnganantaggtgattggtggaaggaaagacaagagctggaaagtctttgggaatgtgcagttatccattcatgctacctcacgggtcccacgtgcaacttcggggcgttatcatgaaaagtatggtggaaatgtgaagttctgggatacatgtgcagaacattcaggaccctctgctgcaggtctgttggagtttgctggaggtccattccagacgctgtttgcctggctatcactagcagaggctgcagaacagcaaagattgctgcctgttccttcctctggaagcttcgtcccagggggcacccgccagatgccagtgggagctctcctgtatgaagtgtctgtcgacccctcctgggaggtgtctcccagtcaggagaatgaccagaccatgcaggcccttgcaactaaaggatgcagcagttaatatttgtggataggcttaagaattccagctactgacaagaccaggccaaaatatttttgggaaggaagatgtttcaatctccctcaaatctatgttggggtttatttctgctgccaaggtctaaaacagctatgaagttgtgtcttactatttcttccagtggcctgcaatccactggaaaccatttcctctgttgtccagcaagcagtttaattgagtactgcagtactcttcttgaggcagtacaagttggggaataaactcaagtaaggggtcatgtcctgtttagaagaaacaatcattttaagagtaaagaatttgttttgactactcctggg

SEQ ID NO: 464962 - DNA, 2958 bp, Homo sapiens
actccctgaacacgttcaggagctgtgtgcagctggaggcctagcactagttggagagacatttttagacttcacaaatgacatcacatcattatgccaaatactttctttcaacaaggttagctcaaaacaaaactcctatattaaaggactcaactggtgcatctcgcctttctgtagcagcaccatctatacctctgcatattctagactttcgagctccagagaccattgagagtgtagctcaaggaatccgtaagaactgcccctttgattatgcctgcatcactgacatggtgaaatcatcagaaacaacatctggaaatattgcatttatagtggagttattaaaaaatatttctacagacttgtctgataatgttactcgagagaaaatgaagggcaaaaactacagtgacagcaaccatcaaagcaacagcaggcatttcacttcggatctgggctacacagcaggagagaacatacctccactctcctccattaaacaatcattaaaatctcatgggaaacttgggttctacacactgcagtctggaaatgctgccctgcgtgcaataataaagcagagctatagtgaagtggccaaccacatcctcgacacagcagccatttcaaactgggctttcattcccaacaaaaatgccagctcggatttgttgcagtcagtgaatttgtttgccagacaactccacatccacaataattctgagaacattgtgaatgaactcttcattcagacaaaagggtttcacatcaaccataatacctcagagaaaagcctcaatttctccatgagcatgaacaataccacagaagatatcttaggaatggtacagattcccaggcaagagctaaggaagctgtggccaaatgcatcccaagccattagcatagctttcccaaccttgggggctatcctgagagaagcccacttgcaaaatgtgagtcttcccagacaggtaaatggtctggtgctatcagtggttttaccagaaaggttgcaagaaatcatactcaccttcgaaaagatcaataaaacccgcaatgccagagcccagtgtgttggctggcactccaagaaaaggagatgggatgagaaagcgtgccaaatgatgttggatatcaggaacgaagtgaaatgccgctgtaactacaccagtgtggtgatgtctttttccattctcatgtcctccaaatcgatgaccgacaaagttctggactacatcacctgcattgggctcagcgtctcaatcctaagcttggttctttgcctgatcattgaagccacagtgtggtcccgggtggttgtgacggagatatcatacatgcgtcacgtgtgcatcgtgaatatagcagtgtcccttctgactgccaatgtgtggtttatcataggctctcactttaacattaaggcccaggactacaacatgtgtgttgcagtgacatttttcagccactttttctacctctctctgtttttctggatgctcttcaaagcattgctcatcatttatggaatattggtcattttccgtaggatgatgaagtcccgaatgatggtcattggctttgccattggctatgggtgcccattgatcattgctgtcactacagttgctatcacagagccagagaaaggctacatgagacctgaggcctgttggcttaactgggacaataccaaagcccttttagcatttgccatcccggcgttcgtcattgtggctgtaaatctgattgtggttttggttgttgctgtcaacactcagaggccctctattggcagttccaagtctcaggatgtggtcataattatgaggatcagcaaaaatgttgccatcctcactccactgctgggactgacctggggttttggaatagccactctcatagaaggcacttccttgacgttccatataatttttgccttgctcaatgctttccagggttttttcatcctgctgtttggaaccattatggatcacaagataagagatgctttgaggatgaggatgtcttcactgaaggggaaatcgagggcagctgagaatgcatcactaggcccaaccaatggatctaaattaatgaatcgtcaaggatgaaatgctgccccatttctcatggatgtcctgagaccaagaggggagatccaggagaaagaggccatggaaagcaggctggagtgaggaggaatggtcatgcttccttggaagactttctcttcttgtcaggagtgactcccaagctcttggtcggccgaagaaaaactgaggataacatttgctgactgggctttaaggagcatgatttatggaccccttaacctacccgtgccctgcaagaggctggcttcttggtcaatcttgactagattaagagtcaatctgcaagccattttatggtctccctggccagctgggggctgtagggccctgctgggcttggtcgtctttcactcctgaggcctgctctgtggctccatagctcagtcctccatcactctgcgtggatcctgggtactttggacagtgagggttcgatccaattttaggggtagggttgggggtgggagtgggagtgtgggttggcaggaggaagaatgagtctactttggagacaattaagtcatggtacgtttcctaaagatagggaacggaagaaaagcaagagaactgtttaatatgctgattattttagtctattttagaccttgagtaaactaatttagcttctaggatccaagtttccttatttgtgaaacaggaaaaaaaaattcttgtaggtattactgtttgtgtgtttgagtttactgcacatgtttgtgtttgtgtatatgtgtcttttaaaaatactatatataaagaagattctggttgttattttagacataaacgaatatatgtacctttcacaacttgcgcatgtgtgagttcattt

SEQ ID NO: 464963 - DNA, 4057 bp, Homo sapiens
gcagcagccagtctagatggcccgccactgccatgactcttggataagcacaagaatacagagagcatggtggagcttctggacttgtatcagatggaggatgaagcctacagcagccttgcagaagctacaaccgaactctatcagtatttactacagccattccgagacatgagagaacttgccatgctacgaagacagcagatcaagatttccatggagaatgattatctgggacctcgaagaattgagagtctacaaaaagaagatgctgattggcagcggaaagctcacatggctgtactgtctattcaagatcttactgtcaagtactttgaaataacagctaaagctcaaaaagctgtgtatgatcgaatgcgagctgatcagaagaaatttggtaaagcatcatgggcagcggctgctgaacggatggaaaaactccagtatgcagtttctaaggaaactttgcagatgatgagagctaaagagatatgcttggaacagcggaaacatgcactaaaggaagagatgcagagtttgcggggtggtacagaagcgatagcacgattggatcagttagaagctgattattatgatctgcaacttcagttgtatgaagtacagtttgaaatcttgaagtgtgaagagttactattgacagcgcaactagaaagcatcaaaagacttatatcagaaaaaagagatgaagtggtatactatgacacttacgaaagcatggaggccatgctggagaaggaagagatggcagcatctgcgtacttacagagagaagagctgcagaaacttcagcagaaagcacgccagctggaagcaagacgtggacgggtttctgccaagaaatcctacctcagaaataaaaagaacactggggaacatttgaaagtgtgtgcagaagaacgggatcaaagagaaagggtaatcgaagttggaagaagcaggagagctcgaagtcatagaagtgaagatgatgattccacacaacaggatgagtttcgagaaaagttgtgggcaaggagtagatcttggtggtctgagaagggagtgcagcagaggtttaaagcagtgactgacggaatagcaaaggaaactgtacaggaaatatgtattgcaaaacacaatgaaaaaatccaacagcgcactcggattgaagatgaatatagaacccatcacacagtacaactaaagagagaaaaattacatgatgaagaagaaagaaaaagtgcctgggttagccaagagagacagagaacactggatagacttcgaacatttaaacagaggtatcctgggcaagtcatacttaaatcaaccagattacgactagctcatgcaagaagaaaaggtgcagcaagtcctgttctccaagaggatcattgtgactctttaccaagtgtgttacaggtagaagagaaaactgaagaggtgggagaaggaagagtcaagcgtgggccatcacagacaacagaaccccagagccttgtgcaacttgaagatacttcattaacacaacttgaagccacctcattacctctcagtggtgttacctctgaactgcctcccactatatctcttccacttttgaataacaacctcgaaccatgttctgttaccataaatccactcccatcccctcttcctccaacaccaccacctcccccacctcctccccctcccccaccaccaccacctctgcctgttgctaaggacagtggcccagagacactggagaaagatctgcctagaaaggaggggaatgagaagaggatcccaaagtcagccagtgccccctcagcacacctctttgacagcagccagctggtcagtgcacggaagaagctcagaaagactgctgaaggtttgcagaggaggagagtgagctcacccatggatgaggtgctagcctccttgaagcgtggtagttttcatctgaaaaaggttgaacagcgaactctgcctccttttcctgatgaagatgatagtaataatatcttggcacaaataaggaaaggggtaaaattgaagaaggtacagaaggatgttttgagagaatccttcacacttctacccgatacagaccctctaacacggagcatccatgaagctcttagaagaattaaagaagcatccccagagtcagaggacgaagaggaggctttaccttgcacagactgggagaactaacaagtgacataacagaagaaaaatatcattcaagattggttctgattcttttggaaaatgacagtttaagcacttggttcctcagttggataacattagatccaaagttcattggttcagtggtgtgaagaaaggaagcacaattggcaggttatcactttccagtcgttccaatagatgatggttaacatgaattttacatgtgcaatgttcctgactgcaatgaagaaaaggccttctggagatttctgttttttaagcacattctccttccatccacatatttacatccttgtaatggccagttaagctagggcttgctgtaagttggaagaacactgggttgacagagatctactgtgagctgtattgggactgctttgagaaccatctttcaatgcactgaaaagtcatctgaaaaaatagcttcttccatatcagcttatattaaatactgtgacactctgagaaagtttatcatcatgatagctgtaagtcaggcattaaaatcaaatggaaatacacctaaaatgtccgcattactcatttccaaaggatttttcataaagatgttcagcaacatctgaaaagctgcatttatggagatacatctattaatatgttcacaacatgatacatttaacatggcatatttttaggagtcttatactttgtaaggttttgaagtttccgtgcttttaaatcactcttcatatttcttgaatttataatagtttgaattttatgtgcatccttgtttatggaaggcagtactttgataatatttcaaattatttttattttgtttgaattattgcttgattgctatgactgacatgactttcctattgagaatcaaaaatcaagattcaatcatagggatgcagatcttaactcttttcacaaattaccattttaagtttttatttttatgctccacagtgaaaagcatgtgctctacaaagatagaaagtagagacaagtctccgtggctggcatttcaccatcttcacatgcactgaatggaattttgggagaatgcctttgttatagtcactaaaattttaaacttatacacagctttaggtgctgattttggctgtgatggagtcctgaaggacacatttatatgttccagattttcagcaggattgttgtgggcttgaatacatgtagatcattggactcagtgtgcagtaccctgtacatataattctgcataagacagatcttggcctttctgtggagggagttaagaactaaaataccaaaaatcactttatttcttttaagacaattatctggcctaaacccagaaagcagtactggagcaaaagcccagtgtatatgaattggtattcctagagaaaaaaagaaatgctcacacctttgttattttaaagtgttttcttgaaaataattagggagaaaattttctggcaacaggttatgtaagacaacaactttttttattatttcaaaacaaaacaggcacatgccaccatgccccagctaatttttatattttttatagagacagggttttgccatgttgcccacgctggtcttgaactcctggactcaagcaatctgtaaccccagcactctgggaggccaaggcgagccgatcacttgaggtcagcagttcgagaccagcctggccaacatggcgaaaccccatctctactaaaaaatgcaagaattagccgggcatggtggcatgtgcctgtaatcccagctactcaggaggctgaggctggagaattgcttgaacctgggaggcagaggttgcagtgagctgagatcacaccactgcactccagcctgggcaacagagcgagactctatctca

SEQ ID NO: 464964 - DNA, 1935 bp, Homo sapiens
agctcggtaccctttctctgatcgcatccccagagtcagaggacgaagaggaggctttaccttgcacagactgggagaactaacaagtgacataacagaagaaaaatatcattcaagattggttctgattcttttggaaaatgacagtttaagcacttggttcctcagttggataacattagatccaaagttcattggttcagtggtgtgaagaaaggaagcacaattggcaggttatcactttccagtcgttccaatagatgatggttaacatgaattttacatgtgcaatgttcctgactgcaatgaagaaaaggccttctggagatttctgttttttaagcacattctccttccatccacatatttacatccttgtaatggccagttaagctagggcttgctgtaagttggaagaacactgggttgacagagatctactgtgagctgtattgggactgctttgagaaccatctttcaatgcactgaaaagtcatctgaaaaaatagcttcttccatatcagcttatattaaatactgtgacactctgagaaagtttatcatcatgatagctgtaagtcaggcattaaaatcaaatggaaatacacctaaaatgtccgcattactcatttccaaaggatttttcataaagatgttcagcaacatctgaaaagctgcatttatggagatacatctattaatatgttcacaacatgatacatttaacatggcatatttttaggagtcttatactttgtaaggttttgaagtttccgtgcttttaaatcactcttcatatttcttgaatttataatagtttgaattttatgtgcatccttgtttatggaaggcagtactttgataatatttcaaattatttttattttgtttgaattattgcttgattgctatgactgacatgactttcctattgagaatcaaaaatcaagattcaatcatagggatgcagatcttaactcttttcacaaattaccattttaagtttttatttttatgctccacagtgaaaagcatgtgctctacaaagatagaaagtagagacaagtctccgtggctggcatttcaccatcttcacatgcactgaatggaattttgggagaatgcctttgttatagtcactaaaattttaaacttatacacagctttaggtgctgattttggctgtgatggagtcctgaaggacacatttatatgttccagattttcagcaggattgttgtgggcttgaatacatgtagatcattggactcagtgtgcagtaccctgtacatataattctgcataagacagatcttggcctttctgtggagggagttaagaactaaaataccaaaaatcactttatttcttttaagacaattatctggcctaaacccagaaagcagtactggagcaaaagcccagtgtatatgaattggtattcctagagaaaaaaagaaatgctcacacctttgttattttaaagtgttttcttgaaaataattagggagaaaattttctggcaacaggttatgtaagacaacaactttttttattatttcaaaacaaaacaggcacatgccaccatgccccagctaatttttatattttttatagagacagggttttgccatgttgcccacgctggtcttgaactcctggactcaagcaatctgtaaccccagcactctgggaggccaaggcgagccgatcacttgaggtcagcagttcgagaccagcctggccaacatggcgaaaccccatctctactaaaaaatgcaagaattagccgggcatggtggcatgtgcctgtaatcccagctactcaggaggctgaggctggagaattgcttgaacctgggaggcagaggttgcagtgagctgagatcacaccactgcactccagcctgggcaacagagcgagactctatctca

SEQ ID NO: 464965 - DNA, 1896 bp, Homo sapiens
catccccaccgaggatggcacatactaacgcgggggggggggcttttgtgacataacagaagaaaaatatcattcaagattggttctgattcttttggaaaatgacagtttaagcacttggttcctcagttggataacattagatccaaagttcattggttcagtggtgtgaagaaaggaagcacaattggcaggttatcactttccagtcgttccaatagatgatggttaacatgaattttacatgtgcaatgttcctgactgcaatgaagaaaaggccttctggagatttctgttttttaagcacattctccttccatccacatatttacatccttgtaatggccagttaagctagggcttgctgtaagttggaagaacactgggttgacagagatctactgtgagctgtattgggactgctttgagaaccatctttcaatgcactgaaaagtcatctgaaaaaatagcttcttccatatcagcttatattaaatactgtgacactctgagaaagtttatcatcatgatagctgtaagtcaggcattaaaatcaaatggaaatacacctaaaatgtccgcattactcatttccaaaggatttttcataaagatgttcagcaacatctgaaaagctgcatttatggagatacatctattaatatgttcacaacatgatacatttaacatggcatatttttaggagtcttatactttgtaaggttttgaagtttccgtgcttttaaatcactcttcatatttcttgaatttataatagtttgaattttatgtgcatccttgtttatggaaggcagtactttgataatatttcaaattatttttattttgtttgaattattgcttgattgctatgactgacatgactttcctattgagaatcaaaaatcaagattcaatcatagggatgcagatcttaactcttttcacaaattaccattttaagtttttatttttatgctccacagtgaaaagcatgtgctctacaaagatagaaagtagagacaagtctccgtggctggcatttcaccatcttcacatgcactgaatggaattttgggagaatgcctttgttatagtcactaaaattttaaacttatacacagctttaggtgctgattttggctgtgatggagtcctgaaggacacatttatatgttccagattttcagcaggattgttgtgggcttgaatacatgtagatcattggactcagtgtgcagtaccctgtacatataattctgcataagacagatcttggcctttctgtggagggagttaagaactaaaataccaaaaatcactttatttcttttaagacaattatctggcctaaacccagaaagcagtactggagcaaaagcccagtgtatatgaattggtattcctagagaaaaaaagaaatgctcacacctttgttattttaaagtgttttcttgaaaataattagggagaaaattttctggcaacaggttatgtaagacaacaactttttttattatttcaaaacaaaacaggcacatgccaccatgccccagctaatttttatattttttatagagacagggttttgccatgttgcccacgctggtcttgaactcctggactcaagcaatctgtaaccccagcactctgggaggccaaggcgagccgatcacttgaggtcagcagttcgagaccagcctggccaacatggcgaaaccccatctctactaaaaaatgcaagaattagccgggcatggtggcatgtgcctgtaatcccagctactcaggaggctgaggctggagaattgcttgaacctgggaggcagaggttgcagtgagctgagatcacaccactgcactccagcctgggcaacagagcgagactctatctca

SEQ ID NO: 464966 - DNA, 4157 bp, Homo sapiens
gcagcagccagtctagatggcccgccactgccatgactcttggataagcacaagaatacagagagcatggtggagcttctggacttgtatcagatggaggatgaagcctacagcagccttgcagaagctacaaccgaactctatcagtatttactacagccattccgagacatgagagaacttgccatgctacgaagacagcagatcaagatttccatggagaatgattatctgggacctcgaagaattgagagtctacaaaaagaagatgctgattggcagcggaaagctcacatggctgtactgtctattcaagatcttactgtcaagtactttgaaataacagctaaagctcaaaaagctgtgtatgatcgaatgcgagctgatcagaagaaatttggtaaagcatcatgggcagcggctgctgaacggatggaaaaactccagtatgcagtttctaaggaaactttgcagatgatgagagctaaagagatatgcttggaacagcggaaacatgcactaaaggaagagatgcagagtttgcggggtggtacagaagcgatagcacgattggatcagttagaagctgattattatgatctgcaacttcagttgtatgaagtacagtttgaaatcttgaagtgtgaagagttactattgacagcgcaactagaaagcatcaaaagacttatatcagaaaaaagagatgaagtggtatactatgacacttacgaaagcatggaggccatgctggagaaggaagagatggcagcatctgcgtacttacagagagaagagctgcagaaacttcagcagaaagcacgccagctggaagcaagacgtggacgggtttctgccaagaaatcctacctcagaaataaaaagaacactggggaacatttgaaagtgtgtgcagaagaacgggatcaaagagaaagggtaatcgaagttggaagaagcaggagagctcgaagtcatagaagtgaagatgatgattccacacaacaggatgagtttcgagaaaagttgtgggcaaggagtagatcttggtggtctgagaagggagtgcagcagaggtttaaagcagtgactgacggaatagcaaaggaaactgtacaggaaatatgtattgcaaaacacaatgaaaaaatccaacagcgcactcggattgaagatgaatatagaacccatcacacagtacaactaaagagagaaaaattacatgatgaagaagaaagaaaaagtgcctgggttagccaagagagacagagaacactggatagacttcgaacatttaaacagaggtatcctgggcaagtcatacttaaatcaaccagattacgactagctcatgcaagaagaaaaggtgcagcaagtcctgttctccaagaggatcattgtgactctttaccaagtgtgttacaggtagaagagaaaactgaagaggtgggagaaggaagagtcaagcgtgggccatcacagacaacagaaccccagagccttgtgcaacttgaagatacttcattaacacaacttgaagccacctcattacctctcagtggtgttacctctgaactgcctcccactatatctcttccacttttgaataacaacctcgaaccatgttctgttaccataaatccactcccatcccctcttcctccaacaccaccacctcccccacctcctccccctcccccaccaccaccacctctgcctgttgctaaggacagtggcccagagacactggagaaagatctgcctagaaaggaggggaatgagaagaggatcccaaagtcagccagtgccccctcagcacacctctttgacagcagccagctggtcagtgcacggaagaagctcagaaagactgctgaaggtttgcagaggaggagagtgagctcacccatggatgaggtgctagcctccttgaagcgtggtagttttcatctgaaaaaggttgaacagcgaactctgcctccttttcctgatgaagatgatagtaataatatcttggcacaaataaggaaaggggtaaaattgaagaaggtacagaaggatgttttgagagaatccttcacacttctacccgatacagaccctctaacacggagcatccatgaagctcttagaagaattaaagaagcatccccagagtcagaggacgaagaggaggctttaccttgcacagactgggagaactaacaagtgacataacagaagaaaaatatcattcaagattggttctgattcttttggaaaatgacagtttaagcacttggttcctcagttggataacattagatccaaagttcattggttcagtggtgtgaagaaaggaagcacaattggcaggttatcactttccagtcgttccaatagatgatggttaacatgaattttacatgtgcaatgttcctgactgcaatgaagaaaaggccttctggagatttctgttttttaagcacattctccttccatccacatatttacatccttgtaatggccagttaagctagggcttgctgtaagttggaagaacactgggttgacagagatctactgtgagctgtattgggactgctttgagaaccatctttcaatgcactgaaaagtcatctgaaaaaatagcttcttccatatcagcttatattaaatactgtgacactctgagaaagtttatcatcatgatagctgtaagtcaggcattaaaatcaaatggaaatacacctaaaatgtccgcattactcatttccaaaggatttttcataaagatgttcagcaacatctgaaaagctgcatttatggagatacatctattaatatgttcacaacatgatacatttaacatggcatatttttaggagtcttatactttgtaaggttttgaagtttccgtgcttttaaatcactcttcatatttcttgaatttataatagtttgaattttatgtgcatccttgtttatggaaggcagtactttgataatatttcaaattatttttattttgtttgaattattgcttgattgctatgactgacatgactttcctattgagaatcaaaaatcaagattcaatcatagggatgcagatcttaactcttttcacaaattaccattttaagtttttatttttatgctccacagtgaaaagcatgtgctctacaaagatagaaagtagagacaagtctccgtggctggcatttcaccatcttcacatgcactgaatggaattttgggagaatgcctttgttatagtcactaaaattttaaacttatacacagctttaggtgctgattttggctgtgatggagtcctgaaggacacatttatatgttccagattttcagcaggattgttgtgggcttgaatacatgtagatcattggactcagtgtgcagtaccctgtacatataattctgcataagacagatcttggcctttctgtggagggagttaagaactaaaataccaaaaatcactttatttcttttaagacaattatctggcctaaacccagaaagcagtactggagcaaaagcccagtgtatatgaattggtattcctagagaaaaaaagaaatgctcacacctttgttattttaaagtgttttcttgaaaataattagggagaaaattttctggcaacaggttatgtaagacaacaactttttttattatttcaaaacaaaacaggcacatgccaccatgccccagctaatttttatattttttatagagacagggttttgccatgttgcccacgctggtcttgaactcctggactcaagcaatctgccagcctcggcctgctaaagtgctaggattataggctgcagcttttctgcattgtaattgtattgctttgtatttcatgttttttacactcatgacttcagagttaagtacttgtacaccaagtattgcaatcacctttctcttgttgtacatgcaatgtaacaacctacagttttggtgcttttaacaatattcctctttttctttaataaaggatatttatttgaattaattaacctgattttgtttgtttaaaatatcagtggtacatattttcacttcatttcaaataggaggaccatagcaagttgtatatctgttatgacaaaagttataacatggagaacaggatccagaga

SEQ ID NO: 464967 - DNA, 1520 bp, Homo sapiens
aatcagtggtgtttactcagacttaaacaaagtagctggacctatgcaccaggacccggaggacaggattttctccaactactattctatgggactgtgtccagcctgcctggattctacaagcagtgttcattgccttattggaacagatgtcattgtaaatgtacccaccgattctgctatcatatggcagcagcattcttcctccactcacatagtttatgtccagccctctgccaatgagaagatatggctggctggatatcaagactgtcagtcattctgcctcatccataaatttcacagcctgggatacagagctcatcaatgccataaggaagttgaggacttagactgtgtcagaggaaatctttttggcatgggtctgaagatggaagctggagctgtacacgggctaactctcatgggctactatcaaacagtgagggaaacccacagtctcagagagaaatgtcttctgtgccatttgcagttaccttgctaatgagatgagtccacagagaagagggagcgtctcggcaggcactccagagctctcaccaaatgaggcactgcctattaagcagcatgaaagtacctaaagactgcccataaaacaggaacaaagaaaacaaagctcagtttcacctccagccaaaaaggagtcttcatgacctatcaatatgtaagatgaatacagatcatgctgactttcctcagagaaaagtctaataaaaaatgtccttatcaatatctgcttgaaatctagtttatatggaaaatggagagcataatacacttcaaaatgctactagtatctactacagtgcttatgtcctataaaatccctatggacaaaaacaattttacctgtgaataaaaattagaaatgaaagaggtaggtgactatcatttgaagataatcccaaaacaacatgttgaataatatgcttgagtccccaaagagctctttaactggacaatgagttccaacatcggtgcaatttccttaagagcagagtttcccagatatttcatgatgtcttcaacctttcaatgccccaactcctgatacagtgccacactcttcagacatttaatattaagaaatagctaatgaagtaaaatgtaaagaagtaatactggagaccaaagggtgaggtgatgctgaagtcagctaggctcttcaaaaatctataccctagtatagaggaaagcacatttgagctggacaggacgttagagattcatctaatccaactctctggttttacaaatgaagaaatagaagcttattttttccactggctcacaaaacactaacatcctgaaaagatgctataaatccacagttaacttacttaattagtcaatgatgtagccaagtggctatattttcagcccttatccctgtgggctgttttataaagtgagccactggtaacagagaagctgaccaaggccctagatgcacctgggggcagactgtcagcaagagaaaaacaatttgaaatgtcaga

SEQ ID NO: 464968 - DNA, 1052 bp, Homo sapiens
tgttcagtgttgctgctgaattctcacaaagaccccttcataatctttgttcacaaacagggagcgtctcggcaggcactccagagctctcaccaaatgaggcactgcctattaagcagcatgaaagtacctaaagactgcccataaaacaggaacaaagaaaacaaagctcagtttcacctccagccaaaaaggagtcttcatgacctatcaatatgtaagatgaatacagatcatgctgactttcctcagagaaaagtctaataaaaaatgtccttatcaatatctgcttgaaatctagtttatatggaaaatggagagcataatacacttcaaaatgctactagtatctactacagtgcttatgtcctataaaatccctatggacaaaaacaattttacctgtgaataaaaattagaaatgaaagaggtaggtgactatcatttgaagataatcccaaaacaacatgttgaataatatgcttgagtccccaaagagctctttaactggacaatgagttccaacatcggtgcaatttccttaagagcagagtttcccagatatttcatgatgtcttcaacctttcaatgccccaactcctgatacagtgccacactcttcagacatttaatattaagaaatagctaatgaagtaaaatgtaaagaagtaatactggagaccaaagggtgaggtgatgctgaagtcagctaggctcttcaaaaatctataccctagtatagaggaaagcacatttgagctggacaggacgttagagattcatctaatccaactctctggttttacaaatgaagaaatagaagcttattttttccactggctcacaaaacactaacatcctgaaaagatgctataaatccacagttaacttacttaattagtcaatgatgtagccaagtggctatattttcagcccttatccctgtgggctgttttataaagtgagccactggtaacagagaagctgaccaaggccctagatgcacctgggggcagactgtcagcaagagaaaaacaatttgaaatgtcaga

SEQ ID NO: 464969 - DNA, 3355 bp, Homo sapiens
tgcctgcagagctccttgagctccacctctgaactccctttcagcagccggcacaggcataacagcccagcccacagaggtgctccctgggactggtcctacttcctctgccacctctgatcccaaggtgactctgccaaaatctgggggatgccagcgcttgtgacggtgtgaccagggaggggaagtgtaagtgtctggccgtccgtggtggcggggccagcaggctgtcccagccctcacccggagctcctcacccggcaccacatctgtgttttcccaggacccacgcagccacccagcctcagcactcatctgcgcagccatggaggccctgggacctgggggcgaccgcgcctccccggcctcgtccactagcagcctggacctgtggcatctgtccatgcgcgcggactcggcctacagctctttctccgcagcctccggcggccccgagccgcgcacgcagtcgccggggacagacctccttccttacctagactgggactacgtgcgtgtggtttggggcggcccgggccccgccccgcccgacgctgccctttgcacatccccgcggccccggcccgcggttgcagcccgcagtgggccgcagccaacagaggtcccggggaccccgggaccactgaacaggcaggccaccccgctgctgtacgcgctggcggccgaggcggaggccgcggcgcaggctgccgagccgcccagcccgccggcctcgagggccgcctaccgccagcggcttcagggcgcgcagcggcgagtgctccgggagacgtcgttccagcgcaaggagctccgcatgagcctgcccgcccgtctgcggcccactgtcccagcgcggcccccggcgactcacccgcgctccgcctcgctcagccacccgggcggggagggggagccggcgcgctcccgggctcccgcgccaggaactgccggccggggtcccctcgccaaccagcagcggaagtggtgcttctcagagccaggaaagctggatcgtgtgggtcggggcggtgggccggcgcgggaatgcctgggtgaggcctgctccagctctggcctccctgggcccgagcccttggagttccagcatccggcgctggctaagtttgaagatcacgaggtcggatggctgcccgagacgcaaccccaaggctccatgaacctggactccgggtccttgaagctcggtgatgccttcaggcccgccagtcggagtcggagcgcttcaggcgaagtcttgggttcctggggaggatcaggagggaccatacccattgtccaggctgttccccaaggagcagaaacccccagaccattgtttcagaccaaactttccaggttcttgcctcagaaagaggctgcggtgatgtatcctgcagagttaccccagagcagccctgctgacagtgaacagagggtctcagagacctgcattgtgcctgcctggctcccctcccttcctgatgaagtgttcctagaagaggccccactggtcagaatgagatcaccaccagacccccatgcctcccaggggcccccagccagtgtccatgcctctgaccagccgtatggaactggcttaggccaaagaactggccaggttacagtccccacagagtacccgctccatgagtgtccaggaactgcaggggcagatgactgctggcagggggtgaatggttctgtaggtatttccaggcccacaagccacacccccactgggactgcaaatgataacatcccaactattgaccccactggactgaccaccaatccccccacagctgcagagagtgacctcctcaaacctgtcccagctgatgccttgggactttcaggcaatgatactccaggtccctctcacaatactgccctagccaggggcactggccagcctggttccaggcccacatggcctagtcagtgcctcgaggagctggttcaggagctggccagattagatccctctctatgtgaccctcttgcttcccagcccagcccagagccacccctgggcctgctggatggactgattcctttagcagaggtccgggctgcaatgcggcctgcctgtggggaggctggagaggaggctgccaggaatctggacactgagcccctgaagttggggacaggaaacccagggagctctggttttgttcccaggtcctatcagttcagcttcacccagctcctgccggctcctcgggaggagacaaggcttgaaaaccctgccacccaccctgtgcttgaccagccatgtgggcaggggctccctgcaccaaacaacagcatccagggcaagaaagtggagctggccgcccgcctccaaaagatgcttcaggaccttcacacggagcaggagcggctgcagggggaggcacaagcgtgggccaggcgccaagcggctctggaggctgcagtgcgccaggcctgtgcccctcaggagctggagcggttcagccggttcatggccgacctagagcgcgtgcttggccttctgctgctgctgggcagtcgcctggcgcgcgtgcgccgcgccctggcccgggcggcctcagacagcgaccctgatgagcaggcctccctgctgcagcgactccggctcctgcagcggcaggaggaggacgccaaggagctgaaggagcacgtagcgcggcgcgagcgggccgtgcgggaggtgctggtgcgagcactaccggtggaggagctgcgcgtctattgcgccctgctggcgggcaaggccgccgtcctggcccagcagcgcaacctggacgagcgcatccgcctccttcaggaccaactggacgccatcagggacgaccttggccatcatgccccgtctcccagcccggcgcggcccccagggacctgtcctccaccgccggcacccctgccccatcctccttcctggctgcctgccgcggtgctttcgggcttttgggggagcacaggccgcggctggcatcgttgctgggcaacaggcagccccgcggccgcctccccagctcgcttattccgcccccgctgctcctcctaacatggatttaatcagtgtactttttaccttcaggctgtaaattagaaacggaacagggaagccatgcttcagtttcctcactttaaaatcaagatacaaatagtacataccttataaacttgcgattaatacctgcaaagtgtttcgaattgtgcctggcacttaatcagcacaggttatacagtatatgcattaccctggatctccattaggtaagggagacatgcttaagaataacctccaacctccattaaaggatatgtaaaactttacttaaaagcttgctatggatac

SEQ ID NO: 464970 - DNA, 3262 bp, Homo sapiens
agcccagcaggcccgagcaaaactcggtctttacatcctcggacttctgagggtgggggaaccatgcccccacccccgtggctcccgggccttttcatggccttttccttccttttttgggacccattgctaagcagcagttccttgccctgctggggctgggacgcatggcccaagggtcccacacagctggctggctggttcccaaccacaagccaccgcagccttcccctttcctggccaaagggtttagctttatcggacagaaaactctgacccatttccccaaaacagtgccccctgtcagcaggaagcagttaagatcagtcttcatccttatccttaatctaatggcagttagatgtacttctttagagggggaagtgagacagccaggtgggagggggtcctcagagaaactccaggtcctcggagaaactctagccatcctacccactgaggtggagcctcgggaagttcacgccctttgcagcatggcctgcctggcccctcctcttccttccctggaaaccagggattccaacagcaacctaaattttcatggctgtggaatggagaagaaacctgtctttagccgaactaaggaaagtcctgcaacagtttcatgagtgttttcttcttgtcatttagatcaaactcatcaattcctagaagaatcttgttcattccctagttcaagctgcttctcattcgttgagtctctctctaacacattatcctatttgtgcctgtcatggtacactgtacctaaaatgattgaatagtttctttgataatttagtttcctgccattagaatataagcttattaaagacaagtttactgtttgtcttgttcattcctatatccccatcacccacaacacaacccattccccgtcttgcataccactgccatttagtttatttggttgacagttgccgtgatctctgtattcagttcaggatatgcatcctttggatttatagtggcattctgatcaggaatatcagcatcattcttttctgtggattattcatctgtgaggctctaaatggttttgtttatgtgtttgtttttgttcaaaggtcagctcaatcttatatttaattctgaaaaatatgacatgacaaatgttaattataattattattcacttgtgcttgacaaatactgctttctaaagaaaaattatcattgtgatactatttctttaaaaccccaaaatgtaaccagtggacttctctctagtatactatactaagacttcaatacttctaagctattgttttcgttttttattactcaaactgtttatatatggagactgcttatcagataaattcattctgggctttttgcaattatacttcaactagcattcttaccttaaaaagctaatagtattgtgttttaataaaattgaataaaactcaaatatacccagttttcacaatctttttaaaagagtctattgacagcaatttttagttggaatttttatcagaaatatcctccaaaccaaaagctttggacaaaatatttagtttgatttatttggtcattattgtggctgtaaatgtttgtgtttatgtaaactgtttttgtctacatggtattgaaacatgaattttttttgtctcaactaaaaacaattgtattccaagatatcttgaagtgtcttcacgtgtgtaaaatagtacttcagcattactgtatttacaatgatattaattataggtagatccatcctatgtggtaaaatgaaaaggactctaatatttctggtcttaaactgttatgcagtttcaacaatgaaagtttattatttggggctaattgttttttaattccagggcttaaaatatatgtgattattattaattacgattataaagacaattttattatttaactgtatctaggaaaatgaaggaattgaaaacaaacttcaacttggccaaaatttagcctagagctattgcctgaaaaataagtagaacccatagcaaacaagcattgtgtgaatcatgtagtgttttgttttgcattgccatacctgtcaatcagcctaaactgttgattgtccatgtaaacacataacataataatgttaaacatttttttaaaggcagtccaaaatacagggcatagtgttattggtggaagttactggtgatgaaggagaatgtaaaattgttttaattctctttacatttttcattgctccattttaaatacattttaatagacattcattatatttagaaattaaatgtttgggatatctaaataaacattagttcagttatttttcccttttgtcttttacatctgaaaccttttaggctttgacctagattcagattcagtggcactaatcactaatacttaacaaaaaaacaattaaaatgtgaagtatgctaatgtcttgcttctttgaatattctacccctgaggattatttgtttttaattcccatcactttttaacagcactcctaggaaacatttaacaatagttttaaataaaggtaattttttgaaagaataataaacttagcaagataatttttatattcaaggatatagtcaaatgcattttctaaaagacattttatttattaggcaaaattagagttttacaagtgacataatggtataggctattattctatgacagtttaataaaatattggctaatttaggtatataaagaagattttgctttgtgcattatagactaattgacttaaattattttaaaatattttcttacatttaaatattttcctttaggacatgaatcataagcattcaaattgcctactagaaaattgtgtaatgtcataaataaagtataacagttaaatttttggtggacctattttatctgaatacagtaagttagtatgattgtttcagatatctcaggataagtacaaaatctacattgtgaatacccccaaaggtactcactcagaaacacagtttgtacacttacaaagataacatccttcacaaaagaaaagaaagcagtttgcataaatcttaataatttgaaataaatcatattatatacaacaggaattgaaatgaaattatatgattaagtaaattacctttagcctgtgttctactgagaatacacataacaacaacaaactttaaactcagcccaattcctgaaacgttaatgcaagcaagtataataaaggtttagcagaagaagtatgctttaaacatcaaatgctcagtctcta

SEQ ID NO: 464971 - DNA, 668 bp, Homo sapiens
aaacctattcaggaagagccacatcacaaaataaacttttttattttctaacaaaattaattttaatgtaactatatttaactgtatagattgaccttaaaacaagaagaagaaaagagaaaggatgctgatatgttgtataaaaaaggtagtgaagagttaaaaagaaaagaagaggaatatgggaaagatgttgaaattaaccaacaactgaaacggactctgaaaacacgagccatggaattgaggacagtaagaaagaatttggatcagatttctcttagccataagaaagaaaaaggtctcttgcatgaaaatagcatgttgcaggaagaaattgccatgctaagactggaactggatacaataaaacatcagaatgagataaaggaaaagaaatattttgaggacattgaaagtgtgaaagaagagcatgataatcttctaaaggctataacattgaatgaggaagcattagcaaaaacagtatttcagtacaatggacagcttagcattttgacaactgagaataaaatgctcagttctgaactgaagaatgtaaaacacaacaaggaatgactggaaacagaaattcaatcatttcatgatagactggttgctgctttacatgattgtgaccaaagtcagatagcagaaagagagtcttt

SEQ ID NO: 464972 - DNA, 1384 bp, Homo sapiens
gcctataagccaatctgggcagcagagacttgcttctgaaaggatgggcccctcagttgaatgctttcttctgaggaggcgagagctgaggttgctgcagacccatacaaatttgctgccactaacaggagtgctgttaatgattactctgggacaggaatacatagcgggggcgattgcaggcaaactgacacttaacattcaccccacttccagaatcagcagttactgtacgccagcacctttcactctccaaggagactgctcagctacagcaggaagcacagggatcttaaaacataaactcacagtgctccccacattgatctcccacacaaacccatctctcctgtcagggactgtgggcttcgtgactttctccatgtgctggactgtcgcatggtcactgttgccagggactctttgaactaatcccaagcctatgtcagaaaagcctgtgatcgattcccagtgccatcctgaaccacaagattggaatatcgcacctttcaactgcctgggctgataaacaatacagcatgtactcagcttcataaacactctgccttgttacaaagggcattgcaaactcgccgtgataggacttgaccttaaaagctatagacaatctagcggagcacagacggtttcataaagtacaatcacttcctggaattcttgggccagtgcagtcggagccgtgcaaatcctgttttccttgcattgtttcctgcatgtgaatatcatcagtctagcagtctctctctgtcaccaggctggagtacagtggggcaatctcggctcactgcaacctctgcctcccgggttcaagcgattctcctgcctcagcctcccgagtagctgggactgtaggtgcacgccaccatgagcagttattttttgtctttttagtagagacgaggtttcactatgttggccaggctggtcttgatctcttgacctcgtgatctgctggcctcagccttccaaagtgctgggactatagccgtgagccaccatgccaggcccatctaacttttaatatagattgtatgatgttttcataaaacaagcagggctcagaaaggccgtataaagccacagagccagcaagcagcagagtctgcattttaatccatatgttcatggcttcaaagcaatgttatttaactctaacaatgcaattgaactaacaactgacatcagacacaaatattctgaagaacctggagaaatagaaaagaattggatagaactgatggctcatgggcagaagctgtgcatcaggaagaggaaataaatggcattgttcagccatgaagccatataatttcaacctgactttccttctctattgtcctgtctcattgtctagcttgaaatg

SEQ ID NO: 464973 - DNA, 2023 bp, Homo sapiens
gagtgaaggaagcccaggagccaaggcagggaggcaggtcttttgcccagaaaaacaaccaaagtcccttttactggttaatggcatggcacgaacactggcatgtttacaatggtgtccaggaggatgtaaggtctgactccaccaatagtgacattacagccaaactgttcctgctgaaaaataaattgattagtttcctgtgtggaaccttctatacagtttttcctgcatttttcgaagcctggtcctttagctgccagtcaattctaaaagtctactggcccctggatagagcatctgaatctctgggaactgagatacagaactgtgtttatctcatctttcacgcctctcctagatgccctccttttccagctaaagtttcccagtgtggaggattaatacaagaggaaggcatgcagacagacaggcaaatggctctgaaagatgagagccccatgtcacaccagcagacaggaaccaatgggacacggttcggtggactcctggtttagaatccaagaatgctttttctttactgcctagtttaaggctcagaataaagaaatgtatttgggatgccaaccccagatctgctccctttgtgacgcggtcttgctctgtcacacaggctggaatgctgtggcgcgaacttggctcactgcaacattcacctccggggttcgagcaactctcctgcctcagactcccgagtagctgggattacaggcgcctgccaccatgagtacatgttttataaaggtcaacagagaaggaagagtaggatgatctcactgaatgttttcaaaggctaagctgaggaatagcttgcctcacccacacccattggccagaacccagtcagctggccccaatttaactggaaaaatgtctaggacgtggcattgtttctgttgtgagaaatcaggaaaggcctcccagaagaaggaccggacatgtagaggaagtaccctgccttctcaggaagtatcttgggacaaccaaataaatggaggatttccagctctctaaatccttcagctcccttacaattgccttatttgagctcaggcagtgtttaactaaccagtacagcacatacttaatccattaatttggtttatattttccgtttacttattctaccaaggacaggcatttatggagtatttactatgtgtgagtttcagaacaggctgtatacaaagataatcatggtattgttatttccctcaaggatgtttaatctagttgaaaaaataagacagatatgtagagtattaagtaataacacaataaagacaatgttgaaccacctcaaaggtgtaaacaatagaaaatttattatttcatgtagaaaacagttgaatggtttgaagactgggcaattaggtaatttggtggctcacaaatgccatctaggaccaggttatttccatctttctgctctgctatcctagggtttgctgtagtgtcccattttgtatgtaaacatgactatattcagtggaagaagagagagaagaagtacatttcctttctgtatgtcccttttcaggagtaaggagtccttcccaaaattccccagcagattctcttctttatcatataatgtcaagtccatgcctaaaataatccctggccaaaagatgaatctagtcatattttatttcctgtgactagaactcactttatctgaaagacagaagaacaaaatcaagactctgttacaaggtgttccatgctgggcaggtctatgcaaacctacccccaaagtccaaggaagctgagaggtggaagacagaagctgacatatgcagtttctctgaaagaaacatttaataggaacttaggaagagaagccatgtctgcgtctcaagtggtggtgagaggagatgatggatccctgtgccattactccccaaagccagaacttatatgtcatagggaaggggtatatgtgattcagatgggatgtgtaggacaagtgaggtatgataacatcaaggttgttttaacc

SEQ ID NO: 464974 - DNA, 5160 bp, Homo sapiens
ggttaaggcaggaaccagccattttcacttattttgtggttcttcagttgcctcaggccatctggatatatacgtgcagacttgggctcagaggcctgacaaggattttctcccacggccacatcaacccacctacgcaattgcatctgtgcccgaatacacgctcttcacttctgttactatgggtgaaccatctgtgctctgggccgaggccaacctctctatgtgtacattagatcccaccctctctccaaaagatagggtctggctctgttgccgaggcgggagtgtagtggatctgcttcaaaacacggatgcccacaaaagagcattccatgaaatctaccggaccaggtctgttaacgggattccagtgccacctgatcaattagaggacatggccgagaggtttcattttgtttcctccacatcagagctacacctaatgaaaatggaatttttagaattaaagtaccgtctgctctcactgctggttcttgcagagtcaaagctgaagtcttggatcattaagtacgggaggagagagtcagtggagcagcttctacaaaactacgtgtcttttatagaaaatagcaagttctttgaacaatatgaggtgacataccagatcttgaaacagacagctgagatgtatgtcaaagcagatggttcagtggaagaagctgagaatgtgatgaaattcatgaatgaaaccaccgctcagtggaggaatctctcagtagaagtgaggagtgtgaggagcatgctggaagaagtgatctctaactgggatcgctatggcaatacagtggctagtctgcaagcctggctagaggatgctgaaaaaatgctcaatcaatcagaaaatgccaaaaaggatttttttcgaaatttacctcattggattcagcagcatactgccatgaacgatgctggcaattttctaattgaaacctgtgatgagatggtttcccgtgacctgaagcagcaattactgttgctaaatgggcggtggagggagttgtttatggaagtcaagcaatatgctcaagctgatgagatggacagaatgaagaaggaatacacagactgtgttgttaccctgtctgcttttgcaacggaagcccataagaaactttctgaacccttagaagtctcttttatgaatgtcaagctattaattcaagacttggaggatattgagcagagggtgcctgtgatggatgcccaatacaagataattacaaagacagcacacctcattaccaaagaaagcccccaagaagaaggaaaagaaatgtttgcgaccatgtcaaagctcaaagagcagctaaccaaggtcaaagaatgttactccccactcctttatgagtctcagcagctgttgattccgttggaggaattagaaaagcagatgacgtccttttatgactcacttgggaaaatcaatgaaattatcacagttcttgagcgtgaggcacaatcgagtgccctttttaaacaaaaacatcaggaactgttagcttgtcaagaaaactgtaagaaaaccttgacacttattgagaaaggcagtcaaagtgttcaaaagtttgtgaccttgagcaacgtgttaaagcattttgatcagacgaggctacaaagacagattgcagatattcatgttgcttttcagagtatggtaaagaaaactggagattggaagaagcatgtggaaaccaacagtcgcttgatgaagaagtttgaggagtctcgagcagagttggagaaggtactgcggattgctcaggagggcctggaggaaaagggggatccagaggagctcctgcggagacacactgagtttttcagtcagctggatcagagggtgctcaatgctttcctgaaagcttgtgatgaactcaccgacatccttccagagcaggagcagcaggggctgcaggaagctgttcgaaagctccacaaacaatggaaggatcttcaaggagaagccccttatcatttgcttcatctgaagattgatgtggagaagaataggttcttagcctctgtagaagaatgcagaactgagctggatcgagagaccaagctgatgccccaggaaggcagtgaaaagataattaaagagcacagggttttcttcagtgacaaaggtcctcatcatctctgtgagaaaaggttacagctcatcgaggaactctgtgtgaaactcccagtgcgggacccagtaagggacacacctggaacctgtcacgtgactctcaaagagctcagagctgccattgacagcacctacaggaagctcatggaagacccagacaagtggaaggactacactagcagattctctgagttctcatcttggatatctacaaatgagacacaattaaaggggatcaagggtgaggccatcgatactgccaaccacggagaggttaaacgtgccgttgaagagatcagaaatggtgttaccaaaaggggtgagaccctcagctggctgaaatccaggctgaaagttttgacagaagtttcttctgagaatgaagcccaaaagcagggagatgagctggcaaaattatccagctctttcaaggctcttgtgacgctgctgtcagaggttgaaaagatgctaagcaattttggggactgtgtccagtacaaagaaatagtcaaaaattctctcgaagaattaatttctggctctaaagaagtccaggaacaagctgagaagatcttggatactgaaaatctgtttgaagcacagcagttacttcttcatcaccagcaaaagacaaagcggatctcagcaaagaagagagatgtgcagcagcagatcgcgcaggcgcagcagggagaaggggggctgcctgaccgaggccacgaggagctgcggaagctggagagcacactggatggcctggagcgcagccgggagaggcaggaacgccgcatccaggtcacattaagaaaatgggagcgatttgaaacaaacaaagaaacagtagtaagatacctttttcaaacaggttccagtcatgaacgcttcttgagttttagcagtttggaaagtttatcttcagaactggaacaaacaaaggagttttctaaacggacagaaagtattgcagtccaggctgagaaccttgtaaaggaagcttcagagataccgcttgggccccaaaataagcagctgcttcaacagcaggccaagtcaatcaaagaacaagtcaaaaaattagaagacacgcttgaagaagagtatgtgattgacaagtcctaaactttcttctctgagataaagtttcatacaatctttcctgtaccttgtattcaaaacactcttttaaaatctcaaagtgtctgtgtatttcagcatgttttgaggaaacaactcacagttcaaaagaaagtatcgctaatacagaaaccaatatctataacagagcccaaaaaatataaaggatgtgggttttgcatcttaaactgatcatgttcatgagaaagccatatctattctattctgtggcctttgtacattgtagagggaatcttgaaaaagaactaatatttaaaataatttttttactatattattctgctgtcaccatttagagcgaaaaggagatattttgttagtgtagattccaggcctaaatacacatcacatagaccatatatctccaacctgaagaagctcctggagcttgtttacagtgcctcggtattcaagttatcctgactaatatgctctttccagaaattaactttaaaatattttatttttaaacttttaatgtttgtttatctgaaaaaaaaaaactgcttggcctattgatatcctgttatatacccaaaatatacaaaaaagtttggaggggaaaaacatatgaggatacagccaatattattcaaaacaatatggctaaacatttctatttttaacataatttagtggcaaatcaatgatacataatagcatattattattaagggacaggccatcatttctaaggtgggttttaaaatgtaaaatgtgtttttaatactattaacagcttaaaattaacattttacatttgcctaaactttaaaatttgatacatattttatttaaaacaaattatgacttgaaattttgaggactttatattacattaaatattctctatcaagttatggaaatagtaaaacagagtttattagaaaggaatttacttctattaagaatagccattttaacctttatttaatttaaaaagttgcaatataacacagcttgcattacctgtactgctgacagcattaggcacattcagggtataaatttgagactgcaatattatttaatttgacagtcaatgatgccactctatttttcttgatgtcttcaagtgccttttgatgtttaaagaatgcattttataattacattaaaagttatccataaaaggtaggtatgccattttctcagtaacttttttttttgtcttgctatgtatctttcccactgttatttttatattgcaccaatgttttagatccagcaatctgtgtctgaatttgaagataaacttgctgttccaattaaaatatgttcttcagctacagaaacatacaaagttcttcaagaacatatggtaagagtatgcttcaacatttctactatttaccaacttaaaatttgataattcccacttgaaaagaaaatacagtaaactttttaagagaattgaaattggaaaaatgtttatattagttgagtaattatatagatctaatgtattcactttatataatccaagacatgtaaggatgtgaataaattttcattaaagatgtatattaaaggagtattcatttcaaatacatttctctcttttaattaggatgagtaacatttttagagcttagctttaacaaccctgttacctcttgccagcattataaaaaagtacatgtgcaaggaaaaatatatgtgtatagctgtcttcatattttaacccactgtactcagatgtttaaggaatatatcctcactgatctgtttccaatgattggtttttctcatcattgcgaatcttctgcaaggctacagacagatggctctggcagaatttagggggaggaacaaagggggataattacgtacaaagaaatactacc

SEQ ID NO: 464975 - DNA, 4890 bp, Homo sapiens
acaacggaaacttgagcaacataaggatctgcttcaaaacacggatgcccacaaaagagcattccatgaaatctaccggaccaggtctgttaacgggattccagtgccacctgatcaattagaggacatggccgagaggtttcattttgtttcctccacatcagagctacacctaatgaaaatggaatttttagaattaaagtaccgtctgctctcactgctggttcttgcagagtcaaagctgaagtcttggatcattaagtacgggaggagagagtcagtggagcagcttctacaaaactacgtgtcttttatagaaaatagcaagttctttgaacaatatgaggtgacataccagatcttgaaacagacagctgagatgtatgtcaaagcagatggttcagtggaagaagctgagaatgtgatgaaattcatgaatgaaaccaccgctcagtggaggaatctctcagtagaagtgaggagtgtgaggagcatgctggaagaagtgatctctaactgggatcgctatggcaatacagtggctagtctgcaagcctggctagaggatgctgaaaaaatgctcaatcaatcagaaaatgccaaaaaggatttttttcgaaatttacctcattggattcagcagcatactgccatgaacgatgctggcaattttctaattgaaacctgtgatgagatggtttcccgtgacctgaagcagcaattactgttgctaaatgggcggtggagggagttgtttatggaagtcaagcaatatgctcaagctgatgagatggacagaatgaagaaggaatacacagactgtgttgttaccctgtctgcttttgcaacggaagcccataagaaactttctgaacccttagaagtctcttttatgaatgtcaagctattaattcaagacttggaggatattgagcagagggtgcctgtgatggatgcccaatacaagataattacaaagacagcacacctcattaccaaagaaagcccccaagaagaaggaaaagaaatgtttgcgaccatgtcaaagctcaaagagcagctaaccaaggtcaaagaatgttactccccactcctttatgagtctcagcagctgttgattccgttggaggaattagaaaagcagatgacgtccttttatgactcacttgggaaaatcaatgaaattatcacagttcttgagcgtgaggcacaatcgagtgccctttttaaacaaaaacatcaggaactgttagcttgtcaagaaaactgtaagaaaaccttgacacttattgagaaaggcagtcaaagtgttcaaaagtttgtgaccttgagcaacgtgttaaagcattttgatcagacgaggctacaaagacagattgcagatattcatgttgcttttcagagtatggtaaagaaaactggagattggaagaagcatgtggaaaccaacagtcgcttgatgaagaagtttgaggagtctcgagcagagttggagaaggtactgcggattgctcaggagggcctggaggaaaagggggatccagaggagctcctgcggagacacactgagtttttcagtcagctggatcagagggtgctcaatgctttcctgaaagcttgtgatgaactcaccgacatccttccagagcaggagcagcaggggctgcaggaagctgttcgaaagctccacaaacaatggaaggatcttcaaggagaagccccttatcatttgcttcatctgaagattgatgtggagaagaataggttcttagcctctgtagaagaatgcagaactgagctggatcgagagaccaagctgatgccccaggaaggcagtgaaaagataattaaagagcacagggttttcttcagtgacaaaggtcctcatcatctctgtgagaaaaggttacagctcatcgaggaactctgtgtgaaactcccagtgcgggacccagtaagggacacacctggaacctgtcacgtgactctcaaagagctcagagctgccattgacagcacctacaggaagctcatggaagacccagacaagtggaaggactacactagcagattctctgagttctcatcttggatatctacaaatgagacacaattaaaggggatcaagggtgaggccatcgatactgccaaccacggagaggttaaacgtgccgttgaagagatcagaaatggtgttaccaaaaggggtgagaccctcagctggctgaaatccaggctgaaagttttgacagaagtttcttctgagaatgaagcccaaaagcagggagatgagctggcaaaattatccagctctttcaaggctcttgtgacgctgctgtcagaggttgaaaagatgctaagcaattttggggactgtgtccagtacaaagaaatagtcaaaaattctctcgaagaattaatttctggctctaaagaagtccaggaacaagctgagaagatcttggatactgaaaatctgtttgaagcacagcagttacttcttcatcaccagcaaaagacaaagcggatctcagcaaagaagagagatgtgcagcagcagatcgcgcaggcgcagcagggagaaggggggctgcctgaccgaggccacgaggagctgcggaagctggagagcacactggatggcctggagcgcagccgggagaggcaggaacgccgcatccaggtcacattaagaaaatgggagcgatttgaaacaaacaaagaaacagtagtaagatacctttttcaaacaggttccagtcatgaacgcttcttgagttttagcagtttggaaagtttatcttcagaactggaacaaacaaaggagttttctaaacggacagaaagtattgcagtccaggctgagaaccttgtaaaggaagcttcagagataccgcttgggccccaaaataagcagctgcttcaacagcaggccaagtcaatcaaagaacaagtcaaaaaattagaagacacgcttgaagaagagtatgtgattgacaagtcctaaactttcttctctgagataaagtttcatacaatctttcctgtaccttgtattcaaaacactcttttaaaatctcaaagtgtctgtgtatttcagcatgttttgaggaaacaactcacagttcaaaagaaagtatcgctaatacagaaaccaatatctataacagagcccaaaaaatataaaggatgtgggttttgcatcttaaactgatcatgttcatgagaaagccatatctattctattctgtggcctttgtacattgtagagggaatcttgaaaaagaactaatatttaaaataatttttttactatattattctgctgtcaccatttagagcgaaaaggagatattttgttagtgtagattccaggcctaaatacacatcacatagaccatatatctccaacctgaagaagctcctggagcttgtttacagtgcctcggtattcaagttatcctgactaatatgctctttccagaaattaactttaaaatattttatttttaaacttttaatgtttgtttatctgaaaaaaaaaaactgcttggcctattgatatcctgttatatacccaaaatatacaaaaaagtttggaggggaaaaacatatgaggatacagccaatattattcaaaacaatatggctaaacatttctatttttaacataatttagtggcaaatcaatgatacataatagcatattattattaagggacaggccatcatttctaaggtgggttttaaaatgtaaaatgtgtttttaatactattaacagcttaaaattaacattttacatttgcctaaactttaaaatttgatacatattttatttaaaacaaattatgacttgaaattttgaggactttatattacattaaatattctctatcaagttatggaaatagtaaaacagagtttattagaaaggaatttacttctattaagaatagccattttaacctttatttaatttaaaaagttgcaatataacacagcttgcattacctgtactgctgacagcattaggcacattcagggtataaatttgagactgcaatattatttaatttgacagtcaatgatgccactctatttttcttgatgtcttcaagtgccttttgatgtttaaagaatgcattttataattacattaaaagttatccataaaaggtaggtatgccattttctcagtaacttttttttttgtcttgctatgtatctttcccactgttatttttatattgcaccaatgttttagatccagcaatctgtgtctgaatttgaagataaacttgctgttccaattaaaatatgttcttcagctacagaaacatacaaagttcttcaagaacatatggtaagagtatgcttcaacatttctactatttaccaacttaaaatttgataattcccacttgaaaagaaaatacagtaaactttttaagagaattgaaattggaaaaatgtttatattagttgagtaattatatagatctaatgtattcactttatataatccaagacatgtaaggatgtgaataaattttcattaaagatgtatattaaaggagtattcatttcaaatacatttctctcttttaattaggatgagtaacatttttagagcttagctttaacaaccctgttacctcttgccagcattataaaaaagtacatgtgcaaggaaaaatatatgtgtatagctgtcttcatattttaacccactgtactcagatgtttaaggaatatatcctcactgatctgtttccaatgattggtttttctcatcattgcgaatcttctgcaaggctacagacagatggctctggcagaatttagggggaggaacaaagggggataattacgtacaaagaaatactacc

SEQ ID NO: 464976 - DNA, 899 bp, Homo sapiens
agctctaataatagaaacagttcttgcccggcagcatgggattgagatcacgagctctgtcttgattgataagatgcagtttataaaggtatttctatagaaagcatcactgcagtgtctctcctttaagtgtaagaagaacatttctttggaaataggactattgaaaagctgtgtacactgaaatcttttctggcatagtttataaaaataagtcctggcaacaactggtcacatgcagagtttaattagattctacctggattcaaacccctttggacccagcaatgttttgttcaaagtgcagtttcactcaaagtgtagatactgcctcattaaatgttcattctcagagaagataggaaaacctgataaactactcagaacaactgtgcaattttttttttagcgtgaatagtttcaactttgaaatggtcacaaatgtcttcattatctcttcacctggtgatttcaaggaaaatgtgttgttgttctctattaacaatactgagtttatttacttaatttggttaattttagtattaaaaccatggaaatggtgaaaaccaagtgggatcattttggcagtaattttgagactctgtccgtctggataactgagaaagaaaaagaactcaatgccttggaaacttcgtcatctgccatggacatgcaaatcagccaaattaaggtcacaattcaggaaatagaaagtaagctcagcagcattgtaggattagaagaagaagcccagtcttttgctcagtttgttaccactggagaatctgctcgaattaaagccaagttgacacaaataagaagatacggggaagagcttcgagagcatgcacagtgtctggaaggaacaatcctgggacatttatctcagcagcaaaagt

SEQ ID NO: 464977 - DNA, 2144 bp, Homo sapiens
ggttaaggcaggaaccagccattttcacttattttgtggttcttcagttgcctcaggccatctggatatatacgtgcagacttgggctcagaggcctgacaaggattttctcccacggccacatcaacccacctacgcaattgcatctgtgcccgaatacacgctcttcacttctgttactatgggtgaaccatctgtgctctgggccgaggccaacctctctatgtgtacattagatcccaccctctctccaaaagatagggtctggctctgttgccgaggcgggagtgtagtggatctgcttcaaaacacggatgcccacaaaagagcattccatgaaatctaccggaccaggtctgttaacgggattccagtgccacctgatcaattagaggacatggccgagaggtttcattttgtttcctccacatcagagctacacctaatgaaaatggaatttttagaattaaagtaccgtctgctctcactgctggttcttgcagagtcaaagctgaagtcttggatcattaagtacgggaggagagagtcagtggagcagcttctacaaaactacgtgtcttttatagaaaatagcaagttctttgaacaatatgaggtgacataccagatcttgaaacagacagctgagatgtatgtcaaagcagatggttcagtggaagaagctgagaatgtgatgaaattcatgaatgaaaccaccgctcagtggaggaatctctcagtagaagtgaggagtgtgaggagcatgctggaagaagtgatctctaactgggatcgctatggcaatacagtggctagtctgcaagcctggctagaggatgctgaaaaaatgctcaatcaatcagaaaatgccaaaaaggatttttttcgaaatttacctcattggattcagcagcatactgccatgaacgatgctggcaattttctaattgaaacctgtgatgagatggtttcccgtgacctgaagcagcaattactgttgctaaatgggcggtggagggagttgtttatggaagtcaagcaatatgctcaagctgatgagatggacagaatgaagaaggaatacacagactgtgttgttaccctgtctgcttttgcaacggaagcccataagaaactttctgaacccttagaagtctcttttatgaatgtcaagctattaattcaagacttggaggatattgagcagagggtgcctgtgatggatgcccaatacaagataattacaaagacagcacacctcattaccaaagaaagcccccaagaagaaggaaaagaaatgtttgcgaccatgtcaaagctcaaagagcagctaaccaaggtcaaagaatgttactccccactcctttatgagtctcagcagctgttgattccgttggaggaattagaaaagcagatgacgtccttttatgactcacttgggaaaatcaatgaaattatcacagttcttgagcgtgaggcacaatcgagtgccctttttaaacaaaaacatcaggaactgttagcttgtcaagaaaactgtaagaaaaccttgacacttattgagaaaggcagtcaaagtgttcaaaagtttgtgaccttgagcaacgtgttaaagcattttgatcagacgaggctacaaagacagattgcagatattcatgttgcttttcagagtatggtaaagaaaactggagattggaagaagcatgtggaaaccaacagtcgcttgatgaagaagtttgaggagtctcgagcagagttggagaaggtactgcggattgctcaggagggcctggaggaaaagggggatccagaggagctcctgcggagacacactgagtttttcagtcagctggatcagagggtgctcaatgctttcctgaaagcttgtgatgaactcaccgacatccttccagagcaggagcagcaggggctgcaggaagctgttcgaaagctccacaaacaatggaaggtgagtcaggacaggacggagacaccgtgcatcctcaatgaagggagaagcttgagcgtgttaaggtccaaatgtaagagaaatttagaaattcctggaaagtcactgtaactatttcgctcatttaaaaactcaaaaaactggacttaaataaaacctgataatatatgat

SEQ ID NO: 464978 - DNA, 1905 bp, Homo sapiens
gagaggagctcgaacaaggaagcggcgggaggaggagatttccttgcaacaaatgtgccaaacctgagtgaatcattcgtagcaaaagtgcagtgtcaagcggctctctcttccaccgcccaagatgccaaaaggaaaaaaggggaagaaggtggctccggcccctgctgtcatgacgaagcaggaggccaagaaagtggtgaatcccctgtttgagaaaaggcctaagaattttggcattggacaggacatccagcccaaaagagacctgacctgctttgtgaaatggccccgctgtatcacgttgcagtggcagatagccatcccctataagcggctgaaagtgcctcctgcgattaaccagttcattcaggctctgaaccaccaaacagctactcagctgcttaagctggcccacaagtacaggccagagataaagcaaggagaagaagctgaggctgttggcctgactgagaagaaagctgctggcaaaggggatgtccccattaagagactacctggcctttgagcaggagttaagactgtcacaccttggtggagaacaagaaagctcagctgctagtgattgcacacaacgtgtggcacacaacgtctggttgtcttcctgcctgccctgtgttgtaaaatgggggtcccttactacattatgaagggggaagcaaaactgggacatctagtccacaggaagacctggatcattgtcaccttcacacaggttaacgtggaagacaaaggagctttggctaagctggtggaagctatcaggaccaattacaacatatatgatgagctccgccatcactgggaaggcaatgtcctgggtcccaagtctgtggctcatattgccaaagcttgaaaaggcaaaggctaaagaacttgccatcaaactgggttgaatgtacactgttgagttttctgtacataaaaataattaaaaaatcaaggattccacatttactttgaatccctggtttcttccaaaagggaaatgccacaagactaggccgtgcaacatttccgcagtgctcctcgctacaaagacattcccctaaggctggtgggcaactcaacactcagctcagtacgtggtcagctcgtcctccataggagccttatgccttggtgaggagatctctgaagaaattgctgatgaaagtccaacaggctcttccagtttgtctggtcggtcacatttgctgaaacctggaggaattgttagtggaagctcaacaggcctgactcagtctgactgtccattcttctggaagctgcagagaaaagaaacctggaaaccttatatgctgacaaaaagggacacaattggatatgatggttattttaccaaggttttgaaatgtcgtgctttcaaatataaacagactgctttaaggaatcgaagttgacttatagagccaataaaagccctgcaggaaagctggcctcatactttgtctacacagtctctgtacaggtttcctgacctgtgtttgttaatatggtaaattacattgcttgatttaccaatgctaattcaaccttgcattcctaggataagcccctgtttggttataatgtattatcttttttatatatttttatgtatttatatatttatatatcttttttatataatctactttttactgccttgtctcatgtaaacctgtgtaatttcccattgggtccaccttaggaaacagtctttaaagttttctccgtaaagcaagtaccagtatactcttttatggtcaatacaatgctaattcaaccttgcattcctaggataagcacctgtttggatataatgtattatcttttttatatactgtgaaataaaagtgactagaattgtgcatattatgtttatgagagatattggtccat

SEQ ID NO: 464979 - DNA, 3176 bp, Homo sapiens
cgcggtggcgcacgtctgtaatcccaacactttgggaggccgaggtgggcagatcacgaggtcaagaattcgagaccagcctggccaacatggtgaaaccccgtctctactaaaaatacaaaaattagccgggcgtggtggtgcgctcctgtaacctcagctactcagaaggctgaggcaggagaatcacttgaacccgagaggcagaggttgcagtgagccgagatcgcaccactgcactcaagcctgggtgacagagcaagactctgtctcaaaaaaataaaaaatagacattaaaagaatcctgggaagacattaccgagtggaagatgcacgtgttctttgtgttcttatctcttctggagacactgaggagacttcctgtggctgatgtcagtgtgcctcatactggggaaaattgcagcccccggatggaagctgctctgaccaagaatactgtggacattgcagaaggcctggaacaagtccagatgggaagcttacctggaaccatttcagaaaattctccatctcctagtgaaagaaacagacgagtaaattcagacctagtgaccaatggattaatcaataaaccccaatccctagagagtcgagagcgacagaagtcatcagatatcctggaggaactaattgttcaaggaattatacaaagccacagcaaagtatttagaaatggagaatcatatgatgtcacggcaagtaattttgtaattaacattagcttatagttaaaattagcaatagaatatgattgatcatgagtcattatttccagcatatgcaagttacaatacagataacagcatttatttaagtcagatttttctcccttaaattccccccacatctctgcacaccatctcatatggtttggttctgtgctcccacccaaatctcaccttgaattgtaatcctcaggtgtcaagggcgggaccaggtggagatatccttaacatatatatgtgcagagtagatatctgggaagacacacactgaactctttacaaaggttcatgctaaggactgggattgggggccatgtggttaaatagaggataaggagatgatttatgtatcagttatattttttataatcaatctatattatcttaaaactaatttttaaaacaaaacaccttaaaactttcttcataaatactttatgacaattttacttattttggaactagaaattataattagaaagtcatcattactgctttgaactgttgaaagggtagttgatcatatgaagtgggatttttcccccgctgtcatgaaaatgtttgtcaagttcctccagcaaagcccagaacagagttgttgttcagtaatcgttaattatctctttctaccacaaaaccagaagcaatgagaactaatctctatcccagatgaaagtaacttgtagcttgtggaatattataaaatcatcaggttgaactcttcaccttaaactacaaattcacccccattctccactgcttttcatcttatattcattctcaagattttttccttctaagggttcatcttctatgcagtctgagaacacctgcattcatagggcctttttgtaatagcctggtgcttttaaggcatctaaaagatcttatcgttataattctgttgttatcaactttcacgttggtttttttaatctgcgcctggaaagttagatttttagaatttactttattcatttatttatttatttatttagagacagggtctcgctctgttgccaaggctggagtgcagtggaacgatcttggctcactgcaacctccacctcctgggctcaagcgatcctccaccctcagcctcccaagtagctgggactacgggcacacaccaccatgcctggctaattttttgtatttttgtagagacaaggtttcactatgttgcccaggctggcctcaaactccggagctcaagcagtcttcccaccttggcctcccaaagtgccgggattacaggcatgagccactgcacccagactagaatttacattttaaactgtttattctaactcttttgcccttctcttctgccagtgaatatgattgtttcttcatgtaaaaagatgttttattccagttgactacgactgagaagccattgagaaagccaccttccagactgaaaaaactcaagatcaaaaagcaagtgaaggatttcacaatgaaggacatcgaggagaagatggaggctgccgaggagcgcaggaagactaaagaagaagaaataagaaaaaggctacggagtgaccgacttttgccttcagccaatcactcagattcagctgaattagatggggccgaggttgcatttgccaaaggacttcaaagggtgaggtctgctggatttgaaccatctgacctgcagggaggaaaaccattgaagaggaagaagagtaaatgtgatgcaaccttgattgatagaaacgaaagtgatgaaagttttggggtcgtggagtcagacatgtcctacaaccaagcagatgacatagtctactaagccattttttgtgaatttcataagaaagcattcattctccccatttgtgacatttgtagtatgtctcatattctttgactgactgacctcattccactgggatttctgccttgggcttaaggatgattgtgtgggctgcacaggctgaaggttagttgagtaaattaagtagctatgctagcttttaaaaaaagagcgagggggagacttgaccagcatagatatttggcactctcctttgtgtggcttcaaacattatggagatgtctttaattcatttataagtgccttcagtttacattaataagttcgtgccaaatgaaatccttcctgtttactcctgccttgtggcggggtccatcctctgctgctcctttaaaacaaattgcatggatttgtattaagtattttaatggcttatatgttttttatgctgtatgtctatggttttataatttttttctctgtgttgtgaaggaataaagcaatgtcttgaagttggctgaattacagttttatccacatagtttaagttagcaatatctaattctcagaattacatagagttttcttcttgtgaaaacagaagaacttcagttgaggctagggatggaaggaagttgtgagggtgc

SEQ ID NO: 464980 - DNA, 1770 bp, Homo sapiens
cgcagtagctcaggcctgtaatcccagcactttgggaggccaaggcgggtggatcatgaggtcaggagatcgagaccatcctggctaacatggtgaaaccccatctctactaaaaatacaaaaaaaattagccgggcgtggtggcgggcgcctgtagtcccagctatcagaaggctgaggcaggagaatcacttgaacccgagaggcagaggttgcagtgagccgagatcgcaccactgcactcaagcctgggtgacagagcaagactctgtctcaaaaaaataaaaaatagacattaaaagaatcctgggaagacattaccgagtggaagatgcacgtgttctttgtgttcttatctcttctggagacactgaggagacttcctgtggctgatgtcagtgtgcctcatactggggaaaattgcagcccccggatggaagctgctctgaccaagaatactgtggacattgcagaaggcctggaacaagtccagatgggaagcttacctggaaccatttcagaaaattctccatctcctagtgaaagaaacagacgagtaaattcagacctagtgaccaatggattaatcaataaaccccaatccctagagagtcgagagcgacagaagtcatcagatatcctggaggaactaattgttcaaggaattatacaaagccacagcaaagtatttagaaatggagaatcatatgatgtcacgttgactacgactgagaagccattgagaaagccaccttccagactgaaaaaactcaagatcaaaaagcaagtgaaggatttcacaatgaaggacatcgaggagaagatggaggctgccgaggagcgcaggaagactaaagaagaagaaataagaaaaaggctacggagtgaccgacttttgccttcagccaatcactcagattcagctgaattagatggggccgaggttgcatttgccaaaggacttcaaagggtgaggtctgctggatttgaaccatctgacctgcagggaggaaaaccattgaagaggaagaagagtaaatgtgatgcaaccttgattgatagaaacgaaagtgatgaaagttttggggtcgtggagtcagacatgtcctacaaccaagcagatgacatagtctactaagccattttttgtgaatttcataagaaagcattcattctccccatttgtgacatttgtagtatgtctcatattctttgactgactgacctcattccactgggatttctgccttgggcttaaggatgattgtgtgggctgcacaggctgaaggttagttgagtaaattaagtagctatgctagcttttaaaaaaagagcgagggggagacttgaccagcatagatatttggcactctcctttgtgtggcttcaaacattatggagatgtctttaattcatttataagtgccttcagtttacattaataagttcgtgccaaatgaaatccttcctgtttactcctgccttgtggcggggtccatcctctgctgctcctttaaaacaaattgcatggatttgtattaagtattttaatggcttatatgttttttatgctgtatgtctatggttttataatttttttctctgtgttgtgaaggaataaagcaatgtcttgaagttggctgaattacagttttatccacatagtttaagttagcaatatctaattctcagaattacatagagttttcttcttgtgaaaacagaagaacttcagttgaggctagggatggaaggaagttgtgagggtgc

SEQ ID NO: 464981 - DNA, 2732 bp, Homo sapiens
  misc_feature (3)..(3): n is a, c, g, or t
  misc_feature (5)..(6): n is a, c, g, or t
  misc_feature (8)..(8): n is a, c, g, or t
  misc_feature (11)..(12): n is a, c, g, or t
ctnannantgnngccacagagctcaaatgaaggcagtgggacagcgagaccccactgggaccacacagatgcacaagctgcttcaaacctttcagggcccttaaattcccagcaactaaaaggaaacaggccgcctggggtgctggaaaccgccggcctggagtcagccgaaggttcgatttgtcctttctagaaaccgtgtacacatggactcctacaatccagtcctttgtgtctggcttctgtcactcagcgtcgcatttctggggctcatccatgttgtagcatgtagtggtattccattgattggctacactgtagtttctccatttgccagatgatggatgcttggattgtttccagtttggggctattttgaagaacgcttctatgagcatttgcatctgagttgtatggacgtatgttttcatttctcccggggagatcctaggagcggagttgctgcactgcatggtgaacgtatgtttaactctttaagaaactgcctcgctgacttctgaagcagctgcaccgtggcgtgttcccaccagcagcttatctcgtgtcttcacatctgctggaggatttgagcagaggagagatgtgatgagacttgctcttcagaagattcctccagctgccgggtgagggtcactgagagggaaaggaagaggcaggagggagaagtctgggtcctaggctaaagctccggctctgggtggaccagagacaaggagctggagtccagggatgtgttcaacagggtctggcatggaaggagcaggagccacagagactttggtaactggctcagcctcaatcagcaagtggctgagagagaaaagatggaggtgacttgggagcaagacttccatctggactgcgatgatggtgccggggcctctggctcttgcctgtccatgcatcatgcatggccagatcagcagtcacatcccttcagaaggttcccacatcctgtaaggggagtggctcccagtcctggctgcccttttgaatcacctggaaaactttaaaatctgctggctgggtcctgatgtaactgatctgcgcacagcctgggcatggagaggttcaagctcccaggtgatttgaatgcacactgggctgagtcaagctctcaggcgcaggtgcacactgggagctccaggggagttttacaaactactaaagtgctgagtcccacccagagcttttggtgcagttgggacagggggaagcctgtgcactaggagttgtaacctttccccgggtgattataacgcgcagccacgtttggggactgctgcttgaaggcaacttgtttggacccaagagtcagttctgagcagatgcttctaatgctagcatttcctaaaagagtgttcttgattctctcgctctttataagtagacccagaaatcttttttttttccttctcaatgtacagattatttttctgaagcattttatagtacatgttgctaaaaaataaaaccagattccactgcacgtgttctgtaaacccatctggtttacataaaatatttacaaatgcagatacagaggaatttcaaggtatttttgggtaaggaaccagcatgttagctgtgtgttgcctgctctgtggtctccatagcatatgatacataaacaccagtcagatacagggatgaactgcgttcctacagatgaggtgtgaggttcagacatgtgagagtccatgcctgtcacacagccgcccaatgtccaagtcctggtccaggcattttgcccgaggccaccgtgctgcaggggcgctgtcctggtgggaccatgtgtggttgctgcatctgtcctggagaacagtgcctcggggccagtgagtacgtgaggaggagcccgtctccctctggcatctcttcctccaccatctccctgccctgtgctcctgcagcaggccgctcatgtctttacgtctgtatgaactcacccagggcatcacgtgagggctgtgggatgctgcctgactcccaggcaggagcccagtattctctgcacgctcacactctgtgctcactctgctgcgcacgtcacacgtggacatacatggatctttcccacggaggggactatgagccccaggatggaattgtgcaactggtgccattgatgtccttaggaaatcggaacccgtttctggaattcttgacagaggagcatccaagaggccccgctgggcaccctgccgcggctcctggacacagagcacaggcccagctggcagtcactccggacactcactcagtccttgtcacaaggagttccgagcagcagaatgaggaaggggccctggaagctgcccctggttccctgttatcttgcaatggacgaggcttcccaatactccacatccctgccagcatctggtggttcagtgtgctggattttggccatactcatagcagcagagcagaggacatgactgggccctggatcaaagggttttccctgaagcctggctgttccgtgtgtgcgtcccgcagagcacagtgcttgccctagaatgctgggcgggcaggcccaatttcacattcacacgacattccatgcccaatgcggcgaagatgttttaacaagcacctccatagcctgtaggcttcatcctggagaggactggagagttgctttggcacctaatgcagggcaaggcagtgtgaatgaatgaatgcaggatgcatgaatgaatagctgc

SEQ ID NO: 464982 - DNA, 810 bp, Homo sapiens
cttctggatttaggaaaaacacgtatcgacgaaaaagcatcaaactctgtaaaatatctgaagagattggttctgagccaaatatgagtgaccaatggcctgtgacacggcctgcaggagatcctgagaacatgtggccaaggtggaccctcaagtcccagtcgctgaagcctccttgctcattcccctgggagttttcagtcagcctctgggtccctcttgttagtcctcctccatctgcctacagcaaaaggtttcactgtcttgtaatgagagtctggcaagacagcctggctgctgatgactcttatcctagaagggacttcagacgtcatctcccttaccctcatgcttctgatgacacctatcgttatctgcaattttatttattattgacaccaccagaatgtaaattccatgagggaaggggccttgcttctctgttgcattgccaacagctagaacgcagtgcctgctacacagtaggggcctaataagtggtggttgtgacggacacggtggctcaaggcctgtaatcccagcactttgggaggctgaggcaggtagatcacttgaaatcaggagtttgagaccagcctggggaacacggtgaaaccccatgtctactaaacatacaaaaattagctgggcgtagttgcgtgcacctgtaatcccagctacttgggaggctggggcaggagaatcgcttgaacccaggaggaagaggttgcagtgagctgagatggtaccactgcactccagcctgggcgagagagtgagactctgtctcaaacaacaacaacaacaaca

SEQ ID NO: 464983 - DNA, 1538 bp, Homo sapiens
ggtgtacaagtcgatgacgacgtcgcctaaagtggccgacggcgtcgtctacgccacgcgtcaccctcggcgcgaccccttttgcgtcatctcgccggcgccgcccccggttccgagcagttccttccggtcggcgtgcgggcgccgggctgcccagctgacttacggatcgggttggtcccgcccccggcgcggccgttttgaaaatcctggtccgcccttggcgattttggtggaagcctgtccctcagaacggtctcagtatagtgttttgtgccccgtttgtgtccgtctcaagagcagagcggccctccgcgcggcccttttatccaccagggggcgcccgcggcgggatcttctctccacctatttgggcggactcctccgggtttcctcgtcagtctccttttcgcaaaacaactttgggcctctactagggtaaagccaacaaagggaatcctaagactgtgagttctgggtcattgtaaggttcctcagtgctgttgaactgagcaaaccatttaggacagacccaacaattagtcttgttgtagaaatgggccatggcggatattgtaggagctaaagggtgtgacgtattactaagtcccataaaaaatcctaacagacctagtgatagtaaaacactcatgtttactgttggttaataactgttattcctgctgtaaggatagtaattaagcaaaatgctacagtaattgagattctgttcgatattacaccctgagggtgctatagtatatagtaatacttggcttaaaaggagaggtagaaacggcaaaaagtatttggtgaggtagaggcgagactaagtgaattaaataaagtgaatcctgacttaaaagaagaaaatccactcccaagagggaaatccactgaaggcagaggaaagacaccctacactctgcttctgcttccaagtggaggcttctttcatttctaaaggggtctttcaaaaagttcaaaaatatgtagatgactaactctggaaaatactggagtagactgtgttgtaatagaagtgcagtgactcactcactcccagaaactggaaacagatacaaatcaggtcccagatttccttttggcatcaagcctgctttaaattgcagaaaaagatggactcaaattttgattgtgggaatgatgaaaatgacaatgaaatcggctactgaaaaaggaaatatatcaaggtttggaatcaaaaggtattatctggtgaaagaataaagacattttaatatatactttgttttctgtagtattagaaatattttagaatatcttctcctatatgaaagattaccttcaaagaagagaaagcatctaatgtgcacagaaccgcagtgggttgctgtcaggcaacttgaactctttttatgatagaggatatcaagttgacatgagctgactcaaaggaacatcaaagtactcaccgtattaacattgacagatttatttgtcgtgtaagcaactgccaagttaattctgtcttttgtttctcagattaatgtgaa

SEQ ID NO: 464984 - DNA, 1101 bp, Homo sapiens
gtatctggaagcatctaaccaccatgaggatcccaatgcctccatggataccgagcttttacatatttcctgaccatgcttcccccgtaaacttcaacaagcttgttctggggatgaggccacacatcaggaaacactccagcctcaagggaagctgtaagggaggctgcttctcgccagtcaacctccatcagtcactgaatggggcaccgaaagagagtgaaggcaccagcctgcattatttacccctgcacttccgggccggacatgtgtggacccgcagcagaacctggaagagcaaaggcagctgggaaatgtgtgaggccgtcataaaccctctacctgctaagctgacagctgactccctgcagacctcaacagaccttcgctgctgttgtccatttatacagaacaagggcattctctctgttgcacgtcaggcttccacatggtttttgagttaaaaatgtttaggtttcagaatgaataacccataactaaccacaacaatatgggtaaatctcgtaaacatgatgctgagcaaaagaacccacatgtaagaaagtgtgtaggataggatttcattcatatcaggtacgaacgcagccacagtcactctatgctagagccctgggagagtgagagacaggtgcatgcaagggacttctggagtgcagccaatgtcctgatccctgacctggctgctggctacagggttgtgcagttatcaagaaactaagcatatggtcaaaacattcaagaaacacagcgggaaattctatgactcacacacacgtgttaagaatgatgtgaaatggagcacaaggttttcagtgttacatttctaccttaaaatggtccaccgtatgtgttacctttctaccttgactgtaccttacatatgacttaataaatcataataaataaatccatgtgatagaatttattcaggtattataaagacatgagaagtttttaatacaaaaaatgtacattaataagcacccttgagaaacacaaaatgtagcaagggacacagacaaatgaacaagtgattgctctgtcatatgaatgctgcttcactgagcttaggagcctcac

SEQ ID NO: 464985 - DNA, 1649 bp, Homo sapiens
ccctctccccagctccctctgcttcagtcacactgacggccccagtacattcgtgcttgttggtccttctgcctggaagtgcccagaatgggcctttggaaagcatcgagcagcctctcttgctcagtgggcactgaaatggcactcggagctcagtacccagataaaggacaccccccagataaaggacaccaccccttcccccgcgcaggcctcgggaaagggcgaggccgtggtgagaatggcggggtcagcggacagcagtggggctacaggctgtgtctgtggctgccctggcttagggctctggctggcccctcctttccgacctggtctggcagagcagccccgcaggaccagctcgcaaggctcctggggccagtggggctctgtcctgtgaggcggtccctccgcaaggacagagtcagagagaggctgaaaccaggtcctgaaaaacatcacagaaactacagctggaaatttcctgttgaccctgatagactactacttgacaccagccgaccgatctgctggctgcccaccatggtcctgccacaattctgatgggacagagaattggccttactttctttcctgataaatagccatagacctcaagccagccagttttggccagcttatagagactgtacacaaactgagccctgagtgatcaggcagtcgtagaagtgcatgaggtgccaggggtttccttccagcagaacttgccttctttatttgttgggccagtgacttctcagttccagagttattgccttgatggtccatgagtgctgttttgagattgacccccactctctcttgaatgaaatatatttcatctcttttcttcttgtattgatatgttaatatttattttttaataaagactttgtgaaggattagcattattttttggttaaatatttgataaaattcaccagtgaagttatctgggcctagaattctctttatgggaagattttacatttctaattcagtttctttactttttataggcctatttagattgttctgtatattttttagttcattttggtaatttgtacctttctaggaacttttccacttcatattagttgcctgctttgttggcataaagatgtttacagcatttccttgtaatttctataggatcagtagtctattctttctttcgtccctttattgggtaatttttatcttctctatttttttcttggtcagtctaaaggtttgtcaattttgttgatcttttcaaataatcagcctttaggtttctttggttttctctatttttccattttctattttgttgatttctgctcttatccttattatttcatttattttgcttgctttgatcattttaacttgcccctccttttttagtttcttaagaaattactctagaatgtatactcttctcttgttaccattaaaaacttaacaggattttactttgatttttacaaaagacacgaagtgcaattacctggattagcttcttctatgaagaaaaataaagcagcctaacagggtagagattgatagagtctactatcttaaatagagagactaggaaactctctcttagtagagtcatttgagtagaatcctgaaggcagtaaaagaaaataacatttcac

SEQ ID NO: 464986 - DNA, 3369 bp, Homo sapiens
aggtgtaggggggatatacgtttctgagaagcacacactgactgacatgtgttggttactacatcagctgataacatcgagacctatggaatacaaatggattaatcagatgacccaaagccagacctttcccatgacggagatgaacttcctgaaccacccagagtgcgaggagaggaggagtgactctccagaggagaatgaggaagcccttgccacctggtgggggccagaaagaactcacctccaccagcagctattaggtcctccaaaaaccctaggagcatttagcacatggggagatctccactggggtcccaaatgggctgccctcctgcctctggtgctgactctgactagacatcagatggcacagacaccatgcttccttcattccaggctgctccctgggatactgtatgacgagcactttctaggccagcagaaagccaaggtgatgccatctttgcacaagccttttgaaagccaaaccaccatgagaaatatggtgtacctgaggagcgccccgagccccggcccagctcctcccgctgcatgccctaggagcccaccaagactgaggaagtggagaggctggcggcgatgcgttctgactccctcgtcccaggcacccacaccccacccatccgcaggagaagagagcgagaaagaccagtggctggagaatggagagctgagtgtcgtgcgggttgaggctggagagaggcagcagagcctacagagaagacagatggcccactggagtttggaggaaaaccaggagggactggtggtctcggtgaaccagaggagagagtttcagaaagaagagtccaccctggcagatcttgacaagatggtgtccggtgggcatagacaactcatcattggtgtcctttgggattatgactttagggaagccacgtagctgggatttagatagcatgtggttgaggagtaaatgagaggagaggaggtagtcatcttcttttaagatgtttggttgagagggaaaatgagaaatatatagcaaacaacaaaaggggatgtgagcttgagggggatgttttttaagattggttagattgtgtcaagctgcaaaatttgccttaacatggctgtggcattctcagggaaattgaaacatcagcaaagtgactgttaagccaaataaatatatttgcacacatttttcagcaatgacaattctcgtgactaggaaaagcaaacatgcaaataatcagagcactagttagcatctgattttaataagaaactatcaaaccaagttgaatagccttcagcatctggccagatcacatattccctttgggtgaatgattggagcatttcatttcttctttaaaaaaaaaaaaaaaagatccagcataggtaagcagggaatatttttagttgtgtattcatcatgacccacaaagggaccatctagtggttagaaagcaaagcagacttaatggtcctgttttgtttttaaaaaatctctaacaggtacagactaaagactatggaaatctgttaccttctagggctggataaaagatgtaattgtttcttctcaaagtgaactttatccagcactctctgcgtgtagaatgtgcttcaacaatgttacactgatgacaacagcaggagcaatcttctgttgtgctctgctcatattactatgtcgtatgaaatatacttgaccctttccttgccttatggacttgaatcttgcatcagacccatatagtattattaacttcacttgacaggtgaggaaactgaagcttagggagactcaataattgccagttagaaataacagagctggaatttgaacttagcctgcagtcttctcaaatatatcgcatttcagatccatgagggtggaaatcgataattcagatgctttaaaacataattcttctacacataacagtgatattacaagatgctttccttttttgacgtatctctataaagaaatgtgaaggaagagaagctcatcaataaaaactgacactggaagccatgatacgagtctttattgaaagtctttaaagaggaaagtcaaggtgtagcatactcgtctttgtatgaaccccacagtatctagttcaatgccatgtacttggaggatgcactctatttgttgaatagctaagaaagagtaaattgatactggcatgaaacaaaccttcagaatcattccatttatgttttcaatataactatctctttctgctgtatgatatataggaacaaaatatgcattgattagtcgaattacagttgtgtcctttcatttcttcactgtcactttaatctagatatgcattggtgtcttttgggtttccccagaattctttgaccttttccctttgacttttattcactaaaaacttaataattatgttattaatatacattagcactactagtaacaatggtaatagctagtgcttgagtgcccacctgacaagtgtgaactagctgcaatctggctctcagcgccccagcagtcctctgaggcagttacttagttatgcctaatacctgtttgatagaagcatttaatagtttttctcttcttcctgccatatttccctttgattttcttttttagctctaggatatttactaagtgccttcattttttttaactgttaagttcagggcatatgtacagatttgttatataggtctttgaggaattgccagactgtctcccacaatggttgaactattaaataatttacattcccaccagtagtgtataagtgtttcattttctctgcaacctcaccagcatctgatattttttgactttttaatgatagtctgactggtgtcagatggtatctcattgtggttttgatttgcatttctctaatgatcagtgatgttgagcttttttcatattaaaaatatgttggccacttgtcattttttgaagtgtcttttcatgtcctttgtccactttttaatgaggttgttttgtttttttcttgtaaatttaagtttcttatagatgctgtatattagacctttgtcagatgcatagttgcaaaatttttctcccattctgtaggttgtctgttcactctgttgatagtttcttttgctgtgcagaagctcttaagtataattagatcccatttgtcagtttttacatgtgttgcgattgtttttggtgtcttcttcataaaatctttgcccattcttatattgagaatggtattacctaggttgctttcctgggtttttatggtcttggattttatgtttaagtctttaatccatcttgagttaatttttgtatgtggtgtaaggaaggtgtccaatttcagtcatctgcatatgaag

SEQ ID NO: 464987 - DNA, 698 bp, Homo sapiens
cccgggtccctgatgaccttgtatgtagccgttccagacctggactgtgcacttctggactctggtgacatgcagggaaaaaaaaatgaaacaaacaaaaaaacacgtttaggtttactgcacttgcctctagcagttatggaattctatgccactcaaatcctctatctgttgcaaaaatgtgcatcccaagatggtgctcttgagctgtggtgcagtatcttcagacagacactgtggctgctgcttctaactgctggcttccagcctgctgtctgccagctggctctaccctctcctataacacggcagagagtagctgtggtctcctgcgtgctcaccctctgctcccttggtcctgctccatgctttggtcctgcacttaaattttacaagcatactctctttctcttaagtaactgcctgaaaagccaagaagtagagtgacggggtggtgttgaaggtggcagactgatgaagataaggagaaatgaatttggaaaaggagggaggagcaaaccaatgaagagttgtaaaaaccagaaaagcaattctggattagatttagaagtggcagaatgacaaggtgaagttttctatagggagaaagttgctaggttgcctcatttgagacagcctggaatttttgaaaagcggaaattaaaaaaaaaaactagagcagtgtgatcattcacaag

SEQ ID NO: 464988 - DNA, 3019 bp, Homo sapiens
  misc_feature (2764)..(2764): n is a, c, g, or t
  misc_feature (2794)..(2794): n is a, c, g, or t
  misc_feature (2836)..(2836): n is a, c, g, or t
agataccttaaatcatctctctcaagttcaaagttccacagatctctagggaactctagaaaaaaattcttattttcactctttcccgcctatcttatgcccgtttctaacacaggtgcacagtgcctgcagtgtctttgcatagtaagagtgactttactccatttcccaacaaattcctcatctccctctgagaccacctccgcctggaccttattgtccatatcactattaacattttggtcaaagccattcaacaagtctctaggaagttccaaactttcccacattttcctatcctcttctgagccttccaaactgttccagcctctccctgttacccatttccaaagttgcttccacatgttcgggtatctttacagcagcaccccactctactggtatcaacttattgtattagtctgttctcacactgcaaataaagacatacctgagactgggtaatttataaaggaaagaggttgaattgactcacagttctgcatggctggggaggcctcacaatcatggtggaaggcaaggaggtgcaaaagcatgtctcacatagtggcaggcaggagagagcatgtgcaggggagctcccatttataaaaccatcagatctcatgagacttagtcactaccacgagaacagtatggggggaaccatccccatgattcagttatctgcacctggccccacccttgacacgtgggaattattacaatgcaagatctccgtcaagtgcagtaaccagttcaagttggaagtgtgtcttttgaaatcagaaaacaaagtcgtggacaaccaggctgggacccagggccagctgaaggtgctgggtgccaacctctggtggccgtacctgatgcacgaacaccccgcctacctgtactcgtgggaggtaatggtggtttgggacttgcttaagggaggtcttttgctcccatctggtagccctggcttcagcaggagcccaggacaggtgaacgggcagggcaggccagatggggctcaggctgtcggggcgctcacacctggcgctttggctgtcataggtgcggctgactgcacagaagtcactggggcctttgacttctacacactccctgtggggctccgcactgtgcccgtcaccgagagccagtgggctctgtatgtggatgtgatccgtgtgaacagctactactcttggtatcgcaactacgggcacctggagttgattcagctgcagctggccgcccagtttgagaactgtgaagagtaccagaaaagtctgctagagcagtaccatctgggtctcaatcaaaaacgcagaaaatacgtggttggagagctcatctggaattttgccgatttcatgactaaccagtccaaggatgaaggaaaaactggacctcattatggatttacttttgggatacactcattattccagaggagggtaaaaggctgagaagcttaaggtatttcagtctgttttatgttactcatttgcgaaaagtaggctcatcgaatacagggatctcagtcttttaatataatcaattgactggatgagccctacaatattttggaaaataatctgctttactcaaaaattactgattttcatgttaatctcatctaaaaatactttcagagcaacaactagaatggtatttgaatatataactcttttaacttttaaaatatcaaataatacagttatatatatatacacacatatgtatatatgtcacctaaattgtagatatcagaaatcagaatgctgtgatatgaatatttagtatattttaatcatgataaattatacatccttctaccttatgataatggattttaagatctatgctgttaaactctatatttaccctttaattcatatcttgcttattttacatttatctgagaatacattgggtctactaaatctttactatcactcacagtcttacgttttaagataatttttcaataaaataaaaattcttcattgcacctagaaaggagcagggttttgaaagtgatcaatgattactctaatacctaatataataatataatatagtaaaaatcaaaatacttgaatgaaaaatgtaaaattaatagttttgctttcattgtttttattccagtgtccattttagaatgtttttactctaattgtgtttttatgcaaaaccaaatgagctttagataattccattgatacattacatatgaaagttctcgttaaataggatatagcatattttacttaaaaatccaaattataaaataaagagggattttaagttgagtctaaaatttttgtttcaattttgtttttatttaaagacttgctataattctgtgagagagctataaaagtctactcagaaacattataatgtaaaatggccagagaaggacaatgagatatttaatttgccacggcaaagccattgctgtgaagaatggataatatatgtcaatggtaatatatgaagaaataacacaggtgaatagcagaggcaataaatctgtttttaccacaggacttgtcttacacttttctcttagtaataaataaaataattttcgaccagatggagctggcttgaaatcctcttgtttatggcagtacatatcggttatgattcaaaaaatatagcccatttccaaaaacctgcaacaaagagatactttctcaggtgattgttcagatcattattcattacaaagtgtcagttttgtctttattgatcctcattattgtangaaagtatgtggtcttgtctccattctatnaaaacaacattgtagagattagcactgagtctttccagccanatgcatctgttcatttccgtctccagcttgagtttttagttctgcaggctgtacaggaagcacagcggcatcttcttctggagaggcctcagggagcttttattcatgacagaaggcaaagcaggagcaggcttgaatggttgtttgtgttgtgactgtctgcgcggggagtgatgcgtatgg

SEQ ID NO: 464989 - DNA, 444 bp, Homo sapiens
tgcggcagctgtgctgtggtgatctagaggatcccactagtccaggtcggcttgggctgccaaaacaaaatacaggagactgagagcctcaaatcacagaaatttatgttcgcacagttgtcgaggctggaagcgcaagatcagggtgtcaacatggtgggtttccaaggagggctctcttccttctttgttagacggccgtcttctcactgtgtgctcacatagcctcttcttacagggagagaaagagagagagatcctcacaggccaccaatgctcttggatttgggccccacactcatccttatgacctcattaaacctttatgacttcctgcaggttatatttccaaatacaatcacaatgaggattacagcttcaacatgtgattttgggaaaacacagttctgtccacagcttgcttgtcaaagaaaaggagattaa

SEQ ID NO: 464990 - DNA, 853 bp, Homo sapiens
gctgcccagtgcatgaatcaccgaatgctcaaatcaacttatgaaaattgtaatcaaagccgagaacttggctctaggctctcagaacttgaccgtgtctttgatgttgccccactgatgacctgttcatctgaagacccagcccagaaaaggcaggtctgcttgcctcatggaacagagaaccagtgtcacttccaacccattcaaatcctcacttctcctccatcttttaaccagggttgtttttccttaatgctgatccacaaatgcagaggttcccatgagaatgccatgacaatttactactctgttctgagttttgcaactgtgtttttgcatggaggctactttaagtgcatctgcactgctgccaaacacaggctccaccacattcctggagagggcttcctgggacccacttagaaataaccgacagagcccatgctttgaattagtcggcttgggctgccaaaacaaaatacaggagactgagagcctcaaatcacagaaatttatgttcgcacagttgtcgaggctggaagcgcaagatcagggtgtcaacatggtgggtttccaaggagggctctcttccttctttgttagacggccgtcttctcactgtgtgctcacatagcctcttcttacagggagagaaagagagagagatcctcacaggccaccaatgctcttggatttgggccccacactcatccttatgacctcattaaacctttatgacttcctgcaggttatatttccaaatacaatcacaatgaggattacagcttcaacatgtgattttgggaaaacacagttctgtccacagcttgcttgtcaaagaaaaggagattaa

SEQ ID NO: 464991 - DNA, 1782 bp, Homo sapiens
ccgcgcccgccgcacagcgccggccgccgaaggtttgcctcccaggaagcagcaagcgcctgggcgcgggcagggaggggaggggagttacctgcccagcgtcaggtccgcggagggaggctgattccggctcgaaccgcgcctccccgagacaaggtgcagcgctggagggggcgggagtggagacggccagaaagcgctcggaacctgtctgaactcaaacaccctgctctctcccagcggagtatgaaaaagcctttctttcctgcccgccctcggggctacggggcaattacaagtcccgacaccctgctcctggtctggggcgaggagcgatcccggaggacagcgacgctcacctgggaagaaggcggatctaggccgagcggggccgtggtcccgtcctcgcttttccctgggctcaagaatgcctggaggagaggcctgggggccgcgggtgagagcaagggttgtagcaccttcgagagtgtggggcggattcagcccacagtaggtaattccagtgggcatcccgcagtgcagactccttctcagtgcctaagagtctttaggcttggagaggacgtggggagtggaaaagtagaagaaaaagtgcttgtgcctttacttttttatgtaaaagaatttcaaatatcatcaaagattttggtactgactctcaactgaagtctaattttattaagatatgcactcatgctaagtcaagtgaaatcacaaagaaagaaggatatatctactcgagtgttcattattaaaagcaaacaaaagatcagaaaatagacgtggagagggagaatctattaaagagtcactatctggactggatttcacaaacttcaactgaggtctgggatataacttgtattttttataattaagacagagaaaaagagaaaacaacaacaaaaatgaagcaagagtaaactgccaactccaactgcctttctggaaggcctaatttgaagatgtctgaaattctgtatcactggctcccagacatatcatgtttatttgtacatcacacctttgcccacctctgctcagtggacctccagcctaaaatgcctcccttgttcctctgtctcacttcagctgttattgaagtctcctggtacaatgtgacatttccagcgtcttgttttccaatcagatcagtggctctcagtggaccaactgataaggaacatttggaaaatgttacgatgattgagggctgtactggtatttggtgggcagggaatgacaatgtcctgtgatgtatccatcataatggaaaattatctgatgtcttgggcaaataacagcagtcctgccagacaaaatgaaggtgaaaaattcatttataattgcctaagttcagagcttctctctgttttacatacaagtacaagaaatgtttggcacagttttaatgtatactgaattataggaatccaattacaatatattttgcttaacatagacatctgctaagaattattcatcattttgtagatcacagcactacgtaactgcttcagagatataataaaactcatcagtcttccttagcatctgtaggtcagtcatctcacatctcacagcttcttctgccttctggtatatttgtgtatgaatgtttatatactacaacaaatagcatttttataaattccttttatttactttataatcaggacataacattacttttaaaagttatatgtaggttaaattacattattaataaatttcattgttttagtgtagcaagacaatgtt

SEQ ID NO: 464992 - DNA, 1060 bp, Homo sapiens
tcctgtggctatggaaaggcatgtaggcttcattctcagtatgatgggaaacctctgggaaattttaatcagtgcgacaatgaagcaaactaatacaggaacagaaaaccaaataccacatgttctcacttataagtgggagctaaacatggagtacacgtggccacaaagaagggaacaacaacaacaacaacaaaaggaaacacaaagaagagaaaacagacaccagggcctacttgagggtggagggtggaagaagggtgaggatcgaaaaactatctatcagagaatgcctggagaatataagtttttaaattatttcgttaatcaactcactgaagctcttacccggctctacaaattactgaagtccactgatagtccctccttcgtgaagcattcctgaagaccccagcctgacagatctccccttcctctgacctcctgtattgaatgtgtcagttggcttttctggaaagcggatgctaaaatggaactaggggtgtaagaggcttattggaaggtaacacctgtgaaagatgaaaggcacaggaagcaggactggaaaggaaaggctcagaccacaatgcacatctgacaagttcccagtcaactcaacagcaagctagagaacaaggactgatgattagaagggctctgcattgcaaagaatggccaggcccaagtatctcggctgagctttgtcactggctggggatatctgggaaaagcatggagtagggcgactgtggtttacaataatctattgttatattttaaaatagctagaagaaaataatttgaatgtttctagcataaagaaaatttttaagatgatggacatcccaataacactgatttgatctttacaaattatatgaatgtattaaattatcacatatatgcccaaaatatgtacatctattatgtatcaataaaaaataaaattaaataaaaaggctgaggcaggtcctacaggcactaaaagttggaggctgtcagccaactacattcctcatggctgaatatcaaggtctttcttgaagggagatcagagaga

SEQ ID NO: 464993 - DNA, 715 bp, Homo sapiens
aatccaaggttcccttctaagggccaggtgagttcctggcaccattatacatatgaacttgtgaagatcatctactaaattcaccacatttgtagtcccgctgaaagtcttataaccagataaaatcctggaacttaagtatgagaacccttcatatactctcgtgccgaattcggcacgagcttcgtgaagcattcctgaagaccccagcctgacagatctccccttcctctgacctcctgtattggtaatgtattgtctacacctttcttagaacccctcattttctcccgtgaattctagtttattttcatatctgtctcactattttcaaagctaggtttgtactatgtaatataggtggctattagtatccattggtttcacatctgcagattcaaccaaccatgaattcaaccaactgtgaattcaaccagtggctgattataactgtttggaaaaaggccaggtgcagtggcttataccatgatctcaggactttgggaggctgaggtgggaggactgcttgagctcaggcgtttgagaccagcctgggcaacatggcaagacctaatctctacaaaaaatgcaaaaattaggcaggcatagtggtgcgttcctgtaatctcagctattcgggaggctgaggcaggaggatcacttgagcccagaaggtcaacactccagcctgggtgacaaagcaagattctgtctc

SEQ ID NO: 464994 - DNA, 1335 bp, Homo sapiens
  misc_feature (1201)..(1203): n is a, c, g, or t
  misc_feature (1206)..(1206): n is a, c, g, or t
  misc_feature (1211)..(1211): n is a, c, g, or t
  misc_feature (1216)..(1216): n is a, c, g, or t
  misc_feature (1258)..(1258): n is a, c, g, or t
  misc_feature (1284)..(1284): n is a, c, g, or t
  misc_feature (1296)..(1296): n is a, c, g, or t
gtggagctgtaggagctggagatggcatttcgtttggtgctcgagctcgtccaggatgtctgggatgtgtggttatatctgatttctgagctctgggcgtggaggtctgtctgcagaggcccgggcctgggcacaaagggagaggggcctccattgtcccgcaggggccaaaatgcagaccgcatccctgccccgctctccttgagggccctcaacactatcttccctggacacaagtctggggacagccgggtgtttgtagtggctgagctgggggatgccctggaactcagagcacacagcactggcttactgtggtacctgtgcagtgaagttgaagacagaatcaccaggatggaacacaggtcttgcaggatcacggaaaaccttcttagagttgtcttgacaccactgatgtcgagtgtgcgggtgtttgtaggatggcctgccactcagcaactgagccctactcgcaggtcctcggccttggcccaaacaggaatgaggggcacagagtgcccgggtaaccgctcctgggagcagtggggaactgtcggatacttgaactctcaagagctgggctctgagcgtcctcgtccagctgccaacttggccaaaggctaagccagcagattgttctgttgccgggcaacgcgacttctaaacctgagggagtgggcatgtgagcacataatggcaccagtgacagagcgaccataatggatgaataagcgcagccagggctggtgaattaccagatctccgtcaagtgcagtaaccagttcaagttggaagtgtgtcttttgaatgcagaaaacaaagtcgtggacaaccaggctgggacccagggccagctgaaggtgctgggtgccaacctctggtggccgtacctgatgcacgaacaccccgcctacctgtactcgtgggaggatggtgattgctcacaccaaagccttggacccctcccagcctgtgacctttgtgaccaactccacctacgcagcagacaagggggctctgtatgtggatgtgatccgtgtgaacagctactactcttggtatcgcaactacgggcacctggagttgattcagctgcagctggccgcccagtttgagaattggtgtaagacatcacaatcccattattcagagcgcgtatggagtggaaacgcttgtagggtttcaccagggctggtgaatnnncanatctncgtcnagtgcagtaaccagttcaagttggaagtgtgtcttttgaatncagaaaacaaagtcgtggacaaccangctgggacccangggcagctgaaggtgctgggtgccaaacctctggtggcc

SEQ ID NO: 464995 - DNA, 1295 bp, Homo sapiens
  misc_feature (1027)..(1027): n is a, c, g, or t
gtgaaagagcaggttctgcttctttggtgtagtcctgaagcttcctaagaaacttcacatcaggtgatggataggagcaaccctgtaaaaccagccttagactatttttcaaacaggctggtgaattaccagatctccgtcaagtgcagtaaccagttcaagttggaagtgtgtcttttgaatgcagaaaacaaagtcgtggacaaccaggctgggacccagggccagctgaaggtgctgggtgccaacctctggtggccgtacctgatgcacgaacaccccgcctacctgtactcgtgggaggatggtgattgctcacaccaaagccttggacccctcccagcctgtgacctttgtgaccaactccacctacgcagcagacaagggggctctgtatgtggatgtgatccgtgtgaacagctactactcttggtatcgcaactacgggcacctggagttgattcagctgcagctggccgcccagtttgagaattggtgtaagacatcacaatcccattattcagagcgcgtatggagtggaaacgcttgtagggtttcaccaggtaagcggtgttgaactttctgcttgtgtattctctctgggcagagatgccacttgcctcccccaccatgccatctctgaagaatattacagaccattttggagcatggtgaataagaaattttcaccttaggagttcagttgaatagtcatttttatatttgtgactgcaagtcactcttaggggctgtacttccttagtactggtagcattattatccaatggacttttatagctttcattaggttttcttttgtttttgttctttaaagaacgttttacttatcttagtatttcatttttcatctatattatgaggcagtaagagtcttctgtttttccaaagttgagactgctttatatttatttcgtattgtctacagctgtagtgttcaatacattagccactagccacatgtggttatttaaataagataaaataaaaattggccgggcgtggtggntcacgccggtaatcccagcactttgggaggccgaggcgggcagatcattaggtcaggagatcgagaccatccttactaagacggtgaacccccatctctattaaaaatacaaaaaattagccgggcgtggtggcgggcgcctgcagtcccagctactcaggaggctgaggcaggagaatggcgtgaacctgggaggcagagtttgcagtgagccgagatggcgccactgcactccagcctggggacagagcgagactccatctcaaaa

SEQ ID NO: 464996 - DNA, 1081 bp, Homo sapiens
aaataagaaagaaaaatgaggtaactactgctatcaaaataccttcaaggcaataaaattagatagaagtattcattttgttttatttttgtttttaccactatacaaatgagcaggaagcattcattttaaaatctgtatgtgttcatattcatttctaaaaaaaaaaactcttactaattacatagtgaaaacacaaatttcttcttgcaattaaacatttctcaagagtttgatgggtaaaaaaaattaagtttaaagattcatagaaaagaaatatttcttcgtaaaattttagaacagatatttttctgaaagcttccagcacaggaaaaaaaaaaattttgtttgcagtaaaaggattgacaagcagaaaggcatggaacttctcgacagcacattaggaaccagtagaaatgtagcagtgcctctacaatttagaattaaaatgacttccaacctataattctacacctagctaaactatcaaataagtgtgagaatacaggaaaaacatatatctagatagatctatatgtctgtatatgcattatatgcaactaaaagtgtgtatttcttatgcagtctttcccagggaactccgatgaagtgttccaacaaaatgagcgagtgaaccaagaagaggatgacattagatccaggagatacaacagaggagataatctccaggatgcctgtgaagaaagatccctggatcccaggatgattataggacaagttgttcataatccagcaggccagaagacttccagggaaactcattcaagatgaaaatggaccagccgcagtggctcacgcctgtaataccagcactttgggaggctgaggcaggcggatcacttgaggtcaggagtttgaaactagcctggccaacgtggcaaaactccatctctattaaaaatacaaaaattagccaagcatagtggtgcatgcctgtagtcccagctacttgggatgctgaggcaggaagaattgcttgaacctgggaggcagagtctacagtgagccgagatcatgccactgcactccagcctgggtgacagagccagactccgtctca

SEQ ID NO: 464997 - DNA, 901 bp, Homo sapiens
gtgaaagagcaggttctgcttctttggtgtagtcctgaagcttcctaagaaacttcacatcaggtgatggataggagcaaccctgtaaaaccagccttagactatttttcaaacagatggtgattgctcacaccaaagccttggacccctcccagcctgtgacctttgtgaccaactccacctacgcagcagacaagggggctctgtatgtggatgtgatccgtgtgaacagctactactcttggtatcgcaactacgggcacctggagttgattcagctgcagctggccgcccagtttgagaattggtgtaagacatcacaatcccattattcagagcgcgtatggagtggaaacgcttgtagggtttcaccagtctttcccagggaactccgatgaagtgttccaacaaaatgagcgagtgaaccaagaagaggatgacattagatccaggagatacaacagaggagataatctccaggatgcctgtgaagaaagatccctggatcccaggatgattataggacaagttgttcataatccagcaggccagaagacttccagggaaactcattcaaggaggtgaaaatgatggatgactcctccaagatgaaaatggaccagccgcagtggctcacgcctgtaataccagcactttgggaggctgaggcaggcggatcacttgaggtcaggagtttgaaactagcctggccaacgtggcaaaactccatctctattaaaaatacaaaaattagccaagcatagtggtgcatgcctgtagtcccagctacttgggatgctgaggcaggaagaattgcttgaacctgggaggcagagtctacagtgagccgagatcatgccactgcactccagcctgggtgacagagccagactccgtctca

SEQ ID NO: 464998 - DNA, 1089 bp, Homo sapiens
gtgaaagagcaggttctgcttctttggtgtagtcctgaagcttcctaagaaacttcacatcaggtgatggataggagcaaccctgtaaaaccagccttagactatttttcaaacaggctggtgaattaccagatctccgtcaagtgcagtaaccagttcaagttggaagtgtgtcttttgaatgcagaaaacaaagtcgtggacaaccaggctgggacccagggccagctgaaggtgctgggtgccaacctctggtggccgtacctgatgcacgaacaccccgcctacctgtactcgtgggaggatggtgattgctcacaccaaagccttggacccctcccagcctgtgacctttgtgaccaactccacctacgcagcagacaagggggctctgtatgtggatgtgatccgtgtgaacagctactactcttggtatcgcaactacgggcacctggagttgattcagctgcagctggccgcccagtttgagaattggtgtaagacatcacaatcccattattcagagcgcgtatggagtggaaacgcttgtagggtttcaccagtctttcccagggaactccgatgaagtgttccaacaaaatgagcgagtgaaccaagaagaggatgacattagatccaggagatacaacagaggagataatctccaggatgcctgtgaagaaagatccctggatcccaggatgattataggacaagttgttcataatccagcaggccagaagacttccagggaaactcattcaaggaggtgaaaatgatggatgactcctccaagatgaaaatggaccagccgcagtggctcacgcctgtaataccagcactttgggaggctgaggcaggcggatcacttgaggtcaggagtttgaaactagcctggccaacgtggcaaaactccatctctattaaaaatacaaaaattagccaagcatagtggtgcatgcctgtagtcccagctacttgggatgctgaggcaggaagaattgcttgaacctgggaggcagagtctacagtgagccgagatcatgccactgcactccagcctgggtgacagagccagactccgtctca

SEQ ID NO: 464999 - DNA, 1331 bp, Homo sapiens
  misc_feature (1278)..(1278): n is a, c, g, or t
tgctgacgttattttccagagggcacaggaagaactagggaaactactcctgtcaatacttgccctcgtgtgtgatgttctcctccctgtatcccagcggattaagatgctcatttcttaaaattcaggggaaagatggacactaccggttccgtggcccagggttttggaagaggcggcctccggatgactggatgcacttctccctgggactcaccctgtgtcgttacagctcgagcttactgaaaataacagacagacacctccacttgtcccctccaacagagtggctgcactggcagctctctaatgaattaaaggagtgtgtttggctgacgagaggaccccatgcttgcatgtatggagccttatctcagcttccatacctacaaaggggacatgattggtgtctaccccagagagtggttttaagaattaaacaaaatgacgtgtgtgaaactcttggaacagtgtctggttcatggcaggaggtgtccgtgacgtgcctgaggccatttgtgtgcttacctgtgtgtttctgtaaagcagacccagtgcagggcaccagggatgtggtgggagccacacgggatgatgacgttcctaccctcagggagctcacacttacgagggggcagtagagtcatgttccaaactgaagttatgtgcttctttgatcatgggctgtatctgctttctttggtgtccttttcagttgcccactggaagagtctttccatttgccacactggatgccacactggatgggataatctaggagggaggaactgtggagatggtgcgccttgggatgtccagaagacagtgaccagaatttcaagagatgttttcagatttcacagtataataagagaaaaggagccaatcccttaaatgaagaaccttcaatcacttctccccaggtgcacgtttcaatttcatttcttttcatcaactccttccctttgatgatgggttgcattgaaaactattaagaaaagtaggatatttaaaatgaactgtgttaagaagaggatcatttcaaagaatctattctgaggaagtgccttcagccaatcaaaaagctaaagaaactggatataatgtgaatctagtgtaaattaccatgatgtctccttcaacattcatcaagacttctgactagtctacttgatctgtgaaaatgagattacttgaagacctgtcacagattttaaagcagaacacgatatattgattatacaaatatttttatgtcaccctgtatcttaataaaancctatgcggccaggggtccgcccccttgttactgatttaatcgcgattctaaa

SEQ ID NO: 465000 - DNA, 3113 bp, Homo sapiens
ctctacagcagcaatacgaggacatcctaaggagggcgaaggagagacagacggcgctggagaatctgctggcccactggcagagcctgtcccgaatgacttgcattttgcaagaatgcgaatcctttggacaacagccgcctgtgccgcatggtccttacttttcagtcctgttaggatgagatcctctgtggttgctgaacaccagcaatttgatgagctgctgctttccttttctgtctggattaaactgtttctcagtgaattacaaactacctctgagattagcataatggaccatcaagtagcccttactcggcataaggaccacgcagcagaagtagagagcaaaaagggcgaattgcagagtctgcagggtcacttagcaaagttgggttctctgggccgtgctgaggacctccacctcctgcagggaaaggctgaggactgcttccagctgtttgaggaggccagccaggttgtggagaggcggcagcttgccctgtcccatttggcagaattcctccagagccatgcctctctgtccggcattctccgccagctgaggcaaacagtggaagcaaccaacagtatgaataagaacgagtctgatttgatagaaaaggacctcaatgatgctcttcaaaatgctaaagcattagaatctgctgccgtcagtctggatggcattctttccaaagcccaataccatctgaaaatcgggagctctgagcaaaggacttcctgcagagccacggctgatcagctctgtggagaggtagagaggatccagaaccttctgggaaccaagcagagtgaggcagatgctctggcagtgttgaaaaaagcattccaagaccagaaagaggagcttctgaaaagcattgaggacattgaagaaaggactgacaaagagcgattgaaagaacctacccgccaagctcttcagcagagtgttgaagccctcaaaatcatctttggagaaaggttaagagtgtttaatcagctagaagatgaattgaattctcacgagcatgaactatgttggttgaaagacaaagccaagcaaattgcccagaaagatgtagcttttgcacctgaagttgacagggagataaaccgcttagaggtcacctgggatgataccaaaagactaattcatgaaaatcagggtcagtgctgtggacttattgacttaatgagagaatatcagaacctgaaatcagctgtatctaaagtcttagaaaatgccagcagtgtgattgtaaccagaactaccataaaagatcaggaggatcttaaatgggctttttccaagcatgaaactgccaagaacaaaatgaattacaaacagaaagacttggataactttaccagcaaaggaaaacacttgttatctgagctgaagaaaattcacagtagtgatttcagcttggtgaaaacagacatggagagcaccgtggacaaatggctggatgtatcagagaaacttgaagaaaacatggataggctgagagtaagcctgtccatttgggatgatgtactgtcaactagagatgagattgagggatggtcaaacaactgcgttccacagatggcagaaaacatcagcaacctggataaccacctcagagctgaagaactgcttaaagaatttgagtctgaagttaaaaacaaagcattgagattggaagaactgcattccaaagttaatgatctgaaagaattaactaaaaatctagaaacaccgccagaccttcagtttatagaagcagacttaatgcagaaactggagcatgccaaagaaataactgaagtagcaaaaggaaccctgaaggatttcacggctcaaagtacacaagtggagaagtttattaatgacataacaacatggttcacaaaagtggaagaatcgttgatgaactgtgcccaaaatgagacttgtgaagcattgaaaaaagtcaaggatatacaaaaagaacttcaaagtcaacaaagcaacatcagctctacccaagaaaatctcaatagcttgtgccgcaagtaccactcagctgagttggagagcctgggccgtgcaatgactggtctgataaagaaacatgaagcctctatgcaggaattccaagaatggtttttgggagcaaaggcagcagcaaaagaatcatcagatcgcaccggtgacagcaaagttctagaagcaaagctccatgatcttcagaacattttggactcagtcagtgatgggcagagcaaacttgatgcagtgactcaagaaggacaaactttgtatgcacatttgtctaaacaaattgtcagtagcattcaagaacaaatcacaaaggccaatgaagagtttcaagcatttctgaaacaatgccttaaagataagcaggctcttcaagactgtgcttcagaacttggaagctttgaagatcagcacagaaaactgaacttatggatccatgaaatggaagaaaggttcaatacggaaaacttgggagagagtaaacagcacattcctgagaagaaaaatgaagttcataaagttgaaatgtttttgggagaactgctggctgcaagagagtctcttgataagctttcccagagagggcagcttctgagtgaagaaggccacggtgctgggcaggagggccgcctgtgttcccagctcctcacaagccaccagaacctacttagaatgaccaaagagaaactccggagctgccaggtggcccttcaggagcacgaagccctggaggaagcactgcaaagcatgtggttctgggtgaaggccattcaggacagactggcctgtgcagagagcactcttgggagcaaagacaccctggagaaacggctgtcacaaatacaggtacatgcgacaccagccagacactgacaactgctgaatgctaatttgattagattcacaagtgcttgtgttgtgtcctaattgttctgtaagcctctaaatgaggattgtgtgggcaaaatggagaaattgggcaaaaaaggatacagaggcatcatttttcccctttgtaagaggaaaatgttattttaatagctttaaataattttaaatttgatttagtaaatattcagcaagc

SEQ ID NO: 465001 - DNA, 1883 bp, Homo sapiens
ctctacagcagcaatacgaggacatcctaaggagggcgaaggagagacagacggcgctggagaatctgctggcccactggcagagcctgtcccgaatgacttgcattttgcaagaatgcgaatcctttggacaacagccgcctgtgccgcatggtccttacttttcagtcctgttaggatgagatcctctgtggttgctgaacaccagcaatttgatgagctgctgctttccttttctgtctggattaaactgtttctcagtgaattacaaactacctctgagattagcataatggaccatcaagtagcccttactcggcataaggaccacgcagcagaagtagagagcaaaaagggcgaattgcagagtctgcagggtcacttagcaaagttgggttctctgggccgtgctgaggacctccacctcctgcagggaaaggctgaggactgcttccagctgtttgaggaggccagccaggttgtggagaggcggcagcttgccctgtcccatttggcagaattcctccagagccatgcctctctgtccggcattctccgccagctgaggcaaacagtggaagcaaccaacagtatgaataagaacgagtctgatttgatagaaaaggacctcaatgatgctcttcaaaatgctaaagcattagaatctgctgccgtcagtctggatggcattctttccaaagcccaataccatctgaaaatcgggagctctgagcaaaggacttcctgcagagccacggctgatcagctctgtggagaggtagagaggatccagaaccttctgggaaccaagcagagtgaggcagatgctctggcagtgttgaaaaaagcattccaagaccagaaagaggagcttctgaaaagcattgaggacattgaagaaaggactgacaaagagcgattgaaagaacctacccgccaagctcttcagcagagtgttgaagccctcaaaatcatctttggagaaaggttaagagtgtttaatcagctagaagatgaattgaattctcacgagcatgaactatgttggttgaaagacaaagccaagcaaattgcccagaaagatgtagcttttgcacctgaagttgacagggagataaaccgcttagaggtcacctgggatgataccaaaagactaattcatgaaaatcagggtcagtgctgtggacttattgacttaatgagagaatatcagaacctgaaatcagctgtatctaaagtcttagaaaatgccagcagtgtgattgtaaccagaactaccataaaagatcaggaggatcttaaatgggctttttccaagcatgaaactgccaagaacaaaatgaattacaaacagaaagacttggataactttaccagcaaaggaaaacacttgttatctgagctgaagaaaattcacagtagtgatttcagcttggtgaaaacagacatggagagcaccgtggacaaatggctggatgtatcagagaaacttgaagaaaacatggataggctgagagtaagcctgtccatttgggatgatgtactgtcaactagagatgagattgagggatggtcaaacaactgcgttccacagatggcagaaaacatcagcaacctggataaccacctcagagctgaagaactgcttaaagaatttgagtctgaagttaaaaacaaagcattgagattggaagaactgcattccaaagttaatgatctgaaagaattaactaaaaatctagaaacaccgccagaccttcagtttatagaagcagacttaatgcagaaactggagcatgccaaagaaataactgaagtagcaaaaggaaccctgaaggatttcacggctcaaagtacctgtgaaagtaggtccggctcattct

SEQ ID NO: 465002 - DNA, 10373 bp, Homo sapiens
aacctaacaaaccaggaagggtttgcacaaatgaaggagcggccaaagccagccatctcggaagggatgagagaccagttatcagaccaggatgaagagggaaagatcaagcaggagtatatcatatctgacccctccttttccatggtgacagtccaaagggaagatagtgggataacctgggaaaccaattcaagtagatcttctactccttgggcttcagaagaaagtcagacttctggtgtgtgtagtcgggaagggtcaactgtgaattctcctcctggaaatgtttcctttattgtggatgaagtgaaaaaggttcggaaaaggactcataagtcaaagcatggttcaccatcattacgccggaaaggcaacagaaaaagaaattcttttgaatcccaagatgttccaacaaacaaaaaaggcagtcctttaacttcagcaagccaggtactaaccacggagaaagagaagtcatatactggcatttatgataaagcaagaaaaaagaagaccacttcaaatacacctccgattactggggcaatatacaaagaacacaagccattagtgttaagaccagtctacataggaacagtacaatataaaattaagatgtttaattcggttaaagaagaattaattcctctacaattttatggaacattgccaaagggttatgtaattaaagaaatacattataggaaagggaaagatgcatccattagtctagagccagatttggacaatagtggttctaatacagtgtccaaaacacgcaaattagtagcccaaagcatagaggataaagtaaaagaggtttttccaccctggagaggcgcactctccaaaggatcagagtccctaaccttaatgttcagtcatgaagatcaaaagaaaatttatgctgattctcccctaaatgccacatctgcattggagcacacagttccctcttattcaagtagtggcagagcagaacaaggaatacagctcaggcattcacagtcagtgccacaacagccagaagatgaagcaaaaccacatgaagtggaacctccatctgtgacacccgacacacctgcaactatgttcctgagaacaacaaaggaagaatgtgagcttgcttcaccaggaactgcagcttcagagaatgactcttcagtctcaccatcatttgctaatgaggtaaagaaggaagatgtgtattctgctcaccattccatttctctggaggcagcgtcaccaggtctggcagcatctacccaggatggtttggacccagaccaagaacagccggacctgacttcaatagaaagggcagaaccagtctccgcaaaactgacccctacccatcccagtgtcaaaggagagaaggaggaaaacatgcttgagccatccatttctctttctgaacctctaatgttagaagaaccagagaaagaagaaatagaaacttccctacccatagctattacccctgaacctgaagattctaatttagtagaagaagagatcgtagaacttgattacccagaaagcccattggtttccgagaagcccttcccaccacatatgtcccctgaagtggagcacaaagaagaagagcttattctaccattattggcagcatcatctcctgaacatgttgctttgtctgaggaagaaagagaggaaattgcatctgtttctactggttctgcttttgtatcagagtattcagtaccacaggatttgaaccatgaattacaggagcaagaaggtgagccagttcccccatccaatgtagaagctatagctgaacatgcagttttgtcagaagaagagaatgaggaatttgaggcttattccccagctgcagcccctacatctgagagctctctctcaccatccacaactgagaagacttcagagaaccagtctccactgttttcaacagttacaccagaatacatggtcctatcaggagacgaggcctcagaaagtgggtgttacacaccagactccacatctgcttctgaatattcagttccatcactggcaacaaaagagtcactgaagaaaacaattgaccgtaagtccccgttaatattgaaaggtgtttctgagtacatgattccatcagaagagaaggaagacactggatcgtttactccagctgtggcccctgcttctgagccctctctctcaccatccacaaccgaaaagacttctgaatgccagtcaccactgccttctactgccacatcagaacacgtggtcccatcagaaggagaggacctaggaagtgaacgtttcacaccggattcaaagttgatctccaaatatgcagccccactcaatgcaacacaggaatctcaaaagaaaataatcaatgaggcatcccaattcaaaccaaaaggtatttctgagcacacagttctgtcagtagacggcaaggaggtcattggaccatcttccccagatttggttgttgcatctgaacactctttcccaccacacacaaccgagatgacttctgaatgccaggccccaccactttcagccaccccatctgaatatgttgttctatcgacgaagaggcaatctctaaatctaaaaggtgcatcctcacccatgaatttatcagaagaagatcaagaagacattggacctttttctccagattctgcatttgtgtcagaattctcatttccaccgtatgcaacccaggaagcagagaaaagagaatttgagtgcgattctccaatatgtttaacatcaccatctgagcacactattttgtcagatgaagacactgaagaagcggaactgttctctccagactcagcatcacaagtttcaatccctccctttagaatctcagaaacagagaaaaatgaacttgagcctgattcactattaactgcagtgtctgcttcaggttattcctgcttttcagaagcagatgaggaagacattggatccacagctgctacacctgtatctgagcagttcagttcatcacagaagcaaaaagctgaaactttccctttgatgtctccgcttgaagacttaagtctgccgccttcaacagataaatcagagaaagcagaaattaagccagagattccaacaacctcaacatctgtatctgaatatctcattttggcacagaagcagaaaactcaagcatatttagagcctgagtctgaagacttgattccttcacatttaaccagtgaagtggagaagggagaaagggaggcaagttcatcagtagctgcaatacctgctgctttacctgcacaatcatctatagtaaaggaagaaaccaaacctgcatctccacattcagttttacctgattcagtccctgcaatcaagaaagaacaggaacccacagcagcactcactctaaaagctgcagatgaacagatggctttgtcaaaagtcagaaaggaagaaattgtgcctgattctcaagaagctacagcacatgtatcacaggatcaaaaaatggagcctcagcctccaaatgttccagagtctgagatgaaatattcagttttgcctgacatggtagatgagccaaagaagggtgtcaagcccaaattagttctaaatgtgacttctgaactagaacagagaaagttgtccaagaatgagcctgaagtaataaaaccatattcacctctaaaggaaacatctttatctggacctgaggttttatcagcagtgaaaatggagatgaaacatgattccaaaataacaactacacctatagtgcttcattcagcttcctcaggagtggaaaagcaagttgaacatggtccacctgcactagcattttcagctttgtcagaagaaattaaaaaagaaattgaacccaaagtagaagccaaagaagttaaagctgggttgccagtaatcaaaacatcatcttctcagcattcagataaatctgaggaagcaagggtagaagacaaacaagatcttgtattttctacagtctgtgactctgaacgtttggtttcatcacagaagaagagcttgatgtctacctcagaggtgttagagcctgaacatgagcttccactcagcctatggggtgagataaagaagaaagaaactgaacttccttcatcacaaaatgtgtcacctgcatccaaacatataatcccaaaaggcaaagatgaggaaacagcaagttcatctcctgagttggaaaatttagcatcaggtttagccccaacattactgctcctcagtgatgataagaacaaaccggcagtggaggtatcttctacagctcagggagacttcccatcagaaaaacaagatgttgctttggcagagctgtctttggaacctgagaagaaagacaagccacaccaaccgttggaattaccaaatgctgggtcagaattttctagtgatttaggtagacaaagtggatccataggtacaaaacaagcaaagtctcccataactgaaacagaggattctgtttcagaaaaaggcccagctgagcttaggagcagagaaggaaaagaagaaaatagagagctttgtgcatcttctacgatgcctgcaatttcagagctttcatcattgcttagggaggaatctcagaatgaagaaattaaacctttctctcccaagatcatcagcctagagtcgaaagaaccacctgcctctgtagctgaaggaggcaacccagaagaatttcagccatttactttttctttaaaaggattatcagaggaggttagccatccagccgactttaaaaagggaggaaatcaagaaataggcccattaccaccaactggaaatttgaaggcacaagtcatgggagatattttagataagctaagtgaagaaacaggccacccaaattcatcccaggtactccagagtataacagaaccatcaaagattgctccttctgacctccttgtggaacaaaaaaagacagaaaaagcacttcattcagatcaaactgttaaattacctgatgtaagcacctcttctgaagataaacaagatctgggtattaagcagttttcacttatgagagagaatttgcctttggaacaatcaaaatcatttatgacaaccaagcctgcggatgtcaaagaaacaaaaatggaagaattctttatttctccaaaggatgaaaactggatgttgggaaagccagaaaatgtggctagtcaacacgaacagagaatagcaggatctgtgcagctggattcctctagcagcaatgagctgaggccagggcagctcaaggctgctgtgtccagtaaggaccatacatgtgaagtgagaaagcaggtcctgccgcattctgctgaagaatctcatttgtcatcacaagaagcagtatctgctcttgatacttccagtggtaatacagagaccttatcaagtaaaagttactcttctgaagaagtaaagctggctgaagaaccaaagtctttagtcctagctggaaatgtagagagaaacatagcagaggggaaggagattcattctttgatggagagtgaaagtttgctattggagaaagcaaacacagagctttcctggccttccaaagaagatagccaggaaaaaattaaactacctcctgaaagattcttccagaaaccagtgtctggcctatcagtggaacaggtgaagtcagaaacaatctcctcttctgtcaaaacagcccatttcccggcagaaggtgtggaacctgcattgggcaatgaaaaagaagcacacaggagcacacctccttttcctgaagagaagccattggaagaatcaaaaatggttcagtcaaaggttattgatgatgctgatgagggaaagaaaccatcacctgaagtaaaaatacccacacaaagaaaacccatctcctcaatccatgcaagagagcctcaatccccagagtcacctgaggtgacacaaaatccacctacacaaccaaaggtggctaagccggaccttcctgaggaaaagggaaagaaaggaatttcatctttcaaatcgtggatgtccagcttgttttttggatcgagcactccagataacaaagttgctgaacaagaagacttagaaacacagccaagtccatccgtagaaaaagcagtgactgtgatagatcctgaaggtacaattcccaccaattttaatgtagctgagaaaccagctgatcattcattatcagaggtaaaacttaaaactgctgatgaacccagaggtactttagtaaaatctggtgacggtcaaaacgttaaagaaaaatccatgattttatcaaatgtagaagatttacaacagccaaaattcatttctgaggtgtctagggaagattatggaaaaaaagaaatctcaggcgattcagaggaaatgaacataaactcagtagttacttctgctgatggtgagaaccttgaaattcaatcttattcactaatcggtgagaaattggttatggaagaagccaaaactattgttcctcctcatgttactgatagtaaaagagtccagaagccagcaatcgctcctccatctaaatggaatatttctatttttaaggaagagccaagaagtgatcaaaaacaaaaatcactcctttcatttgatgtagtagataaggtgccacaacagccaaaatcagcttcctccaactttgcaagtaaaaatatcacaaaggaatcagagaaaccagagtcaattattttgccagtagaagaatcaaaaggcagtttaattgatttcagtgaagacagactcaagaaagaaatgcaaaatcctacttccttgaaaatttctgaagaggaaacaaaactcaggtctgttagtccaactgagaagaaagataatttggaaaacagatcatataccttggcagaaaagaaggtgctggcagaaaaacaaaactctgtggccccattagagcttagagatagtaatgaaatagggaagacacaaattacacttggatctagatctactgaactgaaagaatcaaaagccgatgctatgccacagcacttctatcaaaatgaagactacaatgaaagacccaaaatcattgttggttctgaaaaggagaaaggtgaagaaaaagaaaatcaggtatatgtgctttcagaaggaaagaagcagcaggaacatcagccttattctgtgaatgtagccgagtctatgagtagagaatcagatatctctttaggtcattctttggatgaaactcaatcattttcattagttaaagctacatcagttactgaaaaatcagaagccatgctcgcagaggctcacccagaaatcagagaagcaaaggcagtaggaacccaaccacatcctttagaagaaagtaaagttttggtggagaaaaccaagactttcctgccggtggctctttcttgtcgtgatgaaatagagaaccactctttatctcaggaaggaaatctagtattagaaaagtcaagcagagatatgccagatcacagtgaagaaaaagaacagttcagagagtcagagctatcgaaaggcggttcagtagatatcacaaaagaaactgtgaaacaaggatttcaagaaaaggcagtaggaacccaaccacgtcctttagaagaaagtaaagttttggtggagaaaactaagactttcctgccagtggttctttcttgtcatgatgaaatagagaaccactctttgtctcaggaaggaaatctagtgttagaaaagtcaagcagagatatgccagatcacagtgaagaaaaagaacagttcaaagagtcagagctatggaaaggtggttcagtagatatcacaaaagaaagtatgaaagaaggatttccatctaaagaatccgaaaggactttagctcgtccttttgatgaaactaagagctcagaaacaccgccatatttgctgtcacctgtaaaaccacaaactcttgcttcaggagcttctccagaaattaacgcagtgaagaaaaaagaaatgccacgatcagaattgactccagaaaggcatacagttcatactattcagacatctaaagatgacacatccgatgtgcctaaacaatctgttcttgtttcaaagcaccacttggaggctgcggaagatacccgtgtaaaggaaccactgtcttcagcaaaaagcaactatgctcaatttatatctaatacatcagcaagcaatgctgataaaatggtttctaataaagaaatgcccaaggaacctgaagacacatatgcaaaaggtgaagactttacagtgactagtaagccagccggactttcagaagatcagaagactgcctttagtatcatttctgaaggctgtgagatattgaatattcatgctccggcctttatttcttcaatcgatcaggaagaaagtgaacaaatgcaagataaattagaatatttggaagagaaagcctcatttaaaaccataccactccctgatgatagtgaaacagttgcttgtcataaaacattaaagagcaggttagaagatgaaaaagttaccccattgaaagaaaataaacaaaaggaaactcataagacaaaagaagagatatccacagattcagaaactgatttatcatttattcagcccacaattcccagtgaagaggattattttgaaaaatatactttgattgattataacatctccccagacccagaaaaacagaaagctccacagaaattaaatgttgaagagaaactctcaaaggaagttacagaagaaactatctctttcccagtaagttcagtggaaagtgcactagaacatgaatatgacttggtgaaattagatgaaagtttttatggaccagaaaagggccacaacatattatctcatccagagacccaaagccaaaactcagctgacaggaatgtttcaaaggacacaaagagagatgtggactcaaagtcaccggggatgcctttatttgaagcagaggaaggagttctatcacgaacccagatatttcctaccactattaaagtcattgatccagaatttctggaggagccacctgcacttgcatttttatataaggatctgtatgaagaagcagttggagagaaaaagaaggaagaggagacagcttctgaaggtgacagtgtgaattctgaggcatcatttcccagcagaaattctgacactgatgatggaacaggaatatattttgagaagtacatactcaaagatgacattctccatgacacatctctaactcaaaaggaccagggccaaggtctggaagaaaaacgagttggtaaggatgattcataccaaccgatagctgcagaaggggaaatttggggaaagtttggaactatttgcagggagaagagtctggaagaacagaaaggtgtttatggggaaggagaatcagtagaccatgtggagaccgttggtaacgtagcgatgcagaagaaagctcccatcacagaggacgtcagagtggctacccagaaaataagttatgcggttccatttgaagacacccatcatgttctggagcgtgcagatgaagcaggcagtcacggtaatgaagtcggaaatgcaagtccagaggtcaatctgaatgtcccagtacaagtgtccttcccggaggaagaatttgcatctggtgcaactcatgttcaagaaacatcactagaagaacctaaaatcctggtcccacctgagccaagtgaagagaggctccgtaatagccctgttcaggatgagtatgaatttacagaatccctgcataatgaagtggttcctcaagacatattatcagaagaactgtcttcagaatccacacctgaagatgtcttatctcaaggaaaggaatcctttgagcacatcagtgaaaatgaatttgcgagtgaggcagaacaaagtacacctgctgaacaaaaagagttgggcagcgagaggaaagaagaagaccaattatcatctgaggtagtaactgaaaaggcacaaaaagagctgaaaaagtcccagattgacacatactgttacacctgcaaatgtccaatttctgccactgacaaggtgtttggcacccacaaagaccatgaagtttcaacgcttgacacagctataagtgctgtaaaggtaaatagatgttgaacacacataattaataatatatatatacacatttaatttgcttttacattttctcaattttaaagatgattaatatttgatcattgatctttaagcagaatggtctgaaagcaaactaagaatatttctccaagaatttagttaaggtaggcttgacagacattcattgagtacagcccaccctccttatccttgagttctgcatgcttagaatcaaccaaccgcagatc

SEQ ID NO: 465003 - DNA, 6159 bp, Homo sapiens
  misc_feature (6156)..(6156): n is a, c, g, or t
aacctaacaaaccaggaagggtttgcacaaatgaaggagcggccaaagccagccatctcggaagggatgagagaccagttatcagaccaggatgaagagggaaagatcaagcaggagtatatcatatctgacccctccttttccatggtgacagtccaaagggaagatagtgggataacctgggaaaccaattcaagtagatcttctactccttgggcttcagaagaaagtcagacttctggtgtgtgtagtcgggaagggtcaactgtgaattctcctcctggaaatgtttcctttattgtggatgaagtgaaaaaggttcggaaaaggactcataagtcaaagcatggttcaccatcattacgccggaaaggcaacagaaaaagaaattcttttgaatcccaagatgttccaacaaacaaaaaaggcagtcctttaacttcagcaagccaggtactaaccacggagaaagagaagtcatatactggcatttatgataaagcaagaaaaaagaagaccacttcaaatacacctccgattactggggcaatatacaaagaacacaagccattagtgttaagaccagtctacataggaacagtacaatataaaattaagatgtttaattcggttaaagaagaattaattcctctacaattttatggaacattgccaaagggttatgtaattaaagaaatacattataggaaagggaaagatgcatccattagtctagagccagatttggacaatagtggttctaatacagtgtccaaaacacgcaaattagtagcccaaagcatagaggataaagtaaaagaggtttttccaccctggagaggcgcactctccaaaggatcagagtccctaaccttaatgttcagtcatgaagatcaaaagaaaatttatgctgattctcccctaaatgccacatctgcattggagcacacagttccctcttattcaagtagtggcagagcagaacaaggaatacagctcaggcattcacagtcagtgccacaacagccagaagatgaagcaaaaccacatgaagtggaacctccatctgtgacacccgacacacctgcaactatgttcctgagaacaacaaaggaagaatgtgagcttgcttcaccaggaactgcagcttcagagaatgactcttcagtctcaccatcatttgctaatgaggtaaagaaggaagatgtgtattctgctcaccattccatttctctggaggcagcgtcaccaggtctggcagcatctacccaggatggtttggacccagaccaagaacagccggacctgacttcaatagaaagggcagaaccagtctccgcaaaactgacccctacccatcccagtgtcaaaggagagaaggaggaaaacatgcttgagccatccatttctctttctgaacctctaatgttagaagaaccagagaaagaagaaatagaaacttccctacccatagctattacccctgaacctgaagattctaatttagtagaagaagagatcgtagaacttgattacccagaaagcccattggtttccgagaagcccttcccaccacatatgtcccctgaagtggagcacaaagaagaagagcttattctaccattattggcagcatcatctcctgaacatgttgctttgtctgaggaagaaagagaggaaattgcatctgtttctactggttctgcttttgtatcagagtattcagtaccacaggatttgaaccatgaattacaggagcaagaaggtgagccagttcccccatccaatgtagaagctatagctgaacatgcagttttgtcagaagaagagaatgaggaatttgaggcttattccccagctgcagcccctacatctgagagctctctctcaccatccacaactgagaagacttcagagaaccagtctccactgttttcaacagttacaccagaatacatggtcctatcaggagacgaggcctcagaaagtgggtgttacacaccagactccacatctgcttctgaatattcagttccatcactggcaacaaaagagtcactgaagaaaacaattgaccgtaagtccccgttaatattgaaaggtgtttctgagtacatgattccatcagaagagaaggaagacactggatcgtttactccagctgtggcccctgcttctgagccctctctctcaccatccacaaccgaaaagacttctgaatgccagtcaccactgccttctactgccacatcagaacacgtggtcccatcagaaggagaggacctaggaagtgaacgtttcacaccggattcaaagttgatctccaaatatgcagccccactcaatgcaacacaggaatctcaaaagaaaataatcaatgaggcatcccaattcaaaccaaaaggtatttctgagcacacagttctgtcagtagacggcaaggaggtcattggaccatcttccccagatttggttgttgcatctgaacactctttcccaccacacacaaccgagatgacttctgaatgccaggccccaccactttcagccaccccatctgaatatgttgttctatcgacgaagaggcaatctctaaatctaaaaggtgcatcctcacccatgaatttatcagaagaagatcaagaagacattggacctttttctccagattctgcatttgtgtcagaattctcatttccaccgtatgcaacccaggaagcagagaaaagagaatttgagtgcgattctccaatatgtttaacatcaccatctgagcacactattttgtcagatgaagacactgaagaagcggaactgttctctccagactcagcatcacaagtttcaatccctccctttagaatctcagaaacagagaaaaatgaacttgagcctgattcactattaactgcagtgtctgcttcaggttattcctgcttttcagaagcagatgaggaagacattggatccacagctgctacacctgtatctgagcagttcagttcatcacagaagcaaaaagctgaaactttccctttgatgtctccgcttgaagacttaagtctgccgccttcaacagataaatcagagaaagcagaaattaagccagagattccaacaacctcaacatctgtatctgaatatctcattttggcacagaagcagaaaactcaagcatatttagagcctgagtctgaagacttgattccttcacatttaaccagtgaagtggagaagggagaaagggaggcaagttcatcagtagctgcaatacctgctgctttacctgcacaatcatctatagtaaaggaagaaaccaaacctgcatctccacattcagttttacctgattcagtccctgcaatcaagaaagaacaggaacccacagcagcactcactctaaaagctgcagatgaacagatggctttgtcaaaagtcagaaaggaagaaattgtgcctgattctcaagaagctacagcacatgtatcacaggatcaaaaaatggagcctcagcctccaaatgttccagagtctgagatgaaatattcagttttgcctgacatggtagatgagccaaagaagggtgtcaagcccaaattagttctaaatgtgacttctgaactagaacagagaaagttgtccaagaatgagcctgaagtaataaaaccatattcacctctaaaggaaacatctttatctggacctgaggttttatcagcagtgaaaatggagatgaaacatgattccaaaataacaactacacctatagtgcttcattcagcttcctcaggagtggaaaagcaagttgaacatggtccacctgcactagcattttcagctttgtcagaagaaattaaaaaagaaattgaacccaaagtagaagccaaagaagttaaagctgggttgccagtaatcaaaacatcatcttctcagcattcagataaatctgaggaagcaagggtagaagacaaacaagatcttgtattttctacagtctgtgactctgaacgtttggtttcatcacagaagaagagcttgatgtctacctcagaggtgttagagcctgaacatgagcttccactcagcctatggggtgagataaagaagaaagaaactgaacttccttcatcacaaaatgtgtcacctgcatccaaacatataatcccaaaaggcaaagatgaggaaacagcaagttcatctcctgagttggaaaatttagcatcaggtttagccccaacattactgctcctcagtgatgataagaacaaaccggcagtggaggtatcttctacagctcagggagacttcccatcagaaaaacaagatgttgctttggcagagctgtctttggaacctgagaagaaagacaagccacaccaaccgttggaattaccaaatgctgggtcagaattttctagtgatttaggtagacaaagtggatccataggtacaaaacaagcaaagtctcccataactgaaacagaggattctgtttcagaaaaaggcccagctgagcttaggagcagagaaggaaaagaagaaaatagagagctttgtgcatcttctacgatgcctgcaatttcagagctttcatcattgcttagggaggaatctcagaatgaagaaattaaacctttctctcccaagatcatcagcctagagtcgaaagaaccacctgcctctgtagctgaaggaggcaacccagaagaatttcagccatttactttttctttaaaaggattatcagaggaggttagccatccagccgactttaaaaagggaggaaatcaagaaataggcccattaccaccaactggaaatttgaaggcacaagtcatgggagatattttagataagctaagtgaagaaacaggccacccaaattcatcccaggtactccagagtataacagaaccatcaaagattgctccttctgacctccttgtggaacaaaaaaagacagaaaaagcacttcattcagatcaaactgttaaattacctgatgtaagcacctcttctgaagataaacaagatctgggtattaagcagttttcacttatgagagagaatttgcctttggaacaatcaaaatcatttatgacaaccaagcctgcggatgtcaaagaaacaaaaatggaagaattctttatttctccaaaggatgaaaactggatgttgggaaagccagaaaatgtggctagtcaacacgaacagagaatagcaggatctgtgcagctggattcctctagcagcaatgagctgaggccagggcagctcaaggctgctgtgtccagtaaggaccatacatgtgaagtgagaaagcaggtcctgccgcattctgctgaagaatctcatttgtcatcacaagaagcagtatctgctcttgatacttccagtggtaatacagagaccttatcaagtaaaagttactcttctgaagaagtaaagctggctgaagaaccaaagtctttagtcctagctggaaatgtagagagaaacatagcagaggggaaggagattcattctttgatggagagtgaaagtttgctattggagaaagcaaacacagagctttcctggccttccaaagaagatagccaggaaaaaattaaactacctcctgaaagattcttccagaaaccagtgtctggcctatcagtggaacaggtgaagtcagaaacaatctcctcttctgtcaaaacagcccatttcccggcagaaggtgtggaacctgcattgggcaatgaaaaagaagcacacaggagcacacctccttttcctgaagagaagccattggaagaatcaaaaatggttcagtcaaaggttattgatgatgctgatgagggaaagaaaccatcacctgaagtaaaaatacccacacaaagaaaacccatctcctcaatccatgcaagagagcctcaatccaaagattcatctcttatatctgtagatcgtcagtctacaaagtggaaggggttggagtggttggcccctgttactttgggttgaattagttgggaaaaagtggtaggggttctgaaatttcaattgtgggggaaggaaatggattagggctataaatgttggagaaaatatgggtgaatggtgggggggagcattgggggggaggaggtctaagaacatatatgttgttantgg

SEQ ID NO: 465004 - DNA, 10343 bp, Homo sapiens
aacctaacaaaccaggaagggtttgcacaaatgaaggagcggccaaagccagccatctcggaagggatgagagaccagttatcagaccaggatgaagagggaaagatcaagcaggagtatatcatatctgacccctccttttccatggtgacagtccaaagggaagatagtgggataacctgggaaaccaattcaagtagatcttctactccttgggcttcagaagaaagtcagacttctggtgtgtgtagtcgggaagggtcaactgtgaattctcctcctggaaatgtttcctttattgtggatgaagtgaaaaaggttcggaaaaggactcataagtcaaagcatggttcaccatcattacgccggaaaggcaacagaaaaagaaattcttttgaatcccaagatgttccaacaaacaaaaaaggcagtcctttaacttcagcaagccaggtactaaccacggagaaagagaagtcatatactggcatttatgataaagcaagaaaaaagaagaccacttcaaatacacctccgattactggggcaatatacaaagaacacaagccattagtgttaagaccagtctacataggaacagtacaatataaaattaagatgtttaattcggttaaagaagaattaattcctctacaattttatggaacattgccaaagggttatgtaattaaagaaatacattataggaaagggaaagatgcatccattagtctagagccagatttggacaatagtggttctaatacagtgtccaaaacacgcaaattagtagcccaaagcatagaggataaagtaaaagaggtttttccaccctggagaggcgcactctccaaaggatcagagtccctaaccttaatgttcagtcatgaagatcaaaagaaaatttatgctgattctcccctaaatgccacatctgcattggagcacacagttccctcttattcaagtagtggcagagcagaacaaggaatacagctcaggcattcacagtcagtgccacaacagccagaagatgaagcaaaaccacatgaagtggaacctccatctgtgacacccgacacacctgcaactatgttcctgagaacaacaaaggaagaatgtgagcttgcttcaccaggaactgcagcttcagagaatgactcttcagtctcaccatcatttgctaatgaggtaaagaaggaagatgtgtattctgctcaccattccatttctctggaggcagcgtcaccaggtctggcagcatctacccaggatggtttggacccagaccaagaacagccggacctgacttcaatagaaagggcagaaccagtctccgcaaaactgacccctacccatcccagtgtcaaaggagagaaggaggaaaacatgcttgagccatccatttctctttctgaacctctaatgttagaagaaccagagaaagaagaaatagaaacttccctacccatagctattacccctgaacctgaagattctaatttagtagaagaagagatcgtagaacttgattacccagaaagcccattggtttccgagaagcccttcccaccacatatgtcccctgaagtggagcacaaagaagaagagcttattctaccattattggcagcatcatctcctgaacatgttgctttgtctgaggaagaaagagaggaaattgcatctgtttctactggttctgcttttgtatcagagtattcagtaccacaggatttgaaccatgaattacaggagcaagaaggtgagccagttcccccatccaatgtagaagctatagctgaacatgcagttttgtcagaagaagagaatgaggaatttgaggcttattccccagctgcagcccctacatctgagagctctctctcaccatccacaactgagaagacttcagagaaccagtctccactgttttcaacagttacaccagaatacatggtcctatcaggagacgaggcctcagaaagtgggtgttacacaccagactccacatctgcttctgaatattcagttccatcactggcaacaaaagagtcactgaagaaaacaattgaccgtaagtccccgttaatattgaaaggtgtttctgagtacatgattccatcagaagagaaggaagacactggatcgtttactccagctgtggcccctgcttctgagccctctctctcaccatccacaaccgaaaagacttctgaatgccagtcaccactgccttctactgccacatcagaacacgtggtcccatcagaaggagaggacctaggaagtgaacgtttcacaccggattcaaagttgatctccaaatatgcagccccactcaatgcaacacaggaatctcaaaagaaaataatcaatgaggcatcccaattcaaaccaaaaggtatttctgagcacacagttctgtcagtagacggcaaggaggtcattggaccatcttccccagatttggttgttgcatctgaacactctttcccaccacacacaaccgagatgacttctgaatgccaggccccaccactttcagccaccccatctgaatatgttgttctatcgacgaagaggcaatctctaaatctaaaaggtgcatcctcacccatgaatttatcagaagaagatcaagaagacattggacctttttctccagattctgcatttgtgtcagaattctcatttccaccgtatgcaacccaggaagcagagaaaagagaatttgagtgcgattctccaatatgtttaacatcaccatctgagcacactattttgtcagatgaagacactgaagaagcggaactgttctctccagactcagcatcacaagtttcaatccctccctttagaatctcagaaacagagaaaaatgaacttgagcctgattcactattaactgcagtgtctgcttcaggttattcctgcttttcagaagcagatgaggaagacattggatccacagctgctacacctgtatctgagcagttcagttcatcacagaagcaaaaagctgaaactttccctttgatgtctccgcttgaagacttaagtctgccgccttcaacagataaatcagagaaagcagaaattaagccagagattccaacaacctcaacatctgtatctgaatatctcattttggcacagaagcagaaaactcaagcatatttagagcctgagtctgaagacttgattccttcacatttaaccagtgaagtggagaagggagaaagggaggcaagttcatcagtagctgcaatacctgctgctttacctgcacaatcatctatagtaaaggaagaaaccaaacctgcatctccacattcagttttacctgattcagtccctgcaatcaagaaagaacaggaacccacagcagcactcactctaaaagctgcagatgaacagatggctttgtcaaaagtcagaaaggaagaaattgtgcctgattctcaagaagctacagcacatgtatcacaggatcaaaaaatggagcctcagcctccaaatgttccagagtctgagatgaaatattcagttttgcctgacatggtagatgagccaaagaagggtgtcaagcccaaattagttctaaatgtgacttctgaactagaacagagaaagttgtccaagaatgagcctgaagtaataaaaccatattcacctctaaaggaaacatctttatctggacctgaggttttatcagcagtgaaaatggagatgaaacatgattccaaaataacaactacacctatagtgcttcattcagcttcctcaggagtggaaaagcaagttgaacatggtccacctgcactagcattttcagctttgtcagaagaaattaaaaaagaaattgaacccaaagtagaagccaaagaagttaaagctgggttgccagtaatcaaaacatcatcttctcagcattcagataaatctgaggaagcaagggtagaagacaaacaagatcttgtattttctacagtctgtgactctgaacgtttggtttcatcacagaagaagagcttgatgtctacctcagaggtgttagagcctgaacatgagcttccactcagcctatggggtgagataaagaagaaagaaactgaacttccttcatcacaaaatgtgtcacctgcatccaaacatataatcccaaaaggcaaagatgaggaaacagcaagttcatctcctgagttggaaaatttagcatcaggtttagccccaacattactgctcctcagtgatgataagaacaaaccggcagtggaggtatcttctacagctcagggagacttcccatcagaaaaacaagatgttgctttggcagagctgtctttggaacctgagaagaaagacaagccacaccaaccgttggaattaccaaatgctgggtcagaattttctagtgatttaggtagacaaagtggatccataggtacaaaacaagcaaagtctcccataactgaaacagaggattctgtttcagaaaaaggcccagctgagcttaggagcagagaaggaaaagaagaaaatagagagctttgtgcatcttctacgatgcctgcaatttcagagctttcatcattgcttagggaggaatctcagaatgaagaaattaaacctttctctcccaagatcatcagcctagagtcgaaagaaccacctgcctctgtagctgaaggaggcaacccagaagaatttcagccatttactttttctttaaaaggattatcagaggaggttagccatccagccgactttaaaaagggaggaaatcaagaaataggcccattaccaccaactggaaatttgaaggcacaagtcatgggagatattttagataagctaagtgaagaaacaggccacccaaattcatcccaggtactccagagtataacagaaccatcaaagattgctccttctgacctccttgtggaacaaaaaaagacagaaaaagcacttcattcagatcaaactgttaaattacctgatgtaagcacctcttctgaagataaacaagatctgggtattaagcagttttcacttatgagagagaatttgcctttggaacaatcaaaatcatttatgacaaccaagcctgcggatgtcaaagaaacaaaaatggaagaattctttatttctccaaaggatgaaaactggatgttgggaaagccagaaaatgtggctagtcaacacgaacagagaatagcaggatctgtgcagctggattcctctagcagcaatgagctgaggccagggcagctcaaggctgctgtgtccagtaaggaccatacatgtgaagtgagaaagcaggtcctgccgcattctgctgaagaatctcatttgtcatcacaagaagcagtatctgctcttgatacttccagtggtaatacagagaccttatcaagtaaaagttactcttctgaagaagtaaagctggctgaagaaccaaagtctttagtcctagctggaaatgtagagagaaacatagcagaggggaaggagattcattctttgatggagagtgaaagtttgctattggagaaagcaaacacagagctttcctggccttccaaagaagatagccaggaaaaaattaaactacctcctgaaagattcttccagaaaccagtgtctggcctatcagtggaacaggtgaagtcagaaacaatctcctcttctgtcaaaacagcccatttcccggcagaaggtgtggaacctgcattgggcaatgaaaaagaagcacacaggagcacacctccttttcctgaagagaagccattggaagaatcaaaaatggttcagtcaaaggttattgatgatgctgatgagggaaagaaaccatcacctgaagtaaaaatacccacacaaagaaaacccatctcctcaatccatgcaagagagcctcaatccccagagtcacctgaggtgacacaaaatccacctacacaaccaaaggtggctaagccggaccttcctgaggaaaagggaaagaaaggaatttcatctttcaaatccactccagataacaaagttgctgaacaagaagacttagaaacacagccaagtccatccgtagaaaaagcagtgactgtgatagatcctgaaggtacaattcccaccaattttaatgtagctgagaaaccagctgatcattcattatcagaggtaaaacttaaaactgctgatgaacccagaggtactttagtaaaatctggtgacggtcaaaacgttaaagaaaaatccatgattttatcaaatgtagaagatttacaacagccaaaattcatttctgaggtgtctagggaagattatggaaaaaaagaaatctcaggcgattcagaggaaatgaacataaactcagtagttacttctgctgatggtgagaaccttgaaattcaatcttattcactaatcggtgagaaattggttatggaagaagccaaaactattgttcctcctcatgttactgatagtaaaagagtccagaagccagcaatcgctcctccatctaaatggaatatttctatttttaaggaagagccaagaagtgatcaaaaacaaaaatcactcctttcatttgatgtagtagataaggtgccacaacagccaaaatcagcttcctccaactttgcaagtaaaaatatcacaaaggaatcagagaaaccagagtcaattattttgccagtagaagaatcaaaaggcagtttaattgatttcagtgaagacagactcaagaaagaaatgcaaaatcctacttccttgaaaatttctgaagaggaaacaaaactcaggtctgttagtccaactgagaagaaagataatttggaaaacagatcatataccttggcagaaaagaaggtgctggcagaaaaacaaaactctgtggccccattagagcttagagatagtaatgaaatagggaagacacaaattacacttggatctagatctactgaactgaaagaatcaaaagccgatgctatgccacagcacttctatcaaaatgaagactacaatgaaagacccaaaatcattgttggttctgaaaaggagaaaggtgaagaaaaagaaaatcaggtatatgtgctttcagaaggaaagaagcagcaggaacatcagccttattctgtgaatgtagccgagtctatgagtagagaatcagatatctctttaggtcattctttggatgaaactcaatcattttcattagttaaagctacatcagttactgaaaaatcagaagccatgctcgcagaggctcacccagaaatcagagaagcaaaggcagtaggaacccaaccacatcctttagaagaaagtaaagttttggtggagaaaaccaagactttcctgccggtggctctttcttgtcgtgatgaaatagagaaccactctttatctcaggaaggaaatctagtattagaaaagtcaagcagagatatgccagatcacagtgaagaaaaagaacagttcagagagtcagagctatcgaaaggcggttcagtagatatcacaaaagaaactgtgaaacaaggatttcaagaaaaggcagtaggaacccaaccacgtcctttagaagaaagtaaagttttggtggagaaaactaagactttcctgccagtggttctttcttgtcatgatgaaatagagaaccactctttgtctcaggaaggaaatctagtgttagaaaagtcaagcagagatatgccagatcacagtgaagaaaaagaacagttcaaagagtcagagctatggaaaggtggttcagtagatatcacaaaagaaagtatgaaagaaggatttccatctaaagaatccgaaaggactttagctcgtccttttgatgaaactaagagctcagaaacaccgccatatttgctgtcacctgtaaaaccacaaactcttgcttcaggagcttctccagaaattaacgcagtgaagaaaaaagaaatgccacgatcagaattgactccagaaaggcatacagttcatactattcagacatctaaagatgacacatccgatgtgcctaaacaatctgttcttgtttcaaagcaccacttggaggctgcggaagatacccgtgtaaaggaaccactgtcttcagcaaaaagcaactatgctcaatttatatctaatacatcagcaagcaatgctgataaaatggtttctaataaagaaatgcccaaggaacctgaagacacatatgcaaaaggtgaagactttacagtgactagtaagccagccggactttcagaagatcagaagactgcctttagtatcatttctgaaggctgtgagatattgaatattcatgctccggcctttatttcttcaatcgatcaggaagaaagtgaacaaatgcaagataaattagaatatttggaagagaaagcctcatttaaaaccataccactccctgatgatagtgaaacagttgcttgtcataaaacattaaagagcaggttagaagatgaaaaagttaccccattgaaagaaaataaacaaaaggaaactcataagacaaaagaagagatatccacagattcagaaactgatttatcatttattcagcccacaattcccagtgaagaggattattttgaaaaatatactttgattgattataacatctccccagacccagaaaaacagaaagctccacagaaattaaatgttgaagagaaactctcaaaggaagttacagaagaaactatctctttcccagtaagttcagtggaaagtgcactagaacatgaatatgacttggtgaaattagatgaaagtttttatggaccagaaaagggccacaacatattatctcatccagagacccaaagccaaaactcagctgacaggaatgtttcaaaggacacaaagagagatgtggactcaaagtcaccggggatgcctttatttgaagcagaggaaggagttctatcacgaacccagatatttcctaccactattaaagtcattgatccagaatttctggaggagccacctgcacttgcatttttatataaggatctgtatgaagaagcagttggagagaaaaagaaggaagaggagacagcttctgaaggtgacagtgtgaattctgaggcatcatttcccagcagaaattctgacactgatgatggaacaggaatatattttgagaagtacatactcaaagatgacattctccatgacacatctctaactcaaaaggaccagggccaaggtctggaagaaaaacgagttggtaaggatgattcataccaaccgatagctgcagaaggggaaatttggggaaagtttggaactatttgcagggagaagagtctggaagaacagaaaggtgtttatggggaaggagaatcagtagaccatgtggagaccgttggtaacgtagcgatgcagaagaaagctcccatcacagaggacgtcagagtggctacccagaaaataagttatgcggttccatttgaagacacccatcatgttctggagcgtgcagatgaagcaggcagtcacggtaatgaagtcggaaatgcaagtccagaggtcaatctgaatgtcccagtacaagtgtccttcccggaggaagaatttgcatctggtgcaactcatgttcaagaaacatcactagaagaacctaaaatcctggtcccacctgagccaagtgaagagaggctccgtaatagccctgttcaggatgagtatgaatttacagaatccctgcataatgaagtggttcctcaagacatattatcagaagaactgtcttcagaatccacacctgaagatgtcttatctcaaggaaaggaatcctttgagcacatcagtgaaaatgaatttgcgagtgaggcagaacaaagtacacctgctgaacaaaaagagttgggcagcgagaggaaagaagaagaccaattatcatctgaggtagtaactgaaaaggcacaaaaagagctgaaaaagtcccagattgacacatactgttacacctgcaaatgtccaatttctgccactgacaaggtgtttggcacccacaaagaccatgaagtttcaacgcttgacacagctataagtgctgtaaaggtaaatagatgttgaacacacataattaataatatatatatacacatttaatttgcttttacattttctcaattttaaagatgattaatatttgatcattgatctttaagcagaatggtctgaaagcaaactaagaatatttctccaagaatttagttaaggtaggcttgacagacattcattgagtacagcccaccctccttatccttgagttctgcatgcttagaatcaaccaaccgcagatc

SEQ ID NO: 465005 - DNA, 5952 bp, Homo sapiens
catctgcagatgaacattcagttcttgcagaagaagacaaggtggcaattaaaggtgcttctcccattgaaacttcatccaaacatttagcttggtcagaggcagagaaggaaaagaagaaaatagagagctttgtgcatcttctacgatgcctgcaatttcagagctttcatcattgcttagggaggaatctcagaatgaagaaattaaacctttctctcccaagatcatcagcctagagtcgaaagaaccacctgcctctgtagctgaaggaggcaacccagaagaatttcagccatttactttttctttaaaaggattatcagaggaggttagccatccagccgactttaaaaagggaggaaatcaagaaataggcccattaccaccaactggaaatttgaaggcacaagtcatgggagatattttagataagctaagtgaagaaacaggccacccaaattcatcccaggtactccagagtataacagaaccatcaaagattgctccttctgacctccttgtggaacaaaaaaagacagaaaaagcacttcattcagatcaaactgttaaattacctgatgtaagcacctcttctgaagataaacaagatctgggtattaagcagttttcacttatgagagagaatttgcctttggaacaatcaaaatcatttatgacaaccaagcctgcggatgtcaaagaaacaaaaatggaagaattctttatttctccaaaggatgaaaactggatgttgggaaagccagaaaatgtggctagtcaacacgaacagagaatagcaggatctgtgcagctggattcctctagcagcaatgagctgaggccagggcagctcaaggctgctgtgtccagtaaggaccatacatgtgaagtgagaaagcaggtcctgccgcattctgctgaagaatctcatttgtcatcacaagaagcagtatctgctcttgatacttccagtggtaatacagagaccttatcaagtaaaagttactcttctgaagaagtaaagctggctgaagaaccaaagtctttagtcctagctggaaatgtagagagaaacatagcagaggggaaggagattcattctttgatggagagtgaaagtttgctattggagaaagcaaacacagagctttcctggccttccaaagaagatagccaggaaaaaattaaactacctcctgaaagattcttccagaaaccagtgtctggcctatcagtggaacaggtgaagtcagaaacaatctcctcttctgtcaaaacagcccatttcccggcagaaggtgtggaacctgcattgggcaatgaaaaagaagcacacaggagcacacctccttttcctgaagagaagccattggaagaatcaaaaatggttcagtcaaaggttattgatgatgctgatgagggaaagaaaccatcacctgaagtaaaaatacccacacaaagaaaacccatctcctcaatccatgcaagagagcctcaatccccagagtcacctgaggtgacacaaaatccacctacacaaccaaaggtggctaagccggaccttcctgaggaaaagggaaagaaaggaatttcatctttcaaatcgtggatgtccagcttgttttttggatcgagcactccagataacaaagttgctgaacaagaagacttagaaacacagccaagtccatccgtagaaaaagcagtgactgtgatagatcctgaaggtacaattcccaccaattttaatgtagctgagaaaccagctgatcattcattatcagaggtaaaacttaaaactgctgatgaacccagaggtactttagtaaaatctggtgacggtcaaaacgttaaagaaaaatccatgattttatcaaatgtagaagatttacaacagccaaaattcatttctgaggtgtctagggaagattatggaaaaaaagaaatctcaggcgattcagaggaaatgaacataaactcagtagttacttctgctgatggtgagaaccttgaaattcaatcttattcactaatcggtgagaaattggttatggaagaagccaaaactattgttcctcctcatgttactgatagtaaaagagtccagaagccagcaatcgctcctccatctaaatggaatatttctatttttaaggaagagccaagaagtgatcaaaaacaaaaatcactcctttcatttgatgtagtagataaggtgccacaacagccaaaatcagcttcctccaactttgcaagtaaaaatatcacaaaggaatcagagaaaccagagtcaattattttgccagtagaagaatcaaaaggcagtttaattgatttcagtgaagacagactcaagaaagaaatgcaaaatcctacttccttgaaaatttctgaagaggaaacaaaactcaggtctgttagtccaactgagaagaaagataatttggaaaacagatcatataccttggcagaaaagaaggtgctggcagaaaaacaaaactctgtggccccattagagcttagagatagtaatgaaatagggaagacacaaattacacttggatctagatctactgaactgaaagaatcaaaagccgatgctatgccacagcacttctatcaaaatgaagactacaatgaaagacccaaaatcattgttggttctgaaaaggagaaaggtgaagaaaaagaaaatcaggtatatgtgctttcagaaggaaagaagcagcaggaacatcagccttattctgtgaatgtagccgagtctatgagtagagaatcagatatctctttaggtcattctttggatgaaactcaatcattttcattagttaaagctacatcagttactgaaaaatcagaagccatgctcgcagaggctcacccagaaatcagagaagcaaaggcagtaggaacccaaccacatcctttagaagaaagtaaagttttggtggagaaaaccaagactttcctgccggtggctctttcttgtcgtgatgaaatagagaaccactctttatctcaggaaggaaatctagtattagaaaagtcaagcagagatatgccagatcacagtgaagaaaaagaacagttcagagagtcagagctatcgaaaggcggttcagtagatatcacaaaagaaactgtgaaacaaggatttcaagaaaaggcagtaggaacccaaccacgtcctttagaagaaagtaaagttttggtggagaaaactaagactttcctgccagtggttctttcttgtcatgatgaaatagagaaccactctttgtctcaggaaggaaatctagtgttagaaaagtcaagcagagatatgccagatcacagtgaagaaaaagaacagttcaaagagtcagagctatggaaaggtggttcagtagatatcacaaaagaaagtatgaaagaaggatttccatctaaagaatccgaaaggactttagctcgtccttttgatgaaactaagagctcagaaacaccgccatatttgctgtcacctgtaaaaccacaaactcttgcttcaggagcttctccagaaattaacgcagtgaagaaaaaagaaatgccacgatcagaattgactccagaaaggcatacagttcatactattcagacatctaaagatgacacatccgatgtgcctaaacaatctgttcttgtttcaaagcaccacttggaggctgcggaagatacccgtgtaaaggaaccactgtcttcagcaaaaagcaactatgctcaatttatatctaatacatcagcaagcaatgctgataaaatggtttctaataaagaaatgcccaaggaacctgaagacacatatgcaaaaggtgaagactttacagtgactagtaagccagccggactttcagaagatcagaagactgcctttagtatcatttctgaaggctgtgagatattgaatattcatgctccggcctttatttcttcaatcgatcaggaagaaagtgaacaaatgcaagataaattagaatatttggaagagaaagcctcatttaaaaccataccactccctgatgatagtgaaacagttgcttgtcataaaacattaaagagcaggttagaagatgaaaaagttaccccattgaaagaaaataaacaaaaggaaactcataagacaaaagaagagatatccacagattcagaaactgatttatcatttattcagcccacaattcccagtgaagaggattattttgaaaaatatactttgattgattataacatctccccagacccagaaaaacagaaagctccacagaaattaaatgttgaagagaaactctcaaaggaagttacagaagaaactatctctttcccagtaagttcagtggaaagtgcactagaacatgaatatgacttggtgaaattagatgaaagtttttatggaccagaaaagggccacaacatattatctcatccagagacccaaagccaaaactcagctgacaggaatgtttcaaaggacacaaagagagatgtggactcaaagtcaccggggatgcctttatttgaagcagaggaaggagttctatcacgaacccagatatttcctaccactattaaagtcattgatccagaatttctggaggagccacctgcacttgcatttttatataaggatctgtatgaagaagcagttggagagaaaaagaaggaagaggagacagcttctgaaggtgacagtgtgaattctgaggcatcatttcccagcagaaattctgacactgatgatggaacaggaatatattttgagaagtacatactcaaagatgacattctccatgacacatctctaactcaaaaggaccagggccaaggtctggaagaaaaacgagttggtaaggatgattcataccaaccgatagctgcagaaggggaaatttggggaaagtttggaactatttgcagggagaagagtctggaagaacagaaaggtgtttatggggaaggagaatcagtagaccatgtggagaccgttggtaacgtagcgatgcagaagaaagctcccatcacagaggacgtcagagtggctacccagaaaataagttatgcggttccatttgaagacacccatcatgttctggagcgtgcagatgaagcaggcagtcacggtaatgaagtcggaaatgcaagtccagaggtcaatctgaatgtcccagtacaagtgtccttcccggaggaagaatttgcatctggtgcaactcatgttcaagaaacatcactagaagaacctaaaatcctggtcccacctgagccaagtgaagagaggctccgtaatagccctgttcaggatgagtatgaatttacagaatccctgcataatgaagtggttcctcaagacatattatcagaagaactgtcttcagaatccacacctgaagatgtcttatctcaaggaaaggaatcctttgagcacatcagtgaaaatgaatttgcgagtgaggcagaacaaagtacacctgctgaacaaaaagagttgggcagcgagaggaaagaagaagaccaattatcatctgaggtagtaactgaaaaggcacaaaaagagctgaaaaagtcccagattgacacatactgttacacctgcaaatgtccaatttctgccactgacaaggtgtttggcacccacaaagaccatgaagtttcaacgcttgacacagctataagtgctgtaaaggtaaatagatgttgaacacacataattaataatatatatatacacatttaatttgcttttacattttctcaattttaaagatgattaatatttgatcattgatctttaagcagaatggtctgaaagcaaactaagaatatttctccaagaatttagttaaggtaggcttgacagacattcattgagtacagcccaccctccttatccttgagttctgcatgcttagaatcaaccaaccgcagatc

SEQ ID NO: 465006 - DNA, 2906 bp, Homo sapiens
tctctcctcaaatatggctggttggagaaaaaggaatgtaacggaacatatcaaaggagatgtctctcctggccgcttgacaactctggtgggatcttcccatgaccagcgctgctgtatgactcacggctccacttctttccctgcccttttgtggcaggaagggaagatgctgtgcttctcactcatgaattgtgcttcttatgactcagtcggccagcctgttagcattgatttgttcttggtggacaccgttgggcagaaggccctgctaaccacagaagcgagggtgaagtgtgcgctcaccaccatcagcaaggtgaatgatggtgccttgattatgggccaagaggcagatgcatgcatgcttttccacacagcacccttttattgaatgcaaaatagaactttaaagaaaaaaaatggtgaagtttaacgttagtcggttttactaataactgtattacaaaagcttggtactacatgaagtgtaataattggagctattcaagtaacggaaggtgttgccccgagaacagtgaggtcccatcactggacgtgttccacggagactgctgaaggtttgtttattaattgtttttggtaagttttgttgctgctggttgtggggggtacgtactgctttttttgagctgtagtatttttgggaaaggtcttgtagtttcactcttgaagttagtaaaaccactgaacctactgggaagaaggaacaacttcagactcttatacttaagagctgtaactttcatctggaaggtctgtagctctactcgtgagcaagcgggaccactgaacccccccaaccaccaattaacgaatgaaactcctgatatatccgaacctcaaaaggaacgaactttggatataccacctttaagaactgtaatgctcaccgtgagggtccgtggcttcattcttgaagttagtgagaccaagaacccacccatgctggacacaaagggagcatgtatatatatatatatatatatatatatatatatatatatccacgttgggaaagaaatctatgttatggaggaagttagaccaaatagtgtctaggaccccttctatattttcctgaagttgctgtgacgtagcggaaacccagggcttaaacaacaaaatttatttttctctttttctggaggctcgagggctgaaatcaatgtttgggcagggacaagctccttctgatgccccagggaaggctctgctccagcctctttccagcttctagttctctggcttgtggcggtgttgttccagcttttacgtggcattctccctgtatgtatgtctgcatctagatttctccttaaaaggtcacaagtcctgtaggattagttttcctctggcgtgagttcatcttgactaattacatgtccaacaactgtatcttcgaattaagtttcagataaggccacatcctgaggtaagaggggctaggacttgaacatacgaatttgcaggggacacaatttaacccataacactttccaactctgcaatttgattgaccagaataaagacatatacaagtataactaaaataaggcacccatttacgctattcgtagccgtttttagttaactgcgcatctaaacttggcattcacgtgtctggtcttaaagagaacgtgtgtttttttcttatcctgaattcctttcagaagacctttcactgtccatattccattagctccatggaggacttacttcctgcaggctctgcttgcctcccacaagagattctttgccttgattgcacttaatagaagtataatctggccttcaaatcacccgttcatttgattttcccagtaatccctttgctctctgtgtctgcatttgccagctgggtctagagctgactttttcccatctgaagggaggatgcttcccccgttaacattcgcttttcttcctttgaaccgtgagggtgtgtggatgatccctcaggacttaaaccccgacaaacctcagcaacaccagaacatcgctttccaatccctccttaatcagaacgtaatgaaactttgaaacaaaagcttttcaaattagatgaatgattccatcacaggagatcaaaggcaggacagctaattaggacaaaatcttgtccacagagtttctctggtaataatggaaatattcttcttatcatattacaagaaaaataggaaaattcatatatccggtataatttcaactgtggggacaaaacagaaaaagggctgtagtgactccagggaacgtgtgaacagtggttatcagcggatcacagaatgcaggaaaatatccatttctatctttaaactgatctgaaaatttaggaccagagtggaagtcaacactggccctgcgtgtagtttcagaaaaggcgcctcctggacctgccgcactttgataccctcctttgcacaccccatttcatttgtcctgctatcaacttgacatcagcatttccacacccaaatatcccttatatgctcttctgacagtgaggatgtttgctccctactgaaacagagtttagaactcacaccttgttaacaggttgtcaaaattcgttttgctagtctattgtttttcttctaatacaaaaagatttgctgatttgttctttcggattattataccacatttcctctgtgtctaagccgtgcttgaaagaacagacatttttcagagcctgttgctggtaactttcttcacagaacactgatgctttgttggtggctgggaagccagtggaagctttttcagggtggctgccttgatcttctcattgaaaacagtatactgctgactgtgattcctactgttatgggagagagatgaagttttttctttttctctttcttttatattcttttaaaaaa

SEQ ID NO: 465007 - DNA, 2427 bp, Homo sapiens
cgctgtgatcaatgattcctgtctggccagagctggtttaaatgttccctctatggggctcagaagaagacaagaaaatgtgggaaagtgtggtacttcctagagatttgttgaatggctttgaccaaggtgctgatagtgatgtggacaataaagcccaggctgaggtgatctcagacagaaatgaggaacttgtggggaactggagcaaagctgcagaaatctgcataactaatgaggagcccaatgttaatcaccaagacaatggggaaaatgtccccagggcatgtcagaagtcttcatggcagcccctcccatcacaggcctggagacctaggaggaaaaagtggttttgtgggctggacacagggtccctgtgctgtgtgcagcctagggacttggtgccttgcaccgcagccactccagccctggctaaaaggggccaatgtagagctcgggccacggtttcagagggtgcaagcctcaagcctttgcagcttacatgtggtgttgagcctatgagtgcacagaaggcagtgcagaagggaaatgtgggatgggagcccccacacagagtgcctactggggcactgcctggtggagatataagaagaaggccaccatcttccagaccccagaatggtagatccacttacagcttgcactgtgtgactggaaaagatgtggacactcaacaccagcccatgaaggcagccatgagggaggctgtactctgcaaaaccacagaggtagagctgctcaagaccatgggaatccacctcttgcataagcgcgaccagggtaaagatgaaaacgtgtaatttcctcttatgctcataaattttcaacattacttcttaaaaaaaatcatgtttttctgctagacttgtacaattctagctaagagcctgctgtgtagagcatgtcaaaatcttttgagctaataactgcatctgacttgataaacagagctgtactattttttttccgtgaatattatgcatttgcccaattttacattttttaatgaaatgtccaaggcctattatttcagaaaaacatacattcactttattttaccaaaatatttttttaaatccatcctcaaattctttgtgttagtctaaaaatagtttacttacatagctaaatacacaaagataatagcatataggaagaacattgttctttcaagtactgtgtttctcatctgattagttagcaatttgtacaattacacttaaatggatgcaatgctgatatcactgcttattttactgcagtagtaaaacaggtacagtgctatctgccctgcttgtttataatattaccataaacaattttgtgtgcactctatttcaatttctcagcttgattagctaacaatcttcactaaaacattcaaggtaaaatggaaagctaattgcatagagatttttaagctcatttgcacacaacagcatttgttagtaccaatgaaggtaaaaaacagtatgacttctctcctagcttcactaattccctctgctaattcaaaatgtccacatagaaaccaaatgaggtagaacataaaaatagtatttttggtaagggcagtatttgaaaagaagaaaatgtttcttgggtctatgtacaggtgatgaatcacttttattctattatattgtgcaaattttagaatgttccatctaatgatgtaaagaaagctaaagattctttatagaaatggttttcattcattgcattctcctgcaattttctgttaggtatctctttttcactcctagcaactgaatgatatcaattatgggattataaagaaggaatctaggtgataaaaggctcaaaatatataacacagagaactggtataaaaatttttcttcctagaatggtaaatagaaaagtttaataaagagtgtaaagccaggtcaaaatgggattctcttaatttttaaaagcatcaaaaatgattataaaatataatattttagcacagttaaagtactgttgaattataaactttgaaagatagcagtcataaatatatatggacttagaggtcaataaattcaaagtactttttttaaaaataataattttctggtaaaaagtccataaaaggaggtgttatggtttggatctatgttcccaccaaatctcatgtaaaattataatctctagtgctgcaggtagggcccggtgggagatgattggatcatagaggtagagttctcatgaatgggttagcactatcctctaggctctgttgtcatgagaatgggaacataaatgatttatcataagatctggttgtttcaaaagtgtgtagcacctcccccatctctcttgctcgctcctgttctggccatgtaagacattcctgctttcccttcaccttccaccatgattctgtttcctgaggtc

SEQ ID NO: 465008 - DNA, 1206 bp, Homo sapiens
gatgagaggattggaacttttaactacacccaacaacctccaggaaagggagtggggctggatggatgtcaagctctataaaaactcggacaacatgatttgatgaacttccgggttgctgaagatacagagatgttgggaggctagcacacccagagacagcatggccgctctgtgcctgctttcctccccttacctcatcctatctatcttcatctgtctgttcatgtttatcctttataatatccttcataataaaccagcaaatataagttgtttacctgagttcggtgagccaacctagcaaattaattaaatgctggaagaaggttgtgggaaccctgatttgtagcaggtcagagtataggtgacaacctaatacttaaatctgaagtgaaggcaatcttgtggggctgaaccctcaaactgtgggatctgacattatctccaggtaaattgccaggtggattacactagtccaggtagatagtgtcagaattgaattcaattatataatacccatttggtgtccagtggagaattgcttagttttgggaatagccccccacacatctgttcacagaagtgttctgtgtttagtgtgagagtgggattgtgggaaacagaatgtgtttttttttctttttttacaggcaacacaaatggactaagacatataccattagcacttttggaacatgatttactttactggcacggtacatatataaaataaactcttttatccttttgaaaatcaataaatatgcattgaatgcctatgtgtttatgtagtaaccgggacctacccttaggtgaggcacagatggacacgcagagtcaacacactagtggtcccaagctggaaatcgagtttaggaactggtataaggaacaagcaccagaagccagtttgactgttaaaactgataaaactgataaaactcctaatatatccttcaatatgcaaggagtgatacacagaaacctggcaacaaatgcaaacatagacaaatgggattacatcaaactaaaaatcttcatagcaaaggaaataatcaacagagtgaagaggcaatgtatagaatgggagaaaatatttgcaaactatacacctaagaggttaatactcaaaatatataaggaatgtaaacaatttaatagcaagaagaccacccaactggaaaatgggccaaagatgtgaat

SEQ ID NO: 465009 - DNA, 6416 bp, Homo sapiens
ggaaacgcgattcgcagcgggcgccggaagcggtgttgtgtctgcagctctggcagaggactgttccactagacacgctgaagggactgggtacgtgttttccttcaggaccagagctgagaggagctgggatcgcggcggcaatggaacgggcctcagaaaggcgcacggccagcgcgctttttgcggggttccgggccttgggacttttcagcaacgacattccacacgtggtgcggttcagcgcgctcaagcgccggttctatgtaacaacctgcgtgggcaagagtttccacacctatgacgttcagaaacttagtctggttgcagtaagtaattctgttccacaggatatctgctgtatggcagctgatggcagattagtctttgctgcttatggaaatgttttctctgcatttgcccgtaataaagagatagtacatacctttaagggtcataaggcagaaatccatttcttgcaaccctttggagaccacattatctctgttgatactgatggcattcttattatttggcacatatattcagaagaagaatacctgcagttgacttttgataaatcagtatttaaaatttctgcaattttgcatccaagtacctacttgaataaaatacttctgggcagtgaacaaggaagcctgcagttgtggaatgtaaaatccaataaacttctatatacatttccaggatggaaagttggagtgacagctcttcagcaggcaccagccgtggatgttgttgctattggtcttatgtcaggtcaagttatcattcacaacattaaatttaatgaaacattaatgaagtttcgtcaagactggggacccattacttcaatttcatttcgcacagatggtcatccagtaatggcagctggaagcccatgtggccatattggactctgggatctagaagacaaaaaattaatcaaccaaatgagaaatgcacactctacagcaattgccggactgacatttctccatagagagccacttcttgtcacaaatggcgctgacaatgctcttaggatatggatatttgatggtcctacaggtgaaggccgacttttgagattcagaatgggtcatagtgctcctcttaccaatatcagatattatggacagaatggacagcagattctaagtgcaagtcaagatggaactcttcagtcattttccacggtacatgaaaaattcaataagagcttgggacatggattaataaataaaaagagagttaaacgtaaaggacttcagaataccatgtcagtgagacttccacccatcacaaagtttgcagcagaggaagctcgtgaaagtgactgggatggtatcattgcttgccatcaaggtaagctatcttgctcaacctggaattatcagaaatctacaataggcgcttactttctcaagccaaaagagttgaagaaagatgacataactgcaacagcagtggatataacttcttgtggaaactttgctgtaattggcctctcatcaggaactgtagatgtatataacatgcagtctggcatacatcgaggaagttttggcaaggatcaagctcacaagggatctgttagaggtgtcgcagtggatggattaaaccagttgacagttacaactggtagtgaaggattactcaaattctggaactttaaaaacaaaattttaatccattctgtgagcctcagttcatctccaaatatcatgttgctacatagggacagtggcattctgggactcgccttggatgacttctccattagtgttctggacatagaaactaggaagattgtcagagagttttctggacaccaaggccaaataaatgacatggcttttagtcctgatggtcgttggttaataagtgctgcgatggattgctctattaggacttgggaccttccttctgggtgccttatagactgctttttgttggactcggctcctctcaatgtttctatgtctcctactggagactttctggcaacttcccatgtggaccaccttggaatttatctatggtccaatatttccctgtattcagttgtttcattacggccacttcctgcagattatgtcccttcaatagtcatgcttcctggtacttgtcaaacccaagatgtagaagtatcagaagaaacagtagaaccaagtgatgaattgatagaatatgattcgccagaacagttgaatgagcaattggtgactctttcacttcttcctgaatcacgatggaaaaaccttcttaaccttgatgttattaagaaaaagaataaaccaaaggaaccacccaaagtacccaaatcagcaccatttttcattccaacaattcctggccttgtacccagatatgctgcacctgaacaaaataatgatccccagcagtctaaagtggtaaatcttggagttttggctcaaaaatcagatttctgcttgaaacttgaagaaggactggtaaataataagtatgacactgctctcaaccttctgaaagaatcaggcccatcaggaattgaaacagagctgcgaagcttgtctcctgattgtggtgggtccatagaagttatgcagagcttcttgaaaatgattgggatgatgctggacagaaagcgtgattttgagttagcccaggcataccttgcattgtttctaaagttacaccttaaaatgcttccttcagagccagtactcctagaagaaataacaaatttgtcatcccaggtggaagaaaactggacccatttgcaatcactcttcaatcaaagcatgtgtattttaaattatctcaaaagtgctttgttgtaaaaataaatttgtgactaaacaaagactttcatattaaatgggttcaattgaactcatttcttattttccaagtgtcaatgtgaaaagaaaataaatgctagcactactgactagtcagtatatctccactttaaatgctaaatactttcttgaaataaaatcgcacctcccggccaggcatgatggataatgcctgtaattccagcactttcagaggccaaagcgggaggattgcttgaagccaggaatttgagcccagcctgggcaacatagcaagcaagatcccatctctacaaaaagttaaaaaaataaattacacctgccttttgttttgaagacttaaagaatctgctcaaatgatttattttctgagtctcttcacattaacttttatatgatttttaaaaaattattacctgcttatattttttgagtatctgtttcatataaagagatgctgcatgttcactgtgaagtattgctgaattaaattgaaaatgtcagataaaactgatacatgatgtagttataaaaatgctgttatgaagaaaaaaggaatgcttttttcctcggtggcctttgataaaaatatgaatgattgactctcagagttggaggataaactaatcatcttctagcacagccctgttgtgttgcaggagaggaatcaggctaaagtctgctggtatttcagtgacagattaaaactttctaacagtggcctagtgctttctccattgtaatgtactgaaaggaagttgttcatggatcagaaatgtgggaggcccttccttgcccaaggcaagtcgctgtagatggttaaactgataccaaggataggtaagggaaattccaaattccattggaagatggccttttactgacactgcagacatgtagataacaatagtttaatgtcctctgaaaaggtaaaaattccataaatccttgcaaacaatttttagcaatattgtttattgctaccacagccaagaatgggtatttcaaagccagggttttttttattttgttttgttttgtttttttttttttttttttggctacacttttttgggggggaccttttaatttgggaagaaaatgctgagtatacttttctttcacaaccattgcaaacccaggtagccctggagttttctttttttctcatcatcattgttttgttttttttatggttcaagacttttgcaatacatgaattaaaaataagcagttctttaaagcatagcgctctaaaaactattcttagtttataccctcaaaagttgggtctttcatgaaacacagtggtttgaatatgaacaccagtagcattctcgttcgttgttagggtaagagagttttgtagaatgatctccaaaagaagcagtcctcaaaaggcatttaccagtgatatcttttaatattcatgtttttatttaatgatgtaagatagaattaataaactactaaggaaataagccaatgtggttattgtactcaatttcgtttttcttttagaaatgtgtattgacttattaaagccactgacagaaatgttaatcatgacttaagttctaatttaaaaaactattttcctctttcctaaatactatattctaaattggaatatggcaaaatcccaatatataattctatacctagtaaagattgtaaataactaaaacaaaatgataagagctgtgaactgaaattgtattgcttacagaaatcatgaaccgaattttcttctctttttaaagtgagcataaagacttaagtgtattgttaccagagatatatttagatagaatacatcattttggcaggtaatcttctagaacctttcatgtactgtttccatcaagggagggaaagaaatagaaaatataattttatctatattttccttaaaatatatcaatctgtgcacactctttcagttttttaattactcatgtaatatatgactacattttgcttgtgtgctttttgaaaaccatcttcagtcccaatatcctctgtagaagtaatagttttaactctcctagatcttcttttagagtgtttttatgagtgtttaatgtaggaatgtgtatatattatctacagccacaggaaatgtatagttacgatttttacatacgtgtatgtatattattgtacaacttgctatttctacttgggagttttttattttggtacattcacatttacctaatctcttgtgcactgtccaacagtactttgcctataatagacacttaaggaagttttccttctttttattcctttataattacaaacaatgctgaaaggaacatcatcctacatgagccctttttgtacatataaggctctctctgtggtatatgcttaggatttgaatttcaggccagagtataaccatttttaatttgaagagatacttccatttgggttccagaatggctgtatcaagttacagttcccctgagcaagatatgagcatctgcttccccatgtaattaatgacacttgctattggatttttgtaatttaattactctgaaaaaattattttggttttaaatcagaaatttctcactagtgaagatggacatatttttgtatgtttattttagaacatataaacatttgttaattttctttttcctctcatttttctattgaatgatttgtccttttatctcatggatttgttaggagttctcttgtattttctgtattttatgtctgttgccaatgttttctcctacttagccatttggctttaattttacatggtgtctgtttaaataaatgttttatatttgtatacaatcaaattgattaattttcatgacttatttcaggatataaagcaaattattttctaagacatttacagtgtatgttttcctatgtttacatgtgctcatttcacgtcatgtattttcctctacgacatgtttctgtgtgagtagttaacatgtagatctttagaattgatttttctgaagagtgaaacagcgctgcttccaatatctgttcaaaattcatttattgaaaagtccactcatatgtctgatttgaaatgctgtttcattatgtgttaaattctttcactgagctcttccatattcctagtaaatgatgcattactttggtatgttctcagatttgggtaaagccttcctcatgttctataaaaattggttaactgctggtgagcacatctcttgaagttttgatatgggttgcacaacatttataggactgatttggagagaccgacaataccgagtgcagtcctcccttggtatctagttccaggacccctgtggataccaaaatccaagcaatgccctgcagatcatgggacctatgcatatgaaaagtcggtccttgtatttgagggttttgcatccctcaaataccatatgttttatttgtgtttggttgaaaaaagtttgcatataagtgaaacttagcatttcaaacctgtgttgttcaaagatcatttgtatttctcttcaagaacaatgaatgtcttcattaaatcatcttttgtgggaaaaaaaaaaataaatataataaaagggg

SEQ ID NO: 465010 - DNA, 860 bp, Homo sapiens
ccacgcgtccgcccacgcggtccggtttaaataaatgttttatatttgtatacaatcaaattgattaattttcatgacttatttcaggatataaagcaaattattttctaagacatttacagtgtatgttttcctatgtttacatgtgctcatttcacgtcatgtattttcctctacgacatgtttctgtgtgagtagttaacatgtagatctttagaattgatttttctgaagagtgaaacagcgctgcttccaatatctgttcaaaattcatttattgaaaagtccactcatatgtctgatttgaaatgctgtttcattatgtgttaaattctttcactgagctcttccatattcctagtaaatgatgcattactttggtatgttctcagatttgggtaaagccttcctcatgttctataaaaattggttaactgctggtgagcacatctcttgaagttttgatatgggttgcacaacatttataggactgatttggagagaccgacaataccgagtgcagtcctcccttggtatctagttccaggacccctgtggataccaaaatccaagcaatgccctgcagatcatgggacctatgcatatgaaaagtcggtccttgtatttgagggttttgcatccctcaaataccatatgttttatttgtgtttggttgaaaaaagtttgcatataagtgaaacttagcatttcaaacctgtgttgttcaaagatcatttgtatttctcttcaagaacaatgaatgtcttcattaaatcatcttttgtgggagagcttttggtttcatagattttcatatatatatatgatataataaacactttttgacattcaaaaaaaaa

SEQ ID NO: 465011 - DNA, 5653 bp, Homo sapiens
ggaaacgcgattcgcagcgggcgccggaagcggtgttgtgtctgcagctctggcagaggactgttccactagacacgctgaagggactgggtacgtgttttccttcaggaccagagctgagaggagctgggatcgcggcggcaatggaacgggcctcagaaaggcgcacggccagcgcgctttttgcggggttccgggccttgggacttttcagcaacgacattccacacgtggtgcggttcagcgcgctcaagcgccggttctatgtaacaacctgcgtgggcaagagtttccacacctatgacgttcagaaacttagtctggttgcagtaagtaattctgttccacaggatatctgctgtatggcagctgatggcagattagtctttgctgcttatggaaatgttttctctgcatttgcccgtaataaagagatagtacatacctttaagggtcataaggcagaaatccatttcttgcaaccctttggagaccacattatctctgttgatactgatggcattcttattatttggcacatatattcagaagaagaatacctgcagttgacttttgataaatcagtatttaaaatttctgcaattttgcatccaagtacctacttgaataaaatacttctgggcagtgaacaaggaagcctgcagttgtggaatgtaaaatccaataaacttctatatacatttccaggatggaaagttggagtgacagctcttcagcaggcaccagccgtggatgttgttgctattggtcttatgtcaggtcaagttatcattcacaacattaaatttaatgaaacattaatgaagtttcgtcaagactggggacccattacttcaatttcatttcgcacagatggtcatccagtaatggcagctggaagcccatgtggccatattggactctgggatctagaagacaaaaaattaatcaaccaaatgagaaatgcacactctacagcaattgccggactgacatttctccatagagagccacttcttgtcacaaatggcgctgacaatgctcttaggatatggatatttgatggtcctacaggtgaaggccgacttttgagattcagaatgggtcatagtgctcctcttaccaatatcagatattatggacagaatggacagcagattctaagtgcaagtcaagatggaactcttcagtcattttccacggtacatgaaaaattcaataagagcttgggacatggattaataaataaaaagagagttaaacgtaaaggacttcagaataccatgtcagtgagacttccacccatcacaaagtttgcagcagaggaagctcgtgaaagtgactgggatggtatcattgcttgccatcaaggtaagctatcttgctcaacctggaattatcagaaatctacaataggcgcttactttctcaagccaaaagagttgaagaaagatgacataactgcaacagcagtggatataacttcttgtggaaactttgctgtaattggcctctcatcaggaactgtagatgtatataacatgcagtctggcatacatcgaggaagttttggcaaggatcaagctcacaagggatctgttagaggtgtcgcagtggatggattaaaccagttgacagttacaactggtagtgaaggattactcaaattctggaactttaaaaacaaaattttaatccattctgtgagcctcagttcatctccaaatatcatgttgctacatagggacagtggcattctgggactcgccttggatgacttctccattagtgttctggacatagaaactaggaagattgtcagagagttttctggacaccaaggccaaataaatgacatggcttttagtcctgatggtcgttggttaataagtgctgcgatggattgctctattaggacttgggaccttccttctgggtgccttatagactgctttttgttggactcggctcctctcaatgtttctatgtctcctactggagactttctggcaacttcccatgtggaccaccttggaatttatctatggtccaatatttccctgtattcagttgtttcattacggccacttcctgcagattatgtcccttcaatagtcatgcttcctggtacttgtcaaacccaagatgtagaagtatcagaagaaacagtagaaccaagtgatgaattgatagaatatgattcgccagaacagttgaatgagcaattggtgactctttcacttcttcctgaatcacgatggaaaaaccttcttaaccttgatgttattaagaaaaagaataaaccaaaggaaccacccaaagtacccaaatcagcaccatttttcattccaacaattcctggccttgtacccagatatgctgcacctgaacaaaataatgatccccagcagtctaaagtggtaaatcttggagttttggctcaaaaatcagatttctgcttgaaacttgaagaaggactggtaaataataagtatgacactgctctcaaccttctgaaagaatcaggcccatcaggaattgaaacagagctgcgaagcttgtctcctgattgtggtgggtccatagaagttatgcagagcttcttgaaaatgattgggatgatgctggacagaaagcgtgattttgagttagcccaggcataccttgcattgtttctaaagttacaccttaaaatgcttccttcagagccagtactcctagaagaaataacaaatttgtcatcccaggtggaagaaaactggacccatttgcaatcactcttcaatcaaagcatgtgtattttaaattatctcaaaagtgctttgttgtaaaaataaatttgtgactaaacaaagactttcatattaaatgggttcaattgaactcatttcttattttccaagtgtcaatgtgaaaagaaaataaatgctagcactactgactagtcagtatatctccactttaaatgctaaatactttcttgaaataaaatcgcacctcccggccaggcatgatggataatgcctgtaattccagcactttcagaggccaaagcgggaggattgcttgaagccaggaatttgagcccagcctgggcaacatagcaagcaagatcccatctctacaaaaagttaaaaaaataaattacacctgccttttgttttgaagacttaaagaatctgctcaaatgatttattttctgagtctcttcacattaacttttatatgatttttaaaaaattattacctgcttatattttttgagtatctgtttcatataaagagatgctgcatgttcactgtgaagtattgctgaattaaattgaaaatgtcagataaaactgatacatgatgtagttataaaaatgctgttatgaagaaaaaaggaatgcttttttcctcggtggcctttgataaaaatatgaatgattgactctcagagttggaggataaactaatcatcttctagcacagccctgttgtgttgcaggagaggaatcaggctaaagtctgctggtatttcagtgacagattaaaactttctaacagtggcctagtgctttctccattgtaatgtactgaaaggaagttgttcatggatcagaaatgtgggaggcccttccttgcccaaggcaagtcgctgtagatggttaaactgataccaaggataggtaagggaaattccaaattccattggaagatggccttttactgacactgcagacatgtagataacaatagtttaatgtcctctgaaaaggtaaaaattccataaatccttgcaaacaatttttagcaatattgtttattgctaccacagccaagaatgggtatttcaaagccagggttttttttattttgttttgttttgtttttttttttttttttttggctacacttttttgggggggaccttttaatttgggaagaaaatgctgagtatacttttctttcacaaccattgcaaacccaggtagccctggagttttctttttttctcatcatcattgttttgttttttttatggttcaagacttttgcaatacatgaattaaaaataagcagttctttaaagcatagcgctctaaaaactattcttagtttataccctcaaaagttgggtctttcatgaaacacagtggtttgaatatgaacaccagtagcattctcgttcgttgttagggtaagagagttttgtagaatgatctccaaaagaagcagtcctcaaaaggcatttaccagtgatatcttttaatattcatgtttttatttaatgatgtaagatagaattaataaactactaaggaaataagccaatgtggttattgtactcaatttcgtttttcttttagaaatgtgtattgacttattaaagccactgacagaaatgttaatcatgacttaagttctaatttaaaaaactattttcctctttcctaaatactatattctaaattggaatatggcaaaatcccaatatataattctatacctagtaaagattgtaaataactaaaacaaaatgataagagctgtgaactgaaattgtattgcttacagaaatcatgaaccgaattttcttctctttttaaagtgagcataaagacttaagtgtattgttaccagagatatatttagatagaatacatcattttggcaggtaatcttctagaacctttcatgtactgtttccatcaagggagggaaagaaatagaaaatataattttatctatattttccttaaaatatatcaatctgtgcacactctttcagttttttaattactcatgtaatatatgactacattttgcttgtgtgctttttgaaaaccatcttcagtcccaatatcctctgtagaagtaatagttttaactctcctagatcttcttttagagtgtttttatgagtgtttaatgtaggaatgtgtatatattatctacagccacaggaaatgtatagttacgatttttacatacgtgtatgtatattattgtacaacttgctatttctacttgggagttttttattttggtacattcacatttacctaatctcttgtgcactgtccaacagtactttgcctataatagacacttaaggaagttttccttctttttattcctttataattacaaacaatgctgaaaggaacatcatcctacatgagccctttttgtacatataaggctctctctgtggtatatgcttaggatttgaatttcaggccagagtataaccatttttaatttgaagagatacttccatttgggttccagaatggctgtatcaagttacagttcccctgagcaagatatgagcatctgcttccccatgtaattaatgacacttgctattggatttttgtaatttaattactctgaaaaaattattttggttttaaatcagaaatttctcactagtgaagatggacatatttttgtatgtttattttagaacatataaacatttgttaattttctttttcctctcatttttctattgaatgatttgtccttttatctcatggatttgttaggagttctcttgtattttctgtattttatgtctgttgccaatgttttctcctacttagccatttggctttaattttacatggtgtctgtttaaataaatgttttatatttgtataca

SEQ ID NO: 465012 - DNA, 6459 bp, Homo sapiens
ggaaacgcgattcgcagcgggcgccggaagcggtgttgtgtctgcagctctggcagaggactgttccactagacacgctgaagggactgggtacgtgttttccttcaggaccagagctgagaggagctgggatcgcggcggcaatggaacgggcctcagaaaggcgcacggccagcgcgctttttgcggggttccgggccttgggacttttcagcaacgacattccacacgtggtgcggttcagcgcgctcaagcgccggttctatgtaacaacctgcgtgggcaagagtttccacacctatgacgttcagaaacttagtctggttgcagtaagtaattctgttccacaggatatctgctgtatggcagctgatggcagattagtctttgctgcttatggaaatgttttctctgcatttgcccgtaataaagagatagtacatacctttaagggtcataaggcagaaatccatttcttgcaaccctttggagaccacattatctctgttgatactgatggcattcttattatttggcacatatattcagaagaagaatacctgcagttgacttttgataaatcagtatttaaaatttctgcaattttgcatccaagtacctacttgaataaaatacttctgggcagtgaacaaggaagcctgcagttgtggaatgtaaaatccaataaacttctatatacatttccaggatggaaagttggagtgacagctcttcagcaggcaccagccgtggatgttgttgctattggtcttatgtcaggtcaagttatcattcacaacattaaatttaatgaaacattaatgaagtttcgtcaagactggggacccattacttcaatttcatttcgcacagatggtcatccagtaatggcagctggaagcccatgtggccatattggactctgggatctagaagacaaaaaattaatcaaccaaatgagaaatgcacactctacagcaattgccggactgacatttctccatagagagccacttcttgtcacaaatggcgctgacaatgctcttaggatatggatatttgatggtcctacaggtgaaggccgacttttgagattcagaatgggtcatagtgctcctcttaccaatatcagatattatggacagaatggacagcagattctaagtgcaagtcaagatggaactcttcagtcattttccacggtacatgaaaaattcaataagagcttgggacatggattaataaataaaaagagagttaaacgtaaaggacttcagaataccatgtcagtgagacttccacccatcacaaagtttgcagcagaggaagctcgtgaaagtgactgggatggtatcattgcttgccatcaaggtaagctatcttgctcaacctggaattatcagaaatctacaataggcgcttactttctcaagccaaaagagttgaagaaagatgacataactgcaacagcagtggatataacttcttgtggaaactttgctgtaattggcctctcatcaggaactgtagatgtatataacatgcagtctggcatacatcgaggaagttttggcaaggatcaagctcacaagggatctgttagaggtgtcgcagtggatggattaaaccagttgacagttacaactggtagtgaaggattactcaaattctggaactttaaaaacaaaattttaatccattctgtgagcctcagttcatctccaaatatcatgttgctacatagggacagtggcattctgggactcgccttggatgacttctccattagtgttctggacatagaaactaggaagattgtcagagagttttctggacaccaaggccaaataaatgacatggcttttagtcctgatggtcgttggttaataagtgctgcgatggattgctctattaggacttgggaccttccttctgggtgccttatagactgctttttgttggactcggctcctctcaatgtttctatgtctcctactggagactttctggcaacttcccatgtggaccaccttggaatttatctatggtccaatatttccctgtattcagttgtttcattacggccacttcctgcagattatgtcccttcaatagtcatgcttcctggtacttgtcaaacccaagatgtagaagtatcagaagaaacagtagaaccaagtgatgaattgatagaatatgattcgccagaacagttgaatgagcaattggtgactctttcacttcttcctgaatcacgatggaaaaaccttcttaaccttgatgttattaagaaaaagaataaaccaaaggaaccacccaaagtacccaaatcagcaccatttttcattccaacaattcctggccttgtacccagatatgctgcacctgaacaaaataatgatccccagcagtctaaagtggtaaatcttggagttttggctcaaaaatcagatttctgcttgaaacttgaagaaggactggtaaataataagtatgacactgctctcaaccttctgaaagaatcaggcccatcaggaattgaaacagagctgcgaagcttgtctcctgattgtggtgggtccatagaagttatgcagagcttcttgaaaatgattgggatgatgctggacagaaagcgtgattttgagttagcccaggcataccttgcattgtttctaaagttacaccttaaaatgcttccttcagagccagtactcctagaagaaataacaaatttgtcatcccaggtggaagaaaactggacccatttgcaatcactcttcaatcaaagcatgtgtattttaaattatctcaaaagtgctttgttgtaaaaataaatttgtgactaaacaaagactttcatattaaatgggttcaattgaactcatttcttattttccaagtgtcaatgtgaaaagaaaataaatgctagcactactgactagtcagtatatctccactttaaatgctaaatactttcttgaaataaaatcgcacctcccggccaggcatgatggataatgcctgtaattccagcactttcagaggccaaagcgggaggattgcttgaagccaggaatttgagcccagcctgggcaacatagcaagcaagatcccatctctacaaaaagttaaaaaaataaattacacctgccttttgttttgaagacttaaagaatctgctcaaatgatttattttctgagtctcttcacattaacttttatatgatttttaaaaaattattacctgcttatattttttgagtatctgtttcatataaagagatgctgcatgttcactgtgaagtattgctgaattaaattgaaaatgtcagataaaactgatacatgatgtagttataaaaatgctgttatgaagaaaaaaggaatgcttttttcctcggtggcctttgataaaaatatgaatgattgactctcagagttggaggataaactaatcatcttctagcacagccctgttgtgttgcaggagaggaatcaggctaaagtctgctggtatttcagtgacagattaaaactttctaacagtggcctagtgctttctccattgtaatgtactgaaaggaagttgttcatggatcagaaatgtgggaggcccttccttgcccaaggcaagtcgctgtagatggttaaactgataccaaggataggtaagggaaattccaaattccattggaagatggccttttactgacactgcagacatgtagataacaatagtttaatgtcctctgaaaaggtaaaaattccataaatccttgcaaacaatttttagcaatattgtttattgctaccacagccaagaatgggtatttcaaagccagggttttttttattttgttttgttttgtttttttttttttttttttggctacacttttttgggggggaccttttaatttgggaagaaaatgctgagtatacttttctttcacaaccattgcaaacccaggtagccctggagttttctttttttctcatcatcattgttttgttttttttatggttcaagacttttgcaatacatgaattaaaaataagcagttctttaaagcatagcgctctaaaaactattcttagtttataccctcaaaagttgggtctttcatgaaacacagtggtttgaatatgaacaccagtagcattctcgttcgttgttagggtaagagagttttgtagaatgatctccaaaagaagcagtcctcaaaaggcatttaccagtgatatcttttaatattcatgtttttatttaatgatgtaagatagaattaataaactactaaggaaataagccaatgtggttattgtactcaatttcgtttttcttttagaaatgtgtattgacttattaaagccactgacagaaatgttaatcatgacttaagttctaatttaaaaaactattttcctctttcctaaatactatattctaaattggaatatggcaaaatcccaatatataattctatacctagtaaagattgtaaataactaaaacaaaatgataagagctgtgaactgaaattgtattgcttacagaaatcatgaaccgaattttcttctctttttaaagtgagcataaagacttaagtgtattgttaccagagatatatttagatagaatacatcattttggcaggtaatcttctagaacctttcatgtactgtttccatcaagggagggaaagaaatagaaaatataattttatctatattttccttaaaatatatcaatctgtgcacactctttcagttttttaattactcatgtaatatatgactacattttgcttgtgtgctttttgaaaaccatcttcagtcccaatatcctctgtagaagtaatagttttaactctcctagatcttcttttagagtgtttttatgagtgtttaatgtaggaatgtgtatatattatctacagccacaggaaatgtatagttacgatttttacatacgtgtatgtatattattgtacaacttgctatttctacttgggagttttttattttggtacattcacatttacctaatctcttgtgcactgtccaacagtactttgcctataatagacacttaaggaagttttccttctttttattcctttataattacaaacaatgctgaaaggaacatcatcctacatgagccctttttgtacatataaggctctctctgtggtatatgcttaggatttgaatttcaggccagagtataaccatttttaatttgaagagatacttccatttgggttccagaatggctgtatcaagttacagttcccctgagcaagatatgagcatctgcttccccatgtaattaatgacacttgctattggatttttgtaatttaattactctgaaaaaattattttggttttaaatcagaaatttctcactagtgaagatggacatatttttgtatgtttattttagaacatataaacatttgttaattttctttttcctctcatttttctattgaatgatttgtccttttatctcatggatttgttaggagttctcttgtattttctgtattttatgtctgttgccaatgttttctcctacttagccatttggctttaattttacatggtgtctgtttaaataaatgttttatatttgtatacaatcaaattgattaattttcatgacttatttcaggatataaagcaaattattttctaagacatttacagtgtatgttttcctatgtttacatgtgctcatttcacgtcatgtattttcctctacgacatgtttctgtgtgagtagttaacatgtagatctttagaattgatttttctgaagagtgaaacagcgctgcttccaatatctgttcaaaattcatttattgaaaagtccactcatatgtctgatttgaaatgctgtttcattatgtgttaaattctttcactgagctcttccatattcctagtaaatgatgcattactttggtatgttctcagatttgggtaaagccttcctcatgttctataaaaattggttaactgctggtgagcacatctcttgaagttttgatatgggttgcacaacatttataggactgatttggagagaccgacaataccgagtgcagtcctcccttggtatctagttccaggacccctgtggataccaaaatccaagcaatgccctgcagatcatgggacctatgcatatgaaaagtcggtccttgtatttgagggttttgcatccctcaaataccatatgttttatttgtgtttggttgaaaaaagtttgcatataagtgaaacttagcatttcaaacctgtgttgttcaaagatcatttgtatttctcttcaagaacaatgaatgtcttcattaaatcatcttttgtgggagagcttttggtttcatagattttcatatatatatatgatataataaacactttttgacattcaaaaaaaaa

SEQ ID NO: 465013 - DNA, 1135 bp, Homo sapiens
atgatcatagacaaccagtgcaggctctctggccctcagtttcttcatctgtggttaaatgagcctcctgaaatcatgcatagcccttaaggtgtgtgtgcatttctctggggagaggatttgtagcgtgcatcacatttttcaaaggagcttaaaatctggaaagcccacgatctactgttctgctccaaattccctgtttttcagtgaggaaaagggggagaagattaaagcctccacgggctggtcctgctttgattctccagtggactcagacgagatcagagaaagttgttggcagctcccgagtattctcacactaaatgagcagtatagagtaagtacagccttgttgattgtacatcaatttgatggactaactatggtacaggttgaagcaggtagaggagtctgccaagtagctgagacagacactgccctgggatgcagattagtaaccatgaggctcacttctcctcgattacaagtgggcttgtaatccaacttattccaaacactccacccacaaggcagcaagtgagggaaaaaatagaattctgcttgaagataataaaatagcaggagctatgtcaatcaatagcctagaacccagctacctgccctcctgcatgatgccctccttcttcctctcccttcactaagttaccatctggaatagaatccaatagtgatccaccaatggacaatttttgctatgaaggaggaaagagaggacagatttgattacaacaaaagcatcccaagaatgtgtcctgcatgagctcttcaggctgtgaaatcttgaacttctacacccatccttggctggctttttccatgtgaggccatatagagtaacttatgaggtattaccaccgtcattttccagaagaagaaagctgaggctcagagtgatcaagaatacccagccagaacgtggcatctgggacttctgtctccactctgttatccaccagcacccttgggccctattgcttggctagatgggcactctgcatgtatcaggcattgtctgtcacctgagtcactacatgtatgacatcatatgtctattaccagtctcagatatacactaagaaaataagatttcattaaagtattttctaaattcatg

SEQ ID NO: 465014 - DNA, 1358 bp, Homo sapiens
atgatcatagacaaccagtgcaggctctctggccctcagtttcttcatctgtggttaaatgagcctcctgaaatcatgcatagcccttaaggtgtgtgtgcatttctctggggagaggatttgtagcgtgcatcacatttttcaaaggagcttaaaatctggaaagcccacgatctactgttctgctccaaattccctgtttttcagtgaggaaaagggggagaagattaaagcctccacgggctggtcctgctttgattctccagtggactcagacgagatcagagaaagttgttggcagctcccgagtattctcacactaaatgagcagtatagagtaagtacagccttgttgattgtacatcaatttgatggactaactatggtacaggttgaagcaggtagaggagtctgccaagtagctgagacagacactgccctgggatgcagattagtaaccatgaggctcacttctcctcgattacaagtgggcttgtaatccaacttattccaaacactccacccacaaggcagcaagtgagggaaaaaatagaattctgcttgaagataataaaatagcaggagctatgtcaatcaatagcctagaacccagctacctgccctcctgcatgatgccctccttcttcctctcccttcactaagttaccatctggaatagaatccaatagtgatccaccaatggacaatttttgctatgaaggaggaaagagaggacagatttgattacaacaaaagcatcccaagaatgtgtcctgcatgagctcttcaggctgtgaaatcttgaacttctacacccatccttggctggctttttccatgtgaggccatatagagttgctgcaggtgataagcatcctgatggaactgagcttcactaacaggaggacaacactgattgcagtatcagggatgatatagtttgagccggattatagagctcatcaactgatccacatcttaaatgctccatctttggcataaggtgtttgtaaataatatgcagggcatttataaatatgatgggatacttaataccaaaattaactataagtgaattgctgggatagaataaaatacagaaaacgaatacataagatcaatatgttaccataaaattaaaatatttaatagcttcaatttctacttatgtcaaaattcctgtaattatgtttaatatcctttccccttttctgcccacattctgggaactgtcctattaataatgaaatgagagctagataaaaagataaggaagggaatcaaaagggttgcttattcttttcttgattaatcaaggaatcattagttatatttgaagaatataatactatctcttt

SEQ ID NO: 465015 - DNA, 975 bp, Homo sapiens
  misc_feature (3)..(3): n is a, c, g, or t
  misc_feature (14)..(15): n is a, c, g, or t
agnaagacccaccnncgaagccccatcctcaatgtgggtgggcaccatccgatcggctgccagcacaactagaaaaagcaggcagaagaaggtggaagaagatgacttgctgagtcttctggccttcatctttctcttctgctggatgcttcctgccctcaaacatcagactccacgttcttcagcttttggactcttggacttacaccagtggtatgctaggggctctccggccttcagccacagactgaaggctgcactggttaagctcaaatgtgatttctgctcttcccctgcaaattgttcaataaaggactggaagtactgtgaaaaaagaaagagagaaagaaatgttcttatcatccacaatatacttctccttccaacagcaaatctaaccacagctgggaaaaagcagcaaaaacaaacaaacaaaaagacttaattggaaaatcactttgcctccttgtccacccccaggtgctaaagcaagggataaaccaaaaggacagccagtaggtgaggagaggccatggaatacccgccaacaagataatcatcgctggaataatagggacctgtctgaataacccaagaagaggggaaaccagcatgtcaccagctgctgtgatggagtcaggtagcacagggaagtggctcagagcagggactctggagctagactgcctgcgtttgagatcctgctcagccaattactagctgggtgatcttggcaaggttttttgttaaaactgttatgccttaatatctttaaaatagggataataatactatgcatctcattgagttgcctaaaattctgtaattcagcccttctttacaatggagagcattggcatagatttcaacaaaaggcagataatgagaatctgctatttggttttctactatatttctctatttgcatttgcatctggatttgactgttaataaacctgtgaagtcacattttat

SEQ ID NO: 465016 - DNA, 865 bp, Homo sapiens
  misc_feature (3)..(3): n is a, c, g, or t
  misc_feature (14)..(15): n is a, c, g, or t
agnaagacccaccnncgaagccccatcctcaatgtgggtgggcaccatccgatcggctgccagcacaactagaaaaagcaggcagaagaaggtggaagaagatgacttgctgagtcttctggccttcatctttctcttctgctggatgcttcctgccctcaaacatcagactccacgttcttcagcttttggactcttggacttacaccagtggtatgctaggggctctccggccttcagccacagactgaaggctgcactggttaagctcaaatgtgatttctgctcttcccctgcaaattgttcaataaaggactggaagtactgtgaaaaaagaaagagagaaagaaatgttcttatcatccacaatatacttctccttccaacagcaaatctaaccacagctgggaaaaagcagcaaaaacaaacaaacaaaaagacttaattggaaaatcactttgcctccttgtccacccccaggtgctaaagcaagggataaaccaaaaggacagccagtaggtgaggagaggccatggaatacccgccaacaagataatcatcgctggaataatagggacctgtctgaatgtaggtatgtgtgccgaagacttctacgtgctctcgcagtccattatctggcattccctactttcatccgtgttatatacctgccatctcatcactcacagccactcggaatcccctggtggccctccagcaggaggtctttctcctctcttgagcttctaaaacactgtacaaaatcactttaaactgcttcctgcctcagtattgcccacatagaaaccttccccgtcaatgaaatggattcttttttaaaaattttttttattgattttctttt

SEQ ID NO: 465017 - DNA, 2094 bp, Homo sapiens
cgccggtctttgtaaggagaccactgagacgagcgggagcgcggagcagcagcctctgctgccctgactttttaagaaatctcaatgaactatttgtagagaatcactgatccggcctgcaagcattttgcacggcaaaaatatcgatcagtgttaagtgaagatcacattttatatgcgatcttgacttttttgtcttacattatatttttatagattttgttataaacatggtgctgggaaaggtgaagagtttgacaataagctttgactgtcttaatgacagcaatgtccctgtgtattctagtggggataccgtctcaggaagggtaaatttagaagttactggggaaatcagagtaaaatctcttaaaattcatgcaagaggacatgcgaaagtacgctggactgaatctagaaacgccggctccaatactgcctatacacagaattacactgaagaagtagagtatttcaaccataaagacatcttaattgggcacgaaagaggaaaccggcgtgcgccggtaaaggttcctccagagcgacccccacccagcccgtactcacgtttgttcccgggcttctgggggcgcccagcccgtgtcaacatcatgttctgtcgcccctcttttgggcctcctaagggccatcgaaaggaaacgacttcaggctttaactgagtagagggcagacgctcctgccggccttacaggtgctggatggccatggacccaactttagcagaaaatccttttcagatggaagttggatgggaagggttttctagtggttttggagtatctattctattcacatctggtattattattccctataaactgacatattttaagagggttgcatgaacagtttttctttgatacattatagtcttaatgtgataaatttaagcaaaccgttggagacaaaggatagcattgtcttaccatgatgtgagacccgagccttttgagtatatatactattttataaacagatgctttgcagtttgggtcattttccattagaaaaaataaaaagcctgtggggtgtgagtattcattatccccattttacagataaggcagctgacgacaggatttttattttgtccagaggaaatgatgaagttagaattagaactcagatctctcagactccaaagcttgttttgtggtcttaattgttatgtaagcatctttaaagttatgccaccctgcggagtatgtaaatgttgaataataaattctttgttttctttttatgtttgttttagatgatgataattccgaagaaggcttccacactattcattcaggaaggcatgaatatgcattcagcttcgagcttccacagacaccactcgctacctcattcgaaggccgacatggcagtgtgcgctattgggtgaaagccgaattgcacaggccttggctactaccagtaaaattaaagaaggaatttacagtctttgagcatatagatatcaacactccttcattactgtcaccccaagcaggcacaaaagaaaagacactctgttgctggttctgtacctcaggcccaatatccttaagtgccaaaattgaaaggaagggctataccccaggtatgtaagaggtagattcccacaaaaaacttttcttcacttagcttttgtgtttaaatttataatatgactactaaatataaacataatatagtattcttttgtgaaataacaaattgtgcttatccatttgtttttttcacaaagtagaatgtagtttcctttttcaaatagctactgattagttcatttctatgactcaagttatttgcagttcctgggacatcttttcatgtatgttagttgcactttcttactttagctttaagaatcttgacttcttttgttgtttttttctaacagtagatatgtatatatttttccctctctaggtgaatcaattcagatatttgctgagattgagaactgctcttcccgaatggtggtgccaaaggcagccatttaccaacacaggccttctatgccaagggaaaatgaaggaagtaatacagcttgtggctaacttgcgtggggtaggaggt

SEQ ID NO: 465018 - DNA, 471 bp, Homo sapiens
cgccggtctttgtaaggagaccactgagacgagcgggagcgcggagcagcagcctctgctgccctgactttttaagaaatctcaatgaactatttgtagagaatcactgatccggcctgcaagcattttgcacggcaaaaatatcgatcagtgttaagtgaagatcacattttatatgcgatcttgacttttttgtcttacattatatttttatagattttgttataaacatggtgctgggaaaggtgaagagtttgacaataagctttgactgtcttaatgacagcaatgtccctgtgtattctagtggggaagtggtattacgaggctataccaccagatgaaacaagataggatcaccagataccagggtgttaatctttatgtgaccaatcttgatgatatattgatgatgacgtctccggaaagagttttctccctttggtacatcatacgcgagtatgatgagga

SEQ ID NO: 465019 - DNA, 1325 bp, Homo sapiens
cgccggtctttgtaaggagaccactgagacgagcgggagcgcggagcagcagcctctgctgccctgactttttaagaaatctcaatgaactatttgtagagaatcactgatccggcctgcaagcattttgcacggcaaaaatatcgatcagtgttaagtgaagatcacattttatatgcgatcttgacttttttgtcttacattatatttttatagattttgttataaacatggtgctgggaaaggtgaagagtttgacaataagctttgactgtcttaatgacagcaatgtccctgtgtattctagtggggataccgtctcaggaagggtaaatttagaagttactggggaaatcagagtaaaatctcttaaaattcatgcaagaggacatgcgaaagtacgctggactgaatctagaaacgccggctccaatactgcctatacacagaattacactgaagaagtagagtatttcaaccataaagacatcttaattgggcacgaaagagatgatgataattccgaagaaggcttccacactattcattcaggaaggcatgaatatgcattcagcttcgagcttccacagacaccactcgctacctcattcgaaggccgacatggcagtgtgcgctattgggtgaaagccgaattgcacaggccttggctactaccagtaaaattaaagaaggaatttacagtctttgagcatatagatatcaacactccttcattactgtcaccccaagcaggcacaaaagaaaagacactctgttgctggttctgtacctcaggcccaatatccttaagtgccaaaattgaaaggaagggctataccccaggtatgtaagaggtagattcccacaaaaaacttttcttcacttagcttttgtgtttaaatttataatatgactactaaatataaacataatatagtattcttttgtgaaataacaaattgtgcttatccatttgtttttttcacaaagtagaatgtagtttcctttttcaaatagctactgattagttcatttctatgactcaagttatttgcagttcctgggacatcttttcatgtatgttagttgcactttcttactttagctttaagaatcttgacttcttttgttgtttttttctaacagtagatatgtatatatttttccctctctaggtgaatcaattcagatatttgctgagattgagaactgctcttcccgaatggtggtgccaaaggcagccatttaccaacacaggccttctatgccaagggaaaatgaaggaagtaatacagcttgtggctaacttgcgtggggtaggaggt

SEQ ID NO: 465020 - DNA, 993 bp, Homo sapiens
cgccggtctttgtaaggagaccactgagacgagcgggagcgcggagcagcagcctctgctgccctgactttttaagaaatctcaatgaactatttgtagagaatcactgatccggcctgcaagcattttgcacggcaaaaatatcgatcagtgttaagtgaagatcacattttatatgcgatcttgacttttttgtcttacattatatttttatagattttgttataaacatggtgctgggaaaggtgaagagtttgacaataagctttgactgtcttaatgacagcaatgtccctgtgtattctagtggggataccgtctcaggaagggtaaatttagaagttactggggaaatcagagtaaaatctcttaaaattcatgcaagaggacatgcgaaagtacgctggactgaatctagaaacgccggctccaatactgcctatacacagaattacactgaagaagtagagtatttcaaccataaagacatcttaattgggcacgaaagagatgatgataattccgaagaaggcttccacactattcattcaggaaggcatgaatatgcattcagcttcgagcttccacagacaccactcgctacctcattcgaaggccgacatggcagtgtgcgctattgggtgaaagccgaattgcacaggccttggctactaccagtaaaattaaagaaggaatttacagtctttgagcatatagatatcaacactccttcattactgtcaccccaagcaggcacaaaagaaaagacactctgttgctggttctgtacctcaggcccaatatccttaagtgccaaaattgaaaggaagggctataccccaggtgaatcaattcagatatttgctgagattgagaactgctcttcccgaatggtggtgccaaaggcagccatttaccaacacaggccttctatgccaagggaaaatgaaggaagtaatacagcttgtggctaacttgcgtggggtaggaggt

SEQ ID NO: 465021 - DNA, 1184 bp, Homo sapiens
cacgcgcctgttgacccagggaaagcgctgagaaagcatctcactcctgatctaactttacttattttttccgagataattccaactaaattatttcagctacatacgcctttccattgtttcggacacgatgattaaatcagagagcgatggtgaatagaccacagagcacttagatcaactgcgtgacgaaaaaggagacctgtgtgttgcttctcaaactttgctgccctgtggaatcacctggagagttcaaaacatatatattgattcttgggtcccacctctagagactctgatttaattggaacaggacaggatctggtctgggcattgagaaatcaccagagattgcgccactgcagtccgcagtccgacctgggcgacagagcgagactccgtctcaaaaaaaaaaaaaaaaaaaaaaaaagaaatcaccagatttaccatcttgtcttaattatttttttaacttatcctgcacactttcagaaggtctagtaaaatttcatgttctttataatgaaaataacaattgtccacattttgagaaatgactgctgcatgacaaacatcctgagccgatctatgagggaatgacagaaagttggcaggaaaatgccagctccgttggggagaccctaacccaaataagaagatttaccattactagacccatctgtaaaacaatgaaaacaggctgcatgttgtttactgcaggaattgtaaatgcaaactgttcacagtcttgctcagctaaagggatagtaaagaaacaatcttttaaatctatgactattaaagcccaattttttggaattatagcaggagaaggcaatcctggctgtaatgctcccataggttatataactgaattgatagctctgaagtcagttaacattctccatttacctgattttttcttaattacgaaaactggagaattccaaggagaaaatgctggagctatgtgcccattttctaattgttcagtaactaatttctccaaagcctccagtttctctttacttagcggccattgttctatccaaattggcttatctgttaaccattctaaaggtataggttctggaggcttaacaatggctgccatcaaaaatgatatcctaatctttggcgggaactttttaaaccttgcaaatttttttttctagtcctgttcc

SEQ ID NO: 465022 - DNA, 1367 bp, Homo sapiens
tttaatgatataatgactgttgccaagcatccactttgagggaaatatgggtttaatcattcacaggagcaatccaccacaggcaaacacttgagtcactaaacattttcacgtgtgcgaataatgcctgatttcagggtctctgtttagtctgtttcaggatattgaggattctcgggatttttttgccataagccttaggcactcgtgatgacaactcccgctattataatttaagagtggacagatgaattgattctgggtccttgtggcacacttgttaaaacttcctggcaggacagggtccccctgtgtacacagttgaaaacttgcagtccaagtgactcacaggctcttcagttaccatggtgatattccattacaggagctgatagattccagagagattggtgcaagccgtctcagcagagtggagtcgctggctcccgaagtgaaacagaacacaactgccagtgggtgtgagctcatgcacacggagatgcaggccctgcgtgccgactggaagcagtgggaagacagtgtattccaaacgcagagctgtttggagaacctggtcagccagatggccctttcggagcaggaattctcaggccaagtggctcaactggagcaggccctggaacagttcagtgcccttctgaaaacctgggctcagcagttaaccctcctggaaggcaagaacacggatgaggagatagtggaatgctggcacaaaggacaagagatactggatgctttgcaaaaagcagagcctagaacagaggatctcaagtctcagctgaatgaactttgtcgattttccagagacctgagtacctacagtggaaaagtttctggcttgattaaagagtataattgtctttgtttgcaagcatccaagggctgccagaataaagaacagattttacagcaaagatttcgaaaggccttcagggatttccagcagtggttggttaatgcaaaaatcactaccgccaagtgttttgatatacctcaaaatataagtgaagtttcaactagtcttcagaaaatacaggagtttttgtcagaaagtgaaaatggacagcacaagctaaacatgatgctgtctaaaggggaacttctgagtaccctgctgaccaaagagaaagcgaaagggatccaggccaaagttacagctgcaaaagaagattggaaaaattttcattcaaatctccaccaaaaagaatctgctctagaggtatatatagccaaccacatggaagcattctgtgttatttgttattgttgttgttgttagtgaaatcacagtttctgtatatcaaagcccccttgtcaatgattttggttacccctctcagaacata

SEQ ID NO: 465023 - DNA, 1049 bp, Homo sapiens
agcttggacatgctctcctcatgcaaacacaaaagcacaagagagcgagtgggaacgcatgctgcccctgaagatgttgaaacttctgctaacgccgccttggttaaagcagctcctatggccaaacccaacaccaagggacagataatcctgctgtggctgccaattcacatggtgaagccacgaatggatcattatgaatgtgacaagaatgaaagccaggttgaaggagacaaagcagtgagagtcaacaagatggaaataggaaaagctttgaacacttttgtcagcagtggagaaaccagcagagaagaagtgacagaagacattgaaaaaacatcaggaaaatggatgagcaaaattccagagaaactgagaagcagggatctgtaattgtcttctcaaagacagcaacaaatcaaagaagggagaccaagatttatagaggctttaggaaattagaagtaaagcagagagctcaggcacttgctaaaacgaatagaaaaaaatgaggaccaccatcaattccaacattgagaactcgtattttagttggaaagaaatgcacacagtttggaatcctatgtaatcaagataagagaacaacaattttccaaatgctttccgtgggccagcgtggaaacttaactctctcacacagacaacgagattacactctgacaccaagccctgcccttgtgggaagtatgataagcctcaaggcaaacaattcttccttcgcgattgcagtctgggcacctgatgatatagaatgactcattggactcctgcctcttctacttcattcttaccatgagctcccctagaagatgtagtcttccaccgttaccaaaatctgcaaccagaaagatcaagctctaggaagcagtacacactatactcctgtgtggaaacaaagtaatcctcatcagatcatctaacttgctgttgctgtaaggactgtgaattggtagcaataaataagccatgggaaataggagggaaaacaccatcaatgacaataaaaactgaatgtgaaatttgactac

SEQ ID NO: 465024 - DNA, 2365 bp, Homo sapiens
cataaggcatacaaggcatacagacatgaggcaagaaaagatgtttgctgagaacacatgctttggaatagaacagaatccattggtccaatatggatggagaaactctttctttttcttcctctttggtggttcatccttggagctgctatctgtgctggtgctgctgctactggaagagctggaatctgagtctgaatcagaggaggaggaagaggttgtggaggaggctgaggatgaggaattagaagagctttcatcaatgtcactgtcctctgaggaggatgaggcaaatgctgtggaaccccatataagcagtaaaatgattaagctagaagtgtttaacaaattgccaaaggctaagtgtggaatagtgaaccaatgtgaagactctagtttctgcagacatatgggagttgtatgtctgcagaagccaggatcttcacactggtacactattcaacacttgttacattattacactgtgaagttttttgcaggttttcccagtatgattaccaccgggtgctcccagattagataaggagacattcattagccagaaagaaaacagttttgtttcaacttgtatatcttcaaagagataatatgcttcagaaatgaaatgaatgaagatgaaatataatattttaattttacttttaatttctctaaaataaacttttcacaaaaagttgtagaaatatagtatgttcataacatgaaaacttgaaagttttgactgtaatgacacatagaaggggatggatttattgggaatattatggtgcaagtctactattctataaataaaaccatatagtattatttaagggtggattcagattatttcaaaatataagttgaaaacccaagacgatcatttaaagaaatttttttaaaagatggatatattgtcctagttaaagagggtaatgacatgacggtcaggtttcaagaagccataataatcttaattatgtatataatatacactaatacatcaaactatatgagttactttgaaatacataattgttaactagtcacattgttatgcaatggaacactagaatttattcctcctatattactggaactttgtatgttttgaccaacctttccccatccaccctaccctcaacccttcaaagcttccagtaaaacaactatgctgctctccacttcgatgagatcaactttttaaaattttacatgcgaagctacatctgattccagtggggctttgttaatgcgatcctttctcactgtacctgttgcctgatgttccattgaactgagcttatcaagaagtgcaatactggtgaaaaagttatcgaatacaaaatgatattgtccagggtgtgtgtaagtccctcactaaacttatgaataagtgatgcaccaacaccgtattcttcatatttagtatttgggtttttaccctgatacggctgaaagcagcaaatgtggcacagacatgtggcaccacaacaaaacttacagccaaacataatgggctttccctgaataaattgtttgcacctgtgacaaccagaataaggaaccatggattcattaaagctgaaatatgtctcatttggaacaaatttcatacatctctcattacgtttgcttatgagaagtcgcaacttggaaaatttgtccattggatccaaatttgcatcgtcagcaacatgcaaattagaaaatttagtttcaaagcggtcacgtctcatggcagcaataaccagtacattatgcgcatctggtttgttgttgttgttgttcccaaaacatacggcttctaggaactgagatgtaaccactcagaaaaataattcccagaaaatatttgaattcggagctagtcaagccaagatgtacacccttaacttcgagcctggacaaagtgtagtgccgaattatccaataaatatttactgaatgattgtgtgaaagtagtcagtgaacaaatgtgtgtgtttgtgtgtgtgtgtggtctgcgttgcctaaattttgtataaactattttataatctttaattttaaaatttaaatatggacatgctccctaggaaaatacatagaaaagttcaggttatttatatctctgtatctaattctattgatatacatttccaaatttattaatatagtaaactaaattaaaactattatgaagccacattaatatcttattttacagaaacaataaattcatgtccattgattttcatgtcattttaatgttttctaactgttattattttcaagtcaaataaggtttatttgcctttaccaaggctttatttgttttcaacgctaaaattaatcacattaaaccttaacaaatcttcttcct

SEQ ID NO: 465025 - DNA, 1532 bp, Homo sapiens
cgggacaagacaactttctcctcaccatggtggctgagttctggaggctgtaatttcgtggatttctgtggagctggcagagctcatgtctgcagggctctgagaggaggaagcctggggcaggacctgcgccagtggccgctgggcacagcatggagcaccccagcaagatggaattcttccagaagctgggctatgaccgggaggatgtgctccgggtgttgggcaagctgggcgagggcgccctggtcaacgacgtgctgcaggagcttatccgcacgggcagccgcccgggtgccctggagcacccggctgcacccaggctagtgcctcggggctcctgtggggtcccggactctgcccagcgtggcccggggacagccctggaagaggacttcagaaccctggccagttctctgcgacccatagtgattgatggcagcaaccccaatgccattggtcgtgcttggctgaacccagaagacctggctgctgctctctggaggttgacagagtgggccactggcccagtgctttttacagaaatgggctctcctaagcaggactactggcatcattcctcattttgtaagaggtgggtcaacgtaatgagaactccaagtgatgatgtggggagagtggaagatggggacctggtaaacagacctatggctgcccccagttttgctggacctcttgctgtaccccataaaggaaaccagggaagtcagaagtacaggaccgctaggccagggctgcccaacacaactccccgcagtgagggcaaggcccacccctgccctgtccccacagagccacttgccacgtgtgacactgtgatccaggatattcgcagggaaatcactcttaggaacacttgctgtgtctctatgatttctttgttttcccattgtagccatggaaataaagaaaccttctcttgccggggaatcaagctggctgttgactggttcagggacagaggacacacctacatcaaagtttttgttccatcctggaggaaggacccaccaagagctgacacccctatcagaggtatgctggagcagatgtatgctcaagaggaggtcaacagccacaatgggaggcttcttccttcctagttgtagcttcactttctttatagggatagggatgggaaatgagtggaggtccattctcctgggagcagctgccagggagtagctcagctcacctgttagtcatcccgattttgcccgacttccactccatctccaccaccagaagtgctccaagactgcagggcaatggctcccacctccactccagccttctgcgcatattctgggctgtggttccctccatgctgcacaatcaatacaatcctctctgctttctgtcttcccaaagtatgtcaaaatcctgggtttgctgctgtccccaaacctacttttaacatgattatagatctccccccacctttcattacattggaactatgagaaagagggaatataaatacttgtgttcagttccctgtcatgaactgg

SEQ ID NO: 465026 - DNA, 1706 bp, Homo sapiens
tttttttcttaaaaaaaaaaaaaccaaaaaaacccaaagcataactacttttgcagctgaacgtgactgtggcgtgcaggaagtggagcattggcatgaagtggctcctagtggctgcttggcgcacgccagctgccctcctctgactccagtggcacctgggggcctggcctcactgacgggagaacattggcgtgaaggctgctggcgactgggccagcattcattgtgaagaccggagggacacaccctgctgctcatgtctgcagggctctgagaggaggaagcctggggcaggacctgcgccagtggccgctgggcacagcatggagcaccccagcaagatggaattcttccagaagctgggctatgaccgggaggatgtgctccgggtgttgggcaagctgggcgagggcgccctggtcaacgacgtgctgcaggagcttatccgcacgggcagccgcccgggtgccctggagcacccggctgcacccaggctagtgcctcggggctcctgtggggtcccggactctgcccagcgtggcccggggacagccctggaagaggacttcagaaccctggccagttctctgcgacccatagtgattgatggcagcaaccccaatgccattggtcgtgcttggctgaacccagaagacctggctgctgctctctggaggttgacagagtgggccactggcccagtgctttttacagaaatgggctctcctaagcaggactactggcatcattcctcattttgtaagaggtgggtcaacgtaatgagaactccaagtgatgatgtggggagagtggaagatggggacctggtaaacagacctatggctgcccccagttttgctggacctcttgctgtaccccataaaggaaaccagggaagtcagaagtacaggaccgctaggccagggctgcccaacacaactccccgcagtgagggcaaggcccacccctgccctgtccccacagagccacttgccacgtgtgacactgtgatccaggatattcgcagggaaatcactcttaggaacacttgctgtgtctctatgatttctttgttttcccattgtagccatggaaataaagaaaccttctcttgccggggaatcaagctggctgttgactggttcagggacagaggacacacctacatcaaagtttttgttccatcctggaggaaggacccaccaagagctgacacccctatcagaggtatgctggagcagatgtatgctcaagaggaggtcaacagccacaatgggaggcttcttccttcctagttgtagcttcactttctttatagggatagggatgggaaatgagtggaggtccattctcctgggagcagctgccagggagtagctcagctcacctgttagtcatcccgattttgcccgacttccactccatctccaccaccagaagtgctccaagactgcagggcaatggctcccacctccactccagccttctgcgcatattctgggctgtggttccctccatgctgcacaatcaatacaatcctctctgctttctgtcttcccaaagtatgtcaaaatcctgggtttgctgctgtccccaaacctacttttaacatgattatagatctccccccacctttcattacattggaactatgagaaagagggaatataaatacttgtgttcagttccctgtcatgaactgg

SEQ ID NO: 465027 - DNA, 670 bp, Homo sapiens
tgcgggtctcttcctgcactatccagtcttgtgaggccgaccctgcggagcagctggccttgcagtccacgctcactgtcttagccgagcgaatgtccaccatcaggatgaaagcctcggggaaacggcagcttttggaggagaagttgaatgatcagctggaggaacaaaggcaggaacaggccctgcagaggtatcgctgtgaagccgatgagctggacagctggctcttgagtaccaaggccactctggacactgcgctgagtccacccaaggagcccatggacatggaggcccagcttatggactgccagaatatgctggtggaaatagagcagaaggtggtggctttatcagaactgtcagtccacaatgagaacctgctgctggagggcaaagctcacaccaaggacgaggccgagcagctggctggaaagctgagaaggctcaaggggagcctgctggagctgcagagagccctgcatgataagcagctcaacatgcaggtgagggttccagccgctggcccacagctgaaagttggcacactgttcacgtgctccttctaaggtttgccaggtaaaggaacaggttggcggtgacgcgtacttgtgtgtgtacctgctttacgctgacattttagcatgcagctttaagtttacactcttgg

SEQ ID NO: 465028 - DNA, 3589 bp, Homo sapiens
ccgagcaggagcttcatggtcccacacaccctgctagaagaatccaaagaaattgacagtgagctggaagcaatgactgagaaattacagtacctcactagcgtgtactgtacagaaaaaatgtctcagcaagtggcagaactgggacgggagactgaggagttgcgacagatgatcaaaattcgtttgcagaacctccaagatgcagctaaggatatgaaaaaatttgaagcagagttgaaaaagttacaagctgccttggagcaagcccaggcaacactgacttctccagaagttggacgtctcagtctcaaggagcagctctctcatcggcagcatttgttgtctgagatggagtcactgaagccgaaggtgcaagcagtgcagctctgccagagtgccctccggatccccgaggatgtggttgccagcttacctctctgtcatgctgctctgcggctgcaggaagaggccagccggctgcagcacaccgccatccagcagtctgtggtacaatatgaacaatatgagcaagaaatgaaacatctccagcaactgatagaaggagctcacagagagattgaggataaacctgttgccaccagtaacatacaggagctgcaggctcagatttctcggcatgagaaaccactcattcggcctcatcccctcatttctccttttgtaccgacgcggggacgcgggctcgggcactttggctgtgcctgcgccgcgccgcgcagcctgcggtctggctcggtagcgagatgcaggaggactcgccgcctacacatcctgcctcccgggcccgcgcggctctgcgcgctcattggctcgccctgcaggaagatgaacgctactacttctgagctggcgcagaaaattaagggctaccaggagcagatcgcttctttgaattccaagtgcaagatgctgacgatgaaagccaagcacgccaccatgctgctgacggtgaccgaggtcgaggggctggcggaagggacagaggacctggatggggagctcctccccacgccttcggcccacccctctgtggtcatggtgtttttggatggaagagagaaagtcaacaaagccagagaggatgttaatagaccaagatccttgaaaaagcagtttatgggattctcagagtctgtgggagagtcaggtttaagcagtgaaactggaaagcataagataaggctgtcccagtctgaattcattctaccgcatgacactgctacatttgtttctcagacggctggagccttcttcaatactttttaccaatacatgattctcaataagactcaggacattgcatattaccaagccttgtctgctgagaggttgcagacagatgctgcaaaaattcaccccagcacatccgcatcccaggagttctatgaaccgggattggagccatccgctactgccaaactgggtgatttgcagcgttcttgggaaaccttaaagaatgtgatcagtgagaagcagcgcacactctatgaagctttggaacgccagcagaagtaccaggactccctccagtccatctctacgaagatggaggccattgagctgaaactcagtgagagcccagagcctggcaggagtccagaaagccagatggctgaacatcagttggtagtagtcgtactagccatcacagcagtaaggaggtacagctaatttagtgaagattaccagtcattggggcttaatggtttattaagagagaaaatatattaatatatcatattaatataattgcatatattaatatatcatattaatataattgcatatattaatatatcatattaatataattgcatatattaatatatcatattaatataattgcatatattaatatatcatattaatataattgcatatattaatatatcatattaatataattgcatatattaatatatcatattaatataattgtatatattaatatatcatattaatataattagaacatattaatgttctaatgagagggaaagaaaatagcaataatgtagaatttagtatataatttcatgtatcatcacatatttcatctgagctatttttgctaccttttgctgtctgtgccagaagttctacaagttctggaacacagctgcccacatgaaaagctggtggtatcacagtatctaaatttgttcttagcttcaggaatggtactttaaaaatgtcaagcactgttatagaattactatttctaaatttcaactgaatgggtagaaatttaaagccgatgtgtctgccctacttcttaatttctattttaaatggtttaataaaattaattttaaaataatgaattattcataaaataatttttaaaataaagtatttagagtattttaaaagttaacttttaattcatttatattgtccccagtaactctatgaaaaacttgtgggggtttcaaaatgaagcgattgacgtcgatttttttttcaacatgaattatttgcaatcattgaaaaactcagagagctaacctagaaatttggatttctccctttactggagatgaaagttaacactgggccaccgcttcccacagggatcaattgcctgaaactgtatgtggctgctgttttagacaggccgcatgtttttcagtttgccacagtctccatcactccctactcttcccagaaatagaggtccggtgtctactgccatttaccaaccgctttatgccattgttttgttctaatccttgactgatttccatcatttctattactgcctggtcctataggtatgttatttgagaataccttgttcaactctaggtacacattaaaatcactagggagtctttttaaaaataccaattttgagactcacccctagaaattctgattgttgttctgggatgtggcctaagcaaaggaaatttttaaaagttttaccagtgattcttatgtacagccagggcctggaaccattgctttactgtgttaaattctcaagattttaccttagcgtgatctatattaccttctactgaattcaacaggagaagttgaatgatcagctggaggaacaaaggcaggaacaggccctgcagaggtatcgctgtgaagccgatgagctggacagctggctcttgagtaccaaggccactctggacactgcgctgagtccacccaaggagcccatggacatggaggcccagcttatggactgccagaatatgctggtggaaatagagcagaaggtggtggctttatcagaactgtcagtccacaatgagaacctgctgctggagggcaaagctcacaccaaggacgaggccgagcagctggctggaaagctgagaaggctcaaggggagcctgctggagctgcagagagccctgcatgataagcagctcaacatgcaggtgagggttccagccgctggcccacagctgaaagttggcacactgttcacgtgctccttctaaggtttgccaggtaaaggaacaggttggcggtgacgcgtacttgtgtgtgtacctgctttacgctgacattttagcatgcagctttaagtttacactcttgg

SEQ ID NO: 465029 - DNA, 297 bp, Homo sapiens
catatacaatatctgaagtttttcctctgaagaacagttccgtataacgacaccaagatttaattcgacccctataaaagcagcatctcactttattgatcatacttcaaagcatatactcaatagttaaggatcaataatttctgtttggtttgggtctttccactcgtgactttctatgattttttactcccctccccctatatcctgttccataagtacacgggtgctctagattttcctatcaatacgccatttacaactatctcgggggaaggttaatggttgatattgcta

SEQ ID NO: 465030 - DNA, 2363 bp, Homo sapiens
gcaagctcggggcggtgttggaaatctgaatgtcacccgcggtccggagcagataggatgggctgggaaggtacccgcgaactgccgccggaattcgctggcagctgtgcgaggattatttaaattttccacaaatttctacggattaattcaatggcagctcactttctccttttatgatcggatgggtccgaaagtgaggaaaaagacaattgtctacaaagaaagaggctgccaagtggagacagaaaagcagttatgagactgatgatagattccaatttgttatcgaaaggaaggaggagacctgaacagtacatccggagaatccagcaaagcatactacggcatgaacgtgcaagtggacagaattaaaacacatgccagaaacactaatggattctaaacaagatgcagtttcatttcctgagcctatacgtgatgtttttaactgttctccagttaatatgtctccatttccagaaatctaacaggagaatctctgactgcttaacagatcacctaagcttgcgatttgtgcaatcctttctagagtaagggctccccggctgctccccggccactgtgtacccaaagcagcggctgaaatagcccggagtccaacagctcagcgtcaagcagctcgtggtttgtacttacatcattttttttttcagagcaagagtgaaagtttattaaaaagcgttagaacagtaaggaaaggaaaggagagaaaataaggaaagtacaacttggaagagggccaagcgggcgacttgagaaatcaagtgcctgtacttacatcattcttaaccctttcgctcctggagggggctcagcgggatcagggggcccctgaacttcggaacacgcaggacctgggtgtgagagaagagtcccaaagcttggcgtgagcaatgcactcgcggagggagagagcccggggcttgcggggggctcatcacccgctcgtagacaacgggcccccgcaatccctgcgggctccgccgctgctctcaccgctcaaaacggcaggtgcaaaaagcatttgggagccgcttgccagcgcgcggagcctagtctgggaaactccagccaacccaggatcccattttgtagtcccgggcagacccgaaacccctgaaagaactccactccagaagacgccagaacaagttcccacgaatttcatgggcgcccttcacatgaaaacctcagctcccctatcctcaaggaacggggaagggcgccggggagggacttcggtggccagctgtccctgggtcgtgggcgctgtttgctctgcggagcgccagccctgcacacagcggatctgtaagttgcgaaaaggggcttttgggagcgtcagagctttctcactccggtcccccgccgccttgaggctggcagatttataccccacaggtggatggagacctaaacaaaacagtcccggccgctgcctgccgctcgccccccacgtcccccgggcccaccgcaaacttcaacaaaataaacaactcaccacaggcattcccttgtctgcagcgcgacgcttgccagctgggaaaataagccgcaagccacgcggccgaggcgcggagggaaggcagcgcggcgcccgcccctctcccccaggtggggggcagcgcgactcggggcgggagggaggctccgcctcgggggccgctctcccagttctccgactccagaatgagctctgggagaggagctgcgcccttccagctagcccgatttctccgccatctaggggagagggcggggagccaaatccctcagccccccgcaccccagcagcttcctccaggcagctttctccccagtcagcctcaaatagaggtgaacagagaccctcctctccccccggcaacccctatatcgccacactgccccctgccggcgctatccggctcattccggcactgcggacggctgggggcgggcgccgcagacccccgcgtccaggtcctggatcagttctctcttcgccttccccccaccacactcaatcttgcacaaagacgcctttcacgccgccagcgccaccctccgcgccgccctccgggccggcggcgctgccttcgcccacccgcggcaccagccgattcctggtgggcgattgtgccactcgtcgccaggcagggcggcagcggacgcgtgcgggctgttcccactccgcgccccggccaaggcgccagatgcgctgccccccgccacgttctctagctgcccgccggcagccgcagaatgcacacctttctctccgtaaatgatccttaagggtcttccaagtgtttctaaaatgggtacagtggcgggaatggtccgctggactttcgccg

SEQ ID NO: 465031 - DNA, 2787 bp, Homo sapiens
ataatcccccgccgtgtccctcccttcctccccattggttgtgaccgcacgtcagcccgactcagcctgccaatcgcaggacccagagggccctctcccccgcccgctcagtgtaattcgagttccctgtccatcgactccaagtcctctctcctgcgccgcatgctgcctcgcgctccctttccttccccctctacccccttccgcgatttactgtttcctcgcgcccaacagaaatgggcgaccgcaagtcttactctcgccggcgttacaaaggtaccggcctttgacctctccttgaattaatgtgatccgattcatcttccctccaagttttttttttaatttaattacccctccctgccctcaggtgttctagtttgacatttcccttcctgaaagcggcaaggagaggtctaagagtgggcaaacttcaacgttcggttacagtgtaattaatgagagtggtgggtttttatgcagtgtaattatgccacgatttgttgttgctcagtggctttttcacaaatttctacagattatttaaattttccacaaatttctacggattaattcaatggcagctcactttctccttttatgatcggatgggtccgaaagtgaggaaaaagacaattgtctacaaagaaagaggctgccaagtggagacagaaaagcagttatgagactgatgatagattccaatttgttatcgaaaggaaggaggagacctgaacagtacatccggagaatccagcaaagcatactacggcatgaacgtgcaagtggacagaattaaaacacatgccagaaacactaatggattctaaacaagatgcagtttcatttcctgagcctatacgtgatgtttttaactgttctccagttaatatgtctccatttccagaaatctaacaggagaatctctgactgcttaacagatcacctaagcttgcgatttgtgcaatcctttctagagtaagggctccccggctgctccccggccactgtgtacccaaagcagcggctgaaatagcccggagtccaacagctcagcgtcaagcagctcgtggtttgtacttacatcattttttttttcagagcaagagtgaaagtttattaaaaagcgttagaacagtaaggaaaggaaaggagagaaaataaggaaagtacaacttggaagagggccaagcgggcgacttgagaaatcaagtgcctgtacttacatcattcttaaccctttcgctcctggagggggctcagcgggatcagggggcccctgaacttcggaacacgcaggacctgggtgtgagagaagagtcccaaagcttggcgtgagcaatgcactcgcggagggagagagcccggggcttgcggggggctcatcacccgctcgtagacaacgggcccccgcaatccctgcgggctccgccgctgctctcaccgctcaaaacggcaggtgcaaaaagcatttgggagccgcttgccagcgcgcggagcctagtctgggaaactccagccaacccaggatcccattttgtagtcccgggcagacccgaaacccctgaaagaactccactccagaagacgccagaacaagttcccacgaatttcatgggcgcccttcacatgaaaacctcagctcccctatcctcaaggaacggggaagggcgccggggagggacttcggtggccagctgtccctgggtcgtgggcgctgtttgctctgcggagcgccagccctgcacacagcggatctgtaagttgcgaaaaggggcttttgggagcgtcagagctttctcactccggtcccccgccgccttgaggctggcagatttataccccacaggtggatggagacctaaacaaaacagtcccggccgctgcctgccgctcgccccccacgtcccccgggcccaccgcaaacttcaacaaaataaacaactcaccacaggcattcccttgtctgcagcgcgacgcttgccagctgggaaaataagccgcaagccacgcggccgaggcgcggagggaaggcagcgcggcgcccgcccctctcccccaggtggggggcagcgcgactcggggcgggagggaggctccgcctcgggggccgctctcccagttctccgactccagaatgagctctgggagaggagctgcgcccttccagctagcccgatttctccgccatctaggggagagggcggggagccaaatccctcagccccccgcaccccagcagcttcctccaggcagctttctccccagtcagcctcaaatagaggtgaacagagaccctcctctccccccggcaacccctatatcgccacactgccccctgccggcgctatccggctcattccggcactgcggacggctgggggcgggcgccgcagacccccgcgtccaggtcctggatcagttctctcttcgccttccccccaccacactcaatcttgcacaaagacgcctttcacgccgccagcgccaccctccgcgccgccctccgggccggcggcgctgccttcgcccacccgcggcaccagccgattcctggtgggcgattgtgccactcgtcgccaggcagggcggcagcggacgcgtgcgggctgttcccactccgcgccccggccaaggcgccagatgcgctgccccccgccacgttctctagctgcccgccggcagccgcagaatgcacacctttctctccgtaaatgatccttaagggtcttccaagtgtttctaaaatgggtacagtggcgggaatggtccgctggactttcgccg

SEQ ID NO: 465032 - DNA, 2230 bp, Homo sapiens
ggagggagctagaacacaaacaaaaaaatcggtgacttataaaagttttatgttttaatcagaaaaaaaatcatgaagtggctgatgacttgtgtaattcacacatccaccctgtttcttgccactggtactctttctccctttctctttgttttcagaaaggaaggaggagacctgaacagtacatccggagaatccagcaaagcatactacggcatgaacgtgcaagtggacagaattaaaacacatgccagaaacactaatggattctaaacaagatgcagtttcatttcctgagcctatacgtgatgtttttaactgttctccagttaatatgtctccatttccagaaatctaacaggagaatctctgactgcttaacagatcacctaagcttgcgatttgtgcaatcctttctagagtaagggctccccggctgctccccggccactgtgtacccaaagcagcggctgaaatagcccggagtccaacagctcagcgtcaagcagctcgtggtttgtacttacatcattttttttttcagagcaagagtgaaagtttattaaaaagcgttagaacagtaaggaaaggaaaggagagaaaataaggaaagtacaacttggaagagggccaagcgggcgacttgagaaatcaagtgcctgtacttacatcattcttaaccctttcgctcctggagggggctcagcgggatcagggggcccctgaacttcggaacacgcaggacctgggtgtgagagaagagtcccaaagcttggcgtgagcaatgcactcgcggagggagagagcccggggcttgcggggggctcatcacccgctcgtagacaacgggcccccgcaatccctgcgggctccgccgctgctctcaccgctcaaaacggcaggtgcaaaaagcatttgggagccgcttgccagcgcgcggagcctagtctgggaaactccagccaacccaggatcccattttgtagtcccgggcagacccgaaacccctgaaagaactccactccagaagacgccagaacaagttcccacgaatttcatgggcgcccttcacatgaaaacctcagctcccctatcctcaaggaacggggaagggcgccggggagggacttcggtggccagctgtccctgggtcgtgggcgctgtttgctctgcggagcgccagccctgcacacagcggatctgtaagttgcgaaaaggggcttttgggagcgtcagagctttctcactccggtcccccgccgccttgaggctggcagatttataccccacaggtggatggagacctaaacaaaacagtcccggccgctgcctgccgctcgccccccacgtcccccgggcccaccgcaaacttcaacaaaataaacaactcaccacaggcattcccttgtctgcagcgcgacgcttgccagctgggaaaataagccgcaagccacgcggccgaggcgcggagggaaggcagcgcggcgcccgcccctctcccccaggtggggggcagcgcgactcggggcgggagggaggctccgcctcgggggccgctctcccagttctccgactccagaatgagctctgggagaggagctgcgcccttccagctagcccgatttctccgccatctaggggagagggcggggagccaaatccctcagccccccgcaccccagcagcttcctccaggcagctttctccccagtcagcctcaaatagaggtgaacagagaccctcctctccccccggcaacccctatatcgccacactgccccctgccggcgctatccggctcattccggcactgcggacggctgggggcgggcgccgcagacccccgcgtccaggtcctggatcagttctctcttcgccttccccccaccacactcaatcttgcacaaagacgcctttcacgccgccagcgccaccctccgcgccgccctccgggccggcggcgctgccttcgcccacccgcggcaccagccgattcctggtgggcgattgtgccactcgtcgccaggcagggcggcagcggacgcgtgcgggctgttcccactccgcgccccggccaaggcgccagatgcgctgccccccgccacgttctctagctgcccgccggcagccgcagaatgcacacctttctctccgtaaatgatccttaagggtcttccaagtgtttctaaaatgggtacagtggcgggaatggtccgctggactttcgccg

SEQ ID NO: 465033 - DNA, 738 bp, Homo sapiens
ctcggggcggtgttggaaatctgaatgtcacccgcggtccggagcagataggatgggctgggaaggtacccgcgaactgccgccggaattcgctggcagctgtgcgaggctcaggtgttctagtttgacatttcccttcctgaaagcggcaaggagaggtctaagagtgggcaaacttcaacgttcggttacagtgtaattaatgagagtggtgggtttttatgcagtgtaattatgccacgatttgttgttgctcagtggctttttcacaaatttctacagattatttaaattttccacaaatttctacggattaattcaatggcagctcactttctccttttatgatcggatgggtccgaaagtgaggaaaaagacaattgtctacaaagaaagaggctgccaagtggagacagaaaagcagttatgagactgatgatagattccaatttgttatcggtaggtgtgaagtggtatctaatctcaagaatgacctcaaggctgagagacacttgataccgccctcgcctttgcctttccccaaacagcacagggttgccatttaaaatccactaacatccaaatcgtagttggcaactgtacccgctatgttactcagaatctctaattaggaatttcttatcaaccacggacatgctgatattccacacatgtttaaatgagctaatcaatggactaggataattgaggggcaaaccttcagtctcaccagctcac

SEQ ID NO: 465034 - DNA, 2536 bp, Homo sapiens
gcaagctcggggcggtgttggaaatctgaatgtcacccgcggtccggagcagataggatgggctgggaaggtacccgcgaactgccgccggaattcgctggcagctgtgcgaggctcaggtgttctagtttgacatttcccttcctgaaagcggcaaggagaggtctaagagtgggcaaacttcaacgttcggttacagtgtaattaatgagagtggtgggtttttatgcagtgtaattatgccacgatttgttgttgctcagtggctttttcacaaatttctacagattatttaaattttccacaaatttctacggattaattcaatggcagctcactttctccttttatgatcggatgggtccgaaagtgaggaaaaagacaattgtctacaaagaaagaggctgccaagtggagacagaaaagcagttatgagactgatgatagattccaatttgttatcgaaaggaaggaggagacctgaacagtacatccggagaatccagcaaagcatactacggcatgaacgtgcaagtggacagaattaaaacacatgccagaaacactaatggattctaaacaagatgcagtttcatttcctgagcctatacgtgatgtttttaactgttctccagttaatatgtctccatttccagaaatctaacaggagaatctctgactgcttaacagatcacctaagcttgcgatttgtgcaatcctttctagagtaagggctccccggctgctccccggccactgtgtacccaaagcagcggctgaaatagcccggagtccaacagctcagcgtcaagcagctcgtggtttgtacttacatcattttttttttcagagcaagagtgaaagtttattaaaaagcgttagaacagtaaggaaaggaaaggagagaaaataaggaaagtacaacttggaagagggccaagcgggcgacttgagaaatcaagtgcctgtacttacatcattcttaaccctttcgctcctggagggggctcagcgggatcagggggcccctgaacttcggaacacgcaggacctgggtgtgagagaagagtcccaaagcttggcgtgagcaatgcactcgcggagggagagagcccggggcttgcggggggctcatcacccgctcgtagacaacgggcccccgcaatccctgcgggctccgccgctgctctcaccgctcaaaacggcaggtgcaaaaagcatttgggagccgcttgccagcgcgcggagcctagtctgggaaactccagccaacccaggatcccattttgtagtcccgggcagacccgaaacccctgaaagaactccactccagaagacgccagaacaagttcccacgaatttcatgggcgcccttcacatgaaaacctcagctcccctatcctcaaggaacggggaagggcgccggggagggacttcggtggccagctgtccctgggtcgtgggcgctgtttgctctgcggagcgccagccctgcacacagcggatctgtaagttgcgaaaaggggcttttgggagcgtcagagctttctcactccggtcccccgccgccttgaggctggcagatttataccccacaggtggatggagacctaaacaaaacagtcccggccgctgcctgccgctcgccccccacgtcccccgggcccaccgcaaacttcaacaaaataaacaactcaccacaggcattcccttgtctgcagcgcgacgcttgccagctgggaaaataagccgcaagccacgcggccgaggcgcggagggaaggcagcgcggcgcccgcccctctcccccaggtggggggcagcgcgactcggggcgggagggaggctccgcctcgggggccgctctcccagttctccgactccagaatgagctctgggagaggagctgcgcccttccagctagcccgatttctccgccatctaggggagagggcggggagccaaatccctcagccccccgcaccccagcagcttcctccaggcagctttctccccagtcagcctcaaatagaggtgaacagagaccctcctctccccccggcaacccctatatcgccacactgccccctgccggcgctatccggctcattccggcactgcggacggctgggggcgggcgccgcagacccccgcgtccaggtcctggatcagttctctcttcgccttccccccaccacactcaatcttgcacaaagacgcctttcacgccgccagcgccaccctccgcgccgccctccgggccggcggcgctgccttcgcccacccgcggcaccagccgattcctggtgggcgattgtgccactcgtcgccaggcagggcggcagcggacgcgtgcgggctgttcccactccgcgccccggccaaggcgccagatgcgctgccccccgccacgttctctagctgcccgccggcagccgcagaatgcacacctttctctccgtaaatgatccttaagggtcttccaagtgtttctaaaatgggtacagtggcgggaatggtccgctggactttcgccg

SEQ ID NO: 465035 - DNA, 2898 bp, Homo sapiens
ataatcccccgccgtgtccctcccttcctccccattggttgtgaccgcacgtcagcccgactcagcctgccaatcgcaggacccagagggccctctcccccgcccgctcagtgtaattcgagttccctgtccatcgactccaagtcctctctcctgcgccgcatgctgcctcgcgctccctttccttccccctctacccccttccgcgatttactgtttcctcgcgcccaacagaaatgggcgaccgcaagtcttactctcgccggcgttacaaaggtaccggcctttgacctctccttgaattaatgtgatccgattcatcttccctccaagttttttttttaatttaattacccctccctgccctcaggtgttctagtttgacatttcccttcctgaaagcggcaaggagaggtctaagagtgggcaaacttcaacgttcggttacagtgtaattaatgagagtggtgggtttttatgcagtgtaattatgccacgatttgttgttgctcagtggctttttcacaaatttctacagattatttaaattttccacaaatttctacggattaattcaatggcagctcactttctccttttatgatcggatgggtccgaaagtgaggaaaaagacaattgtctacaaagaaagaggctgccaagtggagacagaaaagcagttatgagactgatgatagattccaatttgttatcgtacacgggtgctctagattttcctatcaatagagggcgtcctcgagtcattgcaaatcctggtgtcgttaaacggaactgttcttcagaggaaaaacttcatctctataagaaaggaaggaggagacctgaacagtacatccggagaatccagcaaagcatactacggcatgaacgtgcaagtggacagaattaaaacacatgccagaaacactaatggattctaaacaagatgcagtttcatttcctgagcctatacgtgatgtttttaactgttctccagttaatatgtctccatttccagaaatctaacaggagaatctctgactgcttaacagatcacctaagcttgcgatttgtgcaatcctttctagagtaagggctccccggctgctccccggccactgtgtacccaaagcagcggctgaaatagcccggagtccaacagctcagcgtcaagcagctcgtggtttgtacttacatcattttttttttcagagcaagagtgaaagtttattaaaaagcgttagaacagtaaggaaaggaaaggagagaaaataaggaaagtacaacttggaagagggccaagcgggcgacttgagaaatcaagtgcctgtacttacatcattcttaaccctttcgctcctggagggggctcagcgggatcagggggcccctgaacttcggaacacgcaggacctgggtgtgagagaagagtcccaaagcttggcgtgagcaatgcactcgcggagggagagagcccggggcttgcggggggctcatcacccgctcgtagacaacgggcccccgcaatccctgcgggctccgccgctgctctcaccgctcaaaacggcaggtgcaaaaagcatttgggagccgcttgccagcgcgcggagcctagtctgggaaactccagccaacccaggatcccattttgtagtcccgggcagacccgaaacccctgaaagaactccactccagaagacgccagaacaagttcccacgaatttcatgggcgcccttcacatgaaaacctcagctcccctatcctcaaggaacggggaagggcgccggggagggacttcggtggccagctgtccctgggtcgtgggcgctgtttgctctgcggagcgccagccctgcacacagcggatctgtaagttgcgaaaaggggcttttgggagcgtcagagctttctcactccggtcccccgccgccttgaggctggcagatttataccccacaggtggatggagacctaaacaaaacagtcccggccgctgcctgccgctcgccccccacgtcccccgggcccaccgcaaacttcaacaaaataaacaactcaccacaggcattcccttgtctgcagcgcgacgcttgccagctgggaaaataagccgcaagccacgcggccgaggcgcggagggaaggcagcgcggcgcccgcccctctcccccaggtggggggcagcgcgactcggggcgggagggaggctccgcctcgggggccgctctcccagttctccgactccagaatgagctctgggagaggagctgcgcccttccagctagcccgatttctccgccatctaggggagagggcggggagccaaatccctcagccccccgcaccccagcagcttcctccaggcagctttctccccagtcagcctcaaatagaggtgaacagagaccctcctctccccccggcaacccctatatcgccacactgccccctgccggcgctatccggctcattccggcactgcggacggctgggggcgggcgccgcagacccccgcgtccaggtcctggatcagttctctcttcgccttccccccaccacactcaatcttgcacaaagacgcctttcacgccgccagcgccaccctccgcgccgccctccgggccggcggcgctgccttcgcccacccgcggcaccagccgattcctggtgggcgattgtgccactcgtcgccaggcagggcggcagcggacgcgtgcgggctgttcccactccgcgccccggccaaggcgccagatgcgctgccccccgccacgttctctagctgcccgccggcagccgcagaatgcacacctttctctccgtaaatgatccttaagggtcttccaagtgtttctaaaatgggtacagtggcgggaatggtccgctggactttcgccg

SEQ ID NO: 465036 - DNA, 2348 bp, Homo sapiens
ataatcccccgccgtgtccctcccttcctccccattggttgtgaccgcacgtcagcccgactcagcctgccaatcgcaggacccagagggccctctcccccgcccgctcagtgtaattcgagttccctgtccatcgactccaagtcctctctcctgcgccgcatgctgcctcgcgctccctttccttccccctctacccccttccgcgatttactgtttcctcgcgcccaacagaaatgggcgaccgcaagtcttactctcgccggcgttacaaagaaaggaaggaggagacctgaacagtacatccggagaatccagcaaagcatactacggcatgaacgtgcaagtggacagaattaaaacacatgccagaaacactaatggattctaaacaagatgcagtttcatttcctgagcctatacgtgatgtttttaactgttctccagttaatatgtctccatttccagaaatctaacaggagaatctctgactgcttaacagatcacctaagcttgcgatttgtgcaatcctttctagagtaagggctccccggctgctccccggccactgtgtacccaaagcagcggctgaaatagcccggagtccaacagctcagcgtcaagcagctcgtggtttgtacttacatcattttttttttcagagcaagagtgaaagtttattaaaaagcgttagaacagtaaggaaaggaaaggagagaaaataaggaaagtacaacttggaagagggccaagcgggcgacttgagaaatcaagtgcctgtacttacatcattcttaaccctttcgctcctggagggggctcagcgggatcagggggcccctgaacttcggaacacgcaggacctgggtgtgagagaagagtcccaaagcttggcgtgagcaatgcactcgcggagggagagagcccggggcttgcggggggctcatcacccgctcgtagacaacgggcccccgcaatccctgcgggctccgccgctgctctcaccgctcaaaacggcaggtgcaaaaagcatttgggagccgcttgccagcgcgcggagcctagtctgggaaactccagccaacccaggatcccattttgtagtcccgggcagacccgaaacccctgaaagaactccactccagaagacgccagaacaagttcccacgaatttcatgggcgcccttcacatgaaaacctcagctcccctatcctcaaggaacggggaagggcgccggggagggacttcggtggccagctgtccctgggtcgtgggcgctgtttgctctgcggagcgccagccctgcacacagcggatctgtaagttgcgaaaaggggcttttgggagcgtcagagctttctcactccggtcccccgccgccttgaggctggcagatttataccccacaggtggatggagacctaaacaaaacagtcccggccgctgcctgccgctcgccccccacgtcccccgggcccaccgcaaacttcaacaaaataaacaactcaccacaggcattcccttgtctgcagcgcgacgcttgccagctgggaaaataagccgcaagccacgcggccgaggcgcggagggaaggcagcgcggcgcccgcccctctcccccaggtggggggcagcgcgactcggggcgggagggaggctccgcctcgggggccgctctcccagttctccgactccagaatgagctctgggagaggagctgcgcccttccagctagcccgatttctccgccatctaggggagagggcggggagccaaatccctcagccccccgcaccccagcagcttcctccaggcagctttctccccagtcagcctcaaatagaggtgaacagagaccctcctctccccccggcaacccctatatcgccacactgccccctgccggcgctatccggctcattccggcactgcggacggctgggggcgggcgccgcagacccccgcgtccaggtcctggatcagttctctcttcgccttccccccaccacactcaatcttgcacaaagacgcctttcacgccgccagcgccaccctccgcgccgccctccgggccggcggcgctgccttcgcccacccgcggcaccagccgattcctggtgggcgattgtgccactcgtcgccaggcagggcggcagcggacgcgtgcgggctgttcccactccgcgccccggccaaggcgccagatgcgctgccccccgccacgttctctagctgcccgccggcagccgcagaatgcacacctttctctccgtaaatgatccttaagggtcttccaagtgtttctaaaatgggtacagtggcgggaatggtccgctggactttcgccg

SEQ ID NO: 465037 - DNA, 1646 bp, Homo sapiens
tgtgggatcagaccccaaatgaccaactggcagcccacgggccacgtcaggcccacagacatgtcttgtttggcccacaacaagctccctggaggatgccttagccacatgaaagctcttgcagccgtggtggaaaggatcatccacggtgacttgcagctgtactgttattaccaccgtgaaacagctgagaccaaggagggaattctgattgaaagcaaaccagggaggaaagatgcactagcactgacctgtaacaggtcaatctgtgccatggcatggcgagatgaagtggagaacccatgtctcattggaatcccggatcatcgtctccacgaaggctgtcttctgcagcactccagggactcacggctctgggcttattgctcagtgtcatgtgacaagaacctgaaatcagaacctgatttcagaacctgagaacctcagaacctgagccacatcagcttttgccaacaaactccatggttttgttgttgttgttgctgctgctgctttgtttgcttgttctgttgctgtgtaatgaatcttcttgccattggctctttctctgcctttattctagggcatgtccagagctgccactgccctgggcctccaccccacagcccaggaccacaccttaacctggaaagtcgtggacctcctcaggggagctcagggatcagatgggccgatgggtgttactgtggccaggagcactgggtcttgagtatgtgggtggaactttccctcatcccctgaccacgtctaaccacatggcctctccactttgatagtggcgagaagagtagcctcttgcttttgcatgttttcctaatcacagcgtgctttcttgtctgctatttcatttgacttttttcaaccagccgctgaggtggggattattagcacgccctttgcagatgaggaaactgaagcccagggagctttggcaacctgcccaaggtcacacagccagtgaaggaaagggctgaaatcaaaccaggcctgtctgactgcaaggcagggtcttacggctgcctccggtgggtaggtccgggacccagctggtttccgtcctgtggctcaggtgcgaggagagcctccctgggccacctggggaagtctgactgacgtgccagatcctcacagaacaaagcactccctctctcagcaccagggagctcctccaggagcacttcctcccatgtctgtgttcgccgttaagactggacacaccaggatgatctttcaactttgggtccaaaggccctcagtggatgtaaaataggtacatgaggccttgaactgaacatttttttcacttcaccataacctggattttcccagtttaggagcatctgtttgtcttgataacgtttggaacaaagtgaaaaaaactggactttgaagagaacttcagcctcccagcagccctgttttacagatgaagaaactgaggctcaaagagctggagaaggttgttgcccagggtcctgtggagagaaaactcaagctccggctgttccactactctgggacaccacccccagtgggaaccccacttttacaaggattcgaaggtaggtgaggacttatctcctgaaataattagtatacttacttttttgttacatattcccact

SEQ ID NO: 465038 - DNA, 1746 bp, Homo sapiens
tgtgggatcagaccccaaatgaccaactggcagcccacgggccacgtcaggcccacagacatgtcttgtttggcccacaacaagctccctggaggatgccttagccacatgaaagctcttgcagccgtggtggaaaggatcatccacggtgacttgcagctgtactgttattaccaccgtgaaacagctgagaccaaggagggaattctgattgaaagcaaaccagggaggaaagatgcactagcactgacctgtaacaggtcaatctgtgccatggcatggcgagatgaagtggagaacccatgtctcattggaatcccggatcatcgtctccacgaaggctgtcttctgcagcactccagggactcacggctctgggcttattgctcagtgtcatgtgacaagaacctgaaatcagaacctgatttcagaacctgagaacctcagaacctgagccacatcagcttttgccaacaaactccatggttttgttgttgttgttgctgctgctgctttgtttgcttgttctgttgctgtgtaatgaatcttcttgccattggctctttctctgcctttattctagggcatgtccagagctgccactgccctgggcctccaccccacagcccaggaccacaccttaacctggaaagtcgtggacctcctcaggggagctcagggatcagatgggccgatgggtgttactgtggccaggagcactgggtcttgagtatgtgggtggaactttccctcatcccctgaccacgtctaaccacatggcctctccactttgatagtggcgagaagagtagcctcttgcttttgcatgttttcctaatcacagcgtgctttcttgtctgctatttcatttgacttttttcaaccagccgctgaggtggggattattagcacgccctttgcagatgaggaaactgaagcccagggagctttggcaacctgcccaaggtcacacagccagtgaaggaaagggctgaaatcaaaccaggcctgtctgactgcaaggcagggtcttacggctgcctccggtgggtaggtccgggacccagctggtttccgtcctgtggctcaggtgcgaggagagcctccctgggccacctggggaagtctgactgacgtgccagatcctcacagaacaaagcactccctctctcagcaccagggagctcctccaggagcacttcctcccatgtctgtgttcgccgttaagactggacacaccaggatgatctttcaactttgggtccaaaggccctcagtggatgtaaaataggtacatgaggccttgaactgaacatttttttcacttcaccataacctggattttcccagtttaggagcatctgtttgtcttgataacgtttggaacaaagtgaaaaaaactggactttgaagagaacttcagcctcccagcagccctgttttacagatgaagaaactgaggctcaaagagctggagaaggttgttgcccagggtcctgtggagagaaaactcaagctccggctgttccactactctgggacaccacccccagtgggaaccccacttttacaaggattcgaagctttactccattctttgccacacataaggaggccgaggagggaagatggcatgaggccaggaattcaaggctgcagtgagatatgattgcaccactacacttcagcctgggcgacagggtgacacctcatctctaaaaaataaaataaaataataaaaaaatt

SEQ ID NO: 465039 - DNA, 1255 bp, Homo sapiens
ctatattagtttgttctcatactgaaataagaactacctgagactgggtaatttatgaagaaaggaggtttaattgactcacagttccacaggctgaacaggaagcatgactgggaggcctcagaaaacttacaattgtggcagaaagcaacggggaaagccaaaccatatcactcactgagaggtgacaacgtgctagcagccctcgctggccttcggagcctccttggcctgggcgtctgctctggctgggctcaaggagcccttcagccggccactgcgctgtgggggcccctctctggggctggcagaagctggagccagctccctctgcttgcggggaggtgtggagggggcggcgctggtgggaaccggggctgcacgcggacctcgtgggctgacacaggttcctgcttcactcctgaggccagcgagaccatgaaccccctggaaggaatgaacaactccagacgcgctgccttaaagagcctaacactcaccgcaaaggtctgcagctcccctcctgaagtcagcgagaccatgaacccaccagaaggaataaactccggacacatcggaacatctgatggaacaaactccagacacaccatctttaagaactgtaacactcaaccaggactgaaaggagactttagagaagagctgacagaagagattcattctaggatctctccattctcaccacaccatggacaagcctagttccatgtgcaacattcagtattggatgatctggattcagtacagaaagcctggacttttgagcctaaacaggatctgaagcagaaggatgaaaaacagatcaaccaacaacaagaatcaaccatcttggtttctcatttgtcaataatgggcaatagtcctgcccacatatcagggaatgtatatgccataattaaatactaatgcttctatcttctctagagaatttgttcctttatgtgaaaaatattatttcttcttaataagcaatgtatgacaattgaggaggcataaaaattagagaaaaataaaaaggaaaatgtctgtagttgcacattatatcataagtaatctgcattttattgtttttgtgatactctagaaatggatatgttttagtaaacctaatttaactcattaatccatctggaatttcctttgtaatattttataaaatgtgaatcgagactgataaatgttctaaatagtcaaatttgctaaaccttttataaactgttttcctttatattta

SEQ ID NO: 465040 - DNA, 2965 bp, Homo sapiens
tgactaactcatcagaactaaagccagaaagtagagatgatcctttctagaattaactcatatggagtatgacctagagaaaagaggcattacgtctaaagtacttccactgcagcttgaaaatattttctacaaactgcttgctgatggatattcagagaaaatagaacatgttggagactttaatcaaaaagcatgttctacatctgagatgatggaagaaaagccacatattcttggtgatattaaaagcaaagaaggaaactactattctcctaatttagaaactgtaaaagaaattggactagaaagctctactgtgtgggcatcaacattgccaagagatgagaagctcaaggatctgtgtaatgatttcccaagccatttggaatgtacttcagggtctaaagagatggcttctggagatagctcaaccgaacaagaatctctggataacaacttggaagctttgaagaatcaacttagacagttggagaatgtattaaaagaccttggacataccaaaatgcagctggagactactgcctttgatgtgcagttcttcatttctgaatatgcacaggatctgtctcccaaccaaagcaaacaactgctgaggctcttaaatacaactcagaagtgttttcttgatgtacaggagtcagtaactacccaggtggaacgtttagagactcagttacatctagaacaagatcttgatgatcagaagattgtagcagagcgtcagcaggagtataaagagaaactccaagggatatgtgatcttcttacccaaactgaaaaccgcctaattggtcaccaagaagccttcatgattggagatggcacagttgagttaaagaaatatcagtccaagcaagaggaattacagaaagatatgcaaggaagtgcacaggcattggctgaagtagtgaaaaacacagagaacttcttaaaagagaatggtgaaaagctgtcacaggaagataaggctttgattgaacagaaacttaatgaagctaagataaagtgtgaacagcttaatttaaaagcagaacagtctaaaaaggagctggataaagttgtgacaacagcaatcaaggaagaaactgaaaaggtagcagcagtgaagcagctggaagagagcaaaaccaaaatagaaaaccttttggactggttgtcaaatgttgacaaagactcagaaagggcagggacaaaacacaaacaggtaatcgaacagaacgggacccattttcaagaaggtgatggcaagtcagcaattggagaagaggatgaagttaatggtaacctgttggagactgatgttgatgggcaagttggaaccactcaggagaatctgaatcagcaatatcagaaagttaaggcccaacacgagaagatcatctctcagcaccaagcagtgatcatagccactcagtctgcacaagtgttgcttgagaaacagggtcagtatctctctcctgaagaaaaagagaaactgcaaaagaacatgaaggaactgaaagtgcattatgaaactgcactggctgagtcagagaagaaaatgaagttaactcactctctgcaggaagaattagaaaagtttgatgctgactataccgagtttgagcactggctacagcagtcagaacaagaacttgaaaacctggaggcaggtgcagatgacatcaatggtttaatgaccaaattgaagaggcagaagagtttctcagaagacgttatttctcacaaaggtgacttgagatacatcacaatttctggaaacagagtgttggaagctgccaaatctgcagcaagagagacggtggcaaggttgatacttctgcaacccacagagaagtgcagcgcaagttggatcatgctactgatcggttcaggtctctctactctaagtgcaatgttcttggaaataatcttaaagatctggtggataaatatcaacactatgaagatgcttcatgtggacttcttgctggactccaggcctgtgaggccacagcgagcaaacacttatctgaacctattgcggtggaccccaaaaatcttcaaaggcaattagaagagaccaaggctttgcaaggacagatatcaagtcagcaggttgctgtagagaaactgaagaaaacggctgaagtgcttttagatgccaggggatctttacttccagccaagaatgatatccagaaaacacttgatgacattgttgggagatatgaggatctgtccaagtctgttaatgaacgaaatgaaaaactccagataaccttgacccgttcactgagtgtgcaggatggcttggatgaaatgctggactggatgggaaatgtggaaagttctctgaaagaacaaggtcaagtgcctttaaactctactgctcttcaggatattatcagtaaaaacattatgttggaacaggatattgcaggtcgtcagagcagtataaatgccatgaatgaaaaagtgaagaaatttatggaaacaacagatccatccactgcatcctcactgcaagccaaaatgaaagacttgtctgctcggttttcagaagcaagtcataaacacaaagaaactcttgccaaaatggaggagctaaaaaccaaagtagaactgtttgagaacctctcagaaaagctccagacatttttagaaacaaaaactcaggctcttactgaagtagatgtgccaggaaaagatgttactgaattgtctcagtatatgcagacttgttattatgtttttgatctgagaaatgtctttgtgttttggatacatagccgatagatactagtatgagaaagtctaactgatattttaatattctgattatgaaaaagtaccaatgctagattgttatgtaataaaagtgaactgttagtttactgcttactgactagtttctacttgctaagcaatggacctttggttcccacagtggtgtttggtt

SEQ ID NO: 465041 - DNA, 1855 bp, Homo sapiens
  misc_feature (1830)..(1830): n is a, c, g, or t
tgactaactcatcagaactaaagccagaaagtagagatgatcctttctagaattaactcatatggagtatgacctagagaaaagaggcattacgtctaaagtacttccactgcagcttgaaaatattttctacaaactgcttgctgatggatattcagagaaaatagaacatgttggagactttaatcaaaaagcatgttctacatctgagatgatggaagaaaagccacatattcttggtgatattaaaagcaaagaaggaaactactattctcctaatttagaaactgtaaaagaaattggactagaaagctctactgtgtgggcatcaacattgccaagagatgagaagctcaaggatctgtgtaatgatttcccaagccatttggaatgtacttcagggtctaaagagatggcttctggagatagctcaaccgaacaagaatctctggataacaacttggaagctttgaagaatcaacttagacagttggagaatgtattaaaagaccttggacataccaaaatgcagctggagactactgcctttgatgtgcagttcttcatttctgaatatgcacaggatctgtctcccaaccaaagcaaacaactgctgaggctcttaaatacaactcagaagtgttttcttgatgtacaggagtcagtaactacccaggtggaacgtttagagactcagttacatctagaacaagatcttgatgatcagaagattgtagcagagcgtcagcaggagtataaagagaaactccaagggatatgtgatcttcttacccaaactgaaaaccgcctaattggtcaccaagaagccttcatgattggagatggcacagttgagttaaagaaatatcagtccaagcaagaggaattacagaaagatatgcaaggaagtgcacaggcattggctgaagtagtgaaaaacacagagaacttcttaaaagagaatggtgaaaagctgtcacaggaagataaggctttgattgaacagaaacttaatgaagctaagataaagtgtgaacagcttaatttaaaagcagaacagtctaaaaaggagctggataaagttgtgacaacagcaatcaaggaagaaactgaaaaggtagcagcagtgaagcagctggaagagagcaaaaccaaaatagaaaaccttttggactggttgtcaaatgttgacaaagactcagaaagggcagggacaaaacacaaacaggtaatcgaacagaacgggacccattttcaagaaggtgatggcaagtcagcaattggagaagaggatgaagttaatggtaacctgttggagactgatgttgatgggcaagttggaaccactcaggagaatctgaatcagcaatatcagaaagttaaggcccaacacgagaagatcatctctcagcaccaagcagtgatcatagccactcagtctgcacaagtgttgcttgagaaacagggtcagtatctctctcctgaagaaaaagagaaactgcaaaagaacatgaaggaactgaaagtgcattatgaaactgcactggctgagtcagagaagaaaatgaagttaactcactctctgcaggaagaattagaaaagtttgatgctgactataccgagtttgagcactggctacagcagtcagaacaagaacttgaaaacctggaggcaggtgcagatgacatcaatggtttaatgaccaaattgaagaggcagaagagtttctcagaagacgttatttctcacaaaggtgacttgagatacatcacaatttctggaaacagagtgttggaagctgccaaatctgcagcagatgaggtggtgtntcgcagatgaggggatcctctagga

SEQ ID NO: 465042 - DNA, 880 bp, Homo sapiens
tcttaagggatgaatacttgttatctggggagacaagattctcagttaatgacatgcctgagaaacagtcagcagctggttggtggagagagaaacagactggatcttggaggaccaggcttaatgtggatttcgtattgtagaagaagaagcgcctctgagggatgtgtccccatgaccacgtctgacagtatgatgggcacaccaggagtccagacagattcaacagttcagctttgctcaggagaagaggagctgtggtgttcccagtccatcggccacaacactctgatgaggggcttccacctgaagcacatcgtcagtgtggtgacagtgggatttgtgctcactcgcacatgccagaagccataccagggtgcacacacaactctgggaagcaacactggtgggggtgttgctgaattcaatttcatgaaggcaggggtttccatctgcttccttcaccactgcatccccaacatctaaaatgatggcagccacaaaaagactcctcaaaatatcacttgttaaataactgaataaatttgttaaataaggtgatgtgaacatattcagtgacagaaactaagaggccagagcataaaacagaagttccaggtctttaaagaagtaattagcatagattggggccccaatctaataggactcgtgtcctgataagaagagacaccagggccatgggtgcatagagaaaaggccatgtgaagacagaggcggaggacagccacctgcaagccaaggaagagaccttcaaaaaaaccaaatgtactgatactttgtgcttgaacttccaacctccaggactgtgagaaaataaatttctgctctttcagtcacttaatttgtcatattttgttat

SEQ ID NO: 465043 - DNA, 1436 bp, Homo sapiens
tgcctaactgcatcgctaaatgatcccgagccctcgtggcctgaattggatcgttcccacagcttcagaagtgcactggtctaaacatgtctgtttaggggtctgccttcccctccagattggttggttcttgaggggtgtgggcagcggaggggcctggctggggctggaaccctccacataggcacaggtgcccggactctctccagcaagaagcattgcacagacagaggacgctgtttcccagttgaaaggtcaccaagggacagggtgatctgccaggcagttcctgagcttgctcttgggacggccttttgggggcaaagcactttggagccagaagcaacccctgcctgggctgaggccctgtgggcctcgctccacgactgtcacaccttacccaccactggagagatggccgctgcccgtggactccctggcagccatgtggttgcccagcccagggggccttcagaaaggtgaccttgcaccggccaaggcccgtgggcaggctacgctatggcctgtagatcttaatgacgtccttgatgggccgccggcagatggggcagcaggcccgggcctgtcgcttgagccgcaggccgcagctgtggcacaggcacatgtgtccacacgtgtagatgaccgtgtccacctcgccatcgaagcacaccgtgcactcgccattcttgatgcctgccggctccggtggggagaacacgggggacaccggggggctcagcggggagctgggggccgtcactgccgaaagggagaagaggacatatgttaacaatgtctctctcagggatgactcagatgccgaggaggactggttgacactgaaggtcatatctgaatcactatcgtcctgggagccgctgagggaccctgatggagtcgtggtcgcagggctggactgcagggtacctgaggcccaaagagattccatcaggggcagtggaaggaaagaaggaactcattccattcattgggaaggaagcctggagctggaagagccaacccgtggcaaaggcctgcctgagagtgatgccaacacagaggcaagcagagctttgagttggaaagagaggtaggatcctgctgatatccttccagtacctagatccagctattcctgaactcacccaatatactcccagacatttccttttttgcttagggcactttgagtggggttttgccccttgcgagaagatccctgactactagtgctcaacatggatgagttttcttccccaagcttgctgttggttcagacaataacagcttgtttcttaggatgaaaagatgccccttcccttgccctacctgaggatgaatggacagataatgggcacttcgtctcgggctgaaatgatgactatgtctgatggttcctcaaaaacacaaaacaacacaacttccccctcccc

SEQ ID NO: 465044 - DNA, 3470 bp, Homo sapiens
attttcaaacaacctatacacagaatactgctcagctaaaggtggaaacggaaaagacagctgcctacacagtgaaattcgaaaagcctcaagatgccctcctgccagtctgctacagtgcctggaaagcaacaactatagtcattcagctgtgtccttaagagacctttcttaataagaaaaggaggtgacatgtttatccatcacagctctgtcttaattaaagatattctggttgcaggccagataacttttacaaagccaaccacagaaaagtttacaaaggatgtagtggatagtgtgattgctgttctcttctcatctgaaaaagggcaaaacaagcaggtcacttcaaaagtcactgaacaaatgcttaattgccttctggaggatctctgtagaagaagagatcaggcatcccctcccacaggtgttcacaggaaatggtgccacacatgtgcagaagtttccaggccagcatccaccacatcaaacccactgagtgagctcccttcttgcatgggatggcaatgtccacatagcacagcggagaatctgtattacgtggagcaatgtgaagattccaggagtgaagcggccagcaattggagtggctccagtggcagcagcaaacttcagtatggccctctggccagtattcctggaggatatgacgcggacatcagcagggttttcaatggcaacaatggcacaagctgccaacagaagcttctcccaggtcctcttcagatttatgatatagacgccgacatcaagggctctgtacactgtaaaagtttccctttaagttacaacaggaatctagaacatcgccatatggacccctctctgggtagcacaaaaaagcccattctctagttgatagatatttgggttgtttccaggatttggctattatgagtaaaactgctatgaacatccatgcataagtctttttgtgaacataggctttcatttatcttgggtaaatgaccaggagtggaattttagatcacttagaaagtatgtgtttcactttataaggcactgtcagactgtgttactaagttgatgtaccattttataaatccaccagaaatatatgagcagaccagttttttaaaatctttgccaatccttgatattgtcaataatataagtttaaaaaggggaacaataaaagtactagacagaaatgtagaacatattttgtaaaaacagaataagagaaattgtttctaagtgatagttgaaagcttgatgtcataaagaaagcttgactccataaaacataaaataactacatgacaataataatgtcaaatgagaagagaaaaaaatgtctaaaatatttgtcggacatattaaatatattaatgtccttattttttaaagagctcttataaattaatatgtaaaatacatcgatccagcaaaggtgaagagcaggcagttcataacagaaagatattttaaaggtgtataaagttgtccaatttcactcaaaattattgaaatatgaattaaaacaaaatatgtcatacttctatcaaataaaaagatgatttttggctatgtactgtgttggcaagagttttgggagaaagagcttctcatacactgttattggctatattaatttgtattttcccattggaccacagtttactgtatacacagtgctttgggaagtactctcttaaatgggtttttcttctgctctcacaccaccacaataataatcaacacagaagaagacttctctgaccaaaagcttgcttctgagccctaaatttctccaacattataaccaagattgtgacaatgattatgaaagttacgaactaggaaccacagatggaaatgaatcataatatcacacaggcattaggatttaatgttgaatgtttataaagtgtattttacatatattgcctaaatttatactaccaacaccacaagaattagttattttatattctcattttaaaaataaaaaacctagagtttagagagatgccttatccagtcaggtcatataactagtaagtggcatagcttggtatagagcccttaactttgaatttcaagttcagttacattttcattaatcagagttgacttaccttgaaacacatgtgttttgtacatcaatgcatgtcactatttcatgcaatgaatgtaaagatgctacattttattacctagataatgtgctggttttgtcctatttctaagtttgtagaattgctgtagaaatattgagaacattccttttttttccttattaaaatcttgaagaggtgcttttatttttatttatttttgtctgctttcaggacatgttttaaaatctatcatttggacaatttgggttaataatctttgttttagtgttttaaagaacagcctcagtgaaaatgctttattaacgtgataaatgataagtttaaataaaataaatgaaaaaagaaagtgtggttttgaaataatttatctggcacagcaccagattttgagagagttaattattacaagttgctgaacattactgcaattttcacatggaaatatttgcctctcctatttccttgtgttattgaagacatattatgaaagccataatatcagcagcttgcaatttggaactcatttgatttaactgataagaatctttttcatttcacaaaacataacttcactcagaaatataaaactgttctgctgtattaaacagtgaataatatcaggataacaatgttaattggcttttggactgggagtatttgaatgaactctcttctccatcatttttccattagattttgcttgaattactcaaaaaaccaaggtatttatcctgatttgtaacacaatacaacatttctctgataagtgttttcacatttttagaaattctctgcactgtaaacagacagagaaaaacaacaactactataagaaaacaaaacaaaacactaaagctactctagaatgcatgttgagctggatggccattaaacatttgttcaatattcaatgataatcttcatgtcaaatagatcagatagggcattaggttatattaagataaaagaacacagatgagtttgggagccaatcctgttcagacttgaatactgactgcttttgcagtctcccctcttgtggcaggattgggtactggttaatgatgtgaattctgccctaaagtcacctttctttggccaccttctagctgtgtgatttagtgaagactaacttgctttctgtacttcaattttctcatctgtagaataaaagtaaccacctgcacacagagagagttttaagaattaaatgggataaccaagagagtgcctagtccagtgtgtggaacataacaaatattaaataagcattcattttcttttttccccactcctttacttctcctttgccttccctccagctatgaaagttttcagctc

SEQ ID NO: 465045 - DNA, 471 bp, Homo sapiens
ctctttttatttacacgggagcactccacagtgttttgcagctttcctatttcactaaactacagcccattctgctcttataagtagcagcgttgccctcgattggctgcacccgagttctgaccctcctcctccagcgagggcctcggcagccagcaagatgggctcccgctcccggaatggactcggaaactttaactgcggctccacctgctggtgtggattaggacaaaggcggagaacaaacctcgtgtgcaagctgaacacaaggaccaccatcctggcagcaacgaaccccaaaggccagtacgacccccaggagtccgtgtctgtgaacattgccctcggcagcccactcttaagtcgatttgacctgatcctggttttgcttgataccaagaatgaagactgggatcgtatcatttcctcctttatcttagaaaataaaggttacgtgaagacaaacaaagc

SEQ ID NO: 465046 - DNA, 646 bp, Homo sapiens
aattcgcggccgcgtcgcacacggctgacgagaagacgacagaagctgatcctggttttgcttgataccaagaatgaagactgggatcgtatcatttcctcctttatcttagaaaataaaggttacccaagcaaatcagagaagctctggagcatggaaaagatgaaaacctatttctgcctcataaggaatctgcagcccacactgtctgatgtgggcaatcaggttcttctccggtactaccagatgcaaaggcagagtgattgccggaacgctgcccggaccaccattcggctgttggaaagcttgatacgattagcagaagctcatgctcgcctgatgtttcgtgatactgtaactctggaagacgctattacggtggtgtcagtcatggagtcctcaatgcagggaggtgcactgctaggaggtgtgaatgccctccacacttcctttcctgaaaaccctggagagcagtaccagagacagtgtgaacttattctggaaaagctagagctgcagagcctcttgagtgaagagcttagaagacttgaaagtgactgcgaacaccacccccaccagcattttagtgttcacttttctgggtatcagacattcaggcaggctcggtggggatagcttgtctttg

SEQ ID NO: 465047 - DNA, 813 bp, Homo sapiens
ttttttgtttctttcgtgtttagaaaaaaaatcaaaacaaaatgagtgaatacacagaaatgaattgtactgtctctcctggcagcctcgtgtgcaagctgaacacaaggaccaccatcctggcagcaacgaaccccaaaggccagtacgacccccaggagtccgtgtctgtgaacattgccctcggcagcccactcttaagtcgatttgacctgatcctggttttgcttgataccaagaatgaagactgggatcgtatcatttcctcctttatcttagaaaataaaggttacccaagcaaatcagagaagctctggagcatggaaaagatgaaaacctatttctgcctcataaggaatctgcagcccacactgtctgatgtgggcaatcaggttcttctccggtactaccagatgcaaaggcagagtgattgccggaacgctgcccggaccaccattcggctgttggaaagcttgatacgattagcagaagctcatgctcgcctgatgtttcgtgatactgtaactctggaagacgctattacggtggtgtcagtcatggagtcctcaatgcagggaggtgcactgctaggaggtgtgaatgccctccacacttcctttcctgaaaaccctggagagcagtaccagagacagtgtgaacttattctggaaaagctagagctgcagagcctcttgagtgaagagcttagaagacttgaaagtgactgcgaacaccacccccaccagcattttagtgttcacttttctgggtatcagacattcaggcaggctcggtggggatagcttgtctttg

SEQ ID NO: 465048 - DNA, 1345 bp, Homo sapiens
gacgttgcctcatgctctttttttcttttcttttgctgattttgctgcgtatccctttgctgtaagagatcacagccatgcatacagccatatgctgagtgcttgagcctgacactagacatggaaaaaaaaatacaccctctcctaccttccacctcatgggtttccctctggtggcggcgtacactttggactgcctccttgcactgcaggatgagatccctctttggggcgaaggtgggcacaacaggacaggaatctgtaaattcattgaggaccccaccctgagcctcaaccccagctttgcttactggaggtgctgcccctcggagttagggatgcttgccagctttgtcctgaagccagaaacacccttgctgagattcccacccatcactttctgggtctcttattacatttcctgggctcagctgtcttatctggaaacgagaatcctaatagccaccttgaagcacggatgtaaggaggaaatgaaatcattgtgtggaaatgccaagcccagcgcctggcatagagcaggtgcccagagaccaaggatctgggagaaggaacatgccttaggatctaaagtcttgttcctctccctgtcccatagttcccattgaacctcttacaggatggagaagctgaggccttaactcacaaggttgtgcctttataaggcaacaaagcaaaagcaagtgtgtcatagatggaaacctgtttacctagatctcaccgacctgttgagaggaaaggagccaacctggcctggtgaccttctctgtgcaagcagggagcaggcacacaccaccaatgagtgaagaaggctgctgtggcatgctcgggacctagagggaacctgcctcattgacaggggacagcagctgcacagctccagacaatcgttgtcaaggacgggaatgagattctaacatggctgatctgatttttcaagaaagatgagaaaaatagtaatggaggaaatggaaggaaaaaggatggccataagttggaggcaggtgaaagacccaaattcatggaagagaagtgagtcacacagggagccagtggcagagccacaccccacagagcaatcaacatgctctactctgcagacctgcaacagggagggaagccagactctgatgcaagaaggaaagaccatgtgctggctcagtgtgtgcagcctggactgagctactgaactctaaatccaaggatgactaataggcagaatgacattaataccagacctgatgaagacagcacaaaaagtaaatctcaacacaacctcacaatattaataaagcaaaaattttaaatacagtaatgtattagcaaa

SEQ ID NO: 465049 - DNA, 1318 bp, Homo sapiens
gacgttgcctcatgctctttttttcttttcttttgctgattttgctgcgtatccctttgctgtaagagatcacagccatgcatacagccatatgctgagtgcttgagcctgacactagacatggaaaaaaaaatacaccctctcctaccttccacctcatgggtttccctctggtggcggcgtacactttggactgcctccttgcactgcaggatgagatccctctttggggcgaaggtgggcacaacaggacaggaatctgtaaattcattgaggaccccaccctgagcctcaaccccagctttgcttactggaggtgctgcccctcggagttagggatgcttgccagctttgtcctgaagccagaaacacccttgctgagattcccacccatcactttctgggtctcttattacatttcctgggctcagctgtcttatctggaaacgagaatcctaatagccaccttgaagcacggatgtaaggaggaaatgaaatcattgtgtggaaatgccaagcccagcgcctggcatagagcaggtgcccagagaccaaggatctgggagaaggaacatgccttaggatctaaagtcttgttcctctccctgtcccatagttcccattgaacctcttacaggatggagaagctgaggccttaactcacaaggttgtgcctttataaggcaacaaagcaaaagcaagtgtgtcatagatggaaacctgtttacctagatctcaccgacctgttgagaggaaaggagccaacctggcctggtgaccttctctgtgcaagcagggagcaggcacacaccaccaatgagtgaagaaggctgctgtggcatgctcgggacctagagggaacctgcctcattgacaggggacagcagctgcacagctccagacaatcgttgtcaaggacgggaatgagattctaacatggctgatctgatttttcaagaaaggtgaaagacccaaattcatggaagagaagtgagtcacacagggagccagtggcagagccacaccccacagagcaatcaacatgctctactctgcagacctgcaacagggagggaagccagactctgatgcaagaaggaaagaccatgtgctggctcagtgtgtgcagcctggactgagctactgaactctaaatccaaggatgactaatgtaagcctaaagggtaatctgcaaatactgctccattaatattcaatgataaatgatattgctttagaatcaaattcacataaacagaagcttcagctgtatgtccgcaccctgggaacattaaattgtaagccacgtcttgtaaat

SEQ ID NO: 465050 - DNA, 1285 bp, Homo sapiens
gacgttgcctcatgctctttttttcttttcttttgctgattttgctgcgtatccctttgctgtaagagatcacagccatgcatacagccatatgctgagtgcttgagcctgacactagacatggaaaaaaaaatacaccctctcctaccttccacctcatgggtttccctctggtggcggcgtacactttggactgcctccttgcactgcaggatgagatccctctttggggcgaaggtgggcacaacaggacaggaatctgtaaattcattgaggaccccaccctgagcctcaaccccagctttgcttactggaggtgctgcccctcggagttagggatgcttgccagctttgtcctgaagccagaaacacccttgctgagattcccacccatcactttctgggtctcttattacatttcctgggctcagctgtcttatctggaaacgagaatcctaatagccaccttgaagcacggatgtaaggaggaaatgaaatcattgtgtggaaatgccaagcccagcgcctggcatagagcaggtgcccagagaccaaggatctgggagaaggaacatgccttaggatctaaagtcttgttcctctccctgtcccatagttcccattgaacctcttacaggatggagaagctgaggccttaactcacaaggttgtgcctttataaggcaacaaagcaaaagcaagtgtgtcatagatggaaacctgtttacctagatctcaccgacctgttgagaggaaaggagccaacctggcctggtgaccttctctgtgcaagcagggagcaggcacacaccaccaatgagtgaagaaggctgctgtggcatgctcgggacctagagggaacctgcctcattgacaggggacagcagctgcacagctccagacaatcgttgtcaaggacgggaatgagattctaacatggctgatctgatttttcaagaaaggtgaaagacccaaattcatggaagagaagtgagtcacacagggagccagtggcagagccacaccccacagagcaatcaacatgctctactctgcagacctgcaacagggagggaagccagactctgatgcaagaaggaaagaccatgtgctggctcagtgtgtgcagcctggactgagctactgaactctaaatccaaggatgactaataggcagaatgacattaataccagacctgatgaagacagcacaaaaagtaaatctcaacacaacctcacaatattaataaagcaaaaattttaaatacagtaatgtattagcaaa

SEQ ID NO: 465051 - DNA, 1321 bp, Homo sapiens
caacagcttctgcaatggcgtcacgttcacgcagcggcccatccggctgtacgagcaggtgcggctgcgcctggtggccgtgcgcccctggctggagcggcgcgctgcgcttcggcttcaccgcgcacgatccgtcgctcatgagcgcccaggacatccccaagtacgcctgcccggacctggtcacgcggccgggctactgggccaaggcactgcccgagaacctggcgctgcgcgacacggtgctggcctactgggccgaccgccacggccgcgtgttctacagcgtgaacgacggcgagccggtgctcttccactgcggcgtggccgtgggcggcccgctctgggcgctcattgatgtctacggcatcaccgacgaggtgcagcttctggagagcgccttcgctgacacgctgacgcccgcgcgcctcagccaggcccgcttcagcgcctgcctgccgcccagcagccacgacgcggccaacttcgacaacaacgagctcgagaacaaccaggtggtggccaagctgggccacctggcgctgggccgcgccccgggcccaccgccagccgacgccgcggccgccgccattccgtgcgggccccgtgagcgcccgcggcccgcgtcgtcgccggcgctactggaggccgacctgcgcttccacgcaacacgcgggcccgacgtgagcctgtcggccgaccgcaaagtggcctgcgcaccgcggcccgacggcggccgcacgctggtcttctccgagcgcccgctgcggcccggcgagagcctcttcgtggaggtgggccgtccggggctggcggcgcccggcgcgctggccttcggcatcacgtcgtgcgacccgggcgtgctacggcccaacgagctgcccgccgacccagacgcgctgctcgaccgcaaagagtactgggtggtggcgcgcgccgggcccgtgccgagcggcggcgacgcgctcagcttcacgctgcggcccggcggcgacgtgctcctgggcatcaacgggcgtccgcgcggccgcctgctgtgcgtcgacaccacgcaggcgctctgggccttcttcgccgtgcgcggcggcgtcgcgggccagctgcgtctcctcggcgctgcaccgcccgaggccagcccgcggttcccaactttaagcgcccgggcacgatccaccccgtccaaaattgccggactccaccccagagttccggattcagtgggtgcacggtgcgccccgagaacgtgcatttccgacaagtgcccggagatgctgacaaagtggaatggaggcctgaaccatcctattttgagataattttt

SEQ ID NO: 465052 - DNA, 753 bp, Homo sapiens
atcacagtaaaacatggtgggaatgaatttggcaagcaatagtctaaggagggttgtattcctatggcaatatcaaggctgcaaaggagaatgtgtccccggtctagtccaagtccacctggaggcttgggttccatctgggactgaatctagaaagatttgctattatgctctaaaaggaattgtaattaacaccaaattctatgccaggcaaccacgcccctaccctggtagaggactgaagagacactcttggaaagggtttggaaccaagtattctctggactcagggacaccagacaactcttgggcccggactgggggacatctcagaaatgaggtttcagtgaaagcctgcacaccaacaataagaatcccagacccttctccagttggctcccaggatactggtagagaagtttatattttgcaggcagaagatggaaggttttctctccaagggaaatgatgagcccaagaagaaaaagacacttgagggaagctgcaacatgaaaaactgtcaaggaatagcagcacactcacaacaaacacccttcgaagaaaacccaggaagacccatgcaatagattcctgggactcaacttagaaggcatggtggtactcttcactatttgtctgcagtgatttgtggaataaatctctcacttttcctaaccctactttcttttgttattaaaataaaagtaattattctcatgcacttgcctcagagaaagccgtgagcacatactt

SEQ ID NO: 465053 - DNA, 894 bp, Homo sapiens
acttctgcccatcccaggagaaccacctgtgtcttctcactgccagacctctcttcctaatgacctagaggcactcctggcacctctctagcaaggtcctgtgttgaccgatgtggacagaggggcagtgggacatgtctggggacatgtggtttctcagcaggcagggacctcctcctcctctttgccctcatggaaaccctcactctctttgctatgacatcaccgtcatccctaagttcagacctggaccacggtggtgtgcggttcaaggccaggtggatgaaaagacttttcttcactatgactgtggcagcaagacagtcacacccgtcagtcccctggggaagaaactaaatgtcacaacggcctggaaagcacagaacccagtactgagagaggtggtggacatacttacagagcaactgcttgacattcagctggagaattacatacccaaggaacccctcaccctgcaggccaggatgtcttgtgagcagaaagccgaaggacacggcagtggatcttggcagctcagtttcgatggacagatcttcctcctctttgactcagaaaacagaatgtggacaacggttcatcctggagccagaaagatgaaagaaaagtgggagaatgacaaggatatgaccatgtccttccattacatctcaatgggagactgcacaggatggcttgaggacttcttgatgggcatggacagcaccctggagccaagtgcaggaggaaaaaccaggccatgcagagacaggagctgaagggacacgagaagactctgctccaccacctcttgtggaaggcctgacatcagtcaagcctgcccgcagccatccggaggcctaaacgtctccctgtgatgctgtgcttcagggtcac

SEQ ID NO: 465054 - DNA, 774 bp, Homo sapiens
  misc_feature (44)..(44): n is a, c, g, or t
cggccgccagccccgcgttccttctacgcctcccgcttctgctnctgctgtccagctggtgcaggaccgggctggccgaccctcactctctttgctatgacatcaccgtcatccctaagttcagacctggaccacggtggtgtgcggttcaaggccaggtggatgaaaagacttttcttcactatgactgtggcagcaagacagtcacacccgtcagtcccctggggaagaaactaaatgtcacaacggcctggaaagcacagaacccagtactgagagaggtggtggacatacttacagagcaactgcttgacattcagctggagaattacatacccaaggaacccctcaccctgcaggccaggatgtcttgtgagcagaaagccgaaggacacggcagtggatcttggcagctcagtttcgatggacagatcttcctcctctttgactcagaaaacagaatgtggacaacggttcatcctggagccagaaagatgaaagaaaagtgggagaatgacaaggatatgaccatgtccttccattacatctcaatgggagactgcacaggatggcttgaggacttcttgatgggcatggacagcaccctggagccaagtgcaggaggaaaaaccaggccatgcagagacaggagctgaagggacacgagaagactctgctccaccacctcttgtggaaggcctgacatcagtcaagcctgcccgcagccatccggaggcctaaacgtctccctgtgatgctgtgcttcagggtcac

SEQ ID NO: 465055 - DNA, 398 bp, Homo sapiens
tactaggccacgtgcaagggctggttggggactccaggggttgagagcatcctctggacaacatggaaaaagaaaatgaaaatggtgacctcagccctatagctagaaggaattgaatcctgtcaacaacgatactcatcactcacttcagatgttactttaagacattctggagcagcgtcatgtgcaggaacaataaggaagtgagtgcttttgtaattcctgcacaactgtatcttacacttactaagggattcatgggcaatatgactgaataggaacagctccagtctgaagctcccagtgagaccaacatagaaggtgggtgatttctgcatttccaagtgaggtacccagctcatctcattgggtctggttaggcagtgggtgcagcccac

SEQ ID NO: 465056 - DNA, 814 bp, Homo sapiens
acagcttttggactcttggacttataccagtggtttggtaggggctcctccacccatggctaaaaggggccaagctacggcttgggccatggcttcagagggtgcaagcctcaaggcttggcagcttccacatggtattgggcttgcaggtgtgcagaagacaaaaattgagatttgggagcctctgcctaaatttcagacgacgtatggaaatgcctggatgtccagagtccccactggggcactgcctagtggagctgtgagaagagggccaccatcctccagatcccagaatggtagatccaccaacagcttgcaccttgtactgggaaaagccataggcactcaacgccagtctgtgaaagcagccatgggtgctataccctgcagagccacagaagcagagctgcccaaggctgtgggaggccaccccttgcatcagtgtgccatggatgtgagacacagagtcaaaggagattcttatggagctttaagattaaatggcagccctgctggattttggactcacatggggcctgtagcccctttgttttgactgatttctccttttttgaaagggagtatttacccaatgcctgactctatgaacaataaggaagtgagtgcttttgtaattcctgcacaactgtatcttacacttactaagggattcatgggcaatatgactgaataggaacagctccagtctgaagctcccagtgagaccaacatagaaggtgggtgatttctgcatttccaagtgaggtacccagctcatctcattgggtctggttaggcagtgggtgcagcccac

SEQ ID NO: 465057 - DNA, 1403 bp, Homo sapiens
gctcctcaccttccagactgggcagccaggcagaggggctcctcacatcccagacgatgggcggccaggcagagacgctcctcacttcccagacggggcttcgagcagctacgttccgactctttcctcagcttctcatgacactgcttatccagattcatcacagcatcggcctcaccatgtctgatgtcgacatcccaagtggcctgtacacagaacaggaagtgccttcagagaaggtcatgtacttattagtccctcttcttaaccgagggaatgataaacataaactcacatctgcaggcttttttgtggagcttctccggagtccagtggccaagagactgcccagcatatactctgttgcccgctttaaagactggctacaagatggaaatcatctctttagaattctcggcctgaggggactgtacaatcttgttggacaccaggagatgagagaagacatcaagagcctgttgccatacattgtagacagcttgcgtgaaaccgatgagaagatcgttctgtcagccatccagatactcctgcaacttgttagaacaatggatttcactaccctggctgccatgatgaggaccctgttctccttatttggtgatgtgagatctgatgttcatcgtttctccgtgactctctttggagccgccataaagtctgtaaaaaacccagataagaagagtatagagaaccaagtcctggacagcttggtcccactacttctgtattctcaggatgaaaatgatgcagtagctgaggatgtggatcaggaagagatcagtcctctagagttccttccttccaacccagagatgccacaaggacagaaaacaaacactgatgtactccaagaacccaaaacttcccatcagaagatcagcagtcttgtttgccttttatcgaagtacatggatcacaatgagctcaggaggatgggtactgactggatagaggacgatctcaggggcttttacctccaacctgtgtttgcctaccgctagatctgagagacctgctgtgtgaccctgagccctcgctgtgcatcatcgcttcccagactctgttactagtccagatggcgagggccgaaccaaaacctaagcagagagtgaactggttgcagaagctcatgggcaggtcctctgcctagaaacacaaggcaagcaacatcagagacagaatcttgctatgttgtgcggcaagctagtcttgaactcatggcctcaagtcatcctcctgtgtcagcctcccaaagtgctgggattacaagcatgcaccacggcacccagcagaattccagtcttgagaaacaggtcaaggacagcttcaaaagagattctaaataaatgttaatgttacaatgttagtatgtctgcttaatt

SEQ ID NO: 465058 - DNA, 842 bp, Homo sapiens
tagcgcctggctcagaatagctctgaaacacagaaattcagtcctgccaaaaccgccagtctttccctcttggtcaccatccaggactctctgcgccccgttccccacaacatgcttactgagcattcctgggtggggcagggttggggggagggggactggggacttatgttaaggagagatgagttagtggcaatggagagtccattagtcatttgaagatcccaggggtggctgggcggctcccttaattaagtcaacagcagccttgttctacccagtaaataaatagtcaatgactctattgtgcatcctggagcgggcagcacagacgcgtgaccggttctgggcgcctgggctccagctgctgtgacctgcagcctaatgggccctcgaggcacagccgagtttgggccaggctccgaaaaaatgccccattctgtcccattcctccatgggagtaaggaagataactttaatcccctgagaaaaggctttggagccagaaatcagaagaagctttctcttagagaaagccagcttaaaaaaggatcacacgggctgctctatcagggttgctatggcctagtgtggatgtgcactgttggagagtacacaacagagagccctcagatggaaccaatttgccaacaacttgattttggacttttggcctccaaaactgtgagaaaacaaattcctgttgtatcagtacacagacatacagtggtttttctttttgtcaaagaaagtgctacaatttctaaagctgcccattgagtgtttctgagccatagccaagagctatttcaaaatgaggacagatttcttttctccctggg

SEQ ID NO: 465059 - DNA, 1357 bp, Homo sapiens
gagaagaatccccagcggtcactagaggccttgacgaaagagatttccaggagactcagcatagatgttgaatcttcctattggaggagaagctcccgactcccttctagtcatggcagagcacggaattcagaacaattctactggtgaggacaaggcctctattgtagtcagagtcctctcaaaggacaaaagcagatatggctgccttggatcagctgcacgcagtgcactcccgacctggccgctggaggcgcggctcccatcacctgcaccgcgactgctagggactgtcaaagcggcagcatgccatcgccttctccagcccttctccagcagcacaaccagtcctcccagctggtcctctgaggaccagccgtcatggcgacgtggtggcaatgtccccaggcagccgaccatcctgggcttctctttggacaggcctgggccaggaccttaggggatctctgtgtccatggtataaatctgaatgagatcagacacaatattatcaatgattggcttggtaaggtcttcaccaaacacctgccaccacggcttctcagccttaacctcggcgggcacctcaactccgtagacctgcagggccagctgtcccgcaacagggcccaggcagtgacggcaaccggggtccgctgccagctgtggcggttcagagtttttgagggaaaccaggtagtggagcaggtacttgtgtggaagctggaaggagacctggaagcgcagaactctcagcatgagaagctcacactgcacaatgctgtcccggagctcccagaagcgggattccaattccaggggctcaccgctcgggttaaagtacctgttggacacattgatgatgtcatgagtccgcaggtgctgcttttccgctttgccggccaagtaaatggaagacacggcaatcagcttgacacctgcctccatgatgaacctcgccactcggaagtgcaccctggcttcgggcgccggttgcccctcggggccccgcgctgcaggcccccctccgccgccctccggggcttccatgaggcccggcggccccggcggaaggagaggctgctttgcgcgcagaggccagcagagcggggggggggcagccgctgtatttttccactgcgtggatcacactggagattaattttggttcagccagtgcctgccaagcagaaagcgaaggccctagcccacggggaagtcagccatggcatctgtcacagactcgatgtcgctggtacatttccacggagagagatatttacaatagtaaatttctaggctttgataaaaacactgggtacgatttgttttgataggcatgaacatacttgtaatc

SEQ ID NO: 465060 - DNA, 1950 bp, Homo sapiens
gctggagacagtgaggagaagaaaggggcgggacaagggcaaaggcgttagaagtcaccaccgacccagcccctcaacagcaagttggttcttcagcattaagatccaggtgtcagcctatgtctttatattgtcaagatgtctctttctaagaagttgactttagacaaactggatgttagagggaagcgagtcatcatgagagtagacttcaatgttcccatgaagaagaaccagattacaaacaaccagaggatcaaggcttccatcccaagcatcaagtactgcctggacaatggagccaaggcagtagttcttatgagtcatctaggtcggcctgatggtgttcccatgcctgacaaatattccttagcacctgttgctgttgagctcaaatccttgctgggcaaggatgttctgttcctgaaggactgtgtaggcgcagaagtggagaaagcctgtgccaacccagctcctggttcagtcatcctgctggagaacctgcgctttcatgtggaggaagaagggaagggccaagatccctctggaaagaagattaaagctgagccagataaaatagaagccttccgagcatcactttccaagctaggggacgtctatgtcaatgatgcttttggcactgcacaccgcgctcatagttccatggtgggagtgaatctgccccataaagcatccggattcttgatgaagaaggaactagattactttgctaaagccttggaaaacccagtgagaccctttctggctatacttggtggagccaaagtggcagacaagatccaacttatcaaaaatatgctggacaaagtcaatgagatgattattggtggtggaatggcttataccttccttaaggtactcaacaacatggagattggtgcttccctgtttgatgaagagggagccaagatcgttaaagatatcatggccaaagcacaaaagaatggtgtaaggattacttttcctgttgattttgttactggggacaagtttgacgagaacgctcaggttggaaaagccactgtagcatctggcatatctcctggctggatgggtttggactgtggtcctgagagcaacaagaatcatgctcaagttgtggctcaagcaaggctaattgtttggaatgggccgttaggagtatttgaatgggatgcctttgctaagggaaccaaagccctcatggatgaaattgtgaaagccacttccaagggctgcatcactgttatagggggtggagacactgctacttgctgtgccaaatggaacactgaagataaagtcagccatgtcagcactggaggcggtgccagtctagagcttctggaaggtaaaatccttcctggagtagaggccctcagcaacatgtagttaatatagtgttacttccttctgttttctgtccatggcccttaagtcagcttaatgcttttacatctcgatgtgacttttgttaaaatctactcctagatcaagacctatgtaatggacaagcagcaggccatcaggaactcttaatatcagcacagcaattcattttagtttggtcacgcatttgcctgttcaagttctcatttgaacttcaccattgtgctatctagggaggacatattcttaagttgcctattaaagaaagtgagctgaagaaactgaatctttttattttagtccaactttgctattgtttcataatttgaaacccaaaagataaaacttaatttgttgggaaagggtggaatgaaagttgacaaacaaacaataaatatgcccaaataaactgagaaaaataattacatataaagaactcatgggtaccattaaagttctgctaaggggaaatgttatactaaataggaccaaaaaaaagagaaatgaaagacacttattaaacccaaggaatttttaaaaagaaaagaaattaaactcaag

SEQ ID NO: 465061 - DNA, 1952 bp, Homo sapiens
  misc_feature (25)..(25): n is a, c, g, or t
tgcaggctggtacccccgggggtantggggcgggacaagggcaaaggcgttagaagtcaccaccgacccagcccctcaacagcaagttggttcttcagcattaagatccaggtgtcagcctatgtctttatattgtcaagatgtctctttctaagaagttgactttagacaaactggatgttagagggaagcgagtcatcatgagagtagacttcaatgttcccatgaagaagaaccagattacaaacaaccagaggatcaaggcttccatcccaagcatcaagtactgcctggacaatggagccaaggcagtagttcttatgagtcatctaggtcggcctgatggtgttcccatgcctgacaaatattccttagcacctgttgctgttgagctcaaatccttgctgggcaaggatgttctgttcctgaaggactgtgtaggcgcagaagtggagaaagcctgtgccaacccagctcctggttcagtcatcctgctggagaacctgcgctttcatgtggaggaagaagggaagggccaagatccctctggaaagaagattaaagctgagccagataaaatagaagccttccgagcatcactttccaagctaggggacgtctatgtcaatgatgcttttggcactgcacaccgcgctcatagttccatggtgggagtgaatctgccccataaagcatccggattcttgatgaagaaggaactagattactttgctaaagccttggaaaacccagtgagaccctttctggctatacttggtggagccaaagtggcagacaagatccaacttatcaaaaatatgctggacaaagtcaatgagatgattattggtggtggaatggcttataccttccttaaggtactcaacaacatggagattggtgcttccctgtttgatgaagagggagccaagatcgttaaagatatcatggccaaagcacaaaagaatggtgtaaggattacttttcctgttgattttgttactggggacaagtttgacgagaacgctcaggttggaaaagccactgtagcatctggcatatctcctggctggatgggtttggactgtggtcctgagagcaacaagaatcatgctcaagttgtggctcaagcaaggctaattgtttggaatgggccgttaggagtatttgaatgggatgcctttgctaagggaaccaaagccctcatggatgaaattgtgaaagccacttccaagggctgcatcactgttatagggggtggagacactgctacttgctgtgccaaatggaacactgaagataaagtcagccatgtcagcactggaggcggtgccagtctagagcttctggaaggtaaaatccttcctggagtagaggccctcagcaacatgtagttaatatagtgttacttccttctgttttctgtccatggcccttaagtcagcttaatgcttttacatctcgatgtgacttttgttaaaatctactcctagatcaagacctatgtaatggacaagcagcaggccatcaggaactcttaatatcagcacagcaattcattttagtttggtcacgcatttgcctgttcaagttctcatttgaacttcaccattgtgctatctagggaggacatattcttaagttgcctattaaagaaagtgagctgaagaaactgaatctttttattttagtccaactttgctattgtttcataatttgaaacccaaaagataaaacttaatttgttgggaaagggtggaatgaaagttgacaaacaaacaataaatatgcccaaataaactgagaaaaataattacatataaagaactcatgggtaccattaaagttctgctaaggggaaatgttatactaaataggaccaaaaaaaagagaaatgaaagacacttattaaacccaaggaatttttaaaaagaaaagaaattaaactcaag

SEQ ID NO: 465062 - DNA, 5910 bp, Homo sapiens
gttggcggcgggagatcgggtctcgcgatgcgagtgagcgtgtgcgtgcgcggccctcgcgagctcgcgcacgccgcctctaacactacagggtggtagcggcctcttcgtactgcgtccggggcaggaccgtgcgcggcggccgcggcgggtgctgggagccagcgcctgcctcgccgccgccctcgctgcctgccactccgtcttggcccgttctccgcaccgtgcagaggcggcgggctggggagggagcggcgccagcacgaggttcccagccgctgggaagcccctagacgcgccgaggggccgggctacgagcggctgaggtaggtaggggtgcgcgggctggtcagccggccgggagcggggtagggcggcggcgagaacgggcgcctcgctgaccggggagaagaggcctcctgccaaggggccctagtgtagccggagtgagaggaggggccccggacgtagcctgctcttccccggtgtggagccattacggggggacattcctcctgcggcggggggagggagccccctttcttttctttgagaggtcagaatccgcagtccgcccttcgcctttaaataaaagcctgccggctcgagatcggcgtcgcgatggagtgcccgtggacttctacgcttgcggaactccgagtggacggatagcggcttatgaattttgctttttagagggtacacaaccctttctctagggtggcgtgcatcttctgcaaacttgttattgccaatacgctaatagtcgctttcagcacacaacaggtaatacattctaaacgcctcgtgtcaaaataaggagagtccttatttgtgcaccgtggggcacagttaaggagcaggaagaagacaaaggaggccgttatttatgtgccgtcctattatcaaaactttccgtggtggggcagggtgcgtggctattggcctctgctgaatggactttcagagtgattgagaaaatgatgcatcctgttgccagcagtaatccagctttctgtgggcctggcaagccttcctgcctcaatgaagatgccatgagagctgctgatcagtttgacatatattcctcccagcaaagcaaatacagccacacagtcaaccacaaaccaatggtttgtcagaggcaagacccattaaatgaaacacacttgcagactacaagtggcagaagcatagaaataaaagatgaactaaagaaaaagaagaatctcaaccgatctggtaagcgtggccggccttcgggaaccaccaaatcagcaggataccggaccagcacaggcagacccctgggaaccaccaaagcagctggatttaagacaagtccaggcagacctttggggacaactaaagctgcgggatacaaagtcagcccaggcagacctccaggtagcattaaagctctatcccgtcttgccgatcttggttatggctgtggcactgctgcttttccttaccctatgatgcatggcagagcagttcatggggtagaggaaactagcagtgaagtcaaaccacccaatgagtgaatgaggcaggaaaagagggccaggtttagaaggaagattgtgaataatcccaaagcttcttggttttattttgatatacataattttatggcctgggctttccaaatttgttttcctgtttggtttttttcctgcttttgctcaaaaactgccatatgctgacagatgcactcagggcatgagcagcggcattgtatttgtacataggttcaagtgtaacacctaactaaatcatttttccttttcctttagagttatggtcatgtctcatgtttcattactactttggggctgttctaaatagatgctttatgtgataaacaactgaaaccattatacctattagtttgtgaagtaagcctacagtataataaagacactaacgtatttttaactgatggagcaaaaaagcaaactaatgaatcaggattacttgaggtaatggctgtgtgagtttttgtaacatttattttcacaagatgggacacatatttgtatgctttggcatttacatccacttcaaatgttaaaaaacttatttttaatgttttaggtttaagcagcttgtaatttattgatctacatggcattaattgatttaaccattatacctgaaataattcttcagtgtttgcctttgagcagtgataggttgtgtattttttaattgcctaagagcatatataccaaacactacaaacaattcatatttacagaaaatttaaactattttataaaaactgcacattacatttttggtgaaatatagtgcattctgaggatagcatatttcatataatagaaaaagaagcattctctaggtttgcatgtagctatagtcactatattttgcctttcatatagaaagttttaaagtattatgtttaaaaacatttattggctgggtgtggtggctcacacccagcactttgggaggccgaggcaggcggatcacttgaggtcagcagttcaagactagcctggccaacatggtgaaaccccatctctactaaaaatataaaaattagccaggcgtggtggcgggcgcctgtaatccaagctactggggaggctgaggcaggagaattgcttaaatccaggaggcggaggttgcagtgagccaagattgtgccactgcactccagcctgggtgacagagtaagactccgtctcaaataaataaataaataaataaataaataaataaataaataaaaccatttattgatgttgctcatttatttggaacgtttttagtttttctcagaaattgtcccattgcattagcacttactgtgttttcaggttgatatctaccaaaggacacaaattgaatggtagactgtaaaactggtataaacagaatgcagtttcccgaccatcagaacccaaatattaagaagcatataggaatccatctatgcatgaaacatgtaaaaaatatgttggttagtttaattaaaaatcttattgtgggtccagtgagaccatctcatccaaaagattttttttcccccaatgatgtttgctttagaagcaagatagaaaggaaaaaaagtattaggtagatatgtatagtagggacagagggaaatctttcttctttcctttctgaaagtaatacttcttgttacacattttatttattgagtttgttctaaataaaatattataaacttcagacttgaaaaaattccacttaactttaaagttacaatgtttgtatttgggattttaaatgcctttgagattaaaatgtagaattgcaggacccaaaaacttttaaaataattaaaattttaaaagagcacatgttgtgttttttgggcttgctattaatgcaaactctgattgcaaatggatgtcatgtttcataccttttttatcaggaaaaaagcagcaagccttcaggtgttccagtgatgcctgacacaattgagctggactttatgctgctctttacagtaagaggtgttgcattgtatgtggggactatgtgcactggcgtctaagacagtgacctcaacaatattagctttgcacaaaccatagagaacgatgttggatggttacataatcagttataacattctggcagctaaattgctacaagagctttttcttgcaaaagcttaaaatacaagatttttaataatttactcagaacagtataacttctgacacacacaaatgcttgcctctttattcatatgttcgttacctactctgtacatgtatctgtcatttagctgtttctcaagatgatgttcagcagttggctgcttagaaatctttttcaagccagtttctaaagacatttgtttaatgttctaccatagaataatgcacaccattgtcaaagatttgattattgtgttttatagtaagtccatttgacatttatttccctttcagtttattttccttccttattttgttatacatacccttccctttctcccctgcctttcgtacattcattcctcttcctctaccctccagcacatctacttactggtgctgtgctgtgtgtcagaagataaaacaggtgtattattgtataatgaattttgtatacatgtttatgaaatggtgagatcaactaaaggaggcatgttcataacagtgtttattatcagcagctatgtcccaggaaaaaaaaatgggaggggcaaatggctacagttgtaaatggataacatcatttagaaagccgaatttactgttcatctgagcggttacctggagtattatatctatgcactggtgagcatctcctgattccacttacttttctccctgtgaacagtttaccggtgccatgctgaagagaaagacatctaagtgataacatgaatgaagtcttaaaatttaaagtatttttactgctatataaactaaagactacattgtgcatattttgttaacactgtctcttgttatgataaacactgaaatagcatgttaaacagttgcctatactttaatataatcagttggggaaaactggccttttctcccccactgtatgattgtttcttgaaaggtaaattgctaattttatacagtgtaattctgttcttcacaaaataggtttcattattctatatttaaactgttggtcagaaaatgatctgcaattcaagtaagtctgcattacttttttctttaaaaagtactttaacatgccttatttattatattagcaaatgagctaataacagatgaaattttcattttttgacagatataaccttgcataagtagtatttagggtgattttgatactatctttagagttttgcattggatattaaaaaatatattggcacaatgtattggaagaaaatgagtagtatctggtttaatttttaatatttagggacattttaaaaaatcaatgttttaattagactaaaaattctttatattttttatttactttttaaagaaacatctgtcaaagtaatattgattccaaactgatgtttgtgtgaatttacatgtctattttcatgaactaagaatagagtttctttgagttgaggagaaaaaaatatatatgtgggtccatttattaggttaaagttgacccattcagtgtaaaaataaccatagtgtgtgagctaaagaaaaaaaaaagtaaatttctcctttatattctaagaagctttaaaagaacaattcaggggttattgataactgctactctgtcggtcattgtctctatatgcagtaaaattttatggtccctttataggaatataaagaattcaaaacagtttttcaaaagatttttttccttggacataaaaaattttgatgctattctatttttgtttttattacagcttaactgtatgctgttaaactctaggatgtatctgaatctttccttttttcccccctcctccaaatatataaatctgtgctctcacatgtaatgtatttaatttttggaaaatttaatgctatatagtaaatcaagtgtgtgatttaaagtaatcagatcactttgattcttttaagttttcagaatttcttttttccacaggtaattttggagaaaataattaccaattaactgataataagcacgctgtcctctgctgtaaaaagtctgaatagatactgtgtatgtttttatgtccatgaacttgagctactcgtgtgcaattatgtgtatgggaatggagtagtgttcatgatttgtatctacatcatcatatggatgtatatttattaataaagtcattactttaaaaccagctatgtttactatgttttttagtgtggtacttttcaagtacttaagtggtaaatggtaaacctttttcatgactgtagatcttgtgtttttctt

SEQ ID NO: 465063 - DNA, 437 bp, Homo sapiens
  misc_feature (2)..(2): n is a, c, g, or t
antgtgtcaagtcgattgtgaaatagaaatgcctgaagaactctaggatgtatctgaatctttccttttttcccccctcctccaaatatataaatctgtgctctcacatgtaatgtatttaatttttggaaaatttaatgctatatagtaaatcaagtgtgtgatttaaagtaatcagatcactttgattcttttaagttttcagaatttcttttttccacaggtaattttggagaaaataattaccaattaactgataataagcacgctgtcctctgctgtaaaaagtctgaatagatactgtgtatgtttttatgtccatgaacttgagctactcgtgtgcaattatgtgtatgggaatggagtagtgttcatgatttgtatctacatcatcatatggatgtatatttattaataaagtcattactttaaaacca

SEQ ID NO: 465064 - DNA, 591 bp, Homo sapiens
gttggcggcgggagatcgggtctcgcgatgcgagtgagcgtgtgcgtgcgcggccctcgcgagctcgcgcacgccgcctctaacactacagggtggtagcggcctcttcgtactgcgtccggggcaggaccgtgcgcggcggccgcggcgggtgctgggagccagcgcctgcctcgccgccgccctcgctgcctgccactccgtcttggcccgttctccgcaccgtgcagaggcggcgggctggggagggagcggcgccagcacgaggttcccagccgctgggaagcccctagacgcgccgaggggccgggctacgagcggctgagaaaatgatgcatcctgttgccagcagtaatccagctttctgtgggcctggcaagccttcctgcctcaatgaagatgccatgagagctgctgatcagtttgacatatattcctcccagcaaagcaaatacagccacacagtcaaccacaaaccaatggtttgtcagaggcaagacccattaaatgaaacacacttgcagactacaagtggcagaagcatagaaataaaagatgaactaaagaaaaagaagaatctcaaccgatctg

SEQ ID NO: 465065 - DNA, 5164 bp, Homo sapiens
gttggcggcgggagatcgggtctcgcgatgcgagtgagcgtgtgcgtgcgcggccctcgcgagctcgcgcacgccgcctctaacactacagggtggtagcggcctcttcgtactgcgtccggggcaggaccgtgcgcggcggccgcggcgggtgctgggagccagcgcctgcctcgccgccgccctcgctgcctgccactccgtcttggcccgttctccgcaccgtgcagaggcggcgggctggggagggagcggcgccagcacgaggttcccagccgctgggaagcccctagacgcgccgaggggccgggctacgagcggctgagaaaatgatgcatcctgttgccagcagtaatccagctttctgtgggcctggcaagccttcctgcctcaatgaagatgccatgagagctgctgatcagtttgacatatattcctcccagcaaagcaaatacagccacacagtcaaccacaaaccaatggtttgtcagaggcaagacccattaaatgaaacacacttgcagactacaagtggcagaagcatagaaataaaagatgaactaaagaaaaagaagaatctcaaccgatctggtaagcgtggccggccttcgggaaccaccaaatcagcaggataccggaccagcacaggcagacccctgggaaccaccaaagcagctggatttaagacaagtccaggcagacctttggggacaactaaagctgcgggatacaaagtcagcccaggcagacctccaggtagcattaaagctctatcccgtcttgccgatcttggttatggctgtggcactgctgcttttccttaccctatgatgcatggcagagcagttcatggggtagaggaaactagcagtgaagtcaaaccacccaatgagtgaatgaggcaggaaaagagggccaggtttagaaggaagattgtgaataatcccaaagcttcttggttttattttgatatacataattttatggcctgggctttccaaatttgttttcctgtttggtttttttcctgcttttgctcaaaaactgccatatgctgacagatgcactcagggcatgagcagcggcattgtatttgtacataggttcaagtgtaacacctaactaaatcatttttccttttcctttagagttatggtcatgtctcatgtttcattactactttggggctgttctaaatagatgctttatgtgataaacaactgaaaccattatacctattagtttgtgaagtaagcctacagtataataaagacactaacgtatttttaactgatggagcaaaaaagcaaactaatgaatcaggattacttgaggtaatggctgtgtgagtttttgtaacatttattttcacaagatgggacacatatttgtatgctttggcatttacatccacttcaaatgttaaaaaacttatttttaatgttttaggtttaagcagcttgtaatttattgatctacatggcattaattgatttaaccattatacctgaaataattcttcagtgtttgcctttgagcagtgataggttgtgtattttttaattgcctaagagcatatataccaaacactacaaacaattcatatttacagaaaatttaaactattttataaaaactgcacattacatttttggtgaaatatagtgcattctgaggatagcatatttcatataatagaaaaagaagcattctctaggtttgcatgtagctatagtcactatattttgcctttcatatagaaagttttaaagtattatgtttaaaaacatttattggctgggtgtggtggctcacacccagcactttgggaggccgaggcaggcggatcacttgaggtcagcagttcaagactagcctggccaacatggtgaaaccccatctctactaaaaatataaaaattagccaggcgtggtggcgggcgcctgtaatccaagctactggggaggctgaggcaggagaattgcttaaatccaggaggcggaggttgcagtgagccaagattgtgccactgcactccagcctgggtgacagagtaagactccgtctcaaataaataaataaataaataaataaataaataaataaataaaaccatttattgatgttgctcatttatttggaacgtttttagtttttctcagaaattgtcccattgcattagcacttactgtgttttcaggttgatatctaccaaaggacacaaattgaatggtagactgtaaaactggtataaacagaatgcagtttcccgaccatcagaacccaaatattaagaagcatataggaatccatctatgcatgaaacatgtaaaaaatatgttggttagtttaattaaaaatcttattgtgggtccagtgagaccatctcatccaaaagattttttttcccccaatgatgtttgctttagaagcaagatagaaaggaaaaaaagtattaggtagatatgtatagtagggacagagggaaatctttcttctttcctttctgaaagtaatacttcttgttacacattttatttattgagtttgttctaaataaaatattataaacttcagacttgaaaaaattccacttaactttaaagttacaatgtttgtatttgggattttaaatgcctttgagattaaaatgtagaattgcaggacccaaaaacttttaaaataattaaaattttaaaagagcacatgttgtgttttttgggcttgctattaatgcaaactctgattgcaaatggatgtcatgtttcataccttttttatcaggaaaaaagcagcaagccttcaggtgttccagtgatgcctgacacaattgagctggactttatgctgctctttacagtaagaggtgttgcattgtatgtggggactatgtgcactggcgtctaagacagtgacctcaacaatattagctttgcacaaaccatagagaacgatgttggatggttacataatcagttataacattctggcagctaaattgctacaagagctttttcttgcaaaagcttaaaatacaagatttttaataatttactcagaacagtataacttctgacacacacaaatgcttgcctctttattcatatgttcgttacctactctgtacatgtatctgtcatttagctgtttctcaagatgatgttcagcagttggctgcttagaaatctttttcaagccagtttctaaagacatttgtttaatgttctaccatagaataatgcacaccattgtcaaagatttgattattgtgttttatagtaagtccatttgacatttatttccctttcagtttattttccttccttattttgttatacatacccttccctttctcccctgcctttcgtacattcattcctcttcctctaccctccagcacatctacttactggtgctgtgctgtgtgtcagaagataaaacaggtgtattattgtataatgaattttgtatacatgtttatgaaatggtgagatcaactaaaggaggcatgttcataacagtgtttattatcagcagctatgtcccaggaaaaaaaaatgggaggggcaaatggctacagttgtaaatggataacatcatttagaaagccgaatttactgttcatctgagcggttacctggagtattatatctatgcactggtgagcatctcctgattccacttacttttctccctgtgaacagtttaccggtgccatgctgaagagaaagacatctaagtgataacatgaatgaagtcttaaaatttaaagtatttttactgctatataaactaaagactacattgtgcatattttgttaacactgtctcttgttatgataaacactgaaatagcatgttaaacagttgcctatactttaatataatcagttggggaaaactggccttttctcccccactgtatgattgtttcttgaaaggtaaattgctaattttatacagtgtaattctgttcttcacaaaataggtttcattattctatatttaaactgttggtcagaaaatgatctgcaattcaagtaagtctgcattacttttttctttaaaaagtactttaacatgccttatttattatattagcaaatgagctaataacagatgaaattttcattttttgacagatataaccttgcataagtagtatttagggtgattttgatactatctttagagttttgcattggatattaaaaaatatattggcacaatgtattggaagaaaatgagtagtatctggtttaatttttaatatttagggacattttaaaaaatcaatgttttaattagactaaaaattctttatattttttatttactttttaaagaaacatctgtcaaagtaatattgattccaaactgatgtttgtgtgaatttacatgtctattttcatgaactaagaatagagtttctttgagttgaggagaaaaaaatatatatgtgggtccatttattaggttaaagttgacccattcagtgtaaaaataaccatagtgtgtgagctaaagaaaaaaaaaagtaaatttctcctttatattctaagaagctttaaaagaacaattcaggggttattgataactgctactctgtcggtcattgtctctatatgcagtaaaattttatggtccctttataggaatataaagaattcaaaacagtttttcaaaagatttttttccttggacataaaaaattttgatgctattctatttttgtttttattacagcttaactgtatgctgttaaactctaggatgtatctgaatctttccttttttcccccctcctccaaatatataaatctgtgctctcacatgtaatgtatttaatttttggaaaatttaatgctatatagtaaatcaagtgtgtgatttaaagtaatcagatcactttgattcttttaagttttcagaatttcttttttccacaggtaattttggagaaaataattaccaattaactgataataagcacgctgtcctctgctgtaaaaagtctgaatagatactgtgtatgtttttatgtccatgaacttgagctactcgtgtgcaattatgtgtatgggaatggagtagtgttcatgatttgtatctacatcatcatatggatgtatatttattaataaagtcattactttaaaacca

SEQ ID NO: 465066 - DNA, 5110 bp, Homo sapiens
gttggcggcgggagatcgggtctcgcgatgcgagtgagcgtgtgcgtgcgcggccctcgcgagctcgcgcacgccgcctctaacactacagggtggtagcggcctcttcgtactgcgtccggggcaggaccgtgcgcggcggccgcggcgggtgctgggagccagcgcctgcctcgccgccgccctcgctgcctgccactccgtcttggcccgttctccgcaccgtgcagaggcggcgggctggggagggagcggcgccagcacgaggttcccagccgctgggaagcccctagacgcgccgaggggccgggctacgagcggctgagaaaatgatgcatcctgttgccagcagtaatccagctttctgtgggcctggcaagccttcctgcctcaatgaagatgccatgagagctgctgatcagtttgacatatattcctcccagcaaagcaaatacagccacacagtcaaccacaaaccaatggtttgtcagaggcaagacccattaaatgaaacacacttgcagactacaagtggcagaagcatagaaataaaagatgaactaaagaaaaagaagaatctcaaccgatctggtaagcgtggccggccttcgggaaccaccaaatcagcaggataccggaccagcacaggcagacccctgggaaccaccaaagcagctggatttaagacaagtccaggcagacctttggggacaactaaagctgcgggatacaaagtcagcccaggcagacctccaggtagcattaaagctctatcccgtcttgccgatcttggttatggctgtggcactgctgcttttccttaccctatgatgcatggcagagcagttcatggggtagaggaaactagcagtgaagtcaaaccacccaatgagtgaatgaggcaggaaaagagggccaggtttagaaggaagattgtgaataatcccaaagcttcttggttttattttgatatacataattttatggcctgggctttccaaatttgttttcctgtttggtttttttcctgcttttgctcaaaaactgccatatgctgacagatgcactcagggcatgagcagcggcattgtatttgtacataggttcaagtgtaacacctaactaaatcatttttccttttcctttagagttatggtcatgtctcatgtttcattactactttggggctgttctaaatagatgctttatgtgataaacaactgaaaccattatacctattagtttgtgaagtaagcctacagtataataaagacactaacgtatttttaactgatggagcaaaaaagcaaactaatgaatcaggattacttgaggtaatggctgtgtgagtttttgtaacatttattttcacaagatgggacacatatttgtatgctttggcatttacatccacttcaaatgttaaaaaacttatttttaatgttttaggtttaagcagcttgtaatttattgatctacatggcattaattgatttaaccattatacctgaaataattcttcagtgtttgcctttgagcagtgataggttgtgtattttttaattgcctaagagcatatataccaaacactacaaacaattcatatttacagaaaatttaaactattttataaaaactgcacattacatttttggtgaaatatagtgcattctgaggatagcatatttcatataatagaaaaagaagcattctctaggtttgcatgtagctatagtcactatattttgcctttcatatagaaagttttaaagtattatgtttaaaaacatttattggctgggtgtggtggctcacacccagcactttgggaggccgaggcaggcggatcacttgaggtcagcagttcaagactagcctggccaacatggtgaaaccccatctctactaaaaatataaaaattagccaggcgtggtggcgggcgcctgtaatccaagctactggggaggctgaggcaggagaattgcttaaatccaggaggcggaggttgcagtgagccaagattgtgccactgcactccagcctgggtgacagagtaagactccgtctcaaataaataaataaataaataaataaataaataaataaataaaaccatttattgatgttgctcatttatttggaacgtttttagtttttctcagaaattgtcccattgcattagcacttactgtgttttcaggttgatatctaccaaaggacacaaattgaatggtagactgtaaaactggtataaacagaatgcagtttcccgaccatcagaacccaaatattaagaagcatataggaatccatctatgcatgaaacatgtaaaaaatatgttggttagtttaattaaaaatcttattgtgggtccagtgagaccatctcatccaaaagattttttttcccccaatgatgtttgctttagaagcaagatagaaaggaaaaaaagtattaggtagatatgtatagtagggacagagggaaatctttcttctttcctttctgaaagtaatacttcttgttacacattttatttattgagtttgttctaaataaaatattataaacttcagacttgaaaaaattccacttaactttaaagttacaatgtttgtatttgggattttaaatgcctttgagattaaaatgtagaattgcaggacccaaaaacttttaaaataattaaaattttaaaagagcacatgttgtgttttttgggcttgctattaatgcaaactctgattgcaaatggatgtcatgtttcataccttttttatcaggaaaaaagcagcaagccttcaggtgttccagtgatgcctgacacaattgagctggactttatgctgctctttacagtaagaggtgttgcattgtatgtggggactatgtgcactggcgtctaagacagtgacctcaacaatattagctttgcacaaaccatagagaacgatgttggatggttacataatcagttataacattctggcagctaaattgctacaagagctttttcttgcaaaagcttaaaatacaagatttttaataatttactcagaacagtataacttctgacacacacaaatgcttgcctctttattcatatgttcgttacctactctgtacatgtatctgtcatttagctgtttctcaagatgatgttcagcagttggctgcttagaaatctttttcaagccagtttctaaagacatttgtttaatgttctaccatagaataatgcacaccattgtcaaagatttgattattgtgttttatagtaagtccatttgacatttatttccctttcagtttattttccttccttattttgttatacatacccttccctttctcccctgcctttcgtacattcattcctcttcctctaccctccagcacatctacttactggtgctgtgctgtgtgtcagaagataaaacaggtgtattattgtataatgaattttgtatacatgtttatgaaatggtgagatcaactaaaggaggcatgttcataacagtgtttattatcagcagctatgtcccaggaaaaaaaaatgggaggggcaaatggctacagttgtaaatggataacatcatttagaaagccgaatttactgttcatctgagcggttacctggagtattatatctatgcactggtgagcatctcctgattccacttacttttctccctgtgaacagtttaccggtgccatgctgaagagaaagacatctaagtgataacatgaatgaagtattttgttaacactgtctcttgttatgataaacactgaaatagcatgttaaacagttgcctatactttaatataatcagttggggaaaactggccttttctcccccactgtatgattgtttcttgaaaggtaaattgctaattttatacagtgtaattctgttcttcacaaaataggtttcattattctatatttaaactgttggtcagaaaatgatctgcaattcaagtaagtctgcattacttttttctttaaaaagtactttaacatgccttatttattatattagcaaatgagctaataacagatgaaattttcattttttgacagatataaccttgcataagtagtatttagggtgattttgatactatctttagagttttgcattggatattaaaaaatatattggcacaatgtattggaagaaaatgagtagtatctggtttaatttttaatatttagggacattttaaaaaatcaatgttttaattagactaaaaattctttatattttttatttactttttaaagaaacatctgtcaaagtaatattgattccaaactgatgtttgtgtgaatttacatgtctattttcatgaactaagaatagagtttctttgagttgaggagaaaaaaatatatatgtgggtccatttattaggttaaagttgacccattcagtgtaaaaataaccatagtgtgtgagctaaagaaaaaaaaaagtaaatttctcctttatattctaagaagctttaaaagaacaattcaggggttattgataactgctactctgtcggtcattgtctctatatgcagtaaaattttatggtccctttataggaatataaagaattcaaaacagtttttcaaaagatttttttccttggacataaaaaattttgatgctattctatttttgtttttattacagcttaactgtatgctgttaaactctaggatgtatctgaatctttccttttttcccccctcctccaaatatataaatctgtgctctcacatgtaatgtatttaatttttggaaaatttaatgctatatagtaaatcaagtgtgtgatttaaagtaatcagatcactttgattcttttaagttttcagaatttcttttttccacaggtaattttggagaaaataattaccaattaactgataataagcacgctgtcctctgctgtaaaaagtctgaatagatactgtgtatgtttttatgtccatgaacttgagctactcgtgtgcaattatgtgtatgggaatggagtagtgttcatgatttgtatctacatcatcatatggatgtatatttattaataaagtcattactttaaaacca

SEQ ID NO: 465067 - DNA, 3621 bp, Homo sapiens
gttggcggcgggagatcgggtctcgcgatgcgagtgagcgtgtgcgtgcgcggccctcgcgagctcgcgcacgccgcctctaacactacagggtggtagcggcctcttcgtactgcgtccggggcaggaccgtgcgcggcggccgcggcgggtgctgggagccagcgcctgcctcgccgccgccctcgctgcctgccactccgtcttggcccgttctccgcaccgtgcagaggcggcgggctggggagggagcggcgccagcacgaggttcccagccgctgggaagcccctagacgcgccgaggggccgggctacgagcggctgaggtaggtaggggtgcgcgggctggtcagccggccgggagcggggtagggcggcggcgagaacgggcgcctcgctgaccggggagaagaggcctcctgccaaggggccctagtgtagccggagtgagaggaggggccccggacgtagcctgctcttccccggtgtggagccattacggggggacattcctcctgcggcggggggagggagccccctttcttttctttgagaggtcagaatccgcagtccgcccttcgcctttaaataaaagcctgccggctcgagatcggcgtcgcgatggagtgcccgtggacttctacgcttgcggaactccgagtggacggatagcggcttatgaattttgctttttagagggtacacaaccctttctctagggtggcgtgcatcttctgcaaacttgttattgccaatacgctaatagtcgctttcagcacacaacaggtaatacattctaaacgcctcgtgtcaaaataaggagagtccttatttgtgcaccgtggggcacagttaaggagcaggaagaagacaaaggaggccgttatttatgtgccgtcctattatcaaaactttccgtggtggggcagggtgcgtggctattggcctctgctgaatggactttcagagtgattgagaaaatgatgcatcctgttgccagcagtaatccagctttctgtgggcctggcaagccttcctgcctcaatgaagatgccatgagagctgctgatcagtttgacatatattcctcccagcaaagcaaatacagccacacagtcaaccacaaaccaatggtttgtcagaggcaagacccattaaatgaaacacacttgcagactacaagtggcagaagcatagaaataaaagatgaactaaagaaaaagaagaatctcaaccgatctggaaaaaagcagcaagccttcaggtgttccagtgatgcctgacacaattgagctggactttatgctgctctttacagtaagaggtgttgcattgtatgtggggactatgtgcactggcgtctaagacagtgacctcaacaatattagctttgcacaaaccatagagaacgatgttggatggttacataatcagttataacattctggcagctaaattgctacaagagctttttcttgcaaaagcttaaaatacaagatttttaataatttactcagaacagtataacttctgacacacacaaatgcttgcctctttattcatatgttcgttacctactctgtacatgtatctgtcatttagctgtttctcaagatgatgttcagcagttggctgcttagaaatctttttcaagccagtttctaaagacatttgtttaatgttctaccatagaataatgcacaccattgtcaaagatttgattattgtgttttatagtaagtccatttgacatttatttccctttcagtttattttccttccttattttgttatacatacccttccctttctcccctgcctttcgtacattcattcctcttcctctaccctccagcacatctacttactggtgctgtgctgtgtgtcagaagataaaacaggtgtattattgtataatgaattttgtatacatgtttatgaaatggtgagatcaactaaaggaggcatgttcataacagtgtttattatcagcagctatgtcccaggaaaaaaaaatgggaggggcaaatggctacagttgtaaatggataacatcatttagaaagccgaatttactgttcatctgagcggttacctggagtattatatctatgcactggtgagcatctcctgattccacttacttttctccctgtgaacagtttaccggtgccatgctgaagagaaagacatctaagtgataacatgaatgaagtcttaaaatttaaagtatttttactgctatataaactaaagactacattgtgcatattttgttaacactgtctcttgttatgataaacactgaaatagcatgttaaacagttgcctatactttaatataatcagttggggaaaactggccttttctcccccactgtatgattgtttcttgaaaggtaaattgctaattttatacagtgtaattctgttcttcacaaaataggtttcattattctatatttaaactgttggtcagaaaatgatctgcaattcaagtaagtctgcattacttttttctttaaaaagtactttaacatgccttatttattatattagcaaatgagctaataacagatgaaattttcattttttgacagatataaccttgcataagtagtatttagggtgattttgatactatctttagagttttgcattggatattaaaaaatatattggcacaatgtattggaagaaaatgagtagtatctggtttaatttttaatatttagggacattttaaaaaatcaatgttttaattagactaaaaattctttatattttttatttactttttaaagaaacatctgtcaaagtaatattgattccaaactgatgtttgtgtgaatttacatgtctattttcatgaactaagaatagagtttctttgagttgaggagaaaaaaatatatatgtgggtccatttattaggttaaagttgacccattcagtgtaaaaataaccatagtgtgtgagctaaagaaaaaaaaaagtaaatttctcctttatattctaagaagctttaaaagaacaattcaggggttattgataactgctactctgtcggtcattgtctctatatgcagtaaaattttatggtccctttataggaatataaagaattcaaaacagtttttcaaaagatttttttccttggacataaaaaattttgatgctattctatttttgtttttattacagcttaactgtatgctgttaaactctaggatgtatctgaatctttccttttttcccccctcctccaaatatataaatctgtgctctcacatgtaatgtatttaatttttggaaaatttaatgctatatagtaaatcaagtgtgtgatttaaagtaatcagatcactttgattcttttaagttttcagaatttcttttttccacaggtaattttggagaaaataattaccaattaactgataataagcacgctgtcctctgctgtaaaaagtctgaatagatactgtgtatgtttttatgtccatgaacttgagctactcgtgtgcaattatgtgtatgggaatggagtagtgttcatgatttgtatctacatcatcatatggatgtatatttattaataaagtcattactttaaaacca

SEQ ID NO: 465068 - DNA, 5512 bp, Homo sapiens
gttggcggcgggagatcgggtctcgcgatgcgagtgagcgtgtgcgtgcgcggccctcgcgagctcgcgcacgccgcctctaacactacagggtggtagcggcctcttcgtactgcgtccggggcaggaccgtgcgcggcggccgcggcgggtgctgggagccagcgcctgcctcgccgccgccctcgctgcctgccactccgtcttggcccgttctccgcaccgtgcagaggcggcgggctggggagggagcggcgccagcacgaggttcccagccgctgggaagcccctagacgcgccgaggggccgggctacgagcggctgagaaaatgatgcatcctgttgccagcagtaatccagctttctgtgggcctggcaagccttcctgcctcaatgaagatgccatgagagctgctgatcagtttgacatatattcctcccagcaaagcaaatacagccacacagtcaaccacaaaccaatggtttgtcagaggcaagacccattaaatgaaacacacttgcagactacaagtggcagaagcatagaaataaaagatgaactaaagaaaaagaagaatctcaaccgatctggtaagcgtggccggccttcgggaaccaccaaatcagcaggataccggaccagcacaggcagacccctgggaaccaccaaagcagctggatttaagacaagtccaggcagacctttggggacaactaaagctgcgggatacaaagtcagcccaggcagacctccaggtagcattaaagctctatcccgtcttgccgatcttggttatggctgtggcactgctgcttttccttaccctatgatgcatggcagagcagttcatggggtagaggaaactagcagtgaagtcaaaccacccaatgagtgaatgaggcaggaaaagagggccaggtttagaaggaagattgtgaataatcccaaagcttcttggttttattttgatatacataattttatggcctgggctttccaaatttgttttcctgtttggtttttttcctgcttttgctcaaaaactgccatatgctgacagatgcactcagggcatgagcagcggcattgtatttgtacataggttcaagtgtaacacctaactaaatcatttttccttttcctttagagttatggtcatgtctcatgtttcattactactttggggctgttctaaatagatgctttatgtgataaacaactgaaaccattatacctattagtttgtgaagtaagcctacagtataataaagacactaacgtatttttaactgatggagcaaaaaagcaaactaatgaatcaggattacttgaggtaatggctgtgtgagtttttgtaacatttattttcacaagatgggacacatatttgtatgctttggcatttacatccacttcaaatgttaaaaaacttatttttaatgttttaggtttaagcagcttgtaatttattgatctacatggcattaattgatttaaccattatacctgaaataattcttcagtgtttgcctttgagcagtgataggttgtgtattttttaattgcctaagagcatatataccaaacactacaaacaattcatatttacagaaaatttaaactattttataaaaactgcacattacatttttggtgaaatatagtgcattctgaggatagcatatttcatataatagaaaaagaagcattctctaggtttgcatgtagctatagtcactatattttgcctttcatatagaaagttttaaagtattatgtttaaaaacatttattggctgggtgtggtggctcacacccagcactttgggaggccgaggcaggcggatcacttgaggtcagcagttcaagactagcctggccaacatggtgaaaccccatctctactaaaaatataaaaattagccaggcgtggtggcgggcgcctgtaatccaagctactggggaggctgaggcaggagaattgcttaaatccaggaggcggaggttgcagtgagccaagattgtgccactgcactccagcctgggtgacagagtaagactccgtctcaaataaataaataaataaataaataaataaataaataaataaaaccatttattgatgttgctcatttatttggaacgtttttagtttttctcagaaattgtcccattgcattagcacttactgtgttttcaggttgatatctaccaaaggacacaaattgaatggtagactgtaaaactggtataaacagaatgcagtttcccgaccatcagaacccaaatattaagaagcatataggaatccatctatgcatgaaacatgtaaaaaatatgttggttagtttaattaaaaatcttattgtgggtccagtgagaccatctcatccaaaagattttttttcccccaatgatgtttgctttagaagcaagatagaaaggaaaaaaagtattaggtagatatgtatagtagggacagagggaaatctttcttctttcctttctgaaagtaatacttcttgttacacattttatttattgagtttgttctaaataaaatattataaacttcagacttgaaaaaattccacttaactttaaagttacaatgtttgtatttgggattttaaatgcctttgagattaaaatgtagaattgcaggacccaaaaacttttaaaataattaaaattttaaaagagcacatgttgtgttttttgggcttgctattaatgcaaactctgattgcaaatggatgtcatgtttcataccttttttatcaggaaaaaagcagcaagccttcaggtgttccagtgatgcctgacacaattgagctggactttatgctgctctttacagtaagaggtgttgcattgtatgtggggactatgtgcactggcgtctaagacagtgacctcaacaatattagctttgcacaaaccatagagaacgatgttggatggttacataatcagttataacattctggcagctaaattgctacaagagctttttcttgcaaaagcttaaaatacaagatttttaataatttactcagaacagtataacttctgacacacacaaatgcttgcctctttattcatatgttcgttacctactctgtacatgtatctgtcatttagctgtttctcaagatgatgttcagcagttggctgcttagaaatctttttcaagccagtttctaaagacatttgtttaatgttctaccatagaataatgcacaccattgtcaaagatttgattattgtgttttatagtaagtccatttgacatttatttccctttcagtttattttccttccttattttgttatacatacccttccctttctcccctgcctttcgtacattcattcctcttcctctaccctccagcacatctacttactggtgctgtgctgtgtgtcagaagataaaacaggtgtattattgtataatgaattttgtatacatgtttatgaaatggtgagatcaactaaaggaggcatgttcataacagtgtttattatcagcagctatgtcccaggaaaaaaaaatgggaggggcaaatggctacagttgtaaatggataacatcatttagaaagccgaatttactgttcatctgagcggttacctggagtattatatctatgcactggtgagcatctcctgattccacttacttttctccctgtgaacagtttaccggtgccatgctgaagagaaagacatctaagtgataacatgaatgaagtcttaaaatttaaagtatttttactgctatataaactaaagactacattgtgcatattttgttaacactgtctcttgttatgataaacactgaaatagcatgttaaacagttgcctatactttaatataatcagttggggaaaactggccttttctcccccactgtatgattgtttcttgaaaggtaaattgctaattttatacagtgtaattctgttcttcacaaaataggtttcattattctatatttaaactgttggtcagaaaatgatctgcaattcaagtaagtctgcattacttttttctttaaaaagtactttaacatgccttatttattatattagcaaatgagctaataacagatgaaattttcattttttgacagatataaccttgcataagtagtatttagggtgattttgatactatctttagagttttgcattggatattaaaaaatatattggcacaatgtattggaagaaaatgagtagtatctggtttaatttttaatatttagggacattttaaaaaatcaatgttttaattagactaaaaattctttatattttttatttactttttaaagaaacatctgtcaaagtaatattgattccaaactgatgtttgtgtgaatttacatgtctattttcatgaactaagaatagagtttctttgagttgaggagaaaaaaatatatatgtgggtccatttattaggttaaagttgacccattcagtgtaaaaataaccatagtgtgtgagctaaagaaaaaaaaaagtaaatttctcctttatattctaagaagctttaaaagaacaattcaggggttattgataactgctactctgtcggtcattgtctctatatgcagtaaaattttatggtccctttataggaatataaagaattcaaaacagtttttcaaaagatttttttccttggacataaaaaattttgatgctattctatttttgtttttattacagcttaactgtatgctgttaaactctaggatgtatctgaatctttccttttttcccccctcctccaaatatataaatctgtgctctcacatgtaatgtatttaatttttggaaaatttaatgctatatagtaaatcaagtgtgtgatttaaagtaatcagatcactttgattcttttaagttttcagaatttcttttttccacaggtaattttggagaaaataattaccaattaactgataataagcacgctgtcctctgctgtaaaaagtctgaatagatactgtgtatgtttttatgtccatgaacttgagctactcgtgtgcaattatgtgtatgggaatggagtagtgttcatgatttgtatctacatcatcatatggatgtatatttattaataaagtcattactttaaaaccaaaaaaaaaaaaaaaaaaaaaaaaaaaaaaaaaaaaaaagaaaaaaaaaaaaaaaaaaaaaaaaaaaaaaaaaaaaaaaaaaaaaggggggggggggcaaaaaaatccccccagagggaggccaacaatattagtaagacaaccacagcatggtagaaaaagaagaggggcgcccccaaaaagagggacgcgaaataaaacaaagaaagagaacacgagcgcagggaatgtaataaaacacgcgcggggaggcgaaaaaacaagctaccaacgaggagaccccacttagggaaaacagcacacactactctgggggggaggaaaaaagtggcggcgcaaccacaccgtg

SEQ ID NO: 465069 - DNA, 1955 bp, Homo sapiens
  misc_feature (25)..(25): n is a, c, g, or t
gagagagagagagagagagagaganagagagagagagagagagagagagagagagagagagagagagagggctaccatagaataatgcacaccattgtcaaagatttgattattgtgttttatagtaagtccatttgacatttatttccctttcagtttattttccttccttattttgttatacatacccttccctttctcccctgcctttcgtacattcattcctcttcctctaccctccagcacatctacttactggtgctgtgctgtgtgtcagaagataaaacaggtgtattattgtataatgaattttgtatacatgtttatgaaatggtgagatcaactaaaggaggcatgttcataacagtgtttattatcagcagctatgtcccaggaaaaaccgaatttactgttcatctgagcggttacctggagtattatatctatgcactggtgagcatctcctgattccacttacttttctccctgtgaacagtttaccggtgccatgctgaagagaaagacatctaagtgataacatgaatgaagtcttaaaatttaaagtatttttactgctatataaactaaagactacattgtgcatattttgttaacactgtctcttgttatgataaacactgaaatagcatgttaaacagttgcctatactttaatataatcagttggggaaaactggccttttctcccccactgtatgattgtttcttgaaaggtaaattgctaattttatacagtgtaattctgttcttcacaaaataggtttcattattctatatttaaactgttggtcagaaaatgatctgcaattcaagtaagtctgcattacttttttctttaaaaagtactttaacatgccttatttattatattagcaaatgagctaataacagatgaaattttcattttttgacagatataaccttgcataagtagtatttagggtgattttgatactatctttagagttttgcattggatattaaaaaatatattggcacaatgtattggaagaaaatgagtagtatctggtttaatttttaatatttagggacattttaaaaaatcaatgttttaattagactaaaaattctttatattttttatttactttttaaagaaacatctgtcaaagtaatattgattccaaactgatgtttgtgtgaatttacatgtctattttcatgaactaagaatagagtttctttgagttgaggagaaaaaaatatatatgtgggtccatttattaggttaaagttgacccattcagtgtaaaaataaccatagtgtgtgagctaaagaaaaaaaaaagtaaatttctcctttatattctaagaagctttaaaagaacaattcaggggttattgataactgctactctgtcggtcattgtctctatatgcagtaaaattttatggtccctttataggaatataaagaattcaaaacagtttttcaaaagatttttttccttggacataaaaaattttgatgctattctatttttgtttttattacagcttaactgtatgctgttaaactctaggatgtatctgaatctttccttttttcccccctcctccaaatatataaatctgtgctctcacatgtaatgtatttaatttttggaaaatttaatgctatatagtaaatcaagtgtgtgatttaaagtaatcagatcactttgattcttttaagttttcagaatttcttttttccacaggtaattttggagaaaataattaccaattaactgataataagcacgctgtcctctgctgtaaaaagtctgaatagatactgtgtatgtttttatgtccatgaacttgagctactcgtgtgcaattatgtgtatgggaatggagtagtgttcatgatttgtatctacatcatcatatggatgtatatttattaataaagtcattactttaaaacca

SEQ ID NO: 465070 - DNA, 1955 bp, Homo sapiens
  misc_feature (25)..(25): n is a, c, g, or t
gagagagagagagagagagagaganagagagagagagagagagagagagagagagagagagagagagagggctaccatagaataatgcacaccattgtcaaagatttgattattgtgttttatagtaagtccatttgacatttatttccctttcagtttattttccttccttattttgttatacatacccttccctttctcccctgcctttcgtacattcattcctcttcctctaccctccagcacatctacttactggtgctgtgctgtgtgtcagaagataaaacaggtgtattattgtataatgaattttgtatacatgtttatgaaatggtgagatcaactaaaggaggcatgttcataacagtgtttattatcagcagctatgtcccaggaaaaaaaaatgggaggggcaaatggctacagttgtaaatggataacatcatttagaaagccgaatttactgttcatctgagcggttacctggagtattatatctatgcactggtgagcatctcctgattccacttacttttctccctgtgaacagtttaccggtgccatgctgaagagaaagacatctaagtgataacatgaatgaagtattttgttaacactgtctcttgttatgataaacactgaaatagcatgttaaacagttgcctatactttaatataatcagttggggaaaactggccttttctcccccactgtatgattgtttcttgaaaggtaaattgctaattttatacagtgtaattctgttcttcacaaaataggtttcattattctatatttaaactgttggtcagaaaatgatctgcaattcaagtaagtctgcattacttttttctttaaaaagtactttaacatgccttatttattatattagcaaatgagctaataacagatgaaattttcattttttgacagatataaccttgcataagtagtatttagggtgattttgatactatctttagagttttgcattggatattaaaaaatatattggcacaatgtattggaagaaaatgagtagtatctggtttaatttttaatatttagggacattttaaaaaatcaatgttttaattagactaaaaattctttatattttttatttactttttaaagaaacatctgtcaaagtaatattgattccaaactgatgtttgtgtgaatttacatgtctattttcatgaactaagaatagagtttctttgagttgaggagaaaaaaatatatatgtgggtccatttattaggttaaagttgacccattcagtgtaaaaataaccatagtgtgtgagctaaagaaaaaaaaaagtaaatttctcctttatattctaagaagctttaaaagaacaattcaggggttattgataactgctactctgtcggtcattgtctctatatgcagtaaaattttatggtccctttataggaatataaagaattcaaaacagtttttcaaaagatttttttccttggacataaaaaattttgatgctattctatttttgtttttattacagcttaactgtatgctgttaaactctaggatgtatctgaatctttccttttttcccccctcctccaaatatataaatctgtgctctcacatgtaatgtatttaatttttggaaaatttaatgctatatagtaaatcaagtgtgtgatttaaagtaatcagatcactttgattcttttaagttttcagaatttcttttttccacaggtaattttggagaaaataattaccaattaactgataataagcacgctgtcctctgctgtaaaaagtctgaatagatactgtgtatgtttttatgtccatgaacttgagctactcgtgtgcaattatgtgtatgggaatggagtagtgttcatgatttgtatctacatcatcatatggatgtatatttattaataaagtcattactttaaaacca

SEQ ID NO: 465071 - DNA, 1110 bp, Homo sapiens
  misc_feature (796)..(796): n is a, c, g, or t
gttggcggcgggagatcgggtctcgcgatgcgagtgagcgtgtgcgtgcgcggccctcgcgagctcgcgcacgccgcctctaacactacagggtggtagcggcctcttcgtactgcgtccggggcaggaccgtgcgcggcggccgcggcgggtgctgggagccagcgcctgcctcgccgccgccctcgctgcctgccactccgtcttggcccgttctccgcaccgtgcagaggcggcgggctggggagggagcggcgccagcacgaggttcccagccgctgggaagcccctagacgcgccgaggggccgggctacgagcggctgagaaaatgatgcatcctgttgccagcagtaacccagctattttttctttcgttttttaattttaaagttggggggggtctcaatttgttaccctggctggtctcgaactcccggacttaagcgatcctctggctccaagcccactaccagtctcaggtttctttactaaaagatcactaccttttttctcttatctgctgccatgtgagatgtggctttcaccttccgccatgattgtgaggccttcccagccacgtggaactgtaagtccaataaacctcttttgtaaattaaaaaaaaaaatcactatttaagatactaggatggattgtgactgttgaggagtacttacatatcctacatttgactacattatttccaaaccaagtattccatccaaaggaacatactggtatcatagagaccaaggagggactgtttaaggttgccaaggtgaagcgagctgagaggntttgtcctcgtgccagtaactctgaaatctctcttaatctgctgtcaggcagcagaatgcatgtttccccaagtaagtagctgcttaacagtaaagccaatgtccgttctgtgatcccaggtctctgacttctgaggggtccgtctgcgactggttaacttaaatcccctgtaggggataaaggatccctttcagtggaccgaacggccaattggcaagatggtgctcgggttctcggccgaaaccccccgggttgcgagtctgaggacgggtaaaccggggggcgttggggacccaagggcaaaactcgctgg

SEQ ID NO: 465072 - DNA, 5096 bp, Homo sapiens
gttggcggcgggagatcgggtctcgcgatgcgagtgagcgtgtgcgtgcgcggccctcgcgagctcgcgcacgccgcctctaacactacagggtggtagcggcctcttcgtactgcgtccggggcaggaccgtgcgcggcggccgcggcgggtgctgggagccagcgcctgcctcgccgccgccctcgctgcctgccactccgtcttggcccgttctccgcaccgtgcagaggcggcgggctggggagggagcggcgccagcacgaggttcccagccgctgggaagcccctagacgcgccgaggggccgggctacgagcggctgagaaaatgatgcatcctgttgccagcagtaatccagctttctgtgggcctggcaagccttcctgcctcaatgaagatgccatgagagctgctgatcagtttgacatatattcctcccagcaaagcaaatacagccacacagtcaaccacaaaccaatggtttgtcagaggcaagacccattaaatgaaacacacttgcagactacaagtggcagaagcatagaaataaaagatgaactaaagaaaaagaagaatctcaaccgatctggtaagcgtggccggccttcgggaaccaccaagtccaggcagacctttggggacaactaaagctgcgggatacaaagtcagcccaggcagacctccaggtagcattaaagctctatcccgtcttgccgatcttggttatggctgtggcactgctgcttttccttaccctatgatgcatggcagagcagttcatggggtagaggaaactagcagtgaagtcaaaccacccaatgagtgaatgaggcaggaaaagagggccaggtttagaaggaagattgtgaataatcccaaagcttcttggttttattttgatatacataattttatggcctgggctttccaaatttgttttcctgtttggtttttttcctgcttttgctcaaaaactgccatatgctgacagatgcactcagggcatgagcagcggcattgtatttgtacataggttcaagtgtaacacctaactaaatcatttttccttttcctttagagttatggtcatgtctcatgtttcattactactttggggctgttctaaatagatgctttatgtgataaacaactgaaaccattatacctattagtttgtgaagtaagcctacagtataataaagacactaacgtatttttaactgatggagcaaaaaagcaaactaatgaatcaggattacttgaggtaatggctgtgtgagtttttgtaacatttattttcacaagatgggacacatatttgtatgctttggcatttacatccacttcaaatgttaaaaaacttatttttaatgttttaggtttaagcagcttgtaatttattgatctacatggcattaattgatttaaccattatacctgaaataattcttcagtgtttgcctttgagcagtgataggttgtgtattttttaattgcctaagagcatatataccaaacactacaaacaattcatatttacagaaaatttaaactattttataaaaactgcacattacatttttggtgaaatatagtgcattctgaggatagcatatttcatataatagaaaaagaagcattctctaggtttgcatgtagctatagtcactatattttgcctttcatatagaaagttttaaagtattatgtttaaaaacatttattggctgggtgtggtggctcacacccagcactttgggaggccgaggcaggcggatcacttgaggtcagcagttcaagactagcctggccaacatggtgaaaccccatctctactaaaaatataaaaattagccaggcgtggtggcgggcgcctgtaatccaagctactggggaggctgaggcaggagaattgcttaaatccaggaggcggaggttgcagtgagccaagattgtgccactgcactccagcctgggtgacagagtaagactccgtctcaaataaataaataaataaataaataaataaataaataaataaaaccatttattgatgttgctcatttatttggaacgtttttagtttttctcagaaattgtcccattgcattagcacttactgtgttttcaggttgatatctaccaaaggacacaaattgaatggtagactgtaaaactggtataaacagaatgcagtttcccgaccatcagaacccaaatattaagaagcatataggaatccatctatgcatgaaacatgtaaaaaatatgttggttagtttaattaaaaatcttattgtgggtccagtgagaccatctcatccaaaagattttttttcccccaatgatgtttgctttagaagcaagatagaaaggaaaaaaagtattaggtagatatgtatagtagggacagagggaaatctttcttctttcctttctgaaagtaatacttcttgttacacattttatttattgagtttgttctaaataaaatattataaacttcagacttgaaaaaattccacttaactttaaagttacaatgtttgtatttgggattttaaatgcctttgagattaaaatgtagaattgcaggacccaaaaacttttaaaataattaaaattttaaaagagcacatgttgtgttttttgggcttgctattaatgcaaactctgattgcaaatggatgtcatgtttcataccttttttatcaggaaaaaagcagcaagccttcaggtgttccagtgatgcctgacacaattgagctggactttatgctgctctttacagtaagaggtgttgcattgtatgtggggactatgtgcactggcgtctaagacagtgacctcaacaatattagctttgcacaaaccatagagaacgatgttggatggttacataatcagttataacattctggcagctaaattgctacaagagctttttcttgcaaaagcttaaaatacaagatttttaataatttactcagaacagtataacttctgacacacacaaatgcttgcctctttattcatatgttcgttacctactctgtacatgtatctgtcatttagctgtttctcaagatgatgttcagcagttggctgcttagaaatctttttcaagccagtttctaaagacatttgtttaatgttctaccatagaataatgcacaccattgtcaaagatttgattattgtgttttatagtaagtccatttgacatttatttccctttcagtttattttccttccttattttgttatacatacccttccctttctcccctgcctttcgtacattcattcctcttcctctaccctccagcacatctacttactggtgctgtgctgtgtgtcagaagataaaacaggtgtattattgtataatgaattttgtatacatgtttatgaaatggtgagatcaactaaaggaggcatgttcataacagtgtttattatcagcagctatgtcccaggaaaaaaaaatgggaggggcaaatggctacagttgtaaatggataacatcatttagaaagccgaatttactgttcatctgagcggttacctggagtattatatctatgcactggtgagcatctcctgattccacttacttttctccctgtgaacagtttaccggtgccatgctgaagagaaagacatctaagtgataacatgaatgaagtcttaaaatttaaagtatttttactgctatataaactaaagactacattgtgcatattttgttaacactgtctcttgttatgataaacactgaaatagcatgttaaacagttgcctatactttaatataatcagttggggaaaactggccttttctcccccactgtatgattgtttcttgaaaggtaaattgctaattttatacagtgtaattctgttcttcacaaaataggtttcattattctatatttaaactgttggtcagaaaatgatctgcaattcaagtaagtctgcattacttttttctttaaaaagtactttaacatgccttatttattatattagcaaatgagctaataacagatgaaattttcattttttgacagatataaccttgcataagtagtatttagggtgattttgatactatctttagagttttgcattggatattaaaaaatatattggcacaatgtattggaagaaaatgagtagtatctggtttaatttttaatatttagggacattttaaaaaatcaatgttttaattagactaaaaattctttatattttttatttactttttaaagaaacatctgtcaaagtaatattgattccaaactgatgtttgtgtgaatttacatgtctattttcatgaactaagaatagagtttctttgagttgaggagaaaaaaatatatatgtgggtccatttattaggttaaagttgacccattcagtgtaaaaataaccatagtgtgtgagctaaagaaaaaaaaaagtaaatttctcctttatattctaagaagctttaaaagaacaattcaggggttattgataactgctactctgtcggtcattgtctctatatgcagtaaaattttatggtccctttataggaatataaagaattcaaaacagtttttcaaaagatttttttccttggacataaaaaattttgatgctattctatttttgtttttattacagcttaactgtatgctgttaaactctaggatgtatctgaatctttccttttttcccccctcctccaaatatataaatctgtgctctcacatgtaatgtatttaatttttggaaaatttaatgctatatagtaaatcaagtgtgtgatttaaagtaatcagatcactttgattcttttaagttttcagaatttcttttttccacaggtaattttggagaaaataattaccaattaactgataataagcacgctgtcctctgctgtaaaaagtctgaatagatactgtgtatgtttttatgtccatgaacttgagctactcgtgtgcaattatgtgtatgggaatggagtagtgttcatgatttgtatctacatcatcatatggatgtatatttattaataaagtcattactttaaaacca

SEQ ID NO: 465073 - DNA, 3135 bp, Homo sapiens
gttggcggcgggagatcgggtctcgcgatgcgagtgagcgtgtgcgtgcgcggccctcgcgagctcgcgcacgccgcctctaacactacagggtggtagcggcctcttcgtactgcgtccggggcaggaccgtgcgcggcggccgcggcgggtgctgggagccagcgcctgcctcgccgccgccctcgctgcctgccactccgtcttggcccgttctccgcaccgtgcagaggcggcgggctggggagggagcggcgccagcacgaggttcccagccgctgggaagcccctagacgcgccgaggggccgggctacgagcggctgagaaaatgatgcatcctgttgccagcagtaatccagctttctgtgggcctggcaagccttcctgcctcaatgaagatgccatgagagctgctgatcagtttgacatatattcctcccagcaaagcaaatacagccacacagtcaaccacaaaccaatggtttgtcagaggcaagacccattaaatgaaacacacttgcagactacaagtggcagaagcatagaaataaaagatgaactaaagaaaaagaagaatctcaaccgatctggtaagcgtggccggccttcgggaaccaccaaatcagcaggataccggaccagcacaggcagacccctgggaaccaccaaagcagctggatttaagacaagtccaggcagacctttggggacaactaaagctgcgggatacaaagtcagcccaggcagacctccaggaaaaaagcagcaagccttcaggtgttccagtgatgcctgacacaattgagctggactttatgctgctctttacagtaagaggtgttgcattgtatgtggggactatgtgcactggcgtctaagacagtgacctcaacaatattagctttgcacaaaccatagagaacgatgttggatggttacataatcagttataacattctggcagctaaattgctacaagagctttttcttgcaaaagcttaaaatacaagatttttaataatttactcagaacagtataacttctgacacacacaaatgcttgcctctttattcatatgttcgttacctactctgtacatgtatctgtcatttagctgtttctcaagatgatgttcagcagttggctgcttagaaatctttttcaagccagtttctaaagacatttgtttaatgttctaccatagaataatgcacaccattgtcaaagatttgattattgtgttttatagtaagtccatttgacatttatttccctttcagtttattttccttccttattttgttatacatacccttccctttctcccctgcctttcgtacattcattcctcttcctctaccctccagcacatctacttactggtgctgtgctgtgtgtcagaagataaaacaggtgtattattgtataatgaattttgtatacatgtttatgaaatggtgagatcaactaaaggaggcatgttcataacagtgtttattatcagcagctatgtcccaggaaaaaaaaatgggaggggcaaatggctacagttgtaaatggataacatcatttagaaagccgaatttactgttcatctgagcggttacctggagtattatatctatgcactggtgagcatctcctgattccacttacttttctccctgtgaacagtttaccggtgccatgctgaagagaaagacatctaagtgataacatgaatgaagtcttaaaatttaaagtatttttactgctatataaactaaagactacattgtgcatattttgttaacactgtctcttgttatgataaacactgaaatagcatgttaaacagttgcctatactttaatataatcagttggggaaaactggccttttctcccccactgtatgattgtttcttgaaaggtaaattgctaattttatacagtgtaattctgttcttcacaaaataggtttcattattctatatttaaactgttggtcagaaaatgatctgcaattcaagtaagtctgcattacttttttctttaaaaagtactttaacatgccttatttattatattagcaaatgagctaataacagatgaaattttcattttttgacagatataaccttgcataagtagtatttagggtgattttgatactatctttagagttttgcattggatattaaaaaatatattggcacaatgtattggaagaaaatgagtagtatctggtttaatttttaatatttagggacattttaaaaaatcaatgttttaattagactaaaaattctttatattttttatttactttttaaagaaacatctgtcaaagtaatattgattccaaactgatgtttgtgtgaatttacatgtctattttcatgaactaagaatagagtttctttgagttgaggagaaaaaaatatatatgtgggtccatttattaggttaaagttgacccattcagtgtaaaaataaccatagtgtgtgagctaaagaaaaaaaaaagtaaatttctcctttatattctaagaagctttaaaagaacaattcaggggttattgataactgctactctgtcggtcattgtctctatatgcagtaaaattttatggtccctttataggaatataaagaattcaaaacagtttttcaaaagatttttttccttggacataaaaaattttgatgctattctatttttgtttttattacagcttaactgtatgctgttaaactctaggatgtatctgaatctttccttttttcccccctcctccaaatatataaatctgtgctctcacatgtaatgtatttaatttttggaaaatttaatgctatatagtaaatcaagtgtgtgatttaaagtaatcagatcactttgattcttttaagttttcagaatttcttttttccacaggtaattttggagaaaataattaccaattaactgataataagcacgctgtcctctgctgtaaaaagtctgaatagatactgtgtatgtttttatgtccatgaacttgagctactcgtgtgcaattatgtgtatgggaatggagtagtgttcatgatttgtatctacatcatcatatggatgtatatttattaataaagtcattactttaaaacca

SEQ ID NO: 465074 - DNA, 1991 bp, Homo sapiens
gttggcggcgggagatcgggtctcgcgatgcgagtgagcgtgtgcgtgcgcggccctcgcgagctcgcgcacgccgcctctaacactacagggtggtagcggcctcttcgtactgcgtccggggcaggaccgtgcgcggcggccgcggcgggtgctgggagccagcgcctgcctcgccgccgccctcgctgcctgccactccgtcttggcccgttctccgcaccgtgcagaggcggcgggctggggagggagcggcgccagcacgaggttcccagccgctgggaagcccctagacgcgccgaggggccgggctacgagcggctgaggtaggtaggggtgcgcgggctggtcagccggccgggagcggggtagggcggcggcgagaacgggcgcctcgctgaccggggagaagaggcctcctgccaaggggccctagtgtagccggagtgagaggaggggccccggacgtagcctgctcttccccggtgtggagccattacggggggacattcctcctgcggcggggggagggagccccctttcttttctttgagaggtcagaatccgcagtccgcccttcgcctttaaataaaagcctgccggctcgagatcggcgtcgcgatggagtgcccgtggacttctacgcttgcggaactccgagtggacggatagcggcttatgaattttgctttttagagggtacacaaccctttctctagggtggcgtgcatcttctgcaaacttgttattgccaatacgctaatagtcgctttcagcacacaacaggtaatacattctaaacgcctcgtgtcaaaataaggagagtccttatttgtgcaccgtggggcacagttaaggagcaggaagaagacaaaggaggccgttatttatgtgccgtcctattatcaaaactttccgtggtggggcagggtgcgtggctattggcctctgctgaatggactttcagagtgattgagaaaatgatgcatcctgttgccagcagtaatccagctttctgtgggcctggcaagccttcctgcctcaatgaagatgccatgagagctgctgatcagtttgacatatattcctcccagcaaagcaaatacagccacacagtcaaccacaaaccaatggtttgtcagaggcaagacccattaaatgaaacacacttgcagactacaagtggcagaagcatagaaataaaagatgaactaaagaaaaagaagaatctcaaccgatctggaaaaaagcagcaagccttcaggtgttccagtgatgcctgacacaattgagctggactttatgttaaagttgacccattcagtgtaaaaataaccatagtgtgtgagctaaagaaaaaaaaaagtaaatttctcctttatattctaagaagctttaaaagaacaattcaggggttattgataactgctactctgtcggtcattgtctctatatgcagtaaaattttatggtccctttataggaatataaagaattcaaaacagtttttcaaaagatttttttccttggacataaaaaattttgatgctattctatttttgtttttattacagcttaactgtatgctgttaaactctaggatgtatctgaatctttccttttttcccccctcctccaaatatataaatctgtgctctcacatgtaatgtatttaatttttggaaaatttaatgctatatagtaaatcaagtgtgtgatttaaagtaatcagatcactttgattcttttaagttttcagaatttcttttttccacaggtaattttggagaaaataattaccaattaactgataataagcacgctgtcctctgctgtaaaaagtctgaatagatactgtgtatgtttttatgtccatgaacttgagctactcgtgtgcaattatgtgtatgggaatggagtagtgttcatgatttgtatctacatcatcatatggatgtatatttattaataaagtcattactttaaaacca

SEQ ID NO: 465075 - DNA, 1533 bp, Homo sapiens
aagaagcagtcttggacctttcatcttcagagaatgtcacgaggaacagagataagccacccctgctgagccctgcccaatctgcagattcgcactggggaaactctttttctccttactcctggagattctgatttcactgtgcgacctgatggggagttgccaggagaaggactgcgtcggcctttggaagctggtgaagccgcacttgcctggacctctcctggagactcagctgctaagtgattcatttcagatccatctcctttaactgggattggttttaccacctgaatcaaagtattccaatattttgattacttaaaaatataaaaggaataccctttgccatctcaatatggcttcaatgaagaatttcctaccaccattctacggcagttagctgctctcccgctgcatggtaaatattaactacaatatatcataaaattaagtatatgtttaagtatctgcttccctctccacattgtgagctcttccaggacaagttccctcttattcattgttctatcacactgcccagtgacctgacatactgcccctttctgggaagcgaagggtctgcccagtcctaagggtggtggctaatgcttaaggtgctttatacatctgaatccatcccagcttccacagctgcctggtccaggaatgttccttggtccaatgaccttctgtactgaacggtattgtacgcctgagtcagctctctccctgagagtttgaaagtaaaacacacaaatagtgttactgcaggaagagtggcacttaacacggaaacagagcaaggtaataagtagaaacactgagacagaaataagggagaagagagagaaattagaagaaagacagggatgcagaagcaacaaaagtcaacctaacaagttgtacacgggtcccctgataagctgttagatgatgacagccacttttataccacccctggataatgaatgactagttctccacgggccaagtgtacatgctgcaatggaggaaacttcttggtggattctttaatttggaatgaaataaattttaacccatctctgttccctgcaacctcaaatagtctgactaaaacactacatacagaagaagcaaaaaataaaaataaaaccctagtttatctagttttccttaggcatatttcctggtgtcagtactctgtagggttcacctcattaactgaagctctagggtccccttggagaaacgatcccaggtgctgccttcagcctcccccactggccacgtcccctaaaactcagtgtgaagaaatcttcctcagtcctcactcagcaaagagcactgctataatggcctcttatctgtttcccactcttgactttgagatccaacaaagcctttgtcttactcatctttcatccagactcccaaatgcccagtatttgtacataggaagctgtgaggaagcaatgcctttccaatatgaacttctacgccagaaagatctccaagatgtaaataagcttcactgaggcctttgtgtat

SEQ ID NO: 465076 - DNA, 622 bp, Homo sapiens
aagaagcagtcttggacctttcatcttcagagaatgtcacgaggaacagagataagccacccctgctgagccctgcccaatctgcagattcgcactggggaaactctttttctccttactcctggagattctgatttcactgtgcgacctgatggggagttgccaggagaaggactgcgtcggcctttggaagctggtgaagccgcacttgcctggacctctcctggagactcagctgctaagtgattcatttcagatccatctcctttaactgggattggttttaccacctgaatcaaagtattccaatattttgattacttaaaaatataaaaggaataccctttgccatctcaatatggcttcaatgaagaatttcctaccaccattctacggcagttagctgctctcccgctgcatgaaggtaacaatgttgactagcaacatctagaatatgaagactgctgtacaaggctgcttctgctggtattgagggagagaagaagctctagccagaagacaaaggaggcttcaactgtttaatattagttcctttaaaaaatacacatccaactgcactgcagcaagtacaataaaatattaacatttattaaatacaggt

SEQ ID NO: 465077 - DNA, 1912 bp, Homo sapiens
ccggcgtcggtcgagagcgcaggcccggcagagccgcaggcgctaggccgcccgacacagcccgcgcgtccccgcggccggtggcgcctcgagcggccacgtgcacgcgcgcactccgcctcaccagccttcttgcgccggagacgaacccgctgcctggctggagctctctgggcccttcggcctcgggagcaacgcgttcccggcgacttctgacacagccactgtttctgcagaacccagtagatttcctacggtaagaaagagaaagaaggaaacaaattcacttccaagtatgaatttctaaggacagtctgttaattattcatgtcagaactggctgtcagtctgattaatgttacctagattcaagatgaatagcgatcaagttacactggttggtcaagtgtttgagtcatatgtttcggaataccataagaatgatattcttctaatcttgaaggaaagggatgaagatgctcattacccagttgtggttaatgccatgactctgtttgagaccaacatggaaatcggggaatatttcaacatgttccccagtgaagtgcttacaatttttgatagtgcactgcgaaggtcagccttgacaattctccagtccctttctcagcctgaggctgtttccatgaaacagaatcttcatgccaggatatcaggtttgcctgtctgtcctgagctggtgagggaacacatacctaaaaccaaggatgtgggacactttttatctgtcactgggacagtgattcgaacaagtctggtgaaggttctggagtttgagcgggattacatgtgtaacaaatgcaagcatgtgtttgtgatcaaggctgactttgagcagtattacaccttttgccggccatcctcgtgtcccagcttggagagctgtgattcctctaaattcacttgcctctcaggcttgtcttcgtctccaaccaggtgtagagattaccaggaaatcaaaattcaggaacaggttcaaaggctatctgttggaagtattccacgatctatgaaggttattctggaagatgacttagtggatagttgcaaatctgagatgggtctgactggcaatggctacagtagtaaagatgccgcagatgatataggggcacagagagactggattgtagaaaacaagatgtgcgctgtgaagtggagatagtcctgaaagcaaattacatccaagtaaataatgagcagtcctcagggatcatcatggatgaggaggtccaaaaggaattcgaagatttttgggaatactataagagcgatccctttgcaggaaggaatgtaatattggctagcttgtgccctcaagtgtttggaatgtatctagtaaagcttgctgtggccatggtgctggctggtgggattcaaaggactgatgctacaggaacacgggtcagaggagaatctcatcttttattggttggggatcctggcacagggaaatctcagttcctcaaatatgcagcaaagattacaccaagatctgtgctgaccacaggaattggatctactagtgcaggtctgacggtaactgctgtaaaagactcaggagaatggaatttggaggctggggcattagttcttgcagatgcgggctttgctgtattgatgagttcaatagcctcaaagagcatgataggaccagtatccatgaagcaatggagcaacaaacataagtgttgctaaggctggcctcgtgtgcaagctgaacacaaggaccaccatcctggcagcaacgaaccccaaaggccagtacgacccccaggagtccgtgtctgtgaacattgccctcggcagcccactcttaagtcgatttgacctgatcctggttttgcttgataccaagaatgaagactgggatcgtatcatttcctccttt

SEQ ID NO: 465078 - DNA, 1778 bp, Homo sapiens
ccggcgtcggtcgagagcgcaggcccggcagagccgcaggcgctaggccgcccgacacagcccgcgcgtccccgcggccggtggcgcctcgagcggccacgtgcacgcgcgcactccgcctcaccagccttcttgcgccggagacgaacccgctgcctggctggagctctctgggcccttcggcctcgggagcaacgcgttcccggcgacttctgacacagccattacctagattcaagatgaatagcgatcaagttacactggttggtcaagtgtttgagtcatatgtttcggaataccataagaatgatattcttctaatcttgaaggaaagggatgaagatgctcattacccagttgtggttaatgccatgactctgtttgagaccaacatggaaatcggggaatatttcaacatgttccccagtgaagtgcttacaatttttgatagtgcactgcgaaggtcagccttgacaattctccagtccctttctcagcctgaggctgtttccatgaaacagaatcttcatgccaggatatcaggtttgcctgtctgtcctgagctggtgagggaacacatacctaaaaccaaggatgtgggacactttttatctgtcactgggacagtgattcgaacaagtctggtgaaggttctggagtttgagcgggattacatgtgtaacaaatgcaagcatgtgtttgtgatcaaggctgactttgagcagtattacaccttttgccggccatcctcgtgtcccagcttggagagctgtgattcctctaaattcacttgcctctcaggcttgtcttcgtctccaaccaggtgtagagattaccaggaaatcaaaattcaggaacaggttcaaaggctatctgttggaagtattccacgatctatgaaggttattctggaagatgacttagtggatagttgcaaatctgagatgggtctgactggcaatggctacagtagtaaagatgccgcagatgatataggggcacagagagactggattgtagaaaacaagatgtgcgctgtgaagtggagatagtcctgaaagcaaattacatccaagtaaataatgagcagtcctcagggatcatcatggatgaggaggtccaaaaggaattcgaagatttttgggaatactataagagcgatccctttgcaggaaggaatgtaatattggctagcttgtgccctcaagtgtttggaatgtatctagtaaagcttgctgtggccatggtgctggctggtgggattcaaaggactgatgctacaggaacacgggtcagaggagaatctcatcttttattggttggggatcctggcacagggaaatctcagttcctcaaatatgcagcaaagattacaccaagatctgtgctgaccacaggaattggatctactagtgcaggtctgacggtaactgctgtaaaagactcaggagaatggaatttggaggctggggcattagttcttgcagatgcgggctttgctgtattgatgagttcaatagcctcaaagagcatgataggaccagtatccatgaagcaatggagcaacaaacataagtgttgctaaggctggcctcgtgtgcaagctgaacacaaggaccaccatcctggcagcaacgaaccccaaaggccagtacgacccccaggagtccgtgtctgtgaacattgccctcggcagcccactcttaagtcgatttgacctgatcctggttttgcttgataccaagaatgaagactgggatcgtatcatttcctccttt

SEQ ID NO: 465079 - DNA, 1218 bp, Homo sapiens
tcctgtgactggaaaaacatcacctctcatccctgaatctcagttgctgagagcgcaaactaagggcaggggcgggggaggcctggagtagggtggtgatcagctgctaagatctctcccagaatgaatgctgggattctcctattctttgtttcccaaggccgttgaattcatccccatgcaagctaaccatggacttgtcattgttagaggtcagaggaagcagcctctggcggtgtggagccttcatgtgactgctgtgttaatggtaacccatgtggattttatattaaatttccttccacataaccaagttataccaactatcaccctgagtacagaacaggaatttggtggatctcagctgagtactactgtcctgaatctgactcacatgccaatcaaacaagaagccccttccaccccttataccataccaccaagacaggtgctggaagacagagccctgcagtggctgctttttcactcagtgtctcctcctagatctgtacactcagaaaacaccttcctcattgcctacctcttcctcaaaacaaacccatccacctgttctaatgggctctccaaggagaaggcagcaatccactcacacaggctgctaaagactgactgtgttaaggattctaatgggcaagtctctaaaacactacagaggtgatattagttgacagaagcttgttggaaaaggatttagaggctaacaagggctttcaaaatcacacagctttggatccaagaaagggcttaagggaagagttggttgtggaaaaaatatacagaggagccctgtggtgacacaaggcatggtggggtggatgggcagggatgggcattattgcaggtatcttgaaggagagttgagcccagcttttcaattcatacagatcctttctctgaagaaccccttcctgatattgtcactttaacacatctctgtggttttattttgaaatttttaaaggtacagtcatgtgccgcataatgacattcagtcaatgacagactgcatatatgaggtggtcctgtaaggtgataatggagctgaaaaattcctactactgaacgacatcatagccattgtaacatcatagcacaaccaatcaccttttctatatttaggtatgtttatttagaactgtattagtccattttcgtgatgctgataaagataaaaccaagactgggaagaaaaagagg

SEQ ID NO: 465080 - DNA, 1289 bp, Homo sapiens
agtgagatcatgcggtatgaaacagctcttttcaaagcctccagtgttctgttattcagcctgatgggtgatagtcattccttccatccttcgcctgtcattaggattccatgcagctgacggtatcttcctcctcggagcacctgtcttgcttggttcctgggacgccaccctctcctggctctcttcctactttgtggccgctccttgcctttccttgctagattttctttatctttctggcctccaaatactggcccatgaccagggctcagtgttggcccctctttttttgtggctctacccaccttacctgtatgatttcttttactttcaaagctttacgtatctggagacttgtgactttcatatgtacttttgcaacttggatctgtcttgtcctttctacatctatgtatgtccagctcctgcaggcatttcacagagaaatcagacaacttttgagattaaccccctcagcagttttagggatgaattggcaagacaggcttttgaggcaggatctttctggcactttacttcactctctttggcaaaaagaaggtctgtggctcgtgtgccggaagtagtctgcttcttggttgggagaagaaggggcttgggttcttggagcaagaatcagccttccaagtgtgagatgccagtgcagggccatgtcattgaaaagctgatgatgatcttctcaagttgttgctttaaccacagtaagacaaataagaccatccctggcccaaggaggataggtgaagggtgggtggacaggtatctacctgggaaattagccattgttaatgttacagcaaaatgccctattacagatgctaggaggtggggaaatgccaactttgcctcttccgggcagtgctgtggtgatgcagccttgggccccgccagcagcggcttgctggctggcgcggggtcctctcccgggtccgctgcgttgcgcgggcaggacagtcagaaagatcttcctgactgccatgtggagaatggattggaagggaccagactggagctaaggatgctcttggaggattttgtgtatggacaacacagccatggagaaaaaggctcgaagaacactggggccatggaaggagattaaatattaatttcatttcacagattttgaaattttaaaacatacattgtaattcagaaggaaggagggaagaacttgtccattaaatgttggtactcctgaaggttctgttttaggctctatcgtcctttgtgatgcctttttatgataaaactcagtcatccac

SEQ ID NO: 465081 - DNA, 1185 bp, Homo sapiens
  misc_feature (1)..(2): n is a, c, g, or t
  misc_feature (12)..(15): n is a, c, g, or t
nnccaacatccnnnnctgagaggatgagccatgccctggtgctgcgtttcccagccagagcccagccccctttcatccaggtgaaaaactctgtggagccatcagactcccaagcttatctgaaaccatatctttgctcatcttctttcccagccccagccacttccttcctcaataaatctctcatacaagtattactgactgaagctctccttctagtgaatctgttccaggcccagtgtgagagaataaaggcttacaaaaggattataaaaatacagagaagaggaaagagggaagaacagaactttgagaaacacatgatgtacttggtgagagaaggagtaggaaaagaaacagaaggagtttcaaagtcgctggagacagaggagaaagaagaagggaaagaagagaaaactggtatggatctatagacatttttagataaaagagaaaaaggttgagaagtttcatatcagagacaccttatcatctcagtgtagttactattgcagagtcagaggctgtgtaaacaagacaaagttggaaaagccaaggagtggattccttaggactcagagacagatagaaaggttatctggagaaaaagcaatggaattgaagagaaaaatgcaatgcacaggatgagtcagaaggggagggatcagacataaaactaactgcaaagttgtcactatagtttcaataagaaataatgggagcatgaactttgcagaaaagataaaaatggaatgaagacagaactctgtgagagaaagaacatagtaactattctaatgatgttgggatcctcagtcttccagaggatggcaatgggatttgctaatacaggatgggagagagaatgatgtgtgagtgtctgtgatgaagatgtcacacttacagcagaaactgagaaacagtggataacttctgaaatctttgggtataatcatctatcttgtgtgatctaataatttaagaaagaagtgattatgctgttgaaatcgtgaagattttacaggtaacacttcctttccttcctttgttttgataacagatggagatatttacaattttaataaaatctagaatggggaggcaggcaagtcaatgccaatcttcccattctatttggtgataacttttttgtagtgtgaagagtgtgtggtatttttactagta

SEQ ID NO: 465082 - DNA, 846 bp, Homo sapiens
ggcgtcctcgtggaagtgacatcgtctttaaaccctgcgtggcaatccctgacgcaccgccgtgatgcccagggaagacagggcgacctggaagtccaactacttccttaagatcatccaactattggatgattatccgaaatgtttcattgtgggagcagacaatgtgggctccaagcagatgcagcagatccgcatgtcccttcgcgggaaggctgtggtgctgatgggcaagaacaccatgatgcgcaaggccatccgagggcacctggaaaacaacccagctctggagaaactgctgcctcatatccgggggaatgtgggctttgtgttcaccaaggaggacctcactgagatcagggacatgttgctggccaataaggtgccagctgctgcccgtgctggtgccattgccccatgtgaagtcactgtgccagcccagaacactggtctcgggcccgagaagacctcctttttccaggctttaggtatcaccactaaaatctccaggggcaccattgaaatcctgagtgatgtgcagctgatcaagactggagacaaagtgggagccagcgaagccacgctgctgaacatgctcaacatctcccccttctcctttgggctggtcatccagcaggtgttcgacaatggcagcatctacaaccctgaagtgcttgatatcacagaggaaactctgcattctcgcttcctggagggtgtccgcaatgttgccagtgtctgtctgcagattggctacccaactgttgcatcagtaccccattctatcatcaacgggtacaaacgagtcctggccttgtctgcaagaaacgagtcgtgggcaagaaa

SEQ ID NO: 465083 - DNA, 1312 bp, Homo sapiens
ggcgtcctcgtggaagtgacatcgtctttaaaccctgcgtggcaatccctgacgcaccgccgtgatgcccagggaagacagggcgacctggaagtccaactacttccttaagatcatccaactattggatgattatccgaaatgtttcattgtgggagcagacaatgtgggctccaagcagatgcagcagatccgcatgtcccttcgcgggaaggctgtggtgctgatgggcaagaacaccatgatgcgcaaggccatccgagggcacctggaaaacaacccagctctggagaaactgctgcctcatatccgggggaatgtgggctttgtgttcaccaaggaggacctcactgagatcagggacatgttgctggccaataaggtgccagctgctgcccgtgctggtgccattgccccatgtgaagtcactgtgccagcccagaacactggtctcgggcccgagaagacctcctttttccaggctttaggtatcaccactaaaatctccaggggcaccattgaaatcctgagtgatgtgcagctgatcaagactggagacaaagtgggagccagcgaagccacgctgctgaacatgctcaacatctcccccttctcctttgggctggtcatccagcaggtgttcgacaatggcagcatctacaaccctgaagtgcttgatatcacagaggaaactctgcattctcgcttcctggagggtgtccgcaatgttgccagtgtctgtctgcagattggctacccaactgttgcatcagtaccccattctatcatcaacgggtacaaacgagtcctggccttgtctgtggagacggattacaccttcccacttgctgaaaaggtcaaggccttcttggctgatccatctgcctttgtggctgctgcccctgtggctgctgccaccacagctgctcctgctgctgctgcagccccagctaaggttgaagccaaggaagagtcggaggagtcggacgaggatatgggatttggtctctttgactaatcaccaaaaagcaaccaacttagccagctttatttgcaaaacaaggaaataaaggcttacttctttaaaaaaaaaaaaaaaagaatttttcaatccatttacaacttggggaagttttattgtgatggtgtcacaattttatttttatttcaaagtgctttgccaatagtcacaatggcatgtaatattaataaattactataacttttcaactttgaatataactttgaagtagaatcaaaatatcatagtagcgagagggacagaagcttatgaaaagaatcttaaacttaa

SEQ ID NO: 465084 - DNA, 1329 bp, Homo sapiens
ctcctgacctcaggtgatctgcccacctcggcctcccaaagtgctgagattacaggcatgtgccaccgcgcctggccaaaggatttaatgaattaatggatgtacagtgctggggctgttattctagggcctgcattgagactcacattttgccatcaaaagccttttaagaggtggaggttgcggtgagctgacatggtgccactgcactccggcctgagtgacagagtgagactctgtctcacaaaaaaaataatgccctttaaataatgaataatagtgatagaaaatgtcatttcttggacaaatgaaaaattgaaattaatgtatataattagatattattagctactcttaggtagcttcatttgttgaaagtttgacaagtgaatgaagttcacatctggaaatcgttgaacatttttcgttcatggaactcaatggctacgttagtcgtttatgcttttcactgttgtggtaggggctttggaagtaaatgccatcaacaatggatacagaagacctggatttggaataagggcaaaatttatttgactggggctgaattgctctgccaggagcatttggtatgagatgaaatggcctctcttgagactgagctgccaacctggcaattattgtctgctaagggttctctttattcacccttacttggacttccttttcctgtagggaatctcacgtaaaactgaaattcttccctcccccagggttgtccgcaatgttgccagtgtctgtctgcagattggctacccaactgttgcatcagtaccccattctatcatcaacgggtacaaacgagtcctggccttgtctgtggagacggattacaccttcccacttgctgaaaaggtcaaggccttcttggctgatccatctgcctttgtggctgctgcccctgtggctgctgccaccacagctgctcctgctgctgctgcagccccagctaaggttgaagccaaggaagagtcggaggagtcggacgaggatatgggatttggtctctttgactaatcaccaaaaagcaaccaacttagccagctttatttgcaaaacaaggaaataaaggcttacttctttaaaaaaaaaaaaaaaagaatttttcaatccatttacaacttggggaagttttattgtgatggtgtcacaattttatttttatttcaaagtgctttgccaatagtcacaatggcatgtaatattaataaattactataacttttcaactttgaatataactttgaagtagaatcaaaatatcatagtagcgagagggacagaagcttatgaaaagaatcttaaacttaa

SEQ ID NO: 465085 - DNA, 777 bp, Homo sapiens
gctgcgtagtattccatggtgtatatgtgccacattttcttaatccagtctatcattgatggacatttggagaaaacaaccaccagagggccttatgcctggagaaatggcagagaaaaccttactggccttaccttcagtgtgcccccaccccatgggaaagaggaggttaggattgcatcatacctggtggaagtttttgtatctttaagaattggctacccaactgttgcatcagtaccccattctatcatcaacgggtacaaacgagtcctggccttgtctgtggagacggattacaccttcccacttgctgaaaaggtcaaggccttcttggctgatccatctgcctttgtggctgctgcccctgtggctgctgccaccacagctgctcctgctgctgctgcagccccagctaaggttgaagccaaggaagagtcggaggagtcggacgaggatatgggatttggtctctttgactaatcaccaaaaagcaaccaacttagccagctttatttgcaaaacaaggaaataaaggcttacttctttaaaaaaaaaaaaaaaagaatttttcaatccatttacaacttggggaagttttattgtgatggtgtcacaattttatttttatttcaaagtgctttgccaatagtcacaatggcatgtaatattaataaattactataacttttcaactttgaatataactttgaagtagaatcaaaatatcatagtagcgagagggacagaagcttatgaaaagaatcttaaacttaa

SEQ ID NO: 465086 - DNA, 537 bp, Homo sapiens
tggggactttggggtgcccatcgccatcctcatcatggtgcttgcgtggagacggattacaccttcccacttgctgaaaaggtcaaggccttcttggctgatccatctgcctttgtggctgctgcccctgtggctgctgccaccacagctgctcctgctgctgctgcagccccagctaaggttgaagccaaggaagagtcggaggagtcggacgaggatatgggatttggtctctttgactaatcaccaaaaagcaaccaacttagccagctttatttgcaaaacaaggaaataaaggcttacttctttaaaaaaaaaaaaaaaagaatttttcaatccatttacaacttggggaagttttattgtgatggtgtcacaattttatttttatttcaaagtgctttgccaatagtcacaatggcatgtaatattaataaattactataacttttcaactttgaatataactttgaagtagaatcaaaatatcatagtagcgagagggacagaagcttatgaaaagaatcttaaacttaa

SEQ ID NO: 465087 - DNA, 1697 bp, Homo sapiens
ccggagtccgagccgcgggctgacttccgctcgggaaagtggctccaagagcccgccacaggggacgccagggactcgcggcaggctctgcgggccaggatgagttctaagcacagacttggacatccctgacatccctggactccattgtgagcccctgtcacatagccccagacacctgacccaacaggacccgctcagtgaggccattgttgagaaactgatccagtccatccagaaggttttcaatggtgagctaaagggtgaacttgaaaagctgaaattcctaggagatctgtcttctctcagccaagctttaccttatgatgaaaccgcaaaatcattcattcacagccacatagcagacattgtgcataccttaaatgtactggtacaagaggaacgcccgcattctctgtccagttccatgcgccaggaggtctttgtcaccatcgctgatctcagttaccaagatgtccatttgctgttgggctctgaagatcgagctgagttgttcagtcttaccatcaagagtataatcactctgccctctgtaaggacccttacccagatacaggaaatcatgcccaatgggacctgcaacacagagtgtctttacaggcagacgtttcaggcattctctgagatgctccagagtttggtggtaaaagacccacatttggaaaatcttgacaccattattaagcacttggtcccctggttacagtcagtcaaagaccatgagcgggaacgggccacggccagcatggctcaagttctgaagtgcctatccaaacatctcaacttgaagcttccactgcgattccaaagacttggacacctagtggctctgatggcactgctctgtggggacccacaggaaaaggtggctgaggaggctgcagagggcattcactccctgctgcatatcaccctgaggctgaagtatatcactcatgacaagaaagatcagcaaaacttgaaaagagcattgacaaaatgtcgagaattcctggagctccacagctctgccgctaaatgcttctacaactgtcccttcagaattgcccaggtctttgaaggttttcttgattcaaatgagctctgccagtttataatgactacatttgataccctgaaaaccctgaaacatccctgcatccagcgatcagcaggagaattactgctaactttggcgaaaaatacagagtcccaatttgagaaggtgccagaaattatgggagttatctgtgcccagttatccataatcagccagcctagagtccgccaacaaatcataaataccatgtttctcacactgaaattcatgaaccattggcttaaaggctgtgcgctttctaaattcagatgcattttcagcacacttaaaatgtgtggcaaactaaaagcattttgcaacacttctctcacaataaacagcttctcaaagtacttcatttactccctcaggaatccaaagaaaataaccgaggtgataagcggaaaagaggtatgaggaaggggctttattgacccaaccagaaacagaaactaagaacccatgactgtcatctgtcccttggaaacatccctggtttaatatgtttaaaacattccttccctcatcctctaaaaaatatgtatcatcatagttaaagagaaatgcaaacttgtgggaaaaaaacctcaaatatcgt

SEQ ID NO: 465088 - DNA, 1879 bp, Homo sapiens
gtctttctgctgcccggcccattttaaaggaacaggaagggtctcgtcgggaggggatagcttagaagggatttttttttcctctttagaaaattgtggcagtttctggccgggcgcagtggctcacgcctgtaatcccagaactttgggaggccgaggcgggcggattacctgaggatctgtagtcaggaagaagtagtgatcccctgtgcctatgacagtgattcagaaagtgtggatttggagctgagcaacttagagattattaaaaaaggctcaagtagcattgaactgacagacttggacatccctgacatccctggactccattgtgagcccctgtcacatagccccagacacctgacccaacaggacccgctcagtgaggccattgttgagaaactgatccagtccatccagaaggttttcaatggtgagctaaagggtgaacttgaaaagctgaaattcctaggagatctgtcttctctcagccaagctttaccttatgatgaaaccgcaaaatcattcattcacagccacatagcagacattgtgcataccttaaatgtactggtacaagaggaacgcccgcattctctgtccagttccatgcgccaggaggtctttgtcaccatcgctgatctcagttaccaagatgtccatttgctgttgggctctgaagatcgagctgagttgttcagtcttaccatcaagagtataatcactctgccctctgtaaggacccttacccagatacaggaaatcatgcccaatgggacctgcaacacagagtgtctttacaggcagacgtttcaggcattctctgagatgctccagagtttggtggtaaaagacccacatttggaaaatcttgacaccattattaagcacttggtcccctggttacagtcagtcaaagaccatgagcgggaacgggccacggccagcatggctcaagttctgaagtgcctatccaaacatctcaacttgaagcttccactgcgattccaaagacttggacacctagtggctctgatggcactgctctgtggggacccacaggaaaaggtggctgaggaggctgcagagggcattcactccctgctgcatatcaccctgaggctgaagtatatcactcatgacaagaaagatcagcaaaacttgaaaagagcattgacaaaatgtcgagaattcctggagctccacagctctgccgctaaatgcttctacaactgtcccttcagaattgcccaggtctttgaaggttttcttgattcaaatgagctctgccagtttataatgactacatttgataccctgaaaaccctgaaacatccctgcatccagcgatcagcaggagaattactgctaactttggcgaaaaatacagagtcccaatttgagaaggtgccagaaattatgggagttatctgtgcccagttatccataatcagccagcctagagtccgccaacaaatcataaataccatgtttctcacactgaaattcatgaaccattggcttaaaggctgtgcgctttctaaattcagatgcattttcagcacacttaaaatgtgtggcaaactaaaagcattttgcaacacttctctcacaataaacagcttctcaaagtacttcatttactccctcaggaatccaaagaaaataaccgaggtgataagcggaaaagaggtatgaggaaggggctttattgacccaaccagaaacagaaactaagaacccatgactgtcatctgtcccttggaaacatccctggtttaatatgtttaaaacattccttccctcatcctctaaaaaatatgtatcatcatagttaaagagaaatgcaaacttgtgggaaaaaaacctcaaatatcgt

SEQ ID NO: 465089 - DNA, 1726 bp, Homo sapiens
gtctttctgctgcccggcccattttaaaggaacaggaagggtctcgtcgggaggggatagcttagaagggatttttttttcctctttagaaaattgtggcagtttctggccgggcgcagtggctcacgcctgtaatcccagaactttgggaggccgaggcgggcggattacctgaggatctgtagtcaggaagaagtagtgatcccctgtgcctatgacagtgattcagaaagtgtggatttggagctgagcaacttagagattattaaaaaaggctcaagtagcattgaactgacagacttggacatccctgacatccctggactccattgtgagcccctgtcacatagccccagacacctgacccaacaggacccgctcagtgaggccattgttgagaaactgatccagtccatccagaaggttttcaatggtgagctaaagggtgaacttgaaaagctgaaattcctaggagatctgtcttctctcagccaagctttaccttatgatgaaaccgcaaaatcattcattcacagccacatagcagacattgtgcataccttaaatgtactggtacaagaggaacgcccgcattctctgtccagttccatgcgccaggaggtctttgtcaccatcgctgatctcagttaccaagatgtccatttgctgttgggctctgaagatcgagctgagttgttcagtcttaccatcaagagtataatcactctgccctctgtaaggacccttacccagatacaggaaatcatgcccaatgggacctgcaacacagagtgtctttacaggcagacgtttcaggcattctctgagatgctccagagtttggtggtaaaagacccacatttggaaaatcttgacaccattattaagcacttggtcccctggttacagtcagtcaaagaccatgagcgggaacgggccacggccagcatggctcaagttctgaagtgcctatccaaacatctcaacttgaagcttccactgcgattccaaagacttggacacctagtggctctgatggcactgctctgtggggacccacaggaaaaggtggctgaggaggctgcagagggcattcactccctgctgcatatcaccctgaggctgaagtatatcactcatgacaagaaagatcagcaaaacttgaaaagagcattgacaaaatgtcgagaattcctggagctccacagctctgccgctaaatgcttctacaactgtcccttcagaattgcccaggtgccagaaattatgggagttatctgtgcccagttatccataatcagccagcctagagtccgccaacaaatcataaataccatgtttctcacactgaaattcatgaaccattggcttaaaggctgtgcgctttctaaattcagatgcattttcagcacacttaaaatgtgtggcaaactaaaagcattttgcaacacttctctcacaataaacagcttctcaaagtacttcatttactccctcaggaatccaaagaaaataaccgaggtgataagcggaaaagaggtatgaggaaggggctttattgacccaaccagaaacagaaactaagaacccatgactgtcatctgtcccttggaaacatccctggtttaatatgtttaaaacattccttccctcatcctctaaaaaatatgtatcatcatagttaaagagaaatgcaaacttgtgggaaaaaaacctcaaatatcgt

SEQ ID NO: 465090 - DNA, 1256 bp, Homo sapiens
agcggagcggtcggcgggacggctcccggctgcagtctgcccgcccgccccgcgcgggggccgagtcgcgaagcgcgcctgcgacccggcgtccgggcgcgctggagaggacgcgaggagccatgaggcgccagcctgcgaaggtggcggcgctgctgctcgggctgctcttggagtgcacagaagccaaaaagcattgctggtatttcgaaggactctatccaacctattatatatgccgctcctacgaggactgctgtggctccaggtgctgtgtgcgggccctctccatacagaggaccggggatgaaccctgtcgggaattccatggcaatggctttccaggtcccacccaactcaccccaggggagtgtggcctgcccgccccctccagcctactgcaacacgcctccgcccccgtacgaacaggtagtgaaggccaagtagtggggtgcccacgtgcaagaggagagacaggagagggcctttccctggcctttctgtcttcgttgatgttcacttccaggaacggtctcgtgggctgctaagggcagttcctctgatatcctcacagcaagcacagctctctttcaggctttccatggagtacaatatatgaactcacactttgtctcctctgttgcttctgtttctgacgcagtctgtgctctcacatggtagtgtggtgacagtccccgagggctgacgtccttacggtggcgtgaccagatctacaggagagagactgagaggaagaaggcagtgctggaggtgcaggtggcatgtagaggggccaggccgagcatcccaggcaagcatccttctgcccgggtattaataggaagccccacgccgggcggctcagccgatgaagcagcagccgactgagctgagcccagcaggtcatctgctccagcctgtcctctcgtcagccttcctcttccagaagctgttggagagacattcaggagagagcaagccccttgtcatgtttctgtctctgttcatatcctaaagatagacttctcctgcaccgccagggaagggtagcacgtgcagctctcaccgcaggatggggcctagaatcaggcttgccttggaggcctgacagtgatctgacatccactaagcaaatttatttaaattcatgggaaatcacttcctgccccaaactgagacattgcattttgtgagctcttggtctgatttggagaaaggactgttacccattttttggtgtgtttatggaagtgcat

SEQ ID NO: 465091 - DNA, 1869 bp, Homo sapiens
gagtttgttgctcccaccgagttctgaagaacgccagcagctcgctgcttaaaattaaaccacagggttccatgatgggtcaacttgatgggaaagtcatcatcctgacagccgctgctcaggggattggccaagcagctgccttagcttttgtaagagaaggtgccaaagtcatagccacagacattaatgtgtccaaacttcaggaactggaaaagtacctgggtattcaaactcgtgtccttgatgtcacaaagaagaaacaaattgatcagttcgccaatgaagttgagagacttgatgttctctttaatgttgctggttttgtccatcatggaactgtcctggattgtgaggagaaagactgggacttctcgatgaatctcaatgtgcgcagcacgtacctgatgatcaaggcattccttcctaaaatgcttgctcaaaaatctggcaatattatcaccatgttttctgtggtttccagcatcaaaggagttgtgaacagatgtgtgtacagcacaaccaaggcagccgtgattggcctcacaaaatctgtggctgcagatttcatccagcagggcatcaggtgcaactgtgtgtgcccaggaacggttgatacgccatctctacaagaaagaatacaagccagaggaaatcctgaagaggcacggaatgatttcctgaagagacaaaagatgggacgatttgcaactgcagaagaaatagccatgctctgcgtgtatgtggcttctgatgaatctgcttatgtaactgattctgcaccctgccccacaacttgtaaacgtcccaaaaggaaaaattgatagggaatgtaggcctcactttaatgcattctccctctcttgggatcttgacctgtcaagtcctgactgccttgatttccctttgctgcctttaaaaatgtctgttttctagatgttcttagcaggagagttagtctgatactagctactcaatcttaatcaaaagcatgagtggtaattactttttaataggctacaagcaatacaaagttaagaactaattggatttattaaattatttggttaattaaactaataactaccttgaatttccacagcactgctcttccaatgatttcaaagtattttagcacattaacaaaggaccattactagtttcctccagctctaacttataaattttaaattgatgtaacagaagaaaataacttaagttcataggcatgaggtatccagaaaaattagataaaaagaggtactaaatatgctgattgccaaaatcatcagaatgatttgaaatcccaagaaatagactccccctaagtacactatgattcatattaagcttgtagttgcccatatcctctggtgttctagagggatatggaaagtatgtagcatgtgcttagtgctggtttggttacatcatcaaacagagtaagcagattggtatcaaggcttctcagaaagtttttagaaacataattatagtaaaataattgtctgtaagacttatgagacaacaaatactgtcattaaacattggtttcttatgtaagtggaatcgtaacagtattacaaaccatattctgtttatccttttaggtttactgtagcagtagcctttgaagtcacatgttattctatggagatttttctatgccttctctccagaattggcatgaaacatggattctttacaaatttcttacaaattcattccagagaggcatgttcagcttataaaagaaatttaaagatttttctctaaactgaatggggagaaaacttactaaatatgcaaggaggagcctgtagattttaactctaaatcacagcaaatagttacaaatgaaacacagag

SEQ ID NO: 465092 - DNA, 1614 bp, Homo sapiens
  misc_feature (5)..(5): n is a, c, g, or t
ttccngcatttccaattaagtcctcaattaagttgtgccctatactgatattatttcccctagatcccagaaactgactcctattgaaggaaaaaatctgatatcaatctttttaaaaggggaggaatgtgggagaaagcatgaaaatggctactgggaaaacttatttgtgttacctttctgaaggaaaatacattttttattccttcaattgttgaacctttcctccaccctcaggagttgtgaacagatgtgtgtacagcacaaccaaggcagccgtgattggcctcacaaaatctgtggctgcagatttcatccagcagggcatcaggtgcaactgtgtgtgcccaggaacggttgatacgccatctctacaagaaagaatacaagccagaggaaatcctgaagaggcacggaatgatttcctgaagagacaaaagatgggacgatttgcaactgcagaagaaatagccatgctctgcgtgtatgtggcttctgatgaatctgcttatgtaactgattctgcaccctgccccacaacttgtaaacgtcccaaaaggaaaaattgatagggaatgtaggcctcactttaatgcattctccctctcttgggatcttgacctgtcaagtcctgactgccttgatttccctttgctgcctttaaaaatgtctgttttctagatgttcttagcaggagagttagtctgatactagctactcaatcttaatcaaaagcatgagtggtaattactttttaataggctacaagcaatacaaagttaagaactaattggatttattaaattatttggttaattaaactaataactaccttgaatttccacagcactgctcttccaatgatttcaaagtattttagcacattaacaaaggaccattactagtttcctccagctctaacttataaattttaaattgatgtaacagaagaaaataacttaagttcataggcatgaggtatccagaaaaattagataaaaagaggtactaaatatgctgattgccaaaatcatcagaatgatttgaaatcccaagaaatagactccccctaagtacactatgattcatattaagcttgtagttgcccatatcctctggtgttctagagggatatggaaagtatgtagcatgtgcttagtgctggtttggttacatcatcaaacagagtaagcagattggtatcaaggcttctcagaaagtttttagaaacataattatagtaaaataattgtctgtaagacttatgagacaacaaatactgtcattaaacattggtttcttatgtaagtggaatcgtaacagtattacaaaccatattctgtttatccttttaggtttactgtagcagtagcctttgaagtcacatgttattctatggagatttttctatgccttctctccagaattggcatgaaacatggattctttacaaatttcttacaaattcattccagagaggcatgttcagcttataaaagaaatttaaagatttttctctaaactgaatggggagaaaacttactaaatatgcaaggaggagcctgtagattttaactctaaatcacagcaaatagttacaaatgaaacacagag

SEQ ID NO: 465093 - DNA, 1334 bp, Homo sapiens
tattgtcgtagtctcctctggagaaaataatctgtgaaattatgtgaatagagaccatttttcaaaacaatgggggaaagagcaggaagtccaggtactgatcaagaaagaaaggcaggcaaacaccattattcttactcatctgattttgaaacgccacagtcttctggccgatcatcgctggtcagttcttcacctgcaagtgttaggagaaaaaatcctaaaagacaaacttcagatggccaagtacatcaccaagcccctcggaaaccaagccctaagggtctaccaaacagaaagggagtccgagtgggatttcgctcccagagcctcaatagagagccacttcggaaagatactgatcttgttacaaaacggattctgtctgcaagactgctaaaaatcaatgagttgcagaatgaagtatctgaactccaggtcaagttagctgagctgctaaaagaaaataaatctttgaaaaggcttcagtacagacaggagaaagccctgaataagtttgaagatgccgaaaatgaaatctcacaacttatatttcgtcataacaatgagattacagcactcaaagaacgcttaagaaaatctcaagagaaagaacgggcaactgagaaaagggtaaaagatacagaaagtgaactatttaggacaaaattttccttacagaaactgaaagagatctctgaagctagacacctacctgaacgagatgatttggcaaagaaactagtttcagcagagttaaagttagatgacaccgagagaagaattaaggagctatcgaaaaaccttgaactgagtactaacagtttccaacgacagttgcttgctgaaaggaaaagggcatatgaggctcatgatgaaaataaagttcttcaaaaggaggtacagcgactatatcacaaattaaagagtgattttgcagacctgtgtacaaaaggagtacaaaccatggaagacttcaagccagaagaatatcctttaactccagaaacaattatgtgttacgaaaacaaatgggaagaaccaggacatcttactttgaatgggaaagagaagaacttgataaaaagcaaaaagaaaaggcatctttactggaaagagaagaaaagccagagtgggaaactggaaggaactttccataaggatggtaacaacagttcacaaggggcaaaagcaactaggaccgaagtggctctgccagccagtccagcattggtgtagacagctacttgtgatacttatgacgagggctggcctgcattctttttgtaatttttaatctgtattattataagttacaattaagtagcattttc

SEQ ID NO: 465094 - DNA, 979 bp, Homo sapiens
  misc_feature (390)..(390): n is a, c, g, or t
cttccccaagcccaaatctagacctcactgaaactggaaaagaaatgagatctatcatttgccaagggagatataagaaagtagtcacatgtatggactttttgcatcagcaacttcctatctcaatggagaccgcctatcgaatgggaattttctaccccaagacacctgagacagaccacagtacacgctgccagattttcttcattcgtgttcaccaaaacaagatgtggcaccagattgaatgcagaagcagatatgaagattcagctgtcttcgatgagtgctacctgctacggtgcttggtggatgctgctgttgtggcggttcttggtcgttgttattactattatgctcaatgctcacccaccatggcagccctcaggaccntggagcaggggcagttgatggctatttttaccctcacaggggataagcctccctgaggctacagaagcaaagcccagagatgggagtcggggagacagagcctcctcatgatgtcacgatgtcacctgagctcctgggtccagcttgtttcatgagctgagactaatgattgtaactgttcgggcacggtgaggcaagaggaacgtacagttacagaatccgtgggcaaagcatctcggggccaggagcgagcctgaaggcactgtgtaggccttgatcagtttagcaatttctacgattctgacatcctctttctgttctttccggactcaggcatccaaggtcacctcattatggctctgtgcgaagacagcaccccaaaggggccatcgatttggaacatctgatcggctttctgagtcagatccactagctcgtaaaatccaataaatgtcaaagatatgtcaggcccattaacctctggaggtctattaaaagactctgcttctgctaaggagattctgttactgtcacatggacaccagggcagccaattctaaacccctgaatttagaaagttaggaagggg

SEQ ID NO: 465095 - DNA, 1511 bp, Homo sapiens
agaattccacttgctctctagttctgctacttacattttccatagagggtcctgagctgctcatttccgggacttgctgagccctgacagtaaacagacttttaacaaagactcgctaaataacttcccggaatggaatcacggctcaaagaatcccacaaggaaagacaagcaagtgagcgtgaaaagccagatgtgaaaggcagcagaaatgcttcacgtgaagaagtttttggcaaagtggcagaggtggtgaaggacatcatgaaaaacctggagccaatgaagcagaaagacttattctggaatacatggtgtggcatcctagaaaactctagatatgacaggcatgcagcccgtgtggtcacacagggtcctgcactcagaagatccctgcacatgactcagtgctctactgttgccatcctgaaattgttaatagtgtttgaacaagaggccttgggatccatgtcctacactgctacaagaatcactgattacattggcaattcaacatttattaggtcaaatggaatccatcgtagccaggacctcagctctccttcagtatgctcagataacacctgaccgaatatgggaagaggctcattgtgtaaacacaaacgtggaagtgccttttattaaaacaagattttacctgtagaaagatttgagcattcaatttgcctcgaggtagcatctttacctggaaatgaaatctcattctgttattggagccaatgtgtttatgtcaccattggatgcaggaacaacttaaaaaataatagtatacatatgttatgattaactctaaacttttgtttactttaaggataagctaaaaaaactcactattgtcaaaaatagcttctgtaatttgttcttttcacaagaagtaaaattcttgtgttattttttattctctgtaccttgcgaataactcataacttaggagttcccaagttatgttcattcctccattgcaatctctgtcccacccttccctttctttccatttccgttgcaatgtaatgtaaggttaagagcatggaatgcaagaggtgccagtttcaactctagctctactgtttctagctctgtgtcctcgagcacattatgtcccgtactcttgcctcagttataccatctgtgtgtaataatgataatactacctcctttatagggttggttaactaatggtctgttttataaaggtctaaaaacattgtatacgttgaagggcttttaaaaatgctgtacttttagccaggtaaaaattcggttaagaattcaaactagcaaaagatgattctactttggcccaaaggcagtggtttcctgggtttgtgtcatcttgctttgcagcgtgtagacaattcttcaggagttgcagagagaaaaataacatgccagattttggggtcacagtgccatctgctgaagaaaggagtgttgctcgaacaatgagtccacatgatcacaatttgcgtaagtactaggcctagccaaaa

SEQ ID NO: 465096 - DNA, 1988 bp, Homo sapiens
gaagagcagctgccggtttcctggtgggccgcgctggaacctcggggcgagctgccaccttcagccttgggagccgaagctctgggcttcctccccggccgggcgacacccgggggacaccggggctctctcgggccgttaccctgcctatgtggactggtgtgcaccctcgggggaggttcctagggtgccacggtgcccgagcgcgacgagtgactgctggggaggggggccgggtcccggagcgcctcctccgggtggtctcccccccagcggggaccgcgcgcagcacctcgcgggcgccccagcccccgcaccctgcggagcagagccgagcgcccaggacgccgcgggccccagcggtcctccccaccccctggccgcgccgccgccctgcccggggcggagtaaacaagagacgcgcaagatttgacctggcgcgacccggctttctggccggggttccccctgagcagtctctggaattccgggccaaagacaataactgtggttctgcttttaaagcaggtatttcaccagcaactgcggaatgttttgtgtctccagtttcaaatttcgcggaaagggaccaaatgtgaggacatataaaatatccccttctcttttcattaaaaatgaaaaagcttcataaaaggcaaattttgggcctttatcactcagccccatggaatctgaatctttgtgggcccaggactctgcatttttaacatgtaaagcaattgttacttatgtattctaaagcacaagacctcctgccacagagcatgggacctgatatatccaggcaggagaactgggtaccaggagacactgtacatgaagtttccagaaccagccatgtccatcttactaatcaagactctctctgttaaatctgcaactcaaatgactttaaggaaaaatggatttcattgattcacataaccatcactcaaggactaactttcaacatagtgagatcctgaggctcaaatattattacccgaaacaaccttcagtacataagtaatggctgctggatgtaacttgcaattgggtggcaggtcggcaaggaaagaattccaaacagaggactttctgaaagcctaattatacatattgaatgtaacaaaaggaaaatagtttttaagggttccatgaactgcttcctctgacatgagatctaacaaggctaaagactaaaatgcagctgtttacagcgtaagtaggaggccgtcccgtgcagtgcaaaatcaacagagaggagacagtcctatgccttcgagagacagtctgctgatactgtcatgatgtctagtgacaggccagagatcaaaacccaacaccctcatttacctgacagtgatttggccaatcccttaacatctctaagagcttcatttttctacaaaattgagacaatagtatttgtttcatagtgttactgtcagggttaaatgttatacattaagcatttaatatatgctgcttgtttatctaaatattcatggtcaggcactaacttcttatgtgactctgagcaatgcattcatctctgtacctgtttcctcatccataaattgggagttgaacaaggtgagccctaagtttcgttccaacttcaatattctataattcttgcaacttatatggcctcagttttcttatctttataatgggcataagagtacctacctcacagaatttttgagaggataaaatgaattaagacaggtagaaaattcttagaacagtgcctgccacattggaagtgcttaatatgtattagctgtgatgatgctgctaatgatgaagatgataatgaccctatttgcagatagtatggcagccataaaacattcagtatcagattgattacattctcttattttctgagtcaatgccagagctaccaagattttattctttaaaggttcttcaagactaaattctttttacatgatatgattattacacattgtatgtcc

SEQ ID NO: 465097 - DNA, 959 bp, Homo sapiens
cggccgctcctcgccaaggctgagcgtgtctggtggggggtgtctggtagcatttccttaaggacagagggagggcgggcgcggagggagggaaaagatcccgaccgccagcccaggctcctcttgcctttatttatttttctgacaatgagatctaacaaggctaaagactaaaatgcagctgtttacagcgtaagtaggaggccgtcccgtgcagtgcaaaatcaacagagaggagacagtcctatgccttcgagagacagtctgctgatactgtcatgatgtctagtgacaggccagagatcaaaacccaacaccctcatttacctgacagtgatttggccaatcccttaacatctctaagagcttcatttttctacaaaattgagacaatagtatttgtttcatagtgttactgtcagggttaaatgttatacattaagcatttaatatatgctgcttgtttatctaaatattcatggtcaggcactaacttcttatgtgactctgagcaatgcattcatctctgtacctgtttcctcatccataaattgggagttgaacaaggtgagccctaagtttcgttccaacttcaatattctataattcttgcaacttatatggcctcagttttcttatctttataatgggcataagagtacctacctcacagaatttttgagaggataaaatgaattaagacaggtagaaaattcttagaacagtgcctgccacattggaagtgcttaatatgtattagctgtgatgatgctgctaatgatgaagatgataatgaccctatttgcagatagtatggcagccataaaacattcagtatcagattgattacattctcttattttctgagtcaatgccagagctaccaagattttattctttaaaggttcttcaagactaaattctttttacatgatatgattattacacattgtatgtcc

SEQ ID NO: 465098 - DNA, 1267 bp, Homo sapiens
gaagagcagctgccggtttcctggtgggccgcgctggaacctcggggcgagctgccaccttcagccttgggagccgaagctctgggcttcctccccggccgggcgacacccgggggacaccggggctctctcgggccgttaccctgcctatgtggactggtgtgcaccctcgggggaggttcctagggtgccacggtgcccgagcgcgacgagtgactgctggggaggggggccgggtcccggagcgcctcctccgggtggtctcccccccagcggggaccgcgcgcagcacctcgcgggcgccccagcccccgcaccctgcggagcagagccgagcgcccaggacgccgcgggccccagcggtcctccccaccccctggccgcgccgccgccctgcccggggcggagtaaacaagagacgcgcaagatttgacctggcgcgacccggctttctggccggggttccccctgagcagtctctggaattccgggccaaagacaataactgtggttctgcttttaaagcaggtatttcaccagcaactgcggaatgttttgtgtctccagtttcaaatttcgcggaaagggaccaaatgtgaggacatataaaatatccccttctcttttcattaaaaatgaaaaagcttcataaaaggcaaattttgggcctttatcactcagccccatggaatctgaatctttgtgggcccaggactctgcatttttaacatgtaaagcaattgttacttatgtattctaaagcacaagacctcctgccacagagcatgggacctgatatatccaggcaggagaactgggtaccaggagacactgtacatgaagtttccagaaccagccatgtccatcttactaatcaagactctctctgttaaatctgcaactcaaatgactttaaggaaaaatggatttcattgattcacataaccatcactcaaggactaactttcaacatagtgagatcctgaggctcaaatattattacccggtaaggccttctccatctctgttcttatctctctgcttcactttgcccttcaggcaaacattctgcaggttggtggcagcattcccagattatcttcttcctagataagcaacacagcaggaaaagaccttctttccagatagctcaggcagccttagtcatgtcattgcacctgaaccacttgcaggtcttgggtggagtgatctgatttggtcatgactagacctgaagaggagaaggtcctcatggggaaaaaaaaaa

SEQ ID NO: 465099 - DNA, 3844 bp, Homo sapiens
cctgacccctgccagagactggcactgcctgcgagggcagggcgggacaccctgagtgctcagtgggcttcttggccctcagtccccagaagcccccccggagccgtgccgggagcataaagccaccagggccgctgcgttgccactgccttgcacccccgggagctggggaacagacccgcacagccgtgaccacctgaaagccagatgagccaggggaagcagctgcgcctgcagccacccccactccagcatatggagaacgcggcaggacaagctggtgtctccgtggggtgcccccgttgtccccacgtctcacatacactcgcctgatgggtggccttccccacatccgggaccctggctagagtctgaaaggcggctgcccacgtcccagctgcccctgagcagggaggccggcaggggatgcacggcgagttctctcagtggtcggccgggccccagccccctgggtgctgcgaggggaccctgtgagcctgctgatggccagtgagccgcggtcctctggtcctagccggcctcgggtctgtggtcctccgggcaggacgtgtctggcaggccagaggcggctcctgtgtgcgcggaacagccgcttttacaggggcgtcggctcgtggcgctggcagggcttctgtcgcaccagccctcggcccgcggcaaatgccgaatgccggtgctgggaacggaagtgggaaatgacggggggtgcaggggagcggccctgactgggactgtacggggacgcatgggggtgcgggcacttgagggaggaagcagcagagggagaccttccggctgaacaaacgagaacatctcacagccctgcaacagccaggagctgctcgtggagctccacgcccggctggagagagaggaggcaccctgggcagcccgccagcacccaggctctcacagtggaagcccacgtcttcttgggctctattttgaaagctgttctttccacgacggctttgacaagaatcgatttgagtgagccggcgtgtcaatacaggccagcacaggactggcctcagggccacattggggagggtggcgaccaggccctggctgcagcccacgtgggcaaaagcatggccaggcaggaggtggggcctgtgagcttggctacagcgaccgtgggcgctgggcccggggctcctcagccctgaggggagacccaggcccaggcaggctcccaggcgggctcccgggctcccagccttccgatcttctccctttgagaccttgccttctgcacagtgacaggaaagagccctgagtcccactttgcagggatgtattgcatttccagaaagttccttccgggtgcagagtgatacatgaaccctggggactcactccaacttggtattgattttctccacggaggacccagcagtcacggcccgtgtctgcacagccccttggatcctgcggaggaattcagccggcccctccccctgtgccgaaaaccacggaggcaaagccaggccagggtacagtgagaacacgggagaggactgagagaccgctggctgccgagggaggaagagcaggattcgcacccccgtcatcgctgggcccacacgccgccgacagcttccgcgtgtggccatctgtctttcagaaaccctctggcagagggacccagcagatgacacgggggccgttcacactctgaaacctgcctggagtcaaaacactgctggcgagcctccaccgcaaacccaatccagatggtcttccctggtggccctcggggtggcgggcaccctgcccactccctgccagcccctgcccgctggactccaggcccggccgagcccccgaccggtctcctgacccagcatgctgctctcccctgggcccggctttctcgcccgctgggactcccaggcccctccagcccagccccgagagcaggagccccaagggaggcttggcggctgtggaggcgagtgggccacgtgtagctgggaggccggcaggaccaggagcccctcacagcgcagcacccacagcatcacgagccacttccactcctgggtggcctgggggcccccaccctgctctgagctgccccttgttgtgacctggggtcccccgtggtgggcccgccccttgagcctgggatccagcctcagcgaggctccagaagtgtcgtctccgccggccaggcgtcagcgcctccacccaggatcacacactcctatctctgcacttctgccctccatcctgctccacgccgcctctgcttgttattccagcacattccagggtgatgcctgctgaagccacgcagccagtgcctccaccctaccccccatctgacccaccggccccttccgcacgctggaagcctgcccggcctgaagtgtcctcacctgtcgccctatcctcccctccactccagcccaccggtgactcagccctcacagctctctcctccccgagggagccggagcctcccctgccaccgtgccagaatgtgccggaggaacagaggcccgagcctcccgtggccccagcgaggcttcctctggggaagacagcttgagtaaccaggacacagacctgggccatttaatgcgcaggcagccccaagtcccggcagggccagaagcagagacggcggctggggatgaaagtgcacgctggtcccagatggggctggggagttgagctgacaggaagtctgtaactttcctgcaaaacgttattctacccccgccagggccagtgtctgctgctgagcgcaggtcccaccagagccagcacgaaagccatagaaagacaacctgaagtcaccagtgtccctcggcagaaggaacaacccgtggtgtctcccgctccctccctgcacagccatgaaaagaaagggcctgtgtactctaacagcagggagaacacagtccccaagacccccacaggctgggaagtcagagatcacaggagaggtcacctctgggggtcatgactcgggggagtccctgggggggaccaggggttctctgtggttctggcgtgctcttggagggactcactgacacgcacggcggttacacgggcgcagacacgcaaagacctgagcacgagataagatttgtgtctttcgtgaaggaggaccttggatgtggagctggcaagctggagccgcccagggctgtccgtctccctgtggcttcttctccaggaggctcccgggagcaaagccgagtcggcaaggccatccgcccgctgagcagcggccccctcctgcaggctccggaggactcccctgcctgcatctggtctcgcatttcctccgtgacctccaagctcccactgggggcacacggctgccccgctgaccccaactctgaccctgtgccgggcaaggggaggggccacccccaccccgtcacgcgcatggaggaggaggaggagcccacactgccccagcgtccaccccacgcctacaccagccccacatgagctcgggggtctctgggggtcagtgtctgcagctacagatgtgagcacgcatgcgggtgtgcaggacctttgaccgcagcctcccatgcacccctggaaaggtgccttgcctctctccctcactcgccatgtgcagggcagtgggcgagtcccagccagcatgggcatcccgcatttctctgcttctgcagccctgactgaccatggccccccaagtgggctccagccctccaggcacctccccgtgccgtggtgcccaccacagggcctggtctcagggctcctccaggactggccaagtccccaggctcctcccccacccatggggggagaggtgcacagcactgac

SEQ ID NO: 465100 - DNA, 1351 bp, Homo sapiens
cctcccgccgccgccccgcccgctcctcccggccgttccggcctccgcttttggggaaagggaaggcccccaccgcgaagagagtctggcaacgccggaccgggacccccgagggacctcttcctccccgccgcccacctcagaattccttcctccccggcccctagtgggagcttaggccgggagtgacccctgagagggaggaggagcggtgactcctggaacagcccgcgggcggagagggctgcgcgagggcagtggcagagccattgaaaacacaccactctattcagaacccctccagaaacactgagtacgcgtggatacaaaggagaaaaccgaagacacctgggcctacttgagagcggagggtgggaggagcgtgaggatcgaaaaactacctatggcttactacgcttattacctgggtgacaaaataatctttacaccaaacccccatgacatacaattaatttatccatgcacatgtaccctctgaaccaaaaataaaagttggaaagtaaaggaaaaaaaaaatcaccctccagtgcttcccatctcactctgaataaaatttatttgatctcacccagtcatctcagacccagcacttacaaccacctaacacgggtccccaaaccccaggcaacagactggtacaggtctgtggcctgccaggaaccaggctgcccagcaggaggtgagcagcaagtgaggaagcattaaggtctgagctccacctcctgccagatcacggcggcattagatgttcgtaggagcatgaatgctattgtgaactaggctgtgggctccttatgagaatctaatgcctgtaatgcctgatgatctgaggtggaacagtttcatcccaaaaccattccccctgctcccacaaaaccagtccctggtgccaaaaagaagaacagaggagcctaggccttgccgatggattggatatggaggttctgggaaaggagaagtcaagaatcatcttcaggtttctgatttgatcagtgaggaaatagtggtgccatttacccagagagatagagaaagagccctggagcacaataaatcactcttctgtctgcctgcaagtctggcagcacctgccctctatcacaaaaagctattatcatattcattcattcatttgttgacccagtcaacaaatattttggagcacctactatgtgctgtgcattgtactgagccaggagatacagtggtgaacagccttcatgaaatatagttatatagaataatcgtggatcatatattctttttaaaatttcttttgctacctagcgtatatatttgtatacatgtagatatgtagctatttcaatat

SEQ ID NO: 465101 - DNA, 1096 bp, Homo sapiens
tggaaaacaatgtgtataatgattataaacattgactagatctcatgagacttatttgccatcacaagaacagcatgggaaacaccctcatgattcaattccctcccacagagtccctcctacaacacatggggattatggaagttacaattcatgatgagatttggatgcctggttattttggtttgggaactcatgttttctctgtgcccatgggctactctatctatctcataatactatctggaaaggatgcccatgtgaaatttggcctggcttccagacctgccttgcctgtgcccacgtggaattcagtaggatggaaagcacctgcagctctgcccactcaccccttgctggggaaagtgcaaagagctgctgtgtcttgcatggtgggagttagaagcaatgaacgtgaagaactagtggtaaaagaaaacagcaatgacaaacaacaaccaaaaaacagatattgctggtttgctgctgattcattctaatgaggcactcaataatattatttctcttttatgcatttctctttcacttgttaatcttacgataagcgtctaaaatgaacatgactctctttagtgtggattgagaatcagacagatttgggatacatatttgggtagaagacctttcttttttctgttcctatgaaggtgacctggggtgggccaagagagattcttgcaggcgatttagtgggtggaagtaaagcaacaactattttatatcttgcacatatttttgtcagtctggttaaattattgatgtgaggcatgaggtggacctacaactagtgcaccttccctttgatatttcttcagcttttctgactctgcggccaggtgtttgtatttaactccacggtgaggagactcatcttctgacggacctaacctataccatcaagctccagcaccacaagcaaagacaaaaaccttgcggaaactatttaactaactcccacaattgcataaggatctaaatgaaaatatttctgcagtgaaccagttctattgttttaaatatcacccttattaaagagagctttgacacttttctatgtaaagacatgattcacact

SEQ ID NO: 465102 - DNA, 1212 bp, Homo sapiens
gagcctgtgtcctttcatctttcctttgctcagatattagtaggtttgtgtcattgtttattggatgggacagttcagaaaagctcagagtgcgcctgcgctcaagttctcatttacctgttatgggtctgagtcagagccctggggcctgcatattgaacaagtaccccaaggggattctcgtgactgggcaaattcaggaagttctgtgcagttgggaatctggaagtggaactggataaaatacagtgcagtgatggaactagacttcaagaaggagattactgccaaacgtgctaattgcagtgattttctggaatctaagggatgttttgccaacacaacaccctctggcaaaagtgtcagttcctcatcttctgtggaaacaggcccaagtgtcagtgagcctcctggcctccccagagtgtctgcttacgtagacaccactgctgacttggatcggaaactctccttctcacattctgatcactcctctgaaatgtcgttgcctgaagtccaaaaggataaatatcctgaggaattcagcctgcttaagttgcagacgaaagatgggcatcgtcctgagtggacattttacccaaggtttagcagcaacatccacacctaccacgtcggaaagcagtgcttctttaatggagtcttcctcggcaacaagaggtctctatcagagaggacggtggacaagtgctttgggagaaagaaatacgatattgatcccaggaatggaatcccaaagttaactccaggcgacaatccatatatgtacccagaacagagtaaaggcttccacaaagcaggatcaatgctcccaccagtgaatttttcaatagtgccttatgaaaagaaatttgatacatttattccacttgagcctcttccacaaattcccaacttgcctttctgggtgaaggagaaggccaacagtttgaaaaatgagatacaagaggttgaggagcttgacaactggcagccagcagtgcccttaatgcacatgctacacctttctggtgctttggactttccaagacaatcctgagcataaacaggcccacaaaacatgtgctgactgcactctggcgacccttttccagttgatgttttttgtcatgtgactgttctaaatccagtgtttgacccttatgaggaagtgttgtgctttgcttttttaaaactttatattttgaaaacttt

SEQ ID NO: 465103 - DNA, 871 bp, Homo sapiens
caatacaattttcatcattttctttttcttgtaccttacatgcaagagaagccttttactggcagactgttgagggagatatggcagtttttagataaggaaataggtgacttgcggccaggcacggaggctcacgcatgtaatccctgcactttgggaggccgaagcgggcggatcacgatgtcaacagatcaagaccatcctggccaacatgaacatgcttctagaactttcatctattatgaaaaaataatgcatcaggagcagctggtacctgcaggaggagagttgtgcctttgtcagctcaaactgcaggaagcgctttgggacccacaccctctacagacacccaccaggcgaagggccctgttcagggtgctcccagcctgggctcacttccacaggagacccttcccttatgggggctggggacaggttctcaccctgcctgggcacactgcttgagggaggtctgatgctcgggcagggaggagctgtacaccgtcagaggagatctagggacaagagcggctctgcctcgaggaggaggattggtatatgtcacctcttccccagtcccagcacagcctagtgggatattttgcaagacagtaccccagctctgcagtggcagcaacagtagcagttggccccttaaacatgggtccagagcaggactggagctttgtgctcagcctgaggtcagatgtgcttcctgtctataaaggagaggttgacaagaaacttttcaggcttttcctctcaccagttcatttcttgaggatgaaccagttggatttttaattcatcaatggcatggaaataaaatattgattaaaacactggcaaacactcgcatgccttttttgta

SEQ ID NO: 465104 - DNA, 3009 bp, Homo sapiens
tccaggtttgtcacgcaagctgagttcaggctgccaggccgagtgggcacatcaagcacagtgggccaaagcaaaattcagacaaaggcaccaccgaccacagaggtttctggacagaaaagcgacacctgaaggatcctatgagaagagcatcttccttacagaatgcttcctacagtagaatacggtaatgtcctaggccttcatagtcactcacactattcactcactgactcatccaaagcaacttccagtccttcaaatttcattcatatgtcaagccacttgcaaacacctgtgactgctggtgaagttcctgatcaactgccagcccagaccaagccagcaaggtcacatttgaataagaaggaatatcaaagtagcagacatgttttgcaaggaggtaaggttgcaacggacaacactcagagaaggggatcctccaacttaagggtaacagggatgaggaagaataagcaggcagtatcattcacagaagaagaggtgtcttcaaagaagaatgagattttcgtcaggcgtcatcacgtagacataaccaagaaacttcacccaaatcaagctggcctggattcaaaagtactgattggtagtcagaatgatttggtggatgaagagaaagaaaggagcaaccgtggggccacagcaatagcagaaacattcaaaaatgaaaaacatcaaaaataacaagatgtgacagaagccacttaggcagcaaacataaatgttgcagtgaaaaaagaagctagccttctagctgaaaaacgagtattccccaatggactccagaagaaacttgattcatcgctgcaaaggaaagaacaaccttaaaacttttaacagataaaacttacagaaacctatgatatagaattcatatagtctattctgttgtgtctaaatctgtaggcattgtgttgttgttctttaggacgtatttatttaacttgcacattttttcagattcttatttctactaccaacaactaagtaattgggaaataattctgtatttcagtttctgagtaaaaccagtctgaaataggataaaagccaccaaatattttcttttttttccagaatttgttttgccattttttagtgctatcatcattcctaacaagactaacttacagaaaaataattatatctgactgatttaaaatgttcaggtttcttatccaaatcccttggaactatggaaaggagtttgatttcacattcacagtgtatttacaaaatacgctgtgtcataaatatgtttgaattccaacagccaaagccattgagagtcataggagttttccataaccttctcttctatgacccaacaacaagctcatgactgaaatttcaccagatttctgagacgatgtcttaatattctatgtgctatgtaccagataattctttagatgaatgtttcttaggattgtaggaaaattatctagttaatcataatatttgatggaaagaaaaagacaataaaattgtaatataataaatttggctgacaagaaaccaaagtgattcttaattagtatacatcagaatgatgctcttatagttgtaccatctataaaaattactttaagggctctcacattttaataatttatcttattatgtattaagtatacaggaacaatattatttttcctttaacaaaatgaagagacaggctatctggttaatgttacataggaatttaatagtaatgcttgaacttcatccatagatcatactctgtacaaaatttgttagctaacatcctatctcataattattttatgttttgtggagaaatttgttgattttgtaccaaagtgtttctgaagacaataaattgtgagtcaactttagaacaaaaaaaattagagttttttcaatgtttatattctgattaagcttactttaccttacattttttctaagtaacaatgaatcctgatttctagtgtcctaaaaattgcttagtgatttgattgtggtaatatcatttcttatctacaatgtctaaagttttatgggacagtttttcttttatttattttgcctgtttgtgcagataagaacagaaacttttctaagacccacatttggttattgaaggccacagcgaatcttaacctaacagccttgacaaactgcaccataggtgtttttagactcatataatttgttatttttcaaacaatagtgaataattaatatttttgtttggaatttgagaacaattaaatttgtacttttagtaactaccattctttgattagaaaattaagagaatgcatatcttactttggttgtaaattatcaagggctttctaatagaaatcatatataacatttctaaatataagtcctttcacatactgtgtttccagttgtcttgatattgaaaagtgtaataaacttcatgctcacctattggagatttgggaaggttgaaaataaacttcctaatttttatttgtatgtgttctcttctatgtttaactctagaataactatcttcctgtaacgattaagttaaaatattctttaactagaattgaaataaattgttcactaaggagggggctgcttgtgctaaaaaagccatgaggagggagattgtcctccctgccctctccatcccctatggacttacagtgctgagctcagtcataatgaccaaatttcacagcatggccaagctgcatagataggtgccaaaactaccaattattaatattggcctcttcctaattgaatcagtcaagcagttttggaaaaggctgtcagaaaggagtgagaaatggaaagaggaaaatgtgattgttgagatgggctagctcaactcttacatccaggattttaatagaaaaactctttaagattagagtcaacatataatgagacttttaggtgtttaaccaaaggttcttggttcaagttgcctctaaaaggaagatgataacatgtaaaacgctggggagagtcagaatt

SEQ ID NO: 465105 - DNA, 696 bp, Homo sapiens
attcagtttgagaaaagaggacacaaaagcatgaataacaggaggatggatatagaataccagcatcagcaagtgtacacgatttaaagcacatttggtatctattaccaagctgcccttcagagaggttgtctcgttacacattccacagctgtgactgagaaaccgtcttgtcgcatttgacaatccaggttactatctaaaaacttgagtttgtaagagcaacacgccatgagataatattcgtgcaaatgtaactgacaaaagactaacatcccataatactagagcacctacaaaccaagaagataaacatcccattgggaaagtgtaaaaatatgaacataaagtttacagaagaaaaaacacaaatggctcataaacacacaaaaagatgatattgcttcctggtaattggggaaatgcaaacaaaaactacaatgaaatatcgtggtatcgtgtatcaaatttgcagagcataaaatagattacattcgcaaccagcaactacaacccaaccttcagcctcactggacttcttgccattccccaaaccatatccacgcccctctccacaggctgttccttctgcctgcatgccctcgatggcaccaagggggatgggcacactaacacaactgctgggaatgggaaagtttcaacctcttgggaataaaatctaacagtatttattgg

SEQ ID NO: 465106 - DNA, 665 bp, Homo sapiens
attcagtttgagaaaagaggacacaaaagcatgaataacaggaggatggatatagaataccagcatcagcaagtgtacacgatttaaagcacatttggtatctattaccaagctgcccttcagagaggttgtctcgttacacattccacagctgtgactgagaaaccgtcttgtcgcatttgacaatccaggtatttccgagagtgatgcatgctccttgggaagcattgggaattctgcacttctgggccagccagctccaactgcagccaatgtttaaaaaatagcatctctcccttccttctatatgtacagatcttcagggatttagcaaattctcttaaatagctagaagaccttgctgacttcgatgcaaatattctggccagagaactgaggtccttggatgaaacccaataatcagaggggtcacagtttccttagcccaggaggaaggcagctggtgtctcagcagatgttcctaaaggcctggctttttccacatctgttctgtgtggtagacaaggagaagaggaagggaggaagggaacagagaggaagcagagagagctgaagattaaaacaatactgtacaggtccccgctaaagatggactctctggctgccaggaaaggactgagagataaataggaggagcataagaa

SEQ ID NO: 465107 - DNA, 1165 bp, Homo sapiens
tggacacttgtgatgacatttaaggcccatctggataatctaggacactcttgccatctccacatccttacccacacctgcaaagttccttttgtcatagaaggtagcattcctgagttccagggattgggacatggacattttgtggtgggcattagttggcctgcacagctgcctagagcagacatctctgcagcggcaggccagaagagtgagggtgctcctggggtggagcccatgggaccttgcttcgtcctggagcccctggctctgaatctgagtctggtgcaggtacatctgtatgacagtcagggactgaggaggcaggagctccccaaagaaaagatgtttgaagcactggacaagaagaaagcgggacgaatgttcattacagttccaaagacgctcccacattggtaggtttatgttccatcagcaccccacttctggtactaagctttatatcagctatctactgttaggcaacagccaaaacttagtgacttaaaacagacacaaacatatattatctttcacagtctctgatggatatagaataccagcatcagcaagtgtacacgatttaaagcacatttggtatctattaccaagctgcccttcagagaggttgtctcgttacacattccacagctgtgactgagaaaccgtcttgtcgcatttgacaatccaggtatttccgagagtgatgcatgctccttgggaagcattgggaattctgcacttctgggccagccagctccaactgcagccaatgtttaaaaaatagcatctctcccttccttctatatgtacagatcttcagggatttagcaaattctcttaaatagctagaagaccttgctgacttcgatgcaaatattctggccagagaactgaggtccttggatgaaacccaataatcagaggggtcacagtttccttagcccaggaggaaggcagctggtgtctcagcagatgttcctaaaggcctggctttttccacatctgttctgtgtggtagacaaggagaagaggaagggaggaagggaacagagaggaagcagagagagctgaagattaaaacaatactgtacaggtccccgctaaagatggactctctggctgccaggaaaggactgagagataaataggaggagcataagaa

SEQ ID NO: 465108 - DNA, 1652 bp, Homo sapiens
cctggattacaatcgcctttgtcgtcccagggcggtgtttcagctgcaatacaaatcagtcacctgctcctagtcctcaggcgatgtaccctgcaaatattcacgactgccacgtcacaaggacactcagacttgtggcaaggcccacatggtggaaactgaggcctaccaccaacagccagcaccaagccgtccacgtctgcagcttcacttctgaagccggcgagaccacgagcccaccgggagaaacgaacaactcccaacgtgccgcctttaagaactgtaacactcaggtccgcgccttcattcttgaagaagtgagaaaggatgaagaaaacagtgagcaggggagtcacaagcttgagtattctggtgtacaattggaagctgttgaaaatgccaattcctgggcccaccagctgaccccgattcagtggaaccagggttgggcccaggaatctgcattgaaggtgcttccacagcattctaggtgcttctgacgcaggcggtctctgggtcacacttaggatgcaccgagaatttaaggtcaggtcctcgtggtgggagcaaatcacattcctcacttagtgtgtgccttgcaagctactttctatgcccttacacaaagataccttttttgaacagccttgatttttttcaacatataaaactatctgtttgctgttttttcaacttgcttttttccacttacatagatcatatacagccttgcatacatatcaggatatagatatatacacacacatatatatttcactccttttaagaattattaatgatttagcaattattgttttaaccacctctcaatccatagacatttgtttccagtttttgctattgtaaacaatcctgcaagaaacattagctgtatatatgtttgcatcattatgctttaaattttatttacactctgcttactactaaaaaggacttaaaatagctaaaaattattttttcagttgaatccaaatctaaaagatgccaggtgtgatttaagatgacaaaaaggaagaagagaagaatcaagctaatgtcagaaaatgtataagtgaattaagctaaaatgctaattttgagagggtaaaacagatggggctttgtaatatgtgatccaaaggtttctggagacacttatgtttgaattagaagatactgcctgagatttcttggcagcagaagtggaaagcaaagtgatgttaaattgatttttttttcaaacaattactcccaccaaatcatcctccatcattctatttttaaataccaacaagcatgttgtatacatttaaaatcaatgaatactatttaataaaattttgtatttatgtacattttccatttttgcattttcatactttttctgtcttctcatttctaatgccaacactctctctaggaaattcactaccaattgagaaataaaactgtgccaagacatttgggtaggaaattataaaaatcatccttacagaattatacatgaaatgtttgggcaaaatagtaactccatttataaagtaggaatagataacaaaacatttgaaataagatatatatttatatacccaatgagggctaagagtttctagcactgttgaggttgccaattggtcaaaacagaaagcaac

SEQ ID NO: 465109 - DNA, 1073 bp, Homo sapiens
ggccatgagcatgctgagccatcatgcccaccgtggatgacattctggagcaggttggggagtctggctggttccagaagcaagccttcctcatcttatgcctgctgtcggctgcctttgcgcccatctgtgtgggcatcgtcttcctgggtttcacacctgaccaccactgccagagtcctggggtggctgagctgagccagcgctgtggctggagccctgcggaggagctgaactatacagtgccaggcctggggcccgcgggcgaggccttccttggccagtgcaggcgctatgaagtggactggaaccagagcgccctcagctgtgtagaccccctggctagcctggccaccaacaggagccacctgccgctgggtccctgccaggatggctgggtgtatgacacgcccggctcttccatcgtcactgagtcagacatccacccagtatgttcggcatactccctctattctggcactgggtgtgatgccgcaggggagatgcagaagaagattgtgaggtccctcaaggagtctgcagtcttgtggggactgagaggggaagaggatggcaagaatgagaccagtttcaacctggtgtgtgctgactcctggaagctggacctctttcagtcctgtttgaatgcgggcttcttctttggctctctcggtgttggctactttgcagacaggtttggccgtaagctgtgtctcctgggaactgtgctggtcaacgcggtgtcgggcgtgctcatggccttctcgcccaactacatgtccatgctgctcttccgcctgctgcagggcctggtcagcaagggcaactggatggctggctacaccctaatcacagaatttgttggctcgggctccagaagaacggtggcgatcatgtaccagatggccttcacggtggggctggtggcgcttaccgggctggcctacgccctgcctcactggcgctggctgcagctggcagtctccctgcccaccttcctcttcctgctctactactggtgaggcccttcctcctgcctacggggaaggggcgccggccacccctctggctgc

SEQ ID NO: 465110 - DNA, 897 bp, Homo sapiens
ggccatgagcatgctgagccatcatgcccaccgtggatgacattctggagcaggttggggagtctggctggttccagaagcaagccttcctcatcttatgcctgctgtcggctgcctttgcgcccatctgtgtgggcatcgtcttcctgggtttcacacctgaccaccactgccagagtcctggggtggctgagctgagccagcgctgtggctggagccctgcggaggagctgaactatacagtgccaggcctggggcccgcgggcgaggccttccttggccagtgcaggcgctatgaagtggactggaaccagagcgccctcagctgtgtagaccccctggctagcctggccaccaacaggagccacctgccgctgggtccctgccaggatggctgggtgtatgacacgcccggctcttccatcgtcactgagttcaacctggtgtgtgctgactcctggaagctggacctctttcagtcctgtttgaatgcgggcttcttctttggctctctcggtgttggctactttgcagacaggtttggccgtaagctgtgtctcctgggaactgtgctggtcaacgcggtgtcgggcgtgctcatggccttctcgcccaactacatgtccatgctgctcttccgcctgctgcagggcctggtcagcaagggcaactggatggctggctacaccctaatcacagaatttgttggctcgggctccagaagaacggtggcgatcatgtaccagatggccttcacggtggggctggtggcgcttaccgggctggcctacgccctgcctcactggcgctggctgcagctggcagtctccctgcccaccttcctcttcctgctctactactggtgtgtgccggagtcccctcggtggctgttatcac

SEQ ID NO: 465111 - DNA, 1081 bp, Homo sapiens
tcctcacctcccacagagactgggagatagatttttttcttgacgattatatttcaaagggaaggcaaccaggcctttgagaaagacatttgctagttgtgaaactagcaagaagctggtaaaagttttatatcttaggggaagagaaataatttacaattgcaagtttttaaagctctatttttttttttcttgtaatggaggttaggacctccattacaatattggtataagaaagtctcattctcagaatttgaagaaagtttcaaaaattgtcaaatattgaagatccaaataaacacagttagaaattacaagggggcattccacagactacaaaaaaacaaacaaacaaacaaacaaaaaacttcagaaactactatgaacatctctatgcagaaaacctagaaaacctagaagaaatggatggattcctggacacataaatcctcccaagattgaaccagtaagaaaataaattactgaccagaccaatactgagttctgaaattgaatcactagtagaaagcttaccaaccaagaaaagcacaggaccagatggattcacagccaaattacatcaggcatataaagaaaagctggtaccattcctacagaaaatatcccaaaaacttaagaaggaaggaaatggctattattaagaagtcagaaaataacagatgcaggcaaggttgcagagtgaagggtcagccactgtggaaagcagtgtggcaattactcaatgagcttaaaacagaacaaccatttgacccaacaatcccattattgggtaaatacctaaaggaatataaatcattctatcataaagacacatgcatcaaaccaccacaggaacagaaaaccaaatactacatgttctcacttttaaatgggaactatacagtaagaacatatggacacaaagaggggaacaacagactctggggccttattgaaggtgcagttaagagttttcctcttacaacaacagagtaatcctgaccctataagcaacttcttccaatgaacaggataaatattgtgcttagactgagatgaattttcaacaggtcgcgtctac

SEQ ID NO: 465112 - DNA, 1825 bp, Homo sapiens
ctagagcgctcgacaaatgtttactgagtgcccacggggtgcctagagcctggcgggacgtcgcggggatgcggctggaggaatcggagccggccctgccctctcggcactcgcggtccggaccaggaaggcggcccgagcaggacgggtgggctgcggaccgcggtgggaaaagttgggggagcgcggaggtggcgcggaaatagaaggcttcctggaagcggtgacccttgagccggtcttgcccctcagtccctgtatccttttaagccagccacgctgacccctccgcgcctccctgaagccgttgccagcctgtctctgcgctcgccattccctccgcctggacctctccccactcaccacctcccgcccccatcagacgctgctttctcctcccagagacctccaagacctgccaagctgagagtctccctaagtcactgaggctggagtacagtggcatgatctcggctcactgcaacctctgtctcctgagttcaagcgattctcctgcctcagccttccaagaagctgggattacaagcgcccaccaccacacccggctaatttttttgtatttttagtggagacggggttttgccatattggccaagctggtttcgaattcctgacctcaggtgatccactggcctcggtttccccaagtgctgggattacaggtgtgagccaccacagccagcctaaaaataacttttttaaaacaaacataaattttaaaataacttcttttaggcagtccattccatggaattggtggcactgacctcatctgatgtcccagaaagctggccacaaaagtttccatcccccatgacagacaaacagttctactctggggcaattctccctgtgtccagaccacaaacgcccctgcctgtttggtgcatctcagcagcagaaaatcaccaaccacaaagctttcaggaccggcatttaaaatcaacccaaagacactccccttccacatgctctgggctccgtgcgatctttcatagcgcagctccacgctcctcctcgcagacgagactggcattcaaaccaggaattcttctgaggggctctgtgtgcaggaatacaatcacctcaagctcctgtaaattatctgctccaaggatccacccagaaatccctactgagggtgaactccacagtgtggttgagtccagatttgttgctcggtccagatagattttcagctgctgcatccaaactgcagccagggggacaataagaacagaacctcttttgttctgatgaaactgtttttaatggtcccttctaggccgggccctagtggaagtctcaacaaggctgctcattgaaacgcccttgaaagagccaaggttagtctttatttggcactaactcatcttaaattgtgtgggggaaatggaatacaattcaagttgtattactaatcaatctttgagtagaataaatcacaccaaatgatattctattaaatctgaaagtaattaaaagccatgcaaaattctggactttcatcaaattttgctcagctcaaaccttctaccctgcccccaaacacacctgcttccatcaccagagactgtctggaggccccaggaagcctggagtgatggggtccatccccttgctgcgtgttggggcaccccgcttctttgcacctacataattgtatgggtcccaatgacttttgtggcttggagtctgccttcccctggagaatagaagctctggaagggcagaacagggctgtctcagcacctggcacaaaactcaataaatgcttgtgtaatgaatggcgaagggaatattt

SEQ ID NO: 465113 - DNA, 275 bp, Homo sapiens
ctagagcgctcgacaaatgtttactgagtgcccacggggtgcctagagcctggcgggacgtcgcggggatgcggctggaggaatcggagccggccctgccctctcggcactcgcggtccggaccaggaaggcggcccgagcaggacggatgaggaaattgaggctcaaatacttgagggaacctgcccaaagccacaccaatgctgcggccctaactcagtccagtgtggttcctgacttctcatccacctccgtcatgagaccatctgccacag

SEQ ID NO: 465114 - DNA, 509 bp, Homo sapiens
ctagagcgctcgacaaatgtttactgagtgcccacggggtgcctagagcctggcgggacgtcgcggggatgcggctggaggaatcggagccggccctgccctctcggcactcgcggtccggaccaggaaggcggcccgagcaggacgggtgggctgcggaccgcggtgggaaaagttgggggagcgcggaggtggcgcggaaatagaaggcttcctggaagcggtgacccttgagccggtcttgcccctcagtccctgtatccttttaagccagccacgctgacccctccgcgcctccctgaagccgttgccagcctgtctctgcgctcgccattccctccgcctggacctctccccactcaccacctcccgcccccatcagacgctgctttctcctcccagagacctccaagacctgccaagctgaggttgtttcctcgcctcgcccctcgcacgtttgttttctttcctgtagtttctcttgctgtctggaattgctgtttgagtta

SEQ ID NO: 465115 - DNA, 1200 bp, Homo sapiens
agggagaagttcatgatcaccatgaggggtcatcagcacagacccggaaggtcaacgtctgaaaactacatcactggcacagaatggcggggacccaatttgcttcactttttgctgagcactcacctgacaaagcataagattccagccggaaaggcactgagcacctgtttgccaggccttgtcagcaccttgccgtgcagagcctgcaccagccctgagatcagggagcaaagaacccatgcctctggctcgcctggcttctcagccatgggaaaggcagccttcactgggacaatggcaggtcttgagctaaaaccagtcagcaataagagttatccgacacttatggaagagttccagggtgaggacttgggtcagctgcaggatgcttggattggaggtcactcgcaaagaggggtcacctgtgccttgttcaattcagtgaccgccgggttaaagactgatcagaccagtttccggtgagcatggtgacagggttgctgtacgaagtggccctgaggggcttggccaccatttctgagggtgggtcaggcctccggcccacagcgatcctctgccttcctgcgtagtcatgcctgtcactcaaggaaaaacgtccggatgacacgtgacacagcactgagtgattcgggaatttgcattttctataagtgaccactggtaccagccaaggtggaatacgtgcacttccgtctaccgtcccactgggaacgctgaaaactctgggaggaacataaagaacaactccctgagccctctaaaaagccagctccagctgtggagctgcaccactatgctgctggtcctggtgctggaagccctgaaactttgatgaaagacccaactctccaaccagaggaactggaaatggagtggggtgaatccctgtttatttcttcctctttactgttgccacttggctccaaagatggccccagtcatgtggaactatacaatagcacaaagaattaaaaagctaagaaaaacctgattttctggacagaagaaaactggaaaaagagctccagctgttttaaaaatggggggataatccctgttaatttttttgtcttttcttttaccaatttattcctaaggtagtcctagtcacgcagagctgcatggcagtgcgggaagctaaatcttggagataacactatctttctgtccagaaga

SEQ ID NO: 465116 - DNA, 1181 bp, Homo sapiens
agggagaagttcatgatcaccatgaggggtcatcagcacagacccggaaggtcaacgtctgaaaactacatcactggcacagaatggcggggacccaatttgcttcactttttgctgagcactcacctgacaaagcataagattccagccggaaaggcactgagcacctgtttgccaggccttgtcagcaccttgccgtgcagagcctgcaccagccctgagatcagggagcaaagaacccatgcctctggctcgcctggcttctcagccatgggaaaggcagccttcactgggacaatggcaggtcttgagctaaaaccagtcagcaataagagttatccgacacttatggaagagttccagggtgaggacttgggtcagctgcaggatgcttggattggaggtcactcgcaaagaggggtcacctgtgccttgttcaattcagtgaccgccgggttaaagactgatcagaccagtttccggtgagcatggtgacagggttgctgtacgaagtggccctgaggggcttggccaccatttctgagggtgggtcaggcctccggcccacagcgatcctctgccttcctgcgtagtcatgcctgtcactcaaggaaaaacgtccggatgacacgtgacacagcactgagtgattcgggtgaccactggtaccagccaaggtggaatacgtgcacttccgtctaccgtcccactgggaacgctgaaaactctgggaggaacataaagaacaactccctgagccctctaaaaagccagctccagctgtggagctgcaccactatgctgctggtcctggtgctggaagccctgaaactttgatgaaagacccaactctccaaccagaggaactggaaatggagtggggtgaatccctgtttatttcttcctctttactgttgccacttggctccaaagatggccccagtcatgtggaactatacaatagcacaaagaattaaaaagctaagaaaaacctgattttctggacagaagaaaactggaaaaagagctccagctgttttaaaaatggggggataatccctgttaatttttttgtcttttcttttaccaatttattcctaaggtagtcctagtcacgcagagctgcatggcagtgcgggaagctaaatcttggagataacactatctttctgtccagaaga

SEQ ID NO: 465117 - DNA, 1408 bp, Homo sapiens
cggccgccggccgcagcgggctgagattgttgtcctctgtcaccagggcggctgggctcccgcagtcctgcagaccgcgcccgatcccggcgacagggcgggcggacagccgcgcatccccggggtcccgccgagcctgggcgcagagagccgggaggaagcgttcgctcgcttcgccttgctgctgggaaactgaacgaggccgagagagaaggttcttgagttcatgtaagaggacagtcttaaaacggaagaagaaaaagaagcagttcagtctttgggagagctgcctccttgttgagtgctgcaaaggcctggaattcatttatgacagaatagatctagaaaagtccaagcatgttttctagagtggtgtagccctgtgctgcctccagtgaagagtctcttggtgttggcttcgtgcttccggagggaccatggcaacctccagaggggcctcccggtgtcctcgggatatcgccaatgtgatgcagaggctgcaagctacaggtctgttggagtttgctggaggtccactccagaccctgtttgcttgggttttaccagcagaggctggagaacagcaaatattgcagaagagcaaatactgctgcctgatcgttcccctggaaacttcatccccatatagacctgcctatatgaggtgtctgttggcccctactgggaggtgtatcccagttaggctacatggggagctcaaacgccgtgctgggagaaccaccgctgtcttcagtgctgttagacagggacatttaagtctgcagaagctgtctgctgccttttattcagctatgccctgcccacagaggtggagtctacagaggcagtacagtctatcacggcttcccttggctaagaaagggaaatcccccaaccccttgcacttccgagctacttaaaactcaacaggtatgaataaaaagaggaagcaactgtgggtctagtttcagatcacaagaaatctgtatttataccctacttgttccagaaaggattgaaaataacaaaaacacatataatcagaggcattttgtttaaatgaagaattgagtaacatgggcctgtggaaagtactaattaacatcaccttcattcttcactttgtgcagatgtacctgtgttaccttgctaggatggtcatattaaagtaccataactgggtggcttgaacaatggaaatgcattgtctcttggttctagaagctagaagtccaaaatcaagatttcagtagggtgactccttctgagggttgggagggaaggatctgttccaagcctctctccctggtttgtagatggctgtcttcttcctatctcttcttcatattttcttcctatgggtatttctgtgtccaaatttcccctctttctgaggacactagttatc

SEQ ID NO: 465118 - DNA, 1882 bp, Homo sapiens
gttttgatcaatggaggggaaacctgcccttagttaagtttattcccgatgccttacaaatctgattttgtaaatgctgattgcattcgtcaacgcggagttgacaagggctacacaaaagtactgagtacacagaagtggcgacgggcaaatggagatcctggaaaaggaggttttctaccaaaatatccttgtgaacatgaggacagcttccaaactgagaaagagtgggctcgagaaagctctaatgcttctttccctgacacgaagtgcttcgtgcagtgtttggcatcaacatgtcggagccgtggcaacgttctccgtgcatccccgcttgggcgtcattttgtgatggagaacattgatcatattgagcagaagtgggagcagcaaggtctgatggcaaatgcactagcagagagcatagggaccaggggcaagaccaacatcacggtctgaaggctctccctgcctcctcttgcccttttttcctttatacttcacaggtgtgtcccccaatcaatctcttacacatagaatcctgttttggcttctgcttctcagaagaccccaaatgacatagaaggtcttggagaagagtccaacagagacatatattcacagacacgtgtacatctttatgcccacacagaagggtaacagcagccttgcttcagaggccacaccttccaggaaacccttcagcctgccgtgtcttagctgatccctctgccatccccttgcagaaggagcttggagtctctcagctcagctggactagatgaatcttctcagggtcgtcttctcccacctctggctcccagttccttcccccagtctctccctccctgctctgtgtgatcagggaagctgcaaacccaacccttacatcaaaagggaacttgaaaaatacttggagcaaaaactgctaactgtgcatccttgctgtatgctggcgctgatattaaatcaggaaatggcactgaacagccgctccgaacacagaaacaggggttgtcaacacagcaaccaaaagcaatctctaacgggcagaggtgaaagggacctggcacagggccaggaggggggctgcaacccaggaaagaattcctgagctgagtgtgtctgtgccacctctccagtgtccagaatgaagcctggatctcagtccctggcatggaatgcaccttgtctctctccatgagggatgaaagataattagataattaagcatgttgcttaaatacctttgaaattctcctttttatttccatacatgtttaccgagcacccactatgtgcctgacagtccaataaaaaagatgccttcccatgtggagatgaccttctagccctcaggacagaactctgaccctttgacatggcattcaaggtccttcgagtgttggctcctgcagaagctttcatctctgtttccagcctccctgaaatagctccccaagggcacgaggcagtacctttgctccatgcctttgcttggactagtcctaccaccagcaattcctgcatttctgtgtttggcaagtttctgctcagcctccaaagccttaaccaagtgtcaccttttctctgcagcattttctgccaccctccccatttcttccaatagaaccagggatcttttacttgggatccagaagcactgtggacatattgccatcacaacacctttcatgtcacaatggcaaggtttgcactgtcttggaggagaggaaggaagccatattcatccctgaaccctcatctcccagcactggttgtaaaactgaaacaaaaatggaaaaccttgatgaaattcattgttggtgtggctatggggaaacagattttccatttctgatagtaaatgaaataggcacca

SEQ ID NO: 465119 - DNA, 2243 bp, Homo sapiens
gttttgatcaatggaggggaaacctgcccttagttaagtttattcccgatgccttacaaatctgattttgtaaatgctgattgcattcgtcaacgcggagttgacaagggctacacaaaagtactgagtacacagaagtggcgacgggcaaatggagatcctggaaaaggaggttttctaccaaaatatccttgtgaacatgaggacagcttccaaactgagaaagagtgggctcgagaaagctctaatgcttctttccctgacacgaagtgcttcgtgcagtgtttggcatcaacatgtcggagccgtggcaacgttctccgtgcatccccgcttgggcgtcattttgtgatggagaacattgatcatattgagcagaagtgggagcagcaaggtctgatggcaaatgcactagcagagagcatagggaccaggggcaagaccaacatcacggtctgaaggctctccctgcctcctcttgcccttttttcctttatacttcacaggtgtgtcccccaatcaatctcttacacatagaatcctgttttggcttctgcttctcagaagaccccaaatgacatagaaggtcttggagaagagtccaacagagacatatattcacagacacgtgtacatctttatgcccacacagaagggtaacagcagccttgcttcagaggccacaccttccaggaaacccttcagcctgccgtgtcttagctgatccctctgccatccccttgcagaaggagcttggagtctctcagctcagctggactagatgaatcttctcagggtcgtcttctcccacctctggctcccagttccttcccccagtctctccctccctgctctgtgtgatcagggaagctgcaaacccaacccttacatcaaaagggaacttgaaaaatacttggagcaaaaactgctaactgtgcatccttgctgtatgctggcgctgatattaaatcaggaaatggcactgaacagccgctccgaacacagaaacaggggttgtcaacacagcaaccaaaagcaatctctaacgggcagaggtgaaagggacctggcacagggccaggaggggggctgcaacccaggaaagaattcctgagctgagtgtgtctgtgccacctctccagtgtccagaatgaagcctggatctcagtccctggcatggaatgcaccttgtctctctccatgagggatgaaagataattagataattaagcatgttgcttaaatacctttgaaattctcctttttatttccatacatgtttaccgagcacccactatgtgcctgacagtccaataaaaaagatgccttcccatgtggagatgaccttctagccctcaggacagaactctgaccctttgacatggcattcaaggtccttcgagtgttggctcctgcagaagctttcatctctgtttccagcctccctgaaatagctccccaagggcacgaggcagtacctttgctccatgcctttgcttggactagtcctaccaccagcaattcctgcatttctgtgtttggcaagtttctgctcagcctccaaagccttaaccaagtgtcaccttttctctgcagcattttctgccaccctccccatttcttccaatagaaccagggatcttttacttgggatccagaagcactgtggacatattgccatcacaacacctttcatgtcacaatggcaaggtttgcactgtcttggaggagaggaaggaagccatattcatccctgaaccctcatctcccagcactggttgtaaaactgaaacaaaaatggaaaaccttgatgaaattcattgttggtgtggctatggggaaacagattttccatttctgatagtaaatgaaataggcaccatcttgttagaggctaatttgacattattaacactgaaaatgcacacatctttcaacccagcaattttatttcttgctttctagaggaatgtttgcccatgtgcagaaaggcgcatgtaaaaagctgagttgcagcattgtttgcaatagtaaaagatttgaaattgcttaaatgtcggtcaatatggcctggataaaaaactatagggcatccattggatagaatgctatgcattagttaaaaagaagtagatttccatgtattgaccaagcatttgctgagtaaaaatcaaaagcaagctgtagctctagacatagatgttaaaattacattgctgcattttttcacaatgagaatgtga

SEQ ID NO: 465120 - DNA, 3907 bp, Homo sapiens
gaatatgtttctatttaagtagtcatgaacgaaaaagtttactatcttttcctctcttttcctctctttgaaataaccctggaccgtcacgacggcaccagcaacgggacggcacggttgccccagctgggcactgtaggtcaatctccctacacgagcgccccgccgctgtcccacacccccaatgccgacttccagcccccatacttccccccaccctaccagcctatctacccccagtcgcaagatccttactcccacgtcaacgacccctacagcctgaaccccctgcacgcccagccgcagccgcagcacccaggctggcccggccagaggcagagccaggagtctgggctcctgcacacgcaccgggggctgcctcaccagctgtcgggcctggatcctcgcagggactacaggcggcacgaggacctcctgcacggcccacacgcgctcagctcaggactcggagacctctcgatccactccttacctcacgccatcgaggaggtcccgcatgtagaagacccgggtattaacatcccagatcaaactgtaattaagaaaggccccgtgtccctgtccaagtccaacagcaatgccgtctccgccatccctattaacaaggacaacctcttcggcggcgtggtgaaccccaacgaagtcttctgttcagttccgggtcgcctctcgctcctcagctccacctcgaagtacaaggtcacggtggcggaagtgcagcggcggctctcaccacccgagtgtctcaacgcgtcgctgctgggcggagtgctccggagtgaggcccggcacgccccgccgccccggccccgcggggggaaccactgcgcttcgcgggggcggtggcggcgaccgaaacaggcctcgcccggcggccctccctacgcgggaaggaaagggggcggggagaagagcgtagagccaagtgggccggatctgggggccgggggagcgggcgatgcggagcctgatctccgctgtttcccgcaagcaagttctggtgccacttcgttgctgccgggcgctcggcagtcctccatccgccctcctcctacgcaagcagctcgctccgccgcgggctcaatcccggccactgcagaaggggcggcgtacagccaccttttccctcttcgcgcacaccttgcaagcccaggaaaagttcctctcaggctcctcgctttgccttacctctctgagtagggtctccgagggtaaccggtcgtgccttgtatagggtttaatagaatggcttttaactaaaggaagagaatggttgtcctcttgagtccgcacgccatgctttccggtcgctgtcatctccagacccccatactataggcgtttgcatatgatgatgattcccaatttactgaggccctgatgtgtgccaggctgcgtgcgagcatgtttacgtgcattcgtgtgtagtcactaccaaggaatgcatctgtctacatacatagccagggattcttacctcacccctgcgaggtttgagtgattcatttagtagataagattttataagggtcagcaaggtaaagcaccttcccttagggcagttttctccctgctgtgggccttcctacccctaggattcactgcgtctgtggcttcctaccctagacgctgtagttgtgggcttgtgttgacttacccggataatgtttcttctcttctttaataatactgagaacttcattgttttgactgttattcatttacttatgtgttgatagacccacagttcctttctagtggctatatcccgcacaaagcctataaagatccattttttggaagggtttaacatcaaccattctagtcttttcttcctccctgcacagtcattttgctttccctttggtagtctttcactgacacagatcttttccttgccctctgcttttccttccttcccccatccccaatattggagactgtttacctaggggagtataatctaatccacaccaattaaagtagcacttcggagtagggaataaatctcgaaatcacattcaatttgctgttttatgtaaaccacatattatctatgttccagctttactcatctatggcattctatttagttatgtagtatagaattggccagtgtgctatatagtgctctgagagatcagtgaaggcgttttaggtgatgatatcgctctatattgaaatgtacagtgaggtcttggtgtgtcatgggatatcagcttttgacatttccagttaggctggtgacatggcacgtaaacagttggcgaacgaatttccctttgggctagagccagagcaagaaagtgagagtgatgataactttggttactcggaacaacctaacagcatatcttgcaaagacaagttttaaagaccccattggattggtgtgattgtaacagcagagaaaatatacaggaatcagttgaactcaatacctcaaaccctagagatggggctgtgtttgtttgtggttcttctttagagagttgggaaatcaaaccttccaacctgccacaagagttgcaataataactgaaacgtaggggggtgctttacagtttaacaggcgtttatctcctatgaactctgtactattcctaggttccctcctttaaatgtcttggggccaagcttctcagttttgaaagcacattttaggaagctttaaaatgattttaatgtggtgcagagaacccaatgttttctaaatccctttctcgcatatatttgtgaaacagggcgaagtctaaaaatggaggaagatctttaagagaaaaactggacaaaataggattaaatctgcctgcagggagacgtaaagctgccaacgttaccctgctcacatcactagtagagggtaagcgaatccacttgctaactagaaggaacttccttcttggaaaatggataatatttagtggccagatgtttggtcgttttatgtcagttgggcagtttgatctttgcagagaatatagccagatgtgaatggaattatttcatggcaaaaagaaacatttgcatgtactcctatacctccatccttcttccttcttttcctctaccataaagttacacctccccagcctaattctgagctaaacaacgcacaagtttaagaactgcacattctccaagtttgtctcctttaaagggctcagcagtaaataacttaagttattctgacactgcgtttagaaatgcgtgaccattacttcctgaattaatttggaatcttgacctgcgtccttgatttaagaccatcctgaaaggcttcagggttatgtgcctttcaggtctttgttttccaaacatatgctcccttatctctttaattgtgcttttctcttgagaagaagcaaaagtgaggcaatttttgattctggatgatgtggatatggaaaggtaaatataagcattggaaaaagtttctcctggtagctttaaacatacatacaccctccaaatgcctcaaaacaaaaagccaacccttatcctcactccctgctctagatctagattaagtttttctgatacagattggcctaggttttggtgtactggaatgaatctatagctctcctgtgtttttctttgtgtcctattgtaaatatctcatgctaacagggaaaaaaaagttactttaattaccagacagattttaaaactagcatgtatatatatttaaagaagtcattttatttcattcacatcttgtatttgaggagatatattacattgaatttaagttctggctttgtaaattattttttaaaatgtttaaaaccatatattgaggaggaatctatgaatctctttgttgatgtcagagattgatagtaatataactgtttagaaatcagcaattgttcagtgccag

SEQ ID NO: 465121 - DNA, 1095 bp, Homo sapiens
cggcgacttccaaggagcaggccaaggtctggtagcctctttagtgctcaaggtcacccgtagctatgagcatcagtggtagacttaggctgtgtactggggagagaaggcaggcactttcccagaaagatggtggtctggagctccagagcgcggttgcagactggaagtggggacaggagcgggagaaggaggcttcgacaccaactccctgggggtctgcctcatgcagtcccctggatgtcaccggagctcacttctctttgagcacctggctcttgctgacagactgcttggtgcatggtgggtgccacgggccccaaggagggcaagttgcagacgtggcagcagtgcacatgaaagcagccgcagggcctgaacgcgaggctgtaacacgatgcgtgcgtgaaagagagtcacacgggcctgcggcagggggagcatctgtggcacagagcaccgggcaccggctgtggaagttgggagcagagcacaaaagcagaaagggggacccgaagagacctgggcaggtccagggagccagtcctctgcccggctccttcctggtgccaaccacagtggcgattgcattggggccctggacagccttgccaggctccctcaggagcctgtcactccctgaggacaaagggctgtcgcaggggttaagtgagagcacagtggcaatgttcttgggccagttcctggaaggaacgtagcacattgcccggcacagagcaaatgctgaggaaagtcacttggggctgtcttcaggctggatcagaaaattcctctttcagcaaagacaccatctggcaagcgctctgcagtctccgccatcctctgtagttctgccagcttattactgttttgttttgttttaaaaatatagatgacatttatcgagtactcactgttatttctcccttaattctctccacagccccatgagtgggtggcgatgatctatggggtttccaccactgcacactgttcacaccagtctgaccgctgataactcctctactcccaacaacagatctccctattttccttttagttgaagatgaaattcatatttctattatctactat

SEQ ID NO: 465122 - DNA, 585 bp, Homo sapiens
aatgtttctctattcctggaaggtgaggatttccaggttaccaaatgttgtttctggagagggagagtccttggattaacaatgagaagttaaccaccttgccaggctccctcaggagcctgtcactccctgaggacaaagggctgtcgcaggggttaagtgagagcacagtggcaatgttcttgggccagttcctggaaggaacgtagcacattgcccggcacagagcaaatgctgaggaaagtcacttggggctgtcttcaggctggatcagaaaattcctctttcagcaaagacaccatctggcaagcgctctgcagtctccgccatcctctgtagttctgccagcttattactgttttgttttgttttaaaaatatagatgacatttatcgagtactcactgttatttctcccttaattctctccacagccccatgagtgggtggcgatgatctatggggtttccaccactgcacactgttcacaccagtctgaccgctgataactcctctactcccaacaacagatctccctattttccttttagttgaagatgaaattcatatttctattatctactat

SEQ ID NO: 465123 - DNA, 567 bp, Homo sapiens
ctgatcctgtgttctcactgcctcttgtactgcctctccgtatgagtcaccctgccctgccagtcctgcacattttaccaaacatttctgttatcaatacacagatccatactttacccttccagtttcatgaacattgtatgaaacaccagaacttcccatttctaaggaaactcaggatatgttgtccactccagaagtatgaggtgggactgcaggaatatgagctcctctccacatgcagggaccccaggtgcttatccagcctgttcgagatcatagccaccaagggggaactctctggacaacctggcagaagttcccctcactcagctgaaacctgcctccacctgaggccacagagcaagtctccctgggcttctgggtcttcagacatttggagacagttattatctctccctgccctcagatttaccatgtccaggctaaatggatgatttctcacttataaatgtaaggcatttaataattacatttcttgataataaaataaggaaaaatttagggtttttaaacaaaaaattgcattggtatatgtctgctgtt

SEQ ID NO: 465124 - DNA, 877 bp, Homo sapiens
taagaatttagcagagtttgtttaccaggaaacagaattctgaaagaagaagaaaaaaaaggggatatgtcctggagagaaggtagcaaagagaggctagctggggaggcctcacaatcatggtggaaggcgaaggtggagcaaaggcacgtcttacctggtggcaggcaagagagctgtgcaggggaactgcccttcataaaagcagcagatctcactgagagttacagcattgaagcccgggtttctcaggcctttgaactcacagtgaattacaccactggctttcctgggtctccagcttgcagacagcagatcacaggacttcttggcctcgtaagcaactcccatctgcctttcaccatgagtaaaagcttcctgagacctcacaagaagcagatgcaggatccaagcgtcttgtacagtctgcagaattgtcccactgcaattcagttgaataagaaagaaggagaagctgtgaactgtaggtctaaggacttctcaaactttttcacgtacatggagtcaccctgggctcttatcaaaatgtagattctgattcagtaggtctggggagctgctgctgctgctggttccaaactacgctggattaaaaagaggcaaagaagcagaagataagcacagggttgcctgggatgaagtttgctcagccattaaaaggtgggaaagtctcctgctgctgtgtatatgagagaaagccactgttaacgtcatgtgtcagctacccatcaattgaggcagaggaagcaattggttcatcaatgggttggtaagaagccctccaaaccttaattatctgagtgcccctcagtttcactgggcttgtcactgactccttacaagctcagaggcagac

SEQ ID NO: 465125 - DNA, 681 bp, Homo sapiens
tatatactactatgggacagtctccaagatttaagtccaaaaagcaagataaaatgtgtttagaatgctattatttatcaaaaagaaaatgcgatagaaaaagtctggctttgagagataggataagaaaacaaattcctggagaagctaaaggaagtcatcttttaatggattcaggaaagagaccttcaactctggataagaacagtgtttcaggagatcacaaagaggtagaatgcaaccagaaagaaaactgtggccctactgaactgaggaagaagaggtcagagttctggaatcagaaagagcaagtaggaagggtgctgcacctaaggactctagatccttggtttgggactgggcctcacacatgtaatgtgaggctcttgagactgaggaggactgctgttcggtcaggatcagaaggaatatgctagagttcaagccaccatgcaagatccgtgagcaactccttaggtgaattgtgaaagacagccaggtatactctttgctattgcaaatggtcacactttcacttctatccaagacttactgttgattttacctttcccctctgttttcattatgcttgtgggttttttcctgaacctttttcactctgtcaaaatgtgtgccagggctctctgggaccattatccaaataaaacataaaaatatttc

SEQ ID NO: 465126 - DNA, 638 bp, Homo sapiens
tatatactactatgggacagtctccaagatttaagtccaaaaagcaagataaaatgtgtttagaatgctattatttatcaaaaagaaaatgcgatagaaaaagtctggctttgagagataggataagaaaacaaattcctggagaagctaaaggaagtcatcttttaatggattcaggaaagagaccttcaactctggataagaacagtgtttcaggagatcacaaagaggtagaatgcaaccagaaagaaaactgtggccctactgaactgaggaagaagaggtcagagttctggaatcagaaagagcaagtaggaagggtgctgcacctaaggactctagatccttggtttgggactgggcctcacacatgtaatgtgaggctcttgagactgaggaggactgctgttcggtcaggatcagaaggaatatgctagagttcaagccaccatgcaagatccgtgagcaactccttaggtgaattgtgaaagacagccaggattccttcaacctacacagtgaccaacctcatctcctccaaatttcaggttgtgctgcagcctaatcaatcagcaatctgaataaaaataaaactggaaagttatcctttccaatcaccaactttctcagttcacctt

SEQ ID NO: 465127 - DNA, 2237 bp, Homo sapiens
ggacagtcagaccacagcaaatggaggtggaggtggcatggagtgggcagagaataggagacttgagctgagccttgacggatgagcagagtagacaaaacagccagaaaagccaaggaggtggggcagacaaaggtaggagactgctacatcaagtcgtccctttttctgcttgagctatgtcaccagggttttgggcatgtctgtgtcacctggaatccaagtgtgattgttttcatccagacattctaccaagtggaaaccaagagtggaggctcagtccacagccaagcacagagctgcggaggggctgaggtggcctctgccggggaatggaaaacggctctcttggaggaactgaaggaacccccacttccgtcttctgtccctggtgcctgcatggcaggaccctgggaccatgagctcacaactcctccccgggtcactgtggtggacatcaggatcacccctcggtgctcagtgtttggatagggcaccctcacgtagcatctcccccacaggccacccaaccatagctaggacacctctctttggctggccatcacctccacccactctatttgacagtcgggctgtttgttattgtgtcgggctgagctgggggtggggctgggggtgcagagaggcactgcatccattctgtctccgggtgaggagcagctcagatggccccggtagcagaaggaacagggatgggaccagtcctggttgaatactcacatccaggtggccacagcatgacataggcttgagtgaactgagagaaccagcctggatggcagagcttttgtttcagctcacctgcactgaagctgtttcccaagaggatgacccgggtgcctgcctggctaagtaacaagcaaacatttcggagcctaagtttgggaaagagcctgaaggcccctacaccctgaagcaacattccaagccttgctgctcacaatgcggtcccgggaccagcggcagcagcagcagcccaggacgcttgttagaaatgcggcacctccggccccacttcagacgttctgaacccaaatctgcattttatcacgatcccaggtgattcatgtgcccgttagagtgagcgaagccctggattagagaacagaaattagacgtgacccttcctttgacaggaatttatcaccaggctctatctcaagaactgtgagaattcggttcagatgtttgtgataactctgcagcagtaactgactagcgtggtggttctcttccctgactgggcgttggaatcagcgagggaagttttaaaagatgttgatgtgcagaatttacccaagaggttgtgattcaatgggtgtctgggaaggggctgggacatctgtgtttacttagagttccccaggtgattctactgtgcagccagggctaagaggccctggggtacaaatatcatcttgaatggttagacttctttctgaatgggagtgatgtaatttccgatttgcccaccgagcacagcatgctgggccctgaggatgttacagaagtggataccattattgctctccagggacaattcatcgaggaacaatatggcatctgcaaggtgaaaaaagagcgataacaggagatgccgcaaagtgtggcttccagacacaagagtgtgctgggaggagagctgaggaggatcccatccagaatatcatgttacatttagtcatcatgtctccctgagctcttcttggctgaccatttctcagtctttctttgtttttcacgaccttgaagagtactggccaggtgttttgcaatacacccctcaatttgggtgtgacatattctcttgattagactagagttatgggtttagatgtggaaattcagcagaaacaacagaattcacatacaaagacttctgattctggaattatcaaacaccgaatataactgttttcgataaatgaaagagcatctttaaaatatgagtaaaggcagagggagatatgatggtgtttagatgcgtgtgtaatacagaacaaaggtgtggttagacagatggcccgacccagagcctgtctggatctaagggctgagaccccactgtgccctgttccaccttctgcaccaccacagctgtgactgctgaaattcaaaagtgtatcacagacacaatacattgagaaatcttggtctacacatttgaagagcaggcaccacgggtggtccaaagggatccagcagaaacatgacag

SEQ ID NO: 465128 - DNA, 815 bp, Homo sapiens
tcactttctttccagtgttctctctaagaagctcgagtcagtgttcggttacctactcactcttctggtctttctttgcgaaggagatttgagaaagtccatgcatgggagcaggacaaagagaaataatctgatcatccctaagaggtttcaagaactaccaggaggaaaggctaggtctgctggtttgcagagactacagccacccctccttctaggggctcaggcccagggagatccgggttctgtccctgagcctaaggctggagttattggagttcctcctgcaggaaagccctgcccaatgatgatgcacgggtcagggtcaggcctgaaggggcactctggccacagactgctacggccaggagcttactgtgttaggcagttgccagtcccagtgctggctgctgcccctcccccaaggagctcaaacagcttagaaagcaggcagccacagctgcagatatgggtcaccccttcccgcaggtgtttggctgtagccctaggacattccacagggagtgtgtaggttggctcaaagataggagggacctcaaaagggtattaagcatgcttagccaccagctttaggcaagtgatacttgaaaaaattcgctgactctatgtcacttgccttgttaaactattaaatatcatgtatacctgtaccaatttggaaacttcccactgaaccatcaacaacagtgttccccagcgttgtatatgtgtttcagtgttatgtgcgtgtatgtatgtgtatgtgattttgtgttcgtgcttgtcctatttcggacagctcatggtatgcaatc

SEQ ID NO: 465129 - DNA, 397 bp, Homo sapiens
gtaagaagtgtctttcgcctcccgccatgattctgaggcctccccaaccatgtggaactgtgacgaaacttcagctttaagaggttaaaagacttgtccagagtcatgttaacagcagaaacagatgaactctcaagaaataaagatctcgttttcatggaaatcatctcccaagaacaagagaaaaaaataaagaaaatgtatgagagacttgggattgctgtaaaagacaacaggtgtcagagttttctatgaagacttcactattccttgagctacagcttcagacacagccaagtataatgctcttgcttcatgaagccaaacagccactttcttctctggaatgttaatctgctcttattggagttagcaaccccaggaggatcgcttcctg

SEQ ID NO: 465130 - DNA, 922 bp, Homo sapiens
gtaagaagtgtctttcgcctcccgccatgattctgaggcctccccaaccatgtggaactgtgacgaaacttcagctttaagaggttaaaagacttgtccagagtcatgttaacaggaactaattttgaagcaccagaatgctgtgaattggctgtaaaacaatgttgaagaaactcaacatagaacagaaggcacactttccttaggaagaatgctgataaaattttaatgaactaacatgttgtcatggggatttgttgctattcattaattcattgtgctgttcctctatagttttgctgaagttgactgacaaattgtcaagatgaccggactgtcaaaacaaccatgacaaactctcacatcaacttcgactgcaagtcaaagctgcatctggatttgtttcttagcacctccccgggaaggctggaaagaaaacacggagaaatagaactccagtatggcggaaaatgcaggcattcaagggagagttgtgagaatggcccacgtcatcgccatcacctctcctcttcttcatttctactgcctgttctttcgacttcctccagtgaagtgctaaagaaagggaagaggaaaggggtgagggtgggacagttcagtctaaactggccgctggcaaaccaagaaaaagcccagaaaaatcaaagaattcaagaaaccctggtcactcacattaatcaacatttagacctggaatataaggcaaacataagacgactctcaatgagaaagagaaaaaggcagactagctagggacttcaggaccccaaaatagacaacgtggtaagatctatgtgttttctattcacctcatatattccaaacatggtgctgaagatgctggcaacttagaaatgccaaataatgcagaccaaaaaaaaaaaaaaaaaaaaaaaaaaaa

SEQ ID NO: 465131 - DNA, 1621 bp, Homo sapiens
gcagcctaactgcaagatggggcaaggaacccccctttaccaagatgcgtgtaaagcggttgttggtgatgtgtattttggctcatcacggccacgacacttctctggtgaaaggcatcatttttatggaaaggagcgtggaggaggaggaagacaccggcttagaaaacagaggtgacagccccctgcgtgttattggccctgaagactctccagtgggacaagatgtggaagtgaaagacagtgatattgatcatcctgacccagtgatgctctggtattcagttggtgacactggattctctccatcatggagggggtgggcctttgcttgggaaaacacaggctttctgcatgtgggttttcctctctatgatcgtgcttttgccggcactattatcccaacattgcctctgattaatgtgcttattgcacagaggacatgcgttgaaggactcaggcccagaggactcaccatactacacctagcttccctctcacccagaagcagctaacctgatgaaacaaatgccctggccttaggaagacttagctatatcctaattggagccaacacccagaaaaaaagaagcactgtcctaaagatagtagatgatttgaatcagcgtgtgatatggggtgctgatttttccaaagcttgaatatatgggtccaggaatcaaggaccaagtgggagtgttttctccactattacacaagatttctcacttacagaatttttatattcttcctctatcaagctctactacctttggttccaacggaaacatgcctgtaccagggccagcaccctcgaacagtgactgacaggagctggtatttatatattccagattcttctttggctggagacaaccctgaggtgtgtgtttcatgctatctgaaacccccgtgggattaaactcctgttgcatgtagtggtaacgagtttgataacacattctgcctacatttttttaatcttatttcctcctcctctactggtggttcctgaaactcttaaataaattgattagactcaaattcttgtcttgtgtctgcttctgggggaaatccagtctaagactgttgagcattttattgtgggtttttccaactttgcattcccggaataaactatgtttatttcaagtgatatattatatattgctgggtttgttctgccattattctgtggatgatttttgcacctacatccacgagttagattaacctgtaatggtcttttctctcacactgtcatggtcagaccctctagcaagataatgcttgccttataaaatgtattggagagcattccttgtctttctattgactgcaatagttggtgaaagactggaattattacttccttgaatgtttaaagatatgtttggagccatccatggcttcacatattttatatagtttttccatcctgtagagtgtgtatataaatacataaaggcctctaaggtgctgcttcttcctgatctccagatctcatcaataggacatcctaggggacggtcaggctgactaaattatggcttagatctggaaaatcaatgcaacttggaggcaagattataatgtaaaggtacttccatcccttccaggt

SEQ ID NO: 465132 - DNA, 2086 bp, Homo sapiens
attgagggttaatttttatatatggtttgagtaaaacagagatatgcagaaggaaaaccaggagaggattcttatccaggatgaggaaggatttttctattatcttaaaacatcaaatgattttttttggttgacacggtgttatatccctacacctcactgtggattcaaggaagatgatagtggtgaagctttggatgttggggtaaaggaaagaacaggtgtctggattcctttgttgacactcgttcatggaaataatgagatctacagaagctgtttagtcccactctatgataccttgttgacccctgctgatgagagtataagatccccacttttacttgtgggttgctggaagggtgtggaggggcagaaggaagaagcaaagtggagtaggaagtgtgagaatgtgcatgtaatctacgcctatgcagcacatccaggcacgccagcttcaactcgcttcatcatgagagaccaaaaataaacataatgaaatagaggacattctcgcgcctcaaaaaattgaactatcttaaaagtttacttttgagaaatgtgagtcacaaaaagtaaaacaacgtactcaaggtcacaccgctgagaagtgtgttaggtgagacatcttgaagctcttccttctcatgctggaaaggctgtcagaaagttcaagtcctcctcttgacatagtacatgcctatttgctcattgggataggctaaccttttcaagcaatgtgcggcaccccttagcttcaataaagtgttcaatgtaagaagaatatgctctgtatccataataaaatcaccacaaatcaaaaaaatgaccaagttgcattccctagtctaattcttaatccttggagtctgtctctttttgcatcaaaaatccaggcaatgacatgctaggatccccaccaattagatagtgttgcttgatcaagacgtattttctcctgatttaaatgctaaaaagattggaacagtgtatgtcaccatgactgcatttattgtctttgttcaatataatcttgatgaacaatacatcagttgatgaaatggcctgaactcatctttaattgttgctgccttttattttattcaacatttagtgtgtagatctatagcatcatttaaaattgtttatcaatggtttagcaaacatactgtacaaaagcaatatggaaaacactggaaacaagtattaagagtcttcctgctcaggtttatagagattaaggaatgattcagagaaaaaataagatagattgaaaaaagggaggattttttaaagtagcacagtgaaataataatgtttttgaaattataataccatggactagcgggcggttgcaggagaagggtaaaactgtttcagaagttattatgtcgagtataaatttactgataaacagctataacagcagaaataacaaatatattaatatgtccattaaatgcttatttgccaatcaatttcttctatttattgtgatacacgatcactataaacatttttcaagagaggaaaataagtctaataatttaattaatttttcttgaatcatgcagccaaatatgtgctggggccaaattcaaattcagatctgtctatccgcagggttcaggcttttaaccattaagcatagtttaaaaaaataaagtctgcagtccccaagtttacagcagaactagagatacaacctttgaacacaggtacccctatttggcatccatttcaacagaaccgcattttcttcatctcccaaagcagacaagaagaaatcctaagagttttctgcaagttaactatcaattcaaattgcctaaaacactcatagaggcattgattggaatctgtttgaagtgtgaagttctgaaagaaggaaaatgtaaattcctattgaaccgagactaaatcattttggtaaaaagattgtattttaagaagtacattttgtgaaaacagaaagagcaactcattggtaacttgagctgtttttttaaagatgttaaggtgaaataattgctgttccagtgcccctattcaattattttgtactatgaatatctattcttcattt

SEQ ID NO: 465133 - DNA, 2567 bp, Homo sapiens
cgggtccaggcttaagggtggagctctcatcagggactctgccctcctgtctcctctcgcactctccaggaaaagctgcctgctagataacatgaagacacgccagcagcctcatgggggtggagggaagagaggcctcatggtgagggactgaggcctcctactaaaagccagcactaacttgtcaggcatgaaagtgagccacctggaagcacatcttcagcccctgtggaccctttagatgactgcaggccctgctgacatcttgactgaaacctcatgagacagctagaaccagaatcgcccagagagaagaacatcaaaggtgcgggtttagggcccagaaagccactggccccttaatatccagaaaaggacaaaaactcacgggagtcaagcactgtttgcctggaagaagaaagataaagacacagacaagccctgctcccccaccagccaaaactactattctacctgtttcctgattctgacccacgtatattcacttgtttcatcattttctcattcaaaaatatattcattcaattaataatgatttactgagaggagaggaagcgaactatgtggcttttggaggaaggttattccctgcagggaaacagtgcaaaggttctgagacaggaacgtggctataaggtttgtgaagaatcaaggagaacaggccatcggagcagcctgagccaagagagggttataggaaatgaagatgaggagataacaggccagcaacgaggacagatagtgctgggtcttctgggccactatgtatctgcagattgctttgttctcctgcgaaaggattcctgcatcattgaagagaatacacggaagaaaaaattctggcatttgcttaagccaaaatatttttatgacacaaagcatatgagagaaaaactgattttgtatatggtatcggacggggtagagtttcactgtttccatatttccagcatactaaaaaaaagatgaatatcaaaattatcattataatttaatattttttccagaatttttgtttcatgaagattgtggaatcataataggtatgtactccaaactcattttcaaccttaagattgtgcaatccccaaaccctatctactagccaagagctttgccaatttgattttctagtaagacagaaaattctattgcaaatttatcctgaggcttataaccagtatgtattggcaagatttaggaagacaaacataaaatgcatgctctgtagcaaagcaccctcctgaattgcctccatatttcctagcaaacataccgagagcttttatacccacagtatataaaactatgagcccagctcatatggttcagcatactttcacaacatacattaaaagatattacctgtaccttgtaacatgtttgcaattttcccatgaattagcatttattttcaataactcagagagaaagtctgtaatgcttataaattgatttcttttggcatgctgatggaatgaaacagaaactaaatgcataggagcatcagtgaaaagatgagcataaaccttttgtgagaactgtagctttaaaatcacctaaattttcttctcttcagagagagagaaagacaaagagagaggcaaacaaacaaacaaaaaatcatgaacattgagatttgagttttatgcttgggctacagttatactgtgtcccataatatacttttcttggtagaaccaagattatttttgagcagatatttaataacgtattcttccattaggtattattccctacatatgctttaggttatgttcttttacttaaaacacaaggttacctcttctactagaaaattttaatgaaatgtttcctgatgcagtgatttgaaggctgaccctgaagaggcagggtttcctgtgtcctgttacaatggatttttcatgtcctgggatctccaaaggatacaggagcatagtggtaaattcagtcttgctacagagagcttacatatgtatgtacacttccctcacctttccttccaaaggccccaggagcagatgtttgcagattgatttatgctccattatatttagctgtcacttcacccagaactgaaaagcagtcatctctggagaaaatatgacagtagtttaatgaagcacatggatactgcaacgaagggcaggaagtgaaggcgcgtgtgaatctcaacctgctatcatagaaatgtaagaatggtttttctgtcaggtgttctgtgaacaaatttggaacatggaattaacattcagagaggactttgtaacagcacccctctgtccccttcagctccagacacacagcctttcatgacccctggtgggtgacaggcatcacccctcttcctgggcctcttcaggaaaccctcttcacaataatcgctgccaaatcaacctggaatgttgctgttaaaagtgatagaaagctgggaatggtggcaagtgcctgtagtcccagctacttgggaggctgaggcaagaggatagcttgaggctaggattttgagaccagcctgggcaacatagggagactctgtctct

SEQ ID NO: 465134 - DNA, 2793 bp, Homo sapiens
ggcaggaaacagtggtttcctgttcatatcctgcctgagcctgggccgggtggaggtgtcctgcatggagtcttgtgaaatcgcgtggactgcaacacccagcagcgcgccgccctgggtcctgccactgagcagctgttggtaggctctgctgtgaggtctcctcttccggctttcccacttcccaagtgttggttaaggaatccagatgttactgcaataaccactccataaacaaaaggaacacccagctgtgagaactggcttctcagcattcgtcccagcagaggctcttctggggccagccctggaagaacccatcagggttctgatggttgccctgtttcagcacagcccttattggcaggcagacggctacgggcacagccacaggctgaagtgtcaacacttcaaacaacacagacagtacaatgacaaattggagatcagctctaatctcggcccccaatttaatgcattgctgaatattcttctgaacatagtccatcccacactgtcccatgacacaagacgctccaaggggctgaagatagagggacttctgcagtcaagagagctgggaaactcttggacagtcacaatgtgcatttgggtattaaaggctctgcaaagttctgcaccaaataaacccttggattggcttgatccaatgccatgtttccaaaacctacttgcccgtgggacaccttagtccataacacaggttggcatttcttctagagagtgtgctgtgaaaaacactggtctcacagcaccgtgcattcatccagcaggtatttaccaagcagggactttgggccaggtccgtgctaggctctgcaggtggaccagccagccctgacctccatggtgtctcttctcatgggagaggctgcacagcagtcattgagaaaacgaagaaacacacaggtactttcagatgctgataatgactaccatgtgctaaaagagctccaggtgttgtctgttttgagacaatcttctcgacaatgagatagaatgaaccatgcaaactttgggggctacgatggttttaggaaagagctagagtgaaaaatcctttgacatatatacatacaaataaagatacatgtgtataattttatgtaattgacatcacattatatgctggcacctgccttttttgcttaatgaaaatgtcaaaggtaatattaccaatcaatcaatatatttcaccatcgtgtttaatttctgcagagcacttattcaagcacatactgcatttttcttagtcactcactggtgggaatagaaagttttctcaggcatgcatttttcccacttctgaaatgatctccttagaataaattccccaaattgtattgctgggttcaaaggcatgaacattttacatttttatacaataatgtcaaactaccttccggaaatgatgctcactttactttccctccaagactgtgtgaaaatgcccattttcctaaatgcttactatgactggtttccaactacattttaattcttgttcaatctgataggcaaaaaatgatatttaatttttatttgattgataatgaccttgaacgtgcccattagccttttgcatgtattcttttatgaaacatctgttcctatccttcgtcaatgttcctcttcatatgttaacttttcttattgatttgttagagcactttgtatattgtgaatattagcttttgtgatcagaattatggaattgttgttgtctttagttttgcttatcaagtttaaagccattcagagatgttgtaaatgtgtatgttgttaaatttatgtcttattttgtgttttctgatgctcatatgtttagaatggtcaagcaatcccaacttatgattacttaaatattctcccatatttgctcttagcattttttttcttttcatgtaaccctttgttctttcaggaatttactttgcggtaagaaatgggctggcttccagttttatgtttcccaaatggtgattcagctgttccatttccatattctcccttattagaaatgaccactatattatgttctaaaatatctgcgtacttgtgtcccttcctataatctcagttcatctctttgagctatcttttgattcctttttcaaaccacactgctttactgaactgtcatcatcttatacatttttaatactcagcaagacaagtttctcaatgccactctttttcagagtttttctggtggttgtaagatgtttattcttctggataaactttagaatcactctttttgtccaaggtaaaatatatcccacattgagatcatactgaatatacagactaattcaggaaaaaatgtatgtctttattgcattgagtcttcttatccaataaaaaagatatgaatttccatgtattgaaatcttcactgagacttatttttggcttttcacatgtcctgcaaatgtattgttaaatttatttttaggtattttaggggaaatgattttctaaagtttgtattttctagcttgttataatttacatatgagatagtcattgttgtatattatttataactgatcatattactgtatttgtattgttttaatagtttttctattattttgggttttcctggaatacaaccttattatctacaaattatgattgttttgccttttccaatgttcataactgtttttatattcttgtctgattgctttgttcagcacttctagaataaagtcatgcaatactaatgataaagggtactctgaacttgtgactctcataggatgc

SEQ ID NO: 465135 - DNA, 406 bp, Homo sapiens
ggcaggaaacagtggtttcctgttcatatcctgcctgagcctgggccgggtggaggtgtcctgcatggagtcttgtgaaatcgcgtggactgcaacacccagcagcgcggtgagtccaccctgaaatccacagtgacccacgcggcatgtgctgggaattgaacgcttggggaaagagctgggctccagcggatcagccccgaccaagtcgttcccacagctcaggaccggacgctacaagcccactttgtagcagtttggcggacggcaaacttttgcaacacagtgcaaaaaccatttaacacctttaagggaattggaaatgggtttttcatgtgtggtggtgctgaaaattgagaataatgacagaattattaaaaacagccttctcggccttagactctta

SEQ ID NO: 465136 - DNA, 661 bp, Homo sapiens
cttcactcttataaaccctcaggggtcgtccctgttatacccagagacacccagaagacaaaacttagccccttctccaattcctttaataaatctacttgaggcagacatctgaccatttttttttctttacagattttactggagatttgtggttttgcagggaggatcacatggcacatggcagatcacacagccttcaactatattcctttctcctttttatccccacccgtatgtaccacattgaaaataatgaattaaatcttcagaaaataatgatctcaaaggaaccatcacgaaaatgcatcatttctctcatcaaagtgttctgtgacatctgtgatgtgggctctgccatagcttatgaattgatgctcgccttccttcccccatcagaagacatacaacacgaaggaagctcatgggtagtaaactgtgagaatttggggaacagttcagcttattacttcataacccctgacactcttgctaacacgctgaagacagaaaatatagcttctggggacatcgaaatccaagacaagaaggaggcaactggcacttgttaggcttgaggcagcagtgcacagataaatgtttaatgaccagtttcccagggggaaaaaaaagaaaaagccctgatttgtagcatttgtct

SEQ ID NO: 465137 - DNA, 630 bp, Homo sapiens
agatcttcttggcttagcggctgaagactgacacagcccgatcgcctcggaagccccatagaccatcatggacgccgagcttccggtaactctcacagtggaagattttactggagatttgtggttttgcagggaggatcacatggcacatggcagatcacacagccttcaactatattcctttctcctttttatccccacccgtatgtaccacattgaaaataatgaattaaatcttcagaaaataatgatctcaaaggaaccatcacgaaaatgcatcatttctctcatcaaagtgttctgtgacatctgtgatgtgggctctgccatagcttatgaattgatgctcgccttccttcccccatcagaagacatacaacacgaaggaagctcatgggtagtaaactgtgagaatttggggaacagttcagcttattacttcataacccctgacactcttgctaacacgctgaagacagaaaatatagcttctggggacatcgaaatccaagacaagaaggaggcaactggcacttgttaggcttgaggcagcagtgcacagataaatgtttaatgaccagtttcccagggggaaaaaaaagaaaaagccctgatttgtagcatttgtct

SEQ ID NO: 465138 - DNA, 753 bp, Homo sapiens
aagaggaagttaatatatatgtttctcccaaaagtgtctttgagcacccaaaagtactagagtcttgccttcttccttgtgtgattatgaatatgttgaaaagtagtgtgtggagaagtcagtcgccaagagaaaacaggattttctggccaagttcaaagtcccgagcagatcccatgacttcctccctgcagggcagacatctgaccatttttttttctttacagattttactggagatttgtggttttgcagggaggatcacatggcacatggcagatcacacagccttcaactatattcctttctcctttttatccccacccgtatgtaccacattgaaaataatgaattaaatcttcagaaaataatgatctcaaaggaaccatcacgaaaatgcatcatttctctcatcaaagtgttctgtgacatctgtgatgtgggctctgccatagcttatgaattgatgctcgccttccttcccccatcagaagacatacaacacgaaggaagctcatgggtagtaaactgtgagaatttggggaacagttcagcttattacttcataacccctgacactcttgctaacacgctgaagacagaaaatatagcttctggggacatcgaaatccaagacaagaaggaggcaactggcacttgttaggcttgaggcagcagtgcacagataaatgtttaatgaccagtttcccagggggaaaaaaaagaaaaagccctgatttgtagcatttgtct

SEQ ID NO: 465139 - DNA, 6110 bp, Homo sapiens
  misc_feature (1024)..(1024): n is a, c, g, or t
  misc_feature (5151)..(5151): n is a, c, g, or t
gctctgccaaaaaatgagatagtgtatagaaaatgttaatagatcttggccaatgtgacccgaaagccaggtgtgcccccttggaagaaggtgtttcctcatcatagtaacctgttgagcatcatactgaggatttgcttaagaatgaagtgtagacaggccagctctggaatcccatggagtaagtgtccacactggaggtggagagtagggtggggtgaaggtgaaggctgtggattcattccttagtataatgatcatcaccagcaatgttgggaaacagtgtcctaccaaacttaggagtcaaatgacctgaatttaaatctgacttttcccacttgctgctttcttcatttctttgaatttcagttccctcttctgtaattctggagtcacagcaaacagctcgttgagttgttggcaggattatatgtgatttaaaacacaaagacttgatagagtggtggtcccgtggtgtgggctcactaaacggtaacaattgagatggtgaccagtgatcttcacaactgtgtgatttatgaggcagcgttgcaatttcgacctcagattctgtgaggcaagctgaaaaatgtaccatcactaccactttacagatgggagaacacagtcagagaggtgaagttagttgcctgaggacccacagttggtcaggagtagaggtggaattttaattccatggacccatgggcctgaacggccaaggcaaccctgggacctgacttgaaactaggaccacaagcttcccttcatgggaagctctaaggaatcatggtgctgtggacaagagccttgtctcctctcccaggaagacaaggaagaggaggccagggaaatgggcttgggctggtttgtgggaaatttaggttaagactcagaggcaacctgataatacctctgagagttcaacacatcatagcctgagcctgacctggggaagcccttgtagaatttgcagtcagatgagtacaagagcatacaaaaccccaaagaattgatttaaatnccacctatgtcctaatgacccacaaagttgtgtctccagccctaatctgactcctaaaatccactatctgctctacatctccacctggacctcacaaacatctcatgttgaacttgcttaaacagaacctcgggccaggcacagtagctcacacctataatcctagcgctttgggaggctgaggcaagaggatcacttgagcccaggagtttgagaccagcctaggcagcatagtgagacccaatttctacaaacaacaacaacaaaaccaaaaacaaaaacaaaaacacaacaacaaaaaaaacaggcatggtgtcacgtgcctatggtcccagctactcaggaggctgggaagatcacttgaggaggtattcccacctcctcaaagatcacttgagctggggaaattgaggcttcgttgagtgacagtgggaaaccctgtctcaaaaacagaaaaataagctcaacataaacataaaccagtacctcttaccatcactcccctaacgcaaaccggttctatccatgcttctcatcttggttgaaaaacttcacaatcacagttgatgcctctctttatcaattaacatccattaagttagttaggaaataattttagttctaccttgaaagtagatcctaaatctggtaaaaccttaccacctccgcagctgccaccctgatctgaagagccatcttcttacttggattaccccaacagcctcttaaaaggtctccctgcttctatcctccttacaatctattataaacacaatagtcacaatgaccctttcaaaacatgagtcaggccatatcacttctctactgagaacagtgtgatggatccccatttcattctaagtaaaaccaaataccctaaaatggcttacactgatttgtgtagatttcacataattatcctcattttacagagaaggaaactcaccaagtagcaggactgggactttaccatggggcttaaggcaccaagcccagcatgctctctaccatatcccatgatatgatgagacatttcattcttccacagcctactggagatggatagggtagggtgaaccaagttgcagaaagggatactagctttgaagagaaggaaaggctctttgaagggtggtgggatgggggtggggttttaagaagctcacatctgctcttattttagttaaggatggacaatgcccactcttccctttcactgaacgtaaggagtgtccaccttcatgtcacagtgacatcgattgtccccagacagacaaatgttgtgaatccaggtgtggctttgtttgtgccagggcctggacaggtaaggattggggatatacctcccaaatctattgggcatgtgccaaggatgtcatgctgtctccatggagtggggggtgtcttgaacctcagatgctccttgggctcatctttgaggatctttgggaaccccttttaatgcccaacaagttatattgacctcttgacctctgaagactattgtgctgttcttcaaagccagtaattcatagcattgctctctattcttccccaagaaaacttattttttctgagactcattcctcaatgacttgcaaggtgacaatattcaccgattcataaaaaattcataaccatgaggtgtattcctaataagccctcatgtctgcacagaacttcaaagcatgcacatcatattcatatcctgtaagatgggctggggaaaacattagtagcaaatgatgttggatagaagccaactttcctgcctcctctaaggcaggtgtttacttccccatgtagtcccagggattgtccaggtgtggctttaaggttctaaggttcagtatagtgtggtggcaggagtccaaggcttttcaacctacttcaacttttctactggctttctatgtggcattgggcaactcatttccctctaaatacgcctcaatgcctacaatttgtaaaacaagaaggttctgtgtgctaatactcctgccacctgtggtactctggggttatataacccagatccattaattctgtaggagcagacaggaatcctatcagatggtacaagtcagagatggtaagacttttcttgatgctcctcaagttattagtcgtagaaagttgatactctgcctcctccagtctattgttactgtagggggaaaggtaagaagcttaatcagaataaaaccttgtttgagattcccaagattcctcaaatttgtctcaaattatgaccaagtatttcaaggtcaagtgttttcttttaccccataaagtcaaaaaaggtttctgcccacgcaagcccttgctatgtaccaagattgataaacccaagtgcctgcaggatgaggagtgcccattggtggaaaagtgctgctcacattgtggactgaaatgtatggaccccagacgttgaatagtaagtagaaaatattatcatcaaaatcattaattatgagtagcatgataaagagctgtcagttttgtcttgtatccaacttgccaaattatcttaagtatcacaatattgaatgatgttactttgattttatatataatcccatcatctgaaagtgatgatatatttggctttttttcaacttcatgactttattttcttgtcttcttgtattgtgtagaacctccaaaataataatgaaaataaaggcaatggcatccatccttgtctagttccttattttaaagtcaatggctcctgcactataaaaagatatttgttgttgaatttggaatacataagttttattgcacttaaattattttctttttccttttctttctttctttctttttttttttttttgtgagacggagttttgctcttattgcccaggcgcaatctcggctcactgcaacctctgcttcccgggttcaagtgattctcctgcctcggcctcccaagtagctgggattgcgggtgcccaccatcatgcccagctaattttttgtatttttagtggagatggggttttaccatgttggccaggctggtcacaaactcctgacctcaggtgatccacccacctcagcctcagaaagtgctgggatcacaggtgggagccactgtgcctggccagttatttcctttttaagcctatttcctatccatttatagctactactgaaaatgactactgaattttatcaaataccttttaagcatacagtcacataatgatttttctcttctaatttgttggcataataaattactaaattttcttgagccatccttgcattcttaataaacttaattgcagactgctgtatcaatatattattggttctttttagctaatagtatagtttgaattttcacatctatagtcaaaagaaaaataggtctttttaaatttgttttttctatttgggtcatattactttcaaaaaatgagtatgggaactaattgggaaacctagctactttttctatgctctgaaatattttacataatatagcaattcagcattttttgaaggctaccaaaattcagctccaaaagcatctagatcaggttctttctagtggtatattttagtaatttttaaatatttcatcttatagtctgcaggttttctacctcctcttctgcaaattttggtcttttgtattttggtaaaattgatccatttttcctatattttcacatgtattactttagagtagcataaattgttctctatataattcttttatatctttaactttggttaatgctttcatttgtacattcatgtttccacccacctatttactaactattcaatccctttactcacctatccattcactcaacacatatgcaaatacccaatccccactcacctatccctcctttccttccactgacacacttttcaacttagctatttgcctactccatatgtctatccacttacttttcttactcatctttcttctacagacccacttgcccatctagcctttaattcatcttcctattattgacctctctcttccccctttctctgcacacacacacatgcacacactctttcatacccatcaaaatacatattcatcatttctatacctaactccctccatccccctaccaatgcactcntccacctttcattcaaacagcctccatcaataggcccacatatcccatcactaccctatccatctttatattcaatccaatccacttattcacccaatcatccacccatccataatccatgcattcatgtacccaaacatccatgctttcctcactaatccctctccctgctcaaccatcttcccacttatcacactctaccagccacccatccatccacatagctacctacctattcacacacctaccaatcccccccacctaccttgctcttccagcaagatgtactgagtgtttatttggggcctattcatgttttaagcactgcgttctagacacagacctgtttaatggagttcagagcttacttgggggagcaaacatgtaacttagtaatagagttagaggcagagggaacaacataggaagccagtgacagagaatcagtccatgtgacagatcttgggctaatgaaaaagcaggaggtgccaggtagaggctgatcttgttggttctcgttggagtcccctgttctaagcacaggattgttcctgggagagaattggcctggaggcagaggtagggcaccatgccctcaatgagaaaggatgaagaaaggagaggcaaaaccccaggtgggtccttacccagccttctccaagaaattattggagagaaggggccaaaaccatgatttatcccaagtcccaaagacataaattttatttcacctgcttggaaagtgagatgcttggatgggcctgaaaattaggcaagacagaatggaatgaagcaaccagaaagatagttaatttattttcaataaaatttacgaaaaaatgcagccttaattggggaccctgggtaccatttagaaatttactgactttggtgagccaagtttgcgccactgcactccagcctgggtgacagagtgagactccgtttcaaaaaaaaaa

SEQ ID NO: 465140 - DNA, 4423 bp, Homo sapiens
  misc_feature (3464)..(3464): n is a, c, g, or t
gcaggggagcagatgagggaggagccttagagctggagcaaagtgaggaagctgtctccatagggaagaggcctgatgtggactgtccgaactgaaggagggcactttcctctccatagccccaccttctcctggaggaatgtagctttcctgctgcttctctcccttgctttggagtggacttctgcaatgctgaccaagaagatcaaacacaaaccagggttatgtcccaaagagaggctcacctgtaccactgaacttccggactcatgtaacacagattttgactgcaaggaataccagaagtgctgcttttttgcctgtcagaagaagtgcatggatccctttcaagaaccctgcatgctacctgtgaggcatggaaactgtaatcatgaggcacagcgctggcattttgactttaaaaattaccgctgcacacccttcaaatacaggggctgcgaagggaatgccaacaacttcttaaatgaggatgcctgcagaacggcctgcatgttaattgttaaggatggacaatgcccactcttccctttcactgaacgtaaggagtgtccaccttcatgtcacagtgacatcgattgtccccagacagacaaatgttgtgaatccaggtgtggctttgtttgtgccagggcctggacaggtaaggattggggatatacctcccaaatctattgggcatgtgccaaggatgtcatgctgtctccatggagtggggggtgtcttgaacctcagatgctccttgggctcatctttgaggatctttgggaaccccttttaatgcccaacaagttatattgacctcttgacctctgaagactattgtgctgttcttcaaagccagtaattcatagcattgctctctattcttccccaagaaaacttattttttctgagactcattcctcaatgacttgcaaggtgacaatattcaccgattcataaaaaattcataaccatgaggtgtattcctaataagccctcatgtctgcacagaacttcaaagcatgcacatcatattcatatcctgtaagatgggctggggaaaacattagtagcaaatgatgttggatagaagccaactttcctgcctcctctaaggcaggtgtttacttccccatgtagtcccagggattgtccaggtgtggctttaaggttctaaggttcagtatagtgtggtggcaggagtccaaggcttttcaacctacttcaacttttctactggctttctatgtggcattgggcaactcatttccctctaaatacgcctcaatgcctacaatttgtaaaacaagaaggttctgtgtgctaatactcctgccacctgtggtactctggggttatataacccagatccattaattctgtaggagcagacaggaatcctatcagatggtacaagtcagagatggtaagacttttcttgatgctcctcaagttattagtcgtagaaagttgatactctgcctcctccagtctattgttactgtagggggaaaggtaagaagcttaatcagaataaaaccttgtttgagattcccaagattcctcaaatttgtctcaaattatgaccaagtatttcaaggtcaagtgttttcttttaccccataaagtcaaaaaaggtttctgcccacgcaagcccttgctatgtaccaagattgataaacccaagtgcctgcaggatgaggagtgcccattggtggaaaagtgctgctcacattgtggactgaaatgtatggaccccagacgttgaatagtaagtagaaaatattatcatcaaaatcattaattatgagtagcatgataaagagctgtcagttttgtcttgtatccaacttgccaaattatcttaagtatcacaatattgaatgatgttactttgattttatatataatcccatcatctgaaagtgatgatatatttggctttttttcaacttcatgactttattttcttgtcttcttgtattgtgtagaacctccaaaataataatgaaaataaaggcaatggcatccatccttgtctagttccttattttaaagtcaatggctcctgcactataaaaagatatttgttgttgaatttggaatacataagttttattgcacttaaattattttctttttccttttctttctttctttctttttttttttttttgtgagacggagttttgctcttattgcccaggcgcaatctcggctcactgcaacctctgcttcccgggttcaagtgattctcctgcctcggcctcccaagtagctgggattgcgggtgcccaccatcatgcccagctaattttttgtatttttagtggagatggggttttaccatgttggccaggctggtcacaaactcctgacctcaggtgatccacccacctcagcctcagaaagtgctgggatcacaggtgggagccactgtgcctggccagttatttcctttttaagcctatttcctatccatttatagctactactgaaaatgactactgaattttatcaaataccttttaagcatacagtcacataatgatttttctcttctaatttgttggcataataaattactaaattttcttgagccatccttgcattcttaataaacttaattgcagactgctgtatcaatatattattggttctttttagctaatagtatagtttgaattttcacatctatagtcaaaagaaaaataggtctttttaaatttgttttttctatttgggtcatattactttcaaaaaatgagtatgggaactaattgggaaacctagctactttttctatgctctgaaatattttacataatatagcaattcagcattttttgaaggctaccaaaattcagctccaaaagcatctagatcaggttctttctagtggtatattttagtaatttttaaatatttcatcttatagtctgcaggttttctacctcctcttctgcaaattttggtcttttgtattttggtaaaattgatccatttttcctatattttcacatgtattactttagagtagcataaattgttctctatataattcttttatatctttaactttggttaatgctttcatttgtacattcatgtttccacccacctatttactaactattcaatccctttactcacctatccattcactcaacacatatgcaaatacccaatccccactcacctatccctcctttccttccactgacacacttttcaacttagctatttgcctactccatatgtctatccacttacttttcttactcatctttcttctacagacccacttgcccatctagcctttaattcatcttcctattattgacctctctcttccccctttctctgcacacacacacatgcacacactctttcatacccatcaaaatacatattcatcatttctatacctaactccctccatccccctaccaatgcactcntccacctttcattcaaacagcctccatcaataggcccacatatcccatcactaccctatccatctttatattcaatccaatccacttattcacccaatcatccacccatccataatccatgcattcatgtacccaaacatccatgctttcctcactaatccctctccctgctcaaccatcttcccacttatcacactctaccagccacccatccatccacatagctacctacctattcacacacctaccaatcccccccacctaccttgctcttccagcaagatgtactgagtgtttatttggggcctattcatgttttaagcactgcgttctagacacagacctgtttaatggagttcagagcttacttgggggagcaaacatgtaacttagtaatagagttagaggcagagggaacaacataggaagccagtgacagagaatcagtccatgtgacagatcttgggctaatgaaaaagcaggaggtgccaggtagaggctgatcttgttggttctcgttggagtcccctgttctaagcacaggattgttcctgggagagaattggcctggaggcagaggtagggcaccatgccctcaatgagaaaggatgaagaaaggagaggcaaaaccccaggtgggtccttacccagccttctccaagaaattattggagagaaggggccaaaaccatgatttatcccaagtcccaaagacataaattttatttcacctgcttggaaagtgagatgcttggatgggcctgaaaattaggcaagacagaatggaatgaagcaaccagaaagatagttaatttattttcaataaaatttacgaaaaaatgcagccttaattggggaccctgggtaccatttagaaatttactgactttggtgagccaagtttgcgccactgcactccagcctgggtgacagagtgagactccgtttcaaaaaaaaaa

SEQ ID NO: 465141 - DNA, 983 bp, Homo sapiens
tctcttctcatccatacaggcactttcctctccatagccccaccttctcctggaggaatgtagctttcctgctgcttctctcccttgctttggagtggacttctgcaatgctgaccaagaagatcaaacacaaaccagggttatgtcccaaagagaggctcacctgtaccactgaacttccggactcatgtaacacagattttgactgcaaggaataccagaagtgctgcttttttgcctgtcagaagaagtgcatggatccctttcaagaaccctgcatgctacctgtgaggcatggaaactgtaatcatgaggcacagcgctggcattttgactttaaaaattaccgctgcacacccttcaaatacaggggctgcgaagggaatgccaacaacttcttaaatgaggatgcctgcagaacggcctgcatgttaattgttaaggatggacaatgcccactcttccctttcactgaacgtaaggagtgtccaccttcatgtcacagtgacatcgattgtccccagacagacaaatgttgtgaatccaggtgtggctttgtttgtgccagggcctggacagtcaaaaaaggtttctgcccacgcaagcccttgctatgtaccaagattgataaacccaagtgcctgcaggatgaggagtgcccattggtggaaaagtgctgctcacattgtggactgaaatgtatggaccccagacgttgaatagtaagtagaaaatattatcatcaaaatcattaattatgagtagcatgataaagagctgtcagttttgtcttgtatccaacttgccaaattatcttaagtatcacaatattgaatgatgttactttgattttatatataatcccatcatctgaaagtgatgatatatttggctttttttcaacttcatgactttattttcttgtcttcttgtattgtgtagaacctccaaaataataatgaaaataaaggcaatggcatcca

SEQ ID NO: 465142 - DNA, 1029 bp, Homo sapiens
  misc_feature (26)..(27): n is a, c, g, or t
aggggctcgagcggccgccgccagtnnctaggcgctcgagcgaccgctggggcaggtaaagcagggcactttcctctccatagccccaccttctcctggaggaatgtagctttcctgctgcttctctcccttgctttggagtggacttctgcaatgctgaccaagaagatcaaacacaaaccagggttatgtcccaaagagaggctcacctgtaccactgaacttccggactcatgtaacacagattttgactgcaaggaataccagaagtgctgcttttttgcctgtcagaagaagtgcatggatccctttcaagaaccctgcatgctacctgtgaggcatggaaactgtaatcatgaggcacagcgctggcattttgactttaaaaattaccgctgcacacccttcaaatacaggggctgcgaagggaatgccaacaacttcttaaatgaggatgcctgcagaacggcctgcatgttaattgttaaggatggacaatgcccactcttccctttcactgaacgtaaggagtgtccaccttcatgtcacagtgacatcgattgtccccagacagacaaatgttgtgaatccaggtgtggctttgtttgtgccagggcctggacagtcaaaaaaggtttctgcccacgcaagcccttgctatgtaccaagattgataaacccaagtgcctgcaggatgaggagtgcccattggtggaaaagtgctgctcacattgtggactgaaatgtatggaccccagacgttgaatagtaagtagaaaatattatcatcaaaatcattaattatgagtagcatgataaagagctgtcagttttgtcttgtatccaacttgccaaattatcttaagtatcacaatattgaatgatgttactttgattttatatataatcccatcatctgaaagtgatgatatatttggctttttttcaacttcatgactttattttcttgtcttcttgtattgtgtagaacctccaaaataataatgaaaataaaggcaatggcatcca

SEQ ID NO: 465143 - DNA, 1330 bp, Homo sapiens
gcaggggagcagatgagggaggagccttagagctggagcaaagtgaggaagctgtctccatagggaagaggcctgatgtggactgtccgaactgaaggagggcactttcctctccatagccccaccttctcctggaggaatgtagctttcctgctgcttctctcccttgctttggagtggacttctgcaatgctgaccaagaagatcaaacacaaaccagggttatgtcccaaagagaggctcacctgtaccactgaacttccggactcatgtaacacagattttgactgcaaggaataccagaagtgctgcttttttgcctgtcagaagaagtgcatggatccctttcaagaaccctgcatgctacctgtgaggcatggaaactgtaatcatgaggcacagcgctggcattttgactttaaaaattaccgctgcacacccttcaaatacaggggctgcgaagggaatgccaacaacttcttaaatgaggatgcctgcagaacggcctgcatgttaattgttaaggatggacaatgcccactcttccctttcactgaacgtaaggagtgtccaccttcatgtcacagtgacatcgattgtccccagacagacaaatgttgtgaatccaggtgtggctttgtttgtgccagggcctggacagtcaaaaaaggtttctgcccacgcaagcccttgctatgtaccaagattgataaacccaagtgcctgcaggatgaggagtgcccattggtggaaaagtgctgctcacattgtggactgaaatgtatggaccccagacgttgaataacggagttttgctcttattgcccaggcgcaatctcggctcactgcaacctctgcttcccgggttcaagtgattctcctgcctcggcctcccaagtagctgggattgcgggtgcccaccatcatgcccagctaattttttgtatttttagtggagatggggttttaccatgttggccaggctggtcacaaactcctgacctcaggtgatccacccacctcagcctcagaaagtgctgggatcacaggtgggagccactgtgcctggccagttatttcctttttaagcctatttcctatccatttatagctactactgaaaatgactactgaattttatcaaataccttttaagcatacagtcacataatgatttttctcttctaatttgttggcataataaattactaaattttcttgagccatccttgcattcttaataaacttaattgcagactgctgtatcaaactttagagcacaatggatctcgagcaaggagaggacagcgattctcgtacgaacggttac

SEQ ID NO: 465144 - DNA, 1126 bp, Homo sapiens
gcaggggagcagatgagggaggagccttagagctggagcaaagtgaggaagctgtctccatagggaagaggcctgatgtggactgtccgaactgaaggagggcactttcctctccatagccccaccttctcctggaggaatgtagctttcctgctgcttctctcccttgctttggagtggacttctgcaatgctgaccaagaagatcaaacacaaaccagggttatgtcccaaagagaggctcacctgtaccactgaacttccggactcatgtaacacagattttgactgcaaggaataccagaagtgctgcttttttgcctgtcagaagaagtgcatggatccctttcaagaaccctgcatgctacctgtgaggcatggaaactgtaatcatgaggcacagcgctggcattttgactttaaaaattaccgctgcacacccttcaaatacaggggctgcgaagggaatgccaacaacttcttaaatgaggatgcctgcagaacggcctgcatgttaattgttaaggatggacaatgcccactcttccctttcactgaacgtaaggagtgtccaccttcatgtcacagtgacatcgattgtccccagacagacaaatgttgtgaatccaggtgtggctttgtttgtgccagggcctggacagtcaaaaaaggtttctgcccacgcaagcccttgctatgtaccaagattgataaacccaagtgcctgcaggatgaggagtgcccattggtggaaaagtgctgctcacattgtggactgaaatgtatggaccccagacgttgaatagtaagtagaaaatattatcatcaaaatcattaattatgagtagcatgataaagagctgtcagttttgtcttgtatccaacttgccaaattatcttaagtatcacaatattgaatgatgttactttgattttatatataatcccatcatctgaaagtgatgatatatttggctttttttcaacttcatgactttattttcttgtcttcttgtattgtgtagaacctccaaaataataatgaaaataaaggcaatggcatccaactttagagcacaatggatctcgagcaaggagaggacagcgattctcgtacgaacggttac

SEQ ID NO: 465145 - DNA, 2035 bp, Homo sapiens
gcaggggagcagatgagggaggagccttagagctggagcaaagtgaggaagctgtctccatagggaagaggcctgatgtggactgtccgaactgaaggagggcactttcctctccatagccccaccttctcctggaggaatgtagctttcctgctgcttctctcccttgctttggagtggacttctgcaatgctgaccaagaagatcaaacacaaaccagggttatgtcccaaagagaggctcacctgtaccactgaacttccggactcatgtaacacagattttgactgcaaggaataccagaagtgctgcttttttgcctgtcagaagaagtgcatggatccctttcaagaaccctgcatgctacctgtgaggcatggaaactgtaatcatgaggcacagcgctggcattttgactttaaaaattaccgctgcacacccttcaaatacaggggctgcgaagggaatgccaacaacttcttaaatgaggatgcctgcagaacggcctgcatgttaattgttaaggatggacaatgcccactcttccctttcactgaacgtaaggagtgtccaccttcatgtcacagtgacatcgattgtccccagacagacaaatgttgtgaatccaggtgtggctttgtttgtgccagggcctggacaggtaaggattggggatatacctcccaaatctattgggcatgtgccaaggatgtcatgctgtctccatggagtggggggtgtcttgaacctcagatgctccttgggctcatctttgaggatctttgggaaccccttttaatgcccaacaagttatattgacctcttgacctctgaagactattgtgctgttcttcaaagccagtaattcatagcattgctctctattcttccccaagaaaacttattttttctgagactcattcctcaatgacttgcaaggtgacaatattcaccgattcataaaaaattcataaccatgaggtgtattcctaataagccctcatgtctgcacagaacttcaaagcatgcacatcatattcatatcctgtaagatgggctggggaaaacattagtagcaaatgatgttggatagaagccaactttcctgcctcctctaaggcaggtgtttacttccccatgtagtcccagggattgtccaggtgtggctttaaggttctaaggttcagtatagtgtggtggcaggagtccaaggcttttcaacctacttcaacttttctactggctttctatgtggcattgggcaactcatttccctctaaatacgcctcaatgcctacaatttgtaaaacaagaaggttctgtgtgctaatactcctgccacctgtggtactctggggttatataacccagatccattaattctgtaggagcagacaggaatcctatcagatggtacaagtcagagatggtaagacttttcttgatgctcctcaagttattagtcgtagaaagttgatactctgcctcctccagtctattgttactgtagggggaaaggtaagaagcttaatcagaataaaaccttgtttgagattcccaagattcctcaaatttgtctcaaattatgaccaagtatttcaaggtcaagtgttttcttttaccccataaagtcaaaaaaggtttctgcccacgcaagcccttgctatgtaccaagattgataaacccaagtgcctgcaggatgaggagtgcccattggtggaaaagtgctgctcacattgtggactgaaatgtatggaccccagacgttgaatagtaagtagaaaatattatcatcaaaatcattaattatgagtagcatgataaagagctgtcagttttgtcttgtatccaacttgccaaattatcttaagtatcacaatattgaatgatgttactttgattttatatataatcccatcatctgaaagtgatgatatatttggctttttttcaacttcatgactttattttcttgtcttcttgtattgtgtagaacctccaaaataataatgaaaataaaggcaatggcatcca

SEQ ID NO: 465146 - DNA, 1065 bp, Homo sapiens
gcaggggagcagatgagggaggagccttagagctggagcaaagtgaggaagctgtctccatagggaagaggcctgatgtggactgtccgaactgaaggagggcactttcctctccatagccccaccttctcctggaggaatgtagctttcctgctgcttctctcccttgctttggagtggacttctgcaatgctgaccaagaagatcaaacacaaaccagggttatgtcccaaagagaggctcacctgtaccactgaacttccggactcatgtaacacagattttgactgcaaggaataccagaagtgctgcttttttgcctgtcagaagaagtgcatggatccctttcaagaaccctgcatgctacctgtgaggcatggaaactgtaatcatgaggcacagcgctggcattttgactttaaaaattaccgctgcacacccttcaaatacaggggctgcgaagggaatgccaacaacttcttaaatgaggatgcctgcagaacggcctgcatgttaattgttaaggatggacaatgcccactcttccctttcactgaacgtaaggagtgtccaccttcatgtcacagtgacatcgattgtccccagacagacaaatgttgtgaatccaggtgtggctttgtttgtgccagggcctggacagtcaaaaaaggtttctgcccacgcaagcccttgctatgtaccaagattgataaacccaagtgcctgcaggatgaggagtgcccattggtggaaaagtgctgctcacattgtggactgaaatgtatggaccccagacgttgaatagtaagtagaaaatattatcatcaaaatcattaattatgagtagcatgataaagagctgtcagttttgtcttgtatccaacttgccaaattatcttaagtatcacaatattgaatgatgttactttgattttatatataatcccatcatctgaaagtgatgatatatttggctttttttcaacttcatgactttattttcttgtcttcttgtattgtgtagaacctccaaaataataatgaaaataaaggcaatggcatcca

SEQ ID NO: 465147 - DNA, 1032 bp, Homo sapiens
tctccttgctcgagatccattgtgctctaaaagatgcaacctgatatggctgttggagcccaagtagggcactttcctctccatagccccaccttctcctggaggaatgtagctttcctgctgcttctctcccttgctttggagtggacttctgcaatgctgaccaagaagatcaaacacaaaccagggttatgtcccaaagagaggctcacctgtaccactgaacttccggactcatgtaacacagattttgactgcaaggaataccagaagtgctgcttttttgcctgtcagaagaagtgcatggatccctttcaagaaccctgcatgctacctgtgaggcatggaaactgtaatcatgaggcacagcgctggcattttgactttaaaaattaccgctgcacacccttcaaatacaggggctgcgaagggaatgccaacaacttcttaaatgaggatgcctgcagaacggcctgcatgttaattgttaaggatggacaatgcccactcttccctttcactgaacgtaaggagtgtccaccttcatgtcacagtgacatcgattgtccccagacagacaaatgttgtgaatccaggtgtggctttgtttgtgccagggcctggacagtcaaaaaaggtttctgcccacgcaagcccttgctatgtaccaagattgataaacccaagtgcctgcaggatgaggagtgcccattggtggaaaagtgctgctcacattgtggactgaaatgtatggaccccagacgttgaatagtaagtagaaaatattatcatcaaaatcattaattatgagtagcatgataaagagctgtcagttttgtcttgtatccaacttgccaaattatcttaagtatcacaatattgaatgatgttactttgattttatatataatcccatcatctgaaagtgatgatatatttggctttttttcaacttcatgactttattttcttgtcttcttgtattgtgtagaacctccaaaataataatgaaaataaaggcaatggcatcca

SEQ ID NO: 465148 - DNA, 1740 bp, Homo sapiens
gcaggggagcagatgagggaggagccttagagctggagcaaagtgaggaagctgtctccatagggaagaggcctgatgtggactgtccgaactgaaggagggcactttcctctccatagccccaccttctcctggaggaatgtagctttcctgctgcttctctcccttgctttggagtggacttctgcaatgctgaccaagaagatcaaacacaaaccagggttatgtcccaaagagaggctcacctgtaccactgaacttccggactcatgtaacacagattttgactgcaaggaataccagaagtgctgcttttttgcctgtcagaagaagtgcatggatccctttcaagaaccctgcatgctacctgtgaggcatggaaactgtaatcatgaggcacagcgctggcattttgactttaaaaattaccgctgcacacccttcaaatacaggggctgcgaagggaatgccaacaacttcttaaatgaggatgcctgcagaacggcctgcatgttaattgttaaggatggacaatgcccactcttccctttcactgaacgtaaggagtgtccaccttcatgtcacagtgacatcgattgtccccagacagacaaatgttgtgaatccaggtgtggctttgtttgtgccagggcctggacagtcaaaaaaggtttctgcccacgcaagcccttgctatgtaccaagattgataaacccaagtgcctgcaggatgaggagtgcccattggtggaaaagtgctgctcacattgtggactgaaatgtatggaccccagacgttgaatagtaagtagaaaatattatcatcaaaatcattaattatgagtagcatgataaagagctgtcagttttgtcttgtatccaacttgccaaattatcttaagtatcacaatattgaatgatgttactttgattttatatataatcccatcatctgaaagtgatgatatatttggctttttttcaacttcatgactttattttcttgtcttcttgtattgtgtagaacctccaaaataataatgaaaataaaggcaatggcatccatccttgtctagttccttattttaaagtcaatggctcctgcactataaaaagatatttgttgttgaatttggaatacataagttttattgcacttaaattattttctttttccttttctttctttctttctttttttttttttttgtgagacggagttttgctcttattgcccaggcgcaatctcggctcactgcaacctctgcttcccgggttcaagtgattctcctgcctcggcctcccaagtagctgggattgcgggtgcccaccatcatgcccagctaattttttgtatttttagtggagatggggttttaccatgttggccaggctggtcacaaactcctgacctcaggtgatccacccacctcagcctcagaaagtgctgggatcacaggtgggagccactgtgcctggccagttatttcctttttaagcctatttcctatccatttatagctactactgaaaatgactactgaattttatcaaataccttttaagcatacagtcacataatgatttttctcttctaatttgttggcataataaattactaaattttcttgagccatccttgcattcttaataaacttaattgcagactgctgtatcaaactttagagcacaatggatctcgagcaaggagaggacagcgattctcgtacgaacggttac

SEQ ID NO: 465149 - DNA, 1611 bp, Homo sapiens
gcaggggagcagatgagggaggagccttagagctggagcaaagtgaggaagctgtctccatagggaagaggcctgatgtggactgtccgaactgaaggagggcactttcctctccatagccccaccttctcctggaggaatgtagctttcctgctgcttctctcccttgctttggagtggacttctgcaatgctgaccaagaagatcaaacacaaaccagggttatgtcccaaagagaggctcacctgtaccactgaacttccggactcatgtaacacagattttgactgcaaggaataccagaagtgctgcttttttgcctgtcagaagaagtgcatggatccctttcaagaaccctgcatgctacctgtgaggcatggaaactgtaatcatgaggcacagcgctggcattttgactttaaaaattaccgctgcacacccttcaaatacaggggctgcgaagggaatgccaacaacttcttaaatgaggatgcctgcagaacggcctgcatgttaattgttaaggatggacaatgcccactcttccctttcactgaacgtaaggagtgtccaccttcatgtcacagtgacatcgattgtccccagacagacaaatgttgtgaatccaggtgtggctttgtttgtgccagggcctggacagtcaaaaaaggtttctgcccacgcaagcccttgctatgtaccaagattgataaacccaagtgcctgcaggatgaggagtgcccattggtggaaaagtgctgctcacattgtggactgaaatgtatggaccccagacgttgaatagtaagtagaaaatattatcatcaaaatcattaattatgagtagcatgataaagagctgtcagttttgtcttgtatccaacttgccaaattatcttaagtatcacaatattgaatgatgttactttgattttatatataatcccatcatctgaaagtgatgatatatttggctttttttcaacttcatgactttattttcttgtcttcttgtattgtgtagaacctccaaaataataatgaaaataaaggcaatggcatccatccttgtctagttccttattttaaagtcaatggctcctgcactataaaaagatatttgttgttgaatttggaatacataagttttattgcacttaaattattttctttttccttttctttctttctttctttttttttttttttgtgagacggagttttgctcttattgcccaggcgcaatctcgcctggatgacagagcaagaatgtttttaaagaaaagaaaggaaaggaaaggagaagagaagagaagaggaaaggaaaggaaaggaaaggaaaagagaagaaaagaaaagaagaaaaaagaaaagaaaaatttgattcggtagtctcttcaagtgagattgtcaagttggtggcatgggattcttacggcggctgtctgtgatcctaaattttgtgaccatatagtcactctctgataataaggctgtctttgtctggcctctgtctgtcatgtaggaaaatttggagaacaaacttggcccaaaagggtaactcctagttagagaagaaaacgggagccctcgggataacatttactctgt

SEQ ID NO: 465150 - DNA, 1144 bp, Homo sapiens
ataagaactgggggagaactcagttgctggcagaaagggctgctggagctccctgaccaggttcttagaatgtgcacacctgtggactgtggaagacctgctccaggaaagcagctccggacaaactggaggaacttcagggattccttcggccttcagagcattgacttctctcctcctttttcacttttctccaaccttactgtcttttttgctgttcctcagacacagcagcttgatcccactaccaccaaggaactaaatgctttactatatcctttaaacaatgttgcacatttagatggtgtcctgaaaattttatatcctttaaacaatcttgcacatttagatggtgtcctgaaaattttatgtacttttgagagcccagaggatgttccaaagaggtttcaagtattctgtgtacttggcctaagttttaaaattgaaattgaaaaaaataactttaaaccaactaattatctcttctttaagtaattgtttgaatgccctcatggcctggcagcctagcttccacaagaacaaacagtccaagatgccaaggcagaagctgaaattccttttataacctagccccaaaagttacctttgtcacgtctactgtactctattggttatgcatgttctgttggaggaaggagactatggaacggcatgaatatcaaaaggccatgatcactggagccatcttggaggctggctatcacaacactcacctcactgctatcagagtgatcccttaaacatgaacctgtctaattaaagtggaaatggtgaagatacactgtggatagaggaattgagaagaatggtggtgaaggcctgaaagagaatggaagataaagcagcaatttactatgggcatcaaacagatacgtcgaatgacattgagggtttcactgaagaccagtggactcaaacttacccaatatggccactgttctctcaaaaaacgtgagcaaatgacatctggagctgatctccaatattttagagaaagaattgaaaagaatttttgtgggggaataaaattttacccagaaagtaaaatagatgacctctttttatgagactctagtgttcttaacaagctgtctaataaactatttcctatttaaaagaataa

SEQ ID NO: 465151 - DNA, 1985 bp, Homo sapiens
actcaacactcaattaggatgtggctgctgggggccagcaccatgcagcagcgtcccatccagccctctttcaccaagtccctctgccgtgagtcccactggaagtgcctcctgctctcgctgctcatgtacggctgcctgggggcagtggcctggtgccacgtcaccacagtgacgcgcctcaccttcagcagcgcctaccagggcaacagcctcatgtaccatgacagcccctgctccaacggctatgtctacatccccctggccttcctgctcatgttgtacgccgtctacctggtggagtgttggcactgccaagcccgccatgagctgcagcaccgtgttgatgtgagcagtgtgcgggaacgtgtgggccgcatgcagcaagccacgccctgcatctggtggaaggccatcagctaccactatgtccgccgcacccgccaggtcaccagataccgcaatggagacgcctataccaccacccaggtctaccacgaacgcgtcaacacgcacgtggcggaggctgagttcgactacgcgcgctgcggcgttcgcgacgtgtccaagacgctggtggggctggagggcgcgccggccacgcggctgcgcttcaccaagtgcttcagtttcgccagcgtggaggccgagaacgcgtacctgtgccagcgcgcgcgcttcttcgcagagaacgagggcctagacgactacatggaggcacgcgagggcatgcacctcaagaacgtggacttccgtgagttcatggtggccttcccggacccggcccggccgccctggtacgcctgctcgtcggccttctgggccgcggcgctgctcacgctgtcgtggccgctgcgagtgctggccgagtaccgcacggcctacgcgcactaccacgtggagaagctatttggcctggagggcccgggctcggccagcagcgcaggcggtggcctcagccccagcgatgagctgctgcccccgctcacccaccgcctgccgcgggtcaacacagtagacagcacggagctcgagtggcacatccgctccaaccagcagctggtgcccagctactctgaggcggtgctcatggacctggcggggctcgggacgcgctgcggcggggcaggcggcggctacgcgccctcgtgccgctacggtggggtaggcggcccgggcgcggcgggcgtggctccctaccggcgcagctgcgagcactgccagcgcgccgtcagcagctcgtctatcttctcgcgcagcgccctaagcatctgcgccagcccgcgggccggcccggggcccggtgggggcgcgggctgcgggggcagccgcttctcgctgggccgtctctacggctcccggcgcagctgcctgtggcgcagccgcagcgggagcgtcaacgaggccagctgccccacggagcagacgcggctgtccagccaggccagcatgggggacgacgaggacgacgacgaggaggaggccgggccgccgccgccctaccacgacgccctctactttccggtcctcatcgtccaccggcaggaggggtgtctgggccacagccaccggccgctgcaccgccacggctcctgcgtagagacctcactgtgacctccggccccggagtggcccgcgccgtcctcccgcctgcccctcgccggactgtgctccctctgcgacgcagggcgagtcaccacggtgactgaggccgcgcggggggcagggaaagggaggagctgcttcccaccgtcctgggagaagggtgcaaaggaaggggtcatttacatcactacccaggatctgacacacatactacacattttcaggtagatgtgactaaaacaaaagtttcacaaaacaatacttaacctatttgtgacgcatgatgacatattctgttcttttccatttgaaaaatggtagccaatacccactaaattgacatctcaaccctactagtttgaaaaacatgaatctctggc

SEQ ID NO: 465152 - DNA, 821 bp, Homo sapiens
tcttggttgtgagggtcataagatgggaactctcccggcacgtagacatatcccgccgtgggtgaaagttcccgaagacctgaaagatccagaggtgttccaggtccagacgcggctgctgaaagccattttcggtgagtgtgcccagtactggcgggctgccccggctcgggagtctcagccggcccggggatctcatctcttttccccaacaggcccggacggatctcgaatcccttacatcgagcaggtgagcaaggccatgctcgagctgaaggctctggagtcttcagacctcaccgaggtcgtggtttacggctcctatttgtacaagctccggaccaagtggatgctccagtccatggctgagtggcaccgccagcgccaggagcgagggatgctcaaacttgccgaagccatgaatgccctcgaactaggcccttggatgaagtgaaccagtttccagccaatgcaatgaagccgggttgcagagattaggttgtggccagagctagagtgattccttaagcttgttttaaaatctgctccagcctaaagagttaagggaaaaccatttgttcccttaaagagttaagggaaaacccttggctctgagtcttgttgtgaatatttctttgatgattgttaataaaaagtgttttttcttttttcccatttttaaaaataacaataaagttttaaataagttgatagttcagtgtggttgatggattgtaggaagaagtatatatacttctctctccatttgttacataaccaagcttcatatcacagaagtgtatgtcttctcctctgccata

SEQ ID NO: 465153 - DNA, 4054 bp, Homo sapiens
gtgtatcgggctgaagacctgccaggttggacgtccctgccgtgagtggtgtcctcagaggccgcggttctctgcagcagccctgggcagtctgcagcagggaaacctctggtcgagtgggtccagggggagccttggtggccaagtctgctgtgtggccgcagtagaatcctgagcctgggtgagggggaagagcagaagtttccttcccacatttctggaggctgggggtgcaagatcaaggcgccggcgtccccggggcctcctggctgtgttcttggaggctagagggcgctggaggccgcaggaagcctcttgtgtgacggccttgatccccttcactgggaggagacctggagctagtcatcctccaacactatcacgtcggcaacgcctgggtcttggaggggacacattcgaacctcagccaggtacaagcaggagcagggaggccctgacggggcaggacggtgacacctcctctccacacctctgcagcagaagatcgtgcctcctggtggggatgattattgattaaagcatctgaattcaatcagaagctgtttcctgagctcatcaggaaaggctgctctgacatggaaccagtaagctcttccctctacctgccgggtgattcacacgggctctgaaccaacacacacagagagggcagtgtggagatggagccgggaggtgcagctgcagccaggggaggcctagagccccgcagagcatcaggaggctggaaggagccttcctggaccttcagggaagctcgccctgcctgcacctggaaccgagatcacaggtctctagctgcagttctgtgcgccctgcctgcacctggagccgagatcatgggtctctggctgctgttctgtgagcgggtagatctgctggttaaggccaccagtcagtgccatttgtctcggcgtccatgggagagaaacacagtccctttctccttcctggagccccctcccctgtccttggcttatgtcctctggcacgtcctgagctgtggccacagcgagcctcaggctccaggcctttctgcccagcttctgctatggcctagcatggtggaccctccctcacgtcccatccctgactcccctcatccacccaactgtccccgctcagccgctgcgaccgctcccaggagaacgctctgttcattgctcggcactgagggttgttttatataaatatcactcgcgacagtggatgcctcttcagggtggaacccacgtggcagctggtgtgtccctgtgggcaacttgctcatgactttgcaccatcactggaggtttaacaaaaatctcatttattcaattccaggctggaggtagcctgcatcatttcttcatctggtaggtagttttcttttttttttttttttaattcgggatttaaaccctttctaggaaacagacatctctagagaaaaatgaaagcataaatctacctctataagcttgaacaaataaattacagtaaagcactgttaactcaaactaacttgaaggaaacgctgcttattagcaggaaagatcatttaaagtaaaatacacatggtaccacctttgatcactgtggattctggagcaatgttcatattccatgcaaggatgccaagggccaggttccaacgtgggattgtttctcccgccccatgagggtccattgccaaggagggacacacgcaggaaaatgggaatttaaaggattgctgactgtgtctcccaatgccccaacgaaggactccagaaaagtgagcaggggccgggcatagagcccaggcgagggtcccaggctaggcctcgctcccagctccttggaacctcagccctgctggctccagaggccaagactctgtgatacaggagttattaagaaataatttttaggcagatagtaaaggtaaaggttcttggtgtaaactttcctgtaataaaaaacacccgaaccatctcttttctaacagaaaaggcggcttgaagggccggactggcaagctttgatatgcaaatgccgaccattagaaactggatacctcaatatggcaattcccgctgtcttctccttgccagcacgtgtaccaagttcatggccacctccagataacaccaagtgttgggaacatcatggtgacccacatttgcatattaaagggctaaggtgggagggccaggtttttctcaggctatgtaaatgacacacctggtcaagccaatcccctcggccttatgcaaaccagacaccgcctcctccagcgtcccagtataagcagccacttttccgccccacacgggggttttctctttgtttgaatccccctccctctgctctgtacaggggagctgctttcttcttccttccttctttcttgcctattaaactttttgcactgggcctgacacccctgccactggccaggggctgaaggggcctggacccaagtgaccagtaaacagcctcgatctctctctgtctctctgcatctctgtctctgtctctctctcgtccaaatcttcagaggcagcctggcctcctggggatggtgggctaggcctgtgaggttggggggatccaatcactaagcggaaggtgcagagcccagcccaccctgcctccctggccccactgctctcggaggcatggaacacactgcctcacttcctcaccacggccagtggagacggggcaggggtctggcatttgaaagggccgtcctgttcagccctgcccctggagaaccagcctcgggtgtgcctgtgacggctccatggaacaggccactatagattccgccgtgacagtcaggatgttggagggcccctgccaccatagggcctgacttggggcagccagacctgagtgggagcagggatggcctggtgggagaggcctcggctcaccactcactggctctgcaactcttactaaaccagcactgacagccacagcctcaaatccctctggtgcaagcttggagttcgcgttcatccttccgtgttttccgggggctgagcacgtttcttcccggcctcctgctccccacagagatgaggctgtgcttgggtcacagcttccccttctggaggttacattctgctccatcttcagtgtctgtgatatgggcgtgtgtctgttatgtgtgtggctgtgtgtccctgtgtgtttgtgtgctgcatatttgtgtgtatatgtgtgttgtgttttgtgtgtgtggtatttctgtgcatttgtgtgtctgtacgctctgtgtgtatctgtgcatgtgtgtgtctgtgcatgtgtctccatattcctgtgtgtgtgcatgtctgtatgctccctgtatgcatgtgtgtgtgtatgctctatgtgtctgtgtacatgtgtatatgctatgtgtgtgtgcatatgtctgtacactctgtgtgtgtctgtgcacgtgtgtctgtatactatgtgtgtgtgcatgtgtatgtgcatgagtgtgtctgtgcctgtgtctgtacactctgtgcatgtatgtgcatgtgtgtgtctgtgcatgtgtgtatactctgtgtctgtgcacatgtgtgtctgtatgctatgtgtgtgcatgtgtgtctgtgcatgtgtgtctgtacactctgtgtgtgtttgtgcaggttgcatgtgtgcatgcgagaccttgctttgtttgccacatgtggcagctccctaggaaggcgcctctgcagggtcctgctgctcaagccttcccgctgagctgccttcatgctgccctgacccacagttgaaagctgagctctgcagcccgtgccaggagctcttcttgctgtgtttttgctgcaggaagcagcaaaatgggtgctgggtggaaactggagccaggcccctccacgtgctgctctcgggcccctggagatgaccaggccagtgagggtggggccctaaaaaacctgtggccatgggagggtgtgcccgagcctggggtctcctcctcacgggggccctggccaccagctgggtgtgcacttgcagccccaaacatgccccgcggatcccaccctccagc

SEQ ID NO: 465154 - DNA, 3281 bp, Homo sapiens
gcgttccccagctccccccgcagcccgctccacagtggtccgctccggttggttgtcacagcagcctcgacgctatggaggagcctggtgctacccctcagccctacctggggctggtcctggaggagctaggcagagttgtggcagcactacctgagagtatgagaccagatgagaatccttatggttttccatcggaactggtggtatgtgcagctgttattggattttttgttgttctcctttttttgtggagaagttttagatcggttaggagtcggctttatgtgggaagagagcaaaaacttggtgcaacgctttctggactaattgaagaaaaatgtaaactacttgaaaagtttagccttattcaaaaagagtatgaaggctatgaagtagagtcatctttagaggatgccagctttgagaaggcggcagcagaagaagcacgaagtttggaggcaacctgtgaaaagctgagcaggtccaattctgaacttgaggatgaaatcctctgtctagaaaaagacttaaaagaagagaaatctaaacattctcaacaagatgaattgatggcggatatttcaaaaagtatacagtctctagaagatgagtcaaaatccctcaaatcacaaatagctgaagccaaaatcatctgcaagacatttaaaatgagtgaagaacgacgggctatagcaataaaagatgctttgaatgaaaattctcaacttcagacaagccataaacagctttttcagcaagaagctgaagtatggaaaggacaagtgagtgaacttaataaacagaaaataacatttgaagactccaaagtacacgcagaacaagttctgaatgataaagaaaatcacatcaagaccctgactggacacttgccaatgatgaaagatcaggctgctgtgcttgaagaagacacaacggatgatgataacctggaattaaaagtgaacagtcaatgggaaaatggtgctaacttagatgatcctccgaaaggagctttgaagaaactgattcatgctgctaagttaaatgtttctttaaaaagcttagaaggagaaagaaaccacattattattcagttatctgaagtggacaaaacaaaggaagagcttacagagcatattaaaaatcttcagactcaacaagcatctttgcaatcagaaaacatatattttgaaagtgagaatcagaagcttcaacagaaacttaaaataatgactgaattctatcaagaaaatgaaatgaaactctacaggaaattaacagtggaggaaaattaccgaatagaggaagaagagaagctttctagagtggaagaaaagatcagccatgccactgaagagctggagacctatagaaagctagccaaagatcttgaagaagaattggagagaactgttcatttttatcaaaagcaggttatttcctacgagaaaagaggacatgataattggttggcagctcggactgctgaaagaaacctcagtgatttaaggaaagaaaatgctcacaacaaacaaaaattaactgaaagagagttgaaatttgaacttttagaaaaagatcctaatgcactcgatgtttcaaatacagcatttggcagagagcattccccatgtagtccctcaccattgggtcggccttcatctgaaacgagagcttttccctctcctcaaactttgttggaggatccactcagactctcacctgtgcttccagggggaggaggaagaggcccaagcagcccagggaatcccctggaccatcagattaccaatgaaagaggagaaccaagctatgacaggttaatcgatcctcacagggctccttctgacactgggtccctgtcatctccggtggaacaggaccgtaggatgatgtttcctccaccagggcaatcatatcctgattcaactcttcctccacaaagggaagacagattttattctaattctgaaagactgtctggaccagcagaacccagaagttttaaaatgacttctttggataaaatggataggtcaatgccttcagaaatggaatccagtagaaatgatgccaaagatgatcttggtaatttaaatgtgcctgattcatctctccctgctgaaaatgaagcaactggccctggccttattcctccacctcttgctccaatcagcggtccattgtttccagtggatacaaggggcccattcatgagaagaggacctcctttccccccacctcctccaggaaccatgtttggagcttctcgaggttattttccaccaagggatttcccaggtccaccacatgctccatttgcaatgagaaacatctatccaccgaggggtttacctccttaccttcatccgagacctggattttaccccaaccccacattctgaaggtagaagcgagttcccttcaggattgattccgccttcaaaggagcctgctactggacatccagaaccacagcaagacacctgacaatattgttgctttcttcaaaagtaattttgactgatctcattttcagtttaagtaactgctgttacttaagtgattgcacttttctcaaattgaagtttaatggaataatagttctcaggatagtattttgtaaataaagatggtttgaatatgaatcttatgagtaaatcatttccattttattatattctagatcatataacttttaacttggtgaactaatccactcttagagaaacaatagtgggagttttatatatgtaatcttgcaggtgaggaggctttaaattctaaaggttgtggtgtcttcatgccaagaactgtattcactgtggttgtagataaatgtgaaagtaactttatgcttaatttaataaattttcattgatttttttaaaaaaagaaaactgaaaggagatatagatgaatccacaattatagttagaaatttcctcatgcctttttcaataattgatagaactagacagaaaatcagcaaggagtgttggctttggcagcactttctaaaatcagaatgatgccaacaagattaaaacggttcttgaatatagattacacaaaattttgtgaagcatttcatgtttttaaaaagaggaaaaaaaagaaaatcaacaagaatataaaacaactcaaaatgccattaaccaaaagaatctatttggcatttacagaatattccacacagtaacagcagaatacacatattttttttgagtgctgacgaaacacctggcaagatagagctgtcctaggccctaaaactc

SEQ ID NO: 465155 - DNA, 1893 bp, Homo sapiens
  misc_feature (1891)..(1891): n is a, c, g, or t
ggagtgttgacattcagggatgtggctgtagaattctccccagaagagtgggaatgcctggactctgctcagcagcgtttgtatagggatgtgatgttggagaactacagaaatctggtctccttgggtcttgctatctttaagccagacttgatgacctgtctggagcaaagaaaagagccctggaatgtgaagagacaggaggcagtagccaaacacccagattattaagaattttgttaaacggatgcttgaaggcagcatactcgttaagagtcatcaccactccctaatctcaagtacccagggacacaaacactgcggaaggccacagggtcctctgcctaggaaaaccagaggcccttgttcacttgtttatctgctgaccttccctccactattgtcctatgaccctgccaaatccccctctgcgagaaatacccaagaatgatcaataaatactaaaaaaaaaaaacgagatttttgtcatacattagaataggtatgaatgatttagcagataacatatgtgaaatgtccaaaggtgaaggagaaaacaagagcttaaaatgtggattgggaagctgttctccaatggaattgattcttgaaaagcctcttactgtcatggaagaaaattttttggtattgccagagcatgacataaaagattcatttcaaaaggtgattcttagaaaatatggaagcagtgaccttaatactttacatttaaagaaagactaccaaagtgtgggtaattgcaaggggcagaaaagcagatacaatggccttcatcaatgtttgtcaactacccgtagcaaaaccagtcaatgtaataaatgtggtaaagcttttgggttgtgctcaatcttcactgaacataaggaaatttttagcaaagagaaatgctacaaatgtgaggaatgtggcaaagactgtaggttgttctcagattttactctacagaagagaatccatactgcagagagatgctacaaatgtgaagattgtgccaaagtttttaaaaagttctcaaaccttactgaacataatagagttcatcctggagagaaaccctacaaatgtgaagaatgtggcaaaacctttacctgttcctcaacccttattaaacacaagagaaatcattctggagacagacccggcaaatgtgaagaatgtaacaaagcgtacaggtggttctcacaccttgctaaacataagagaattcatactggagagaaatcctacaaatgtaatgaatgtggaaaagcttttacatggatctcggtccttagtcatcataagaaaattcatactagagagaaaccctacatctgtgaaggatgtggcaaagcctttacccgctcctcaaccctgattagccacaagagaattcatatggaagagagaccctacaaatgtgaagaatgtaacaaagcctacaagtgtcaacataagagaattcatactggagagaaaccctacaaatgtaatgaatgtggaaaggcttttacgtgtatcttggcccttagtcaacataaaataattcatgttggagagaaaccctacatctgtgaagaatgtggcaaagcctttacccgctcctcaacccttactaaccacaagagaattcatatggaagagaggccttacaaatgtgaagaatgcagcaaaacatttaagtgcttctcagacctcactaattataagagaattcacactggagagaaaccctacaaatgagaagaatgtggaaaagcatcgagctcacataatatatacttttctattcatctaatttcataaaacattctttgtataatcccctcagagattatgacagtgactgacaaaatttaatggtgttcacagaataattttcacatgtganaa

SEQ ID NO: 465156 - DNA, 1196 bp, Homo sapiens
cccaaaattatgtaacttctccacaggataagatccgatcctacagtaaatagaaaggtgccacttattcatctgaagaagcaaaaggaaatgctttcaacccagatcccagacacagagaggagcccaggtttaaaagctcctccctgccaaggacagagtgccactcaactccatctttgcccataagtctccctgggggacgtctggcaatagctagagacatttggggatgtcaaaactaggaaggacgctactgcatcagtctacattggtctttaactatgacatgtacaaaccagtgggaaaacattaactatggttaatggactgaatggatttatttaagaagaaatatttaaagaaccaaaagcatcaaattatctccacaacacatatattagtcacagagacataatgtaaagtatgtcctaaatattacgtcttccaaaaaccccatcttaagcctcataaagattgaaagaaacagcacatttcgaaatctcaaattctcttagccatatttttacttttctcttctcatcacctatttcaatatttttctacctttctaattaaggtctatactctagagggaagactgtgggtatggtagagcaaagactttttcagttgcagagtgtgcatatgaaaccagagacagagttgcactctattgcccaggctagacatgaactcctgggctcaatcgacactctcccttcagcctccactgctcctggctcaaaattcattttaatatgtgaacttgtttgtcaggccctatcttattttcagcctctacagttccctttcccacagcgagagtcactttatactgtctctggaccaatcactgaccatccaaaatcagtcaagatcttaaaagtaagccaggcaacgatcctgagtgtcagttctcttgagacaggaacacagccactgcaaggtgtagaaagtacccactaccaagggttgaataatcacagttccatactcaattctacctgcggaaggttttgtaacttgagctgagtgacttctcattctagtactatcttctttaaaatgatgaggtggcactcatcatttgaaagtactgtcttttaaagtacttttaaagtactgtcttttaaagtacttttaaagtactgtcttttaaagtacttttaaagtactgtctttaaaatgattgc

SEQ ID NO: 465157 - DNA, 461 bp, Homo sapiens
cccaaaattatgtaacttctccacaggataagatccgatcctacagtaaatagaaaggtgccacttattcatctgaagaagcaaaaggaaatgctttcaacccagatcccagacacagagaggagcccaggtttaaaagctcctccctgccaaggacagagtgccactcaactccatctttgcccataagtctccctgggggacgtctggcaatagctagagacatttggggatgtcaaaactaggaaggacgctactgcatcaggaaaagaagcaagggaagagtgaaaacactggcttggaatgagctctgatcatgtctactctctcctactcctactttttcttggagctacaaagataaattgtttgagtctttaggagagcctaactccttattcaagtatttccttgctcctggatgtggaaaaattgcttaaataaaaactactcaaaagaaa

SEQ ID NO: 465158 - DNA, 1004 bp, Homo sapiens
atttttttttccaaattactgactgccttctttcaaggggaaatggaactcagaaagatgggaagatacatgataagagcacttaagagagaagcctgtccatttccactaaggttgaagtgtgcatactccaggatccagtccttcatgtctacacaaggagtcccaggaaaaggtctgtgcaaaacgtttgtaattgcaacggagcagccacgacctagccctccttcagcagaggaatgaataaactggtttattcagtcaacgcagcagttaaaatgagagaattagtgatgttgaaaggaaaaatgaagagcaaacagatacagtaggaagttatcacgtacatttcaaaaacattcaaaacaaccgtacatatttatggattcatgtaataatgcagtaaaaatacaaaatcagagccaggactgtggcacactgaattcagcacaatggtcgtctctaaatgtgggttcatcagcctcttggcaaatcgggagctctttgtgaggtgtgattaccaaaacccgctggaagggtatcagcaccacctcacaatgaacccagtgttgctaattctgacgccaatatttccacaggactcagttgatggaatcttcctgaatgtgttatttatggttcaggtcaacatgagggtgaccatcgccagggtcagtgcatttggtaggagaccagggaccgtttctgggaatgtcaggaatcttgtctttcaaatgctcacttcacttcacagcccctgcgagtgccctgaacctttgcaagatgtcggggtgacaggagccgcagagccggagcaaacggctgagataagagcggacagcgtgagagaagctgcccatgaaagcgctggtgtgaaaaagctgttaatgaaagcggctgctgaataaaaccatattcacctgcctagagctccccaagcgttctttccgctcatccacccactcccctcggaccgcagcatgggctggacctggaccccagga

SEQ ID NO: 465159 - DNA, 977 bp, Homo sapiens
gactgtgccagactctagggcatactgggagggcatgtacatattcagttttaggggctgccagatacttctggaaattaataagaaaaagactgaaaaccctatagaaaaatcagtaaaagagttgaacggtcacatcgcgaaagaagatgctcagccatactactgcatctccatcagtggctataaagaaggacaagttgaaaaggacatggagcaaccagaagttctgtatgctgatggtgggagtggaaatcagtgcaaccactttggaaaactggcaatatcttctttgaggtatgacaaaatgctgctgctgcagctgatggcaggaaatcatgatggaacacctattttgtgtcagacgctgtggaaagcaattcacaaagtcatcttctatggcctgaacgtgatctccccaaatttatattttgaatcctaatctctaatgtaattgggattagtgactttattttaaaaaggccctggagagactcttcagcccttctaccacttgagagcatagcaagaagacagccgtctaggaaccaggaagccggacctcactagacattgaatgtgtggcatctgagtcttggacttccagcccccacaactgtgagaaatgcatattttattttattttgttttgttttattattattattttttgagacggggactctgtctgtcactcagcctggagtgcagtgacacaatcatagttcactgcagcctcaacctctcaggctcaagcggtcctcccttttcggcctcccaaaattctgggattataggcgtaagtcaccatgttcatccaagaaataaattttgtgttgtttatttggactaagatatcatcttattttatcctatgaaggatctgttgtaagcttcagttaagtgactggcctggccgatggagaccaaacctggccatgggacttgggagatgtaaccatcagcatcacttgccc

SEQ ID NO: 465160 - DNA, 2679 bp, Homo sapiens
atactgagtgtgcaggcaccttctgggccactctgagagctagtgacacagggaccctatgcctggggctccgcatggtgcaggcagccaccccgggggcctcagggctcccctgcagccccagacaggccttggctttgtaccagtatctcttctggtgccccgcaagcccaggccagctcagggctgcactttggcaggtgcaagagggccgcgggtatcccccagggctggagctgccccctgtactgctgcagatggagtggagccggcgggcccaggagcagctcctgtgggacttggaactgctgactggtgtggagctgggcctcttctggccaccccaggcccagtttttcggtccgaggggccaggcccagcaagcatggagccagtgctgtcagccaggtggtagcacaggtggggaccctgagcagccgccccagatctgggtgaaaccgggagtggtgcagaccaagggtgggagagccctggaggacctgcagagcccacacgcggacctggcccagagggaagagaggagtgaggcagagcctgagacccagaaaagaaagctcactcccgggacccctgggccgggggacctgccctcccaaaacctgccttcccaagatgcccttgaagggctgggctcggacccgcacctgggccaggagagagcagaacttcaaagaccaccaaggatggacacccctgagtctgagaggaggaccctcaggatcagaaagcggagacccctcagcgtaagagagccgaggcctcctggggcgagatcaaagatgctcctcagagtcagaaggtgaagacacacgggggccagagcccaagggctcctcagggtcagagggaggagtcgaagagaatttagtcctaagtgccagggaaaggcgagtccccagagtccagggaagaagatgctgcggtcttgggaaggcaatatctcacaagcctgggaggtggctcccggagaggccactgtgcagcccccagaggaaggcgacccccatagccatccgagggactcctgcgggtccctgaaagcacagactccaaagcctgtgggcagggagagcccaaacctccggagaaggactaccacgctgacgcagagcatgatcaaaggcgagccacaaaggtcggcaccggcggtggcaaagctgggggccgcccgggagggggcgtgggctgcgcttacccgcccgaagcccccggcccggcggcggctcccaggtcgcggagccggagccgagatgccagcgaccctgcgcgccgaggtatccgggcagcaggggctcctcggggctctccggggcccccaggcctggagcgcgatccgcacgggctgcagggccctggagtgggccccgcaccgggggagcaggaggtgggccaggcttggcttccgggtgccctccggggtcgggtggggcggccctgagcgtcccaaggccttgaaggccgcgtggccggcgcccctcagcaccgccaaggcgcctgcgggcttaagcgcggcgcagcaggtgacggctctgcagcggctgctggagctgcacagcgcggccaggcggcagcgccgccggcgggaccgtgagcagcagcggctccgggtgtgtccccacgccgggatcggggcctgcctggagcgggcggggcaccgaggggcggccggacgctgactgccgcctctgcaggtcctggaacgcctccacatcgccaggaaccgccactgccgggttcaccccgtggggctcccgcccagtccggctcaactcccgccacaggcaagacccctagaaggcggtggggccacaaggagcctgcgcggggcaggggccgagcttagcgcgcccgggtccctttgaagtgagcgcactgcactctggcagtgactcggcggggcgcgaggggcaggtgtgccaggtgctgccccgcccgccccactgagccgcggacgctcagcgctccgcaccgccaggaggacgcggctgggcggcggcgcgccctgcgggagcagctggagcaaatgcatcgggagaggacggagcggctgcgggccctcggggccaggaacacccagaacttcctggaactactgtgttcccctggtgctgaggatcccgtgcctgcgaagtagtgctcgcccttcccagcaccctctggtcattgctgagtcctcaaagggatgattaaagtgatgagggttacggaaaaagcaagagggcaacttgcagcccacacctggcccacggtcagagggccaggtctcggggatcaagcagtgcgaaggccccgttcttgcggaagaatgactcaatgcggcacatcttgcaggagaccagttcttgcttcactggggggcctgggaaaagatgaatccgtcagtggagtagccactttgtgggaagaaatagaaagtgctttggaggaatgggagctatgggcaaatactgggagctggctggatgccaggatacagcagccatctgccatcattaccctagcttcaggatcctctacctgcagggaggggggccaccctagcctgcttgtcacagggacagactgtggagagatgagatttccttcggcctcctgctccccgcttctagggctcgcctcctgcttttgttagaaagttatttccctgacttccccttt

SEQ ID NO: 465161 - DNA, 2485 bp, Homo sapiens
atactgagtgtgcaggcaccttctgggccactctgagagctagtgacacagggaccctatgcctggggctccgcatggtgcaggcagccaccccgggggcctcagggctcccctgcagccccagacaggccttggctttgtaccagtatctcttctggtgccccgcaagcccaggccagctcagggctgcactttggcaggtgcaagagggccgcgggtatcccccagggctggagctgccccctgtactgctgcagatggagtggagccggcgggcccaggagcagctcctgtgggacttggaactgctgactggtgtggagctgggcctcttctggccaccccaggcccagtttttcggtccgaggggccaggcccagcaagcatggagccagtgctgtcagccaggtggtagcacaggtggggaccctgagcagccgccccagatctgggtgaaaccgggagtggtgcagaccaagggtgggagagccctggaggacctgcagagcccacacgcggacctggcccagagggaagagaggagtgaggcagagcctgagacccagaaaagaaagctcactcccgggacccctgggccgggggacctgccctcccaaaacctgccttcccaagatgcccttgaagggctgggctcggacccgcacctgggccaggagagagcagaacttcaaagaccaccaaggatggacacccctgagtctgagaggaggaccctcaggatcagaaagcggagacccctcagcgtaagagagccgaggcctcctggggcgagatcaaagatgctcctcagagtcagaaggtgaagacacacgggggccagagcccaagggctcctcagggtcagagggaggagtcgaagagaatttagtcctaagtgccagggaaaggcgagtccccagagtccagggaagaagatgctgcggtcttgggaaggcaatatctcacaagcctgggaggtggctcccggagaggccactgtgcagcccccagaggaaggcgacccccatagccatccgagggactcctgcgggtccctgaaagcacagactccaaagcctgtgggcagggagagcccaaacctccggagaaggactaccacgctgacgcagagcatgatcaaaggcgagccacaaaggtcggcaccggcggtggcaaagctgggggccgcccgggagggggcgtgggctgcgcttacccgcccgaagcccccggcccggcggcggctcccaggtcgcggagccggagccgagatgccagcgaccctgcgcgccgaggtatccgggcagcaggggctcctcggggctctccggggcccccaggcctggagcgcgatccgcacgggctgcagggccctggagtgggccccgcaccgggggagcaggaggtgggccaggcttggcttccgggtgccctccggggtcgggtggggcggccctgagcgtcccaaggccttgaaggccgcgtggccggcgcccctcagcaccgccaaggcgcctgcgggcttaagcgcggcgcagcaggtgacggctctgcagcggctgctggagctgcacagcgcggccaggcggcagcgccgccggcgggaccgtgagcagcagcggctccgggtgtgtccccacgccgggatcggggcctgcctggagcgggcggggcaccgaggggcggccggacgctgactgccgcctctgcaggtcctggaacgcctccacatcgccaggaaccgccactgccgggttcaccccgtggggctcccgcccagtccggctcaactcccgccacaggaggacgcggctgggcggcggcgcgccctgcgggagcagctggagcaaatgcatcgggagaggacggagcggctgcgggccctcggggccaggaacacccagaacttcctggaactactgtgttcccctggtgctgaggatcccgtgcctgcgaagtagtgctcgcccttcccagcaccctctggtcattgctgagtcctcaaagggatgattaaagtgatgagggttacggaaaaagcaagagggcaacttgcagcccacacctggcccacggtcagagggccaggtctcggggatcaagcagtgcgaaggccccgttcttgcggaagaatgactcaatgcggcacatcttgcaggagaccagttcttgcttcactggggggcctgggaaaagatgaatccgtcagtggagtagccactttgtgggaagaaatagaaagtgctttggaggaatgggagctatgggcaaatactgggagctggctggatgccaggatacagcagccatctgccatcattaccctagcttcaggatcctctacctgcagggaggggggccaccctagcctgcttgtcacagggacagactgtggagagatgagatttccttcggcctcctgctccccgcttctagggctcgcctcctgcttttgttagaaagttatttccctgacttccccttt

SEQ ID NO: 465162 - DNA, 1102 bp, Homo sapiens
tgaaattcatcaaatgacttctgcttttctattaagttcaagtcctataggagtgctggctttagatcatggcttggcacttcagggctgcccactgcagctctggggcaatctcagtgtttatatttcttccccaaggaacagaggcaggcatagaggaagtgctctcgtttattgctttgagagtttccagaccacagggcaggaacggagagcacaagtggaagggatggagatttttgtggagagtccgtggagaccagactagagttcccagggcagcggataggagaggagagagctgcatggagaaacagctccctagacctgcagaagagccctcacgagtgttcaggacagcactgttcagcacagaatgcatgaaattaaaaagactgaccataccaaatgttgacaaggatgtgcagcacttgggactctcatacccagatgatgaaaatgtagaatggtgcaaccactttggaaaacagtttggtggtttcttagaaaggatcttcatgttgtagatgtatgtgaaattggccaaaattttcatccctgtttatataaacattctttgaaatgtgactttgcagctcctccaatcaacagctagaatctgtttcccgacctcttgaatcagacttgctttggccaatcaattgctgtggaagtggcagtatgccagtttcaagcctaggccttaaaaggacttgggcactttcactctcctggagccctccctgcaggatgagaggtttcaggataacctcgccttcataatcaaaatccacccctttgctgttaacctaaatacacatatcatttacgtactttcacaacttcagactctcatctgactcttaataggcttgcaacctttctgtgtgtctttgtatcattgtgactatactttcagtttaaagtatttgtagcacggttgtatgactatagaatctatatactccaaactggttttcagtagctccaaattcgtcttaaagaaactacttattaattgaatatgtttaaatttataatatgatgcaaccatatactatctgggaaggaagaaatagcaataaaatttcctccttggcca

SEQ ID NO: 465163 - DNA, 1937 bp, Homo sapiens
  misc_feature (2)..(3): n is a, c, g, or t
  misc_feature (8)..(9): n is a, c, g, or t
gnngcttnnggctccttgatgctgttgaccattaaagactaaaaagcgggatctggaaaaggtgactgcaaagcaaaagcaaagccagaagaggccatgatgaggcagatgatgggttccagtggccactatgaggccaaagatgggccagaagaggccatcatgggttcgactggccactatgaggccgaagatgggccagaagaggccatcatgagaaaggagctggctcagctcctgccctccgatggcatctccaggccccaaatggcctctggtcggtggggtcctccaggcccagcttgggcctcccagcggcctctgcagacccaagtcgtcctgaagtccagcccctgcctgttggcggcctctagacgccaagcctctacctcaacagtgggccctccaggcccacctcttgcctcgccatggcgtcctcgggccaggctccccgcctcggggctgcctccacacacccagctcaccaagtactcggcccacaggactgtgtccagcgaggcctcccgtggcgtcagcgtgttcgtgtggaggaatgtggaacctcactctgtggccgtgttcccctggtactccgtccccttcctgacccctccctggagccacacgaggcccagcaacctgccagtcactcagtggcctccaaccagagcaaacaacctgccaagttggcagctgttgctcatgagcatccaccaggtgggacagggagtgttgaccctgggtggccccctggagccacctgccctgaaagcccagggcccagaaccccacacactttgggggtggtggaacctggcccagtccctcagtgccctgcgcaaggaacaggactcatcttctgagaaggatggatgcagccccaacaaatgggacaaggaccacatcccgtggcccataagtggtggtcatgagcttcagcaagcggcaccaggccctggcagggcgcaccagggtcaccccaaccaggacaaccggaccgtctgccagatcctgagcgagcggtggtacaccctggggcccaatgagatgcagaagtaccacgacctggccttccaggtgaaggtggcccacttgcaacagggaccgaaagaagtacagctcagaggccaagcccacaagccaggggctagcaggagtatacaagggctcctgggagcagagggtgtacacagcctggacggcagggaaatagaccgtcaggcactacaggaactgacagaagtggtgtctggcactgcatcatactctggcccaaagccttctactcagtatggagctccaggccactttgcagcccctggaggagggggtgacaatgtcattgctgatgacggctttagcaccactgacactgatctcaagttcaaggagtggggggcagagcctgaagaggagaaactgggctttgggggttggggcagagggaaccccacggacatggatcccgcactggacgaccccaccacacccaaatgcaagatgagaagatgctccatctgcagcccaaagcccaacacccccaagtgtgccatgtgtgatggggacagcttcccctttgcctgtacaggtggagaagccaaggacgggctcagggaaccggagaccgagaaggcgctgtcctcttcactgcacgcgccctggaccagtgccggccctgatcgtgcagcttttccaggcccactgcttcttcctgtccactaggccacagccgctctccaggcccactatgcacacatcttcccctccaaggtttgttctgcccctgccctgactcccagccctgagggggtcctgtccccacctcacctggctcagactctgacgctgccctggctgccccaccactgcctctgcccaagagtcacgtgaggctgagagtaggggcaggggcagcaatggtgccagttggggggcgg

SEQ ID NO: 465164 - DNA, 2876 bp, Homo sapiens
cctccctgaacatctcctcaggaactttgggcgcctggtccgacatgatcgcggcggcccgggaggctccgcggcggcgcccggccccgcccaccccccgcccccggcccccgcggcgcccggcgcccccactcgccccgccaacggccctgcccgcgcagcccgggcccggtcctgcgaatcggggtccgctcccccgccctccgcgcccccgcccgcgcccgcgccgagcgcccgaagcgcgggagccgcgcgcgccctgcgggacgcaccatcccgccccggccaccgagggggagcgccgaggagccgcccggcctccagtgacgccccgcgcctctgccgccagccacggctccggggtagctggcgccggcagcccgctctggcccttgcggttccgtggccgccgctctgcaacgagggggccccgaggacgaggggaaaccagctcccccctcggcggggccggagtgagccggtcccggggaggaggggagctggcaggcccctcccgtcgccacatgcggctgctcgggggcggcgcatgcgcgcggcggagggggggtggggccttggggccgcgagtgggagcgggagcggttctgcggcctcctcgggcttcttggccctgggcggagtgggattgggtgtcccggctgttcgcagtggccgcgagtgcggccggacctggagtagtacctgagccgctctggccgagcaaggcgcggggccccggtctacaccgcgctggacccggctatgccgtgacggaattcccgaggccgtagcgccacgcgagacgcgcactggtggcctccgcggcgagtcctggggtctccgcaaggcctcagtgcccgagctggggacgtgctggggggaggcccggccccgtcgctgcccgaggccccgctgtcccggccggaccggcctggtccctggcgtcctgtcgggtccgcgctggaggagagtcccagacagcagagcccgcggtgcagctccagccccgggaagccccgcgctcaacaggttaatactacacagcggcgattctaatggtcacgcttttatttacagctcgcctcccttccgccaagattcacagaacacggcagagtggcctcgggatcacctgcccaagacacctgcacgaccggaagttgggagaagaaattaaggccatgatgatgaacgcagcctttctcgtttatttccaatcccacaacaaaccggagtccaggaactcatgggtgattatcggactattacctagtcgtaaaactgtggagcattggtgtctaaaggaatctgagacagacccgcagtgtctcccccacatgccttaagtcacttctgccaagcagaaaatcatttttaagtaaatgttagtgaaattggttttaaaaaagagaaggggccgggcgcggtggctcacgcctgtaatcctatcctttaggaggccgaggtgggcggattgcctgagttcaggagttcgagaccagcctgggcgacacggtgaaaccccgtccctactaaaatacaaaaaattagccgggcgtggcggcacgcgcctgtaatcccagctactcaggaggctgaggcaggagaatggcttgaactcgggtgggggaggttgcaatgagccgagatcgcgccgctgcactccagcctgggcgacagagcgagactctgtctctgaaaaaaaacaaaacaaaacgagaaggctttcaaaattactctgcggtacactaatttaacagattagatcactttccaggctttaagttggcctttgttctaccctttttttagtgtatgataaaagttgtgttggttcgttgatcagcatgcaatgaactctggctcttgttaatcaggtgactacagttttgtccttacatttgtatgtatgtcatgagtggttttgtatgggcaggaggtaaacaacgcacatttaaatatacttaatgatttatcattccaatgttttctggttgttttagtctttcatttgtctcttgaacaatctgaaacatccctattctaaggctaaaaaatttcctttacaaacttaggttaaacattcctaatctgaaatccaaaatgctctaaaattcgaatttttttgagtactgacgtgaccccacaaatggaaaattccacacttgccctcatgtgacactgggtgacagtcaagtcacaatcaagcctggtgtggtgggcacctgtagtgccagctactcgggaggttgagcaggaggattgcttgagcccaggagtttgagtccagcctggacgatatagccagaccctgtctgtaaaaaaacaaaaaccaaaacaaaaaaaacaatgaaaacatttttttttaaaacgccatcaaaactttgtttcatgcacaaaattatttaaaatatataatataaccttaccttcaggctatgtgggtaaggtaaggtgtatgtgaaacaaatgaatttcccatttagacttgggtcccatccccaagatatcttattatgtatatgcaaatattccaaatcaaaaatatctgaaatacttttgtcccaagcatttcagataaaggttactcaacctgtaataaaaacactcagtgcttgcctgaaggaaaaaccaagaatttgtcatccatccttaaatttttatgacaccctttgtaatcaggaaaccttttaatacctaagaatatatttgatatattctggtatatgtttatcattctgatgtttaatgttctatgttgggcatatatcagtgtaataaatacattagatccaaatacagatcatgctgcctttttatcgacctgtgtgagagaacttatttatccttttctttttctttcttttttttgaaac

SEQ ID NO: 465165 - DNA, 2818 bp, Homo sapiens
cctccctgaacatctcctcaggaactttgggcgcctggtccgacatgatcgcggcggcccgggaggctccgcggcggcgcccggccccgcccaccccccgcccccggcccccgcggcgcccggcgcccccactcgccccgccaacggccctgcccgcgcagcccgggcccggtcctgcgaatcggggtccgctcccccgccctccgcgcccccgcccgcgcccgcgccgagcgcccgaagcgcgggagccgcgcgcgccctgcgggacgcaccatcccgccccggccaccgagggggagcgccgaggagccgcccggcctccagtgacgccccgcgcctctgccgccagccacggctccggggtagctggcgccggcagcccgctctggcccttgcggttccgtggccgccgctctgcaacgagggggccccgaggacgaggggaaaccagctcccccctcggcggggccggagtgagccggtcccggggaggaggggagctggcaggcccctcccgtcgccacatgcggctgctcgggggcggcgcatgcgcgcggcggagggggggtggggccttggggccgcgagtgggagcgggagcggttctgcggcctcctcgggcttcttggccctgggcggagtgggattgggtgtcccggctgttcgcagtggccgcgagtgcggccggacctggagtagtacctgagccgctctggccgagcaaggcgcggggccccggtctacaccgcgctggacccggctatgccgtgacggaattcccgaggccgtagcgccacgcgagacgcgcactggtggcctccgcggcgagtcctggggtctccgcaaggcctcagtgcccgagctggggacgtgctggggggaggcccggccccgtcgctgcccgaggccccgctgtcccggccggaccggcctggtccctggcgtcctgtcgggtccgcgctggaggagagtcccagacagcagagcccgcggtgcagctccagccccgggaagccccgcgctcaacaggttaatactacacagcggcgattctaatggtcacgcttttatttacagctcgcctcccttccgccaagattcacagaacacggcagagtggcctcgggatcacctgcccaagacacctgcacgaccggaagttgggagaagaaattaaggccatgatgatgaacgcagcctttctcgtttatttccaatcccacaacaaaccggagtccaggaactcatgggtgattatcggactattacctagtcgtaaaactgtggagcattggtgtctaaaggaatctgagacagacccgcagtgtctcccccacatgccttaagtcacttctgccaagcagaaaatcatttttaagtaaatgttagtgaaattggttttaaaaaagagaaggggccgggcgcggtggctcacgcctgtaatcctatcctttaggaggccgaggtgggcggattgcctgagttcaggagttcgagaccagcctgggcgacacggtgaaaccccgtccctactaaaatacaaaaaattagccgggcgtggcggcacgcgcctgtaatcccagctactcaggaggctgaggcaggagaatggcttgaactcgggtgggggaggttgcaatgagccgagatcgcgccgctgcactccagcctgggcgacagagcgagactctgtctctgaaagattagatcactttccaggctttaagttggcctttgttctaccctttttttagtgtatgataaaagttgtgttggttcgttgatcagcatgcaatgaactctggctcttgttaatcaggtgactacagttttgtccttacatttgtatgtatgtcatgagtggttttgtatgggcaggaggtaaacaacgcacatttaaatatacttaatgatttatcattccaatgttttctggttgttttagtctttcatttgtctcttgaacaatctgaaacatccctattctaaggctaaaaaatttcctttacaaacttaggttaaacattcctaatctgaaatccaaaatgctctaaaattcgaatttttttgagtactgacgtgaccccacaaatggaaaattccacacttgccctcatgtgacactgggtgacagtcaagtcacaatcaagcctggtgtggtgggcacctgtagtgccagctactcgggaggttgagcaggaggattgcttgagcccaggagtttgagtccagcctggacgatatagccagaccctgtctgtaaaaaaacaaaaaccaaaacaaaaaaaacaatgaaaacatttttttttaaaacgccatcaaaactttgtttcatgcacaaaattatttaaaatatataatataaccttaccttcaggctatgtgggtaaggtaaggtgtatgtgaaacaaatgaatttcccatttagacttgggtcccatccccaagatatcttattatgtatatgcaaatattccaaatcaaaaatatctgaaatacttttgtcccaagcatttcagataaaggttactcaacctgtaataaaaacactcagtgcttgcctgaaggaaaaaccaagaatttgtcatccatccttaaatttttatgacaccctttgtaatcaggaaaccttttaatacctaagaatatatttgatatattctggtatatgtttatcattctgatgtttaatgttctatgttgggcatatatcagtgtaataaatacattagatccaaatacagatcatgctgcctttttatcgacctgtgtgagagaacttatttatccttttctttttctttcttttttttgaaac

SEQ ID NO: 465166 - DNA, 2670 bp, Homo sapiens
cctccctgaacatctcctcaggaactttgggcgcctggtccgacatgatcgcggcggcccgggaggctccgcggcggcgcccggccccgcccaccccccgcccccggcccccgcggcgcccggcgcccccactcgccccgccaacggccctgcccgcgcagcccgggcccggtcctgcgaatcggggtccgctcccccgccctccgcgcccccgcccgcgcccgcgccgagcgcccgaagcgcgggagccgcgcgcgccctgcgggacgcaccatcccgccccggccaccgagggggagcgccgaggagccgcccggcctccagtgacgccccgcgcctctgccgccagccacggctccggggtagctggcgccggcagcccgctctggcccttgcggttccgtggccgccgctctgcaacgagggggccccgaggacgaggggaaaccagctcccccctcggcggggccggagtgagccggtcccggggaggaggggagctggcaggcccctcccgtcgccacatgcggctgctcgggggcggcgcatgcgcgcggcggagggggggtggggccttggggccgcgagtgggagcgggagcggttctgcggcctcctcgggcttcttggccctgggcggagtgggattgggtgtcccggctgttcgcagtggccgcgagtgcggccggacctggagtagtacctgagccgctctggccgagcaaggcgcggggccccggtctacaccgcgctggacccggctatgccgtgacggaattcccgaggccgtagcgccacgcgagacgcgcactggtggcctccgcggcgagtcctggggtctccgcaaggcctcagtgcccgagctggggacgtgctggggggaggcccggccccgtcgctgcccgaggccccgctgtcccggccggaccggcctggtccctggcgtcctgtcgggtccgcgctggaggagagtcccagacagcagagcccgcggtgcagctccagccccgggaagccccgcgctcaacaggttaatactacacagcggcgattctaatggtcacgcttttatttacagctcgcctcccttccgccaagattcacagaacacggcagagtggcctcgggatcacctgcccaagacacctgcacgaccggaagttgggagaagaaattaaggccatgatgatgaacgcagcctttctcgtttatttccaatcccacaacaaaccggagtccaggaactcatgggaggccgaggtgggcggattgcctgagttcaggagttcgagaccagcctgggcgacacggtgaaaccccgtccctactaaaatacaaaaaattagccgggcgtggcggcacgcgcctgtaatcccagctactcaggaggctgaggcaggagaatggcttgaactcgggtgggggaggttgcaatgagccgagatcgcgccgctgcactccagcctgggcgacagagcgagactctgtctctgaaaaaaaacaaaacaaaacgagaaggctttcaaaattactctgcggtacactaatttaacagattagatcactttccaggctttaagttggcctttgttctaccctttttttagtgtatgataaaagttgtgttggttcgttgatcagcatgcaatgaactctggctcttgttaatcaggtgactacagttttgtccttacatttgtatgtatgtcatgagtggttttgtatgggcaggaggtaaacaacgcacatttaaatatacttaatgatttatcattccaatgttttctggttgttttagtctttcatttgtctcttgaacaatctgaaacatccctattctaaggctaaaaaatttcctttacaaacttaggttaaacattcctaatctgaaatccaaaatgctctaaaattcgaatttttttgagtactgacgtgaccccacaaatggaaaattccacacttgccctcatgtgacactgggtgacagtcaagtcacaatcaagcctggtgtggtgggcacctgtagtgccagctactcgggaggttgagcaggaggattgcttgagcccaggagtttgagtccagcctggacgatatagccagaccctgtctgtaaaaaaacaaaaaccaaaacaaaaaaaacaatgaaaacatttttttttaaaacgccatcaaaactttgtttcatgcacaaaattatttaaaatatataatataaccttaccttcaggctatgtgggtaaggtaaggtgtatgtgaaacaaatgaatttcccatttagacttgggtcccatccccaagatatcttattatgtatatgcaaatattccaaatcaaaaatatctgaaatacttttgtcccaagcatttcagataaaggttactcaacctgtaataaaaacactcagtgcttgcctgaaggaaaaaccaagaatttgtcatccatccttaaatttttatgacaccctttgtaatcaggaaaccttttaatacctaagaatatatttgatatattctggtatatgtttatcattctgatgtttaatgttctatgttgggcatatatcagtgtaataaatacattagatccaaatacagatcatgctgcctttttatcgacctgtgtgagagaacttatttatccttttctttttctttcttttttttgaaac

SEQ ID NO: 465167 - DNA, 1499 bp, Homo sapiens
ttgagtttcttaagatagacttaactcactgaaatgaggcctcgatgtaagctgttcttcagatgtctggaaacaaccacagcaatgatgatttcttttcctgataaaactatttcctttctccaaggttttaaaggttttgacctgaacatgtattacccgaaccatgaggactctgatggaagagttatcaatgatgacgacttgggtggaaatggtctagagattcaggcagatatggctgcatcaccatcctataagggaagagataagactcctagagggaaaaaatgtagggtaatagggtttgggactgaagaaaggaccactgaaaatgtccatgtgttggtcgctgatcgtggttatggaggaggtgtcttcaaaagcatcaaggaaaaaatatcaaatattttgatatttgatatcaaatatcaaaatttgccatggtgcccagcatggttcaagatcataagtgtcaagcacatcagggcaagaatcttctgttccatatgcaacatcttctggcagccttgtcctttttctgtccttgacgactacaataacaaacagctgttgccgaggcattgctgttgacgtgttacctttgaaacctccctcctgttatggaataagcctcttccagatcatggctcattatcatctagtctgacaagcagccttgttgccacggagacccaaagggatcaggcgtggcatttgcctgcatcatcaccccctccaggggaactataaggactcttctgtgcgtcatgcgtggctgtcctgggactggctgccaccagacttttcctgcgggtaaaacctaaacaaatgatcagctgcagataatatcaagacctctgtttgatatgttaatagtgacagccagatttccacaattaacaacgaggtgggaagaaaacactgtagtcaccagacttgggaggagagggtttgtattcacataaacacaacctcacgtcactgcttgccaccacaaagggctctgttcactgttttgttctcaaagatcatccttgcgctcatcctctgatcttgaatttctacataactttctcagtttatatgccctgtggcaagtgcagcaagcactgtttcctgtttctaaacttgtagaaaatcatccatacatcttacagttgtcagttttaaccagataacagtggcactttgttgctgcttttttatctttagcttaggttaacaggaccctggaagtaaagttgttgatttattcaatagagtattctcaattaatttggctagatttctacatgattcaaaatctaaaaaagtagaaatgcatgcttacatgtctaaggcctgaaaaattggtagtgacatcccaaaataaatgaaggttttaaaacaataaatgatctctttttttttttttgcttctgtgcttggggagaagcaatgaaggaaacaacaatgttgctttaaggagtgatggctgcttgaggctgatttttata

SEQ ID NO: 465168 - DNA, 961 bp, Homo sapiens
ttgagtttcttaagatagacttaactcactgaaatgaggcctcgatgtaagctgttcttcagatgtctggaaacaaccacagcaatgatgatttcttttcctgataaaactatttcctttctccaaggttttaaaggttttgacctgaacatgtattacccgaaccatgaggactctgatggaagagttatcaatgatgacgacttgggtggaaatggtctagagattcaggcagatatggctgcatcaccatcctataagggaagagataagactcctagagggaaaaaatgtagggtaatagggtttgggactgaagaaaggaccactgaaaatgtccatgtgttggtcgctgatcgtggttatggaggaggtgtcttcaaaagcatcaaggaaaaaatatcaaatattttgatatttgatatcaaatatcaaaatttgccatggtgcccagcatggttcaagatcataagtgtcaagcacatcaggtaaggaagataataataattcaagggcaaatgaattgccccatggacagtgaattacagtatgctacaatggatttgtttggaccatttatcttttcttttgaattgacttaactgtacatttgtaggagataagcaggaaatcagaagcactcctagggattggcactggtctaaatgacagccctaaggaggagcttagataccagattcatcctccatccaggcagaagctccccagggataaaactgcaaggttaaatgtgaaactcaaaatttgaagcaaaagcctctcctcttctgcacttcttttcttcctaagttgagcagtaatactagaaacagagtcaattgaacctgaatagctcctctggggtaccaggcatcattctaaggaactcgtttcatcctcacagaggcacagatggggtatgtaacttgccaaagctcacactgcttggagtagagtcagg

SEQ ID NO: 465169 - DNA, 1264 bp, Homo sapiens
accgaggcacagcctcagagctcccctccaaggctgaaccctgcatctgctccatcgcctgcaccatctccctcctctcttctggacctcataatttcttactttcctatgcctgtaaatggtttgctgtgaccagagaagaagaaggaaacacgttgaagtccttgtcctggaaggcctgagtctggaaaactgtctcagcaaagcaagagccagtgaagggacacactgcgaagagcaggaattcttccgtcatgatccacagtctctgttgggttgcagtagtcaccgcgatgctcataaactgagaaaaaatatatatatgtctttttcactttattggcaaatattacataagtatataaatttcactttttacagctaaaggctgcatagccataacttctgagcaatttattaaggttgaataaaattgatataaggaatcattttataaaataaaatcttgtgcaaatgtgtatgtttttattttataaagtgcatagctagtaaatctgcgtctgccccacacatcgctttctcattccttgttattccggcattcaagcacacacacgcaccaacatgcacgtgcacacatgtgcccaaacacatacacatatttatgcatgttcacacatacacggacgagtgcacagcacaccatgcctcactaccggacaatgaggttaggtgagtcgcatcaaaccatggtgccacttatggagccagacccagccgccctcctcagacctcgggggactcgggctcctgcactggtccctgcttattccttgtgtgggttatttaaccctctctgcctacctcgatgaggccctggcggtcaccctcacaaagccagttttggccctggagaagttttgctgaatcaagcacctggagtcccaaaagctgtgccgccagaccggagctacccacactgccttcccgccccacagcagaggcctctgacatcacactgagtgggcattattttccttatccatcagcacgaagaggcaaatattctggcagtgttccaacagatggtgtctattcagggtcacccgaaagagttcccactgtcacctccatgccttccgccctctgtggctgcccagtggcaggggcccctcaccccacactcagaagctggagctctggggaacacaacggacagtgttgacgtcgagtttcatacataataaaaatgagggcactaaaagcaaattcactaatggatatggccaacttaaaaggggtc

SEQ ID NO: 465170 - DNA, 879 bp, Homo sapiens
tccttgtcatgttcccttgagcatgttcctgcctggcctctgggagcccctgtccctaccagctggcactttctattgccaggtgctcaggatgctgtcctcaagtccaccctgcactgtgtggccccaacattttctccctcttttgctcggcagtgggggctcccctcctgtgaagctctccaagatgccctgcactgattcgggtgctccgcagcgaagccccttttgccaggtgcccctgccactgcccggctccccagctgcttggctgccatctgcctccattcctgctgcggaggcctggaatgcccgggatactagggccactctgccttccatgctgaagaaggaagatgaatcagatggaggtggttctgggccagagacaaatctaagggaaagaattgctgtttctcctgcacggcagaggagcggctgctgggtaagcagccctttctggctgtctctctccaggtgaggtgaatcatctctctggaggctccctgagctctcaggtgacatcaccattgcaaaatctaagattggtacttgaggtatttttcagactgcattccaatgaacaagctggtgccacctggactggtaccccataccatgaaactggctcatctgaccttgcaatcccacccaggaactgacagagtgtaagaagacagctatgattttatccctaacccaaccaatcagcattccccattccctagtcccctgccttgagaaaccctagcctctgaattctcagggagactgatttgagtcataaactcccatttgccacttggctagtcctgtgataattaaactctttctctactgtaatactgctgtctcagaagattggttttatctgtgcag

SEQ ID NO: 465171 - DNA, 688 bp, Homo sapiens
agatggcattgtaaacgccagagcgaggttctgcctaccccgagactgctgctgttcggagacctgcaggtgaatgccccatcaccatgtctgacctggaggcaaaaccttcaactgagcatttgggggataagataaaagatgaagatattaaactcagggttattggacaggatagcagtgagattcatttcaaagtgaaaatgacaacacctctcaagaaactcaagaaatcgtactgtcagagacagggcgttccagtgaattccctcaggtttctctttgaaggtcagagaattgctgataatcatactccagaagaactgggaatggaggaagaagatgtgattgaggtttatcaggaacaaatcggaggtcattcaacaggggtgcttgtttgtccttatcctccttcctgtggtgaggcactgatgcagagtgtgtgtggggtctcccctggccccttggctggcagagagcctcacgttccacctactttttcttgcctcgcagtcacaggggcatcaaaccacagcaacagcgtcttaacacccggaagattaagttacctcaacccaagatcagttccactttaaaaaagcactttcgacccatatttaaccaaccgtcagagaggattcaaaagagggctaattgagcactgagtgtttgaagcattcaaatcaag

SEQ ID NO: 465172 - DNA, 1539 bp, Homo sapiens
caggctgggatggcttagaggtgttattctgaacatcatgaggggccaacaggagcatgtgtgtgtgtgtgtgtatgtatgtgttgtgtgtgtattggggaagaaggccatggctgatgcaattggatctatttgggggagagaagaaggccacggctggagagaaagaggaaaaagaaacacaattcaaaagccagaatatctgtgatgaacttcgaatgcagggttctggtggtcggaaatctgagatcagggctgccagcattgggttctggcgagggccctctctgtggcttcagggagtgaggttgaggccatgccagaggctccgggcctgggagtgggtcctgcctggccatgcgagggtgggagtggggcaatcggctgccttggggatacagggcaccggggacatggggaacaggggtcccaccaacaccactgctgctcccgcagccgcttttgccgccacggtccctgcccccactcccgctgcagccaatgcagatgctgctgctgctgccactgtttatgaagcccaggctcacctggccacgcggaggagagccaaggctccctcgaggaccccccagctgaccatcaccacggctgacccccagacacgtgaatgaggccactgcagaccatccaggcctagctgacctaccaggtggctgcagccacgagagtgaccccagcccaattaatttcagcccaaattgctgaatcacaagattgtgagaaaatacacggttattttaagctactaagttacagattgctttgttacatggaaatagatcaataagatgtaggaaaataaccagttatcacagtgcctgccatggcagttggtaactgttttgcatatcatccctgcccattagagtgaacaatattagcaaaggcactgagaaggaataatcttggcctgtttatcgaacgtagacacagggtttcaccgtgtgagccaggatggtctcaatctcctgacctcgtgatccacccgcctcggcctcccaaagcgctaggattacaggtgtgagccactgcgcccagcacactcttcaaaaactcttgaacaagatatgatgagcttctgcgtagcgaatgcatctttgtgcagggagggtggtgtaccttaactccacaaaggatcaaagcttctacactcaggacccttctggaccttgccctatgcacctcttcatatttggccatagtaaaaaatgatcacccctggaagttcctgttatcactggcatctcaacatctggaaatccctgaatgagtccagctttttaatttaacagaatagaagtgaggcccctggcagggaagtgtcttgcccaaggtcacaaagctggttagcaaataagggcattggacctgagaacttgatgcccacgctccctcctgccctcctcctcttctcagggcactgcactggaacactgggtgttcctcacgtgattgggtgagacccatgaaatgcatgaggagaataaaagtctcgtgttgacatcagcgaccaaggga

SEQ ID NO: 465173 - DNA, 1336 bp, Homo sapiens
caggctgggatggcttagaggtgttattctgaacatcatgaggggccaacaggagcatgtgtgtgtgtgtgtgtatgtatgtgttgtgtgtgtattggggaagaaggccatggctgatgcaattggatctatttgggggagagaagaaggccacggctggagagaaagaggaaaaagaaacacaattcaaaagccagaatatctgtgatgaacttcgaatgcagggttctggtggtcggaaatctgagatcagggctgccagcattgggttctggcgagggccctctctgtggcttcagggagtgaggttgaggccatgccagaggctccgggcctgggagtgggtcctgcctggccatgcgagggtgggagtggggcaatcggctgccttggggatacagggcaccggggacatggggaacaggggtcccaccaacaccactgctgctcccgcagccgcttttgccgccacggtccctgcccccactcccgctgcagccaatgcagatgctgctgctgctgccactgtttatgaagcccaggctcacctggccacgcggaggagagccaaggctccctcgaggaccccccagctgaccatcaccacggctgacccccagacacgtgaatgaggccactgcagaccatccaggcctagctgacctaccaggtggctgcagccacgagagtgaccccagcccaattaatttcagcccaaattgctgaatcacaagattgtgagaaaatacacggttattttaagctactaagttacagattgctttgttacatggaaatagatcaataagatgtaggaaaataaccagttatcacagtgcctgccatggcagttggtaactgttttgcatatcatccctgcccattagagtgaacaatattagcaaaggcactgagaaggaataatcttggcctgtttatcgaacgggactattcatttccctggctacgaggattttaaaaagcaagaagaaatttattggcagatctgatcacccttatgagagagcaatcaagtaagacagcatgtagcccctggaaattgctggaaatcatcatgtggccctaaggagtgccagcctaacgatgaagcagaaagagggatggcgagatgactgaactgttgagtcaagtcacatccaaagcccatgtggcctctgatcttttcagataaatgagttattaaatattttatttaaaccagtgaaagtcaggctttctcttatcagggacagaaagactctcaactgatagaatatacaatacaagcaagctttgtaatttgcaaatgaataaaaacatttttaaaattattttt

SEQ ID NO: 465174 - DNA, 1485 bp, Homo sapiens
ttactcacaacgcaggctcctggggccctccagagactccggtgtcagcgagctcatggcgcccacctcaagtaacactggcctcgggcactgattctcaaccctggctaaccactaaaaatttactcaaggagcttttaaaaagtatcagtgcctaggacacaacacaggttaattgaataagaacttcgggaggagactctagcaaatagcagccttggtgggatgaagatcattacaaaagaatgcaaagagacagagtggacagtcccttccgacacgcaagccaggacagacacagaaagaaaacctttggaacaggaaaagaagagctcttttgacaaagcaaaggaggatcacagagttccagccctgggggctgcgtctgggggtttcctggcattagaggagctgatggtgaattttccctcaaccatcaccggaaatgtgaaactcagtggagctccctgttcccacagggtcacattcaagcacaattcaaatatgaatacagtaaaatcatgagatcccagctactctcaacaaggcttacccacagcgtttgtggattttgtgccaggcactgagctgggtgctggatatggatgggtcttgtctgtgatctacggagcctgctgtttagtgggggagacacaggccttcgcccttcacccaccaagccctcgtcgttcctcttcaaccccagcatccccctgggttcctgtgcaggcctcggcttccaggaaccctgccttggagtgtgtgtgtggctctgtgaccggcaagcaggaggccacggctgtcccaccctcagggctctcacatgctgggtcccaggatccagctccgtgaggctgcccaacgcagagcagagggcagaggcagcctgggtggcccagccactgccccaacctgaggtctcccagcagcaccaggtctggaaaatgcgaatcccaagaaacataaaagaaaccctgaggatcacaaagaaagctgcgctcttgagaaacaaatacataaacaaaaataaaaaggagaagagaagcaactgaaggtgaggttcctggaagcacagggcccttgtttcaccctcagtgggaagggggcttcctggaagcacagggcccttattgtttcaccctcagtgggaaggggcattcctggaagcacaaggcccttgtttcaccctcagtgggaagagggattcctggaagcacaaggccctcgtttcaccctcagtgggaaggggcattcctggaagcacgaggccctcgtttaactctcagtgggaagagggattcctggaagcacgaggccctcttttcaccttcagtgggaagggggattcctggaagcacaaggctctcgtggggaaggggggggcacctgctgcaccatcggaggttttctttttcattctcactcatatgaacacaacacaggcaccttttcagtgtttgtaaactaccctttctattccgacca

SEQ ID NO: 465175 - DNA, 898 bp, Homo sapiens
tggcaaggctgccgttggcaaaagcccagctctgccatgaatctccgttcagttactggtttcacactcatttgtgagacctcaaccctcacccccaggagatcaggtccggaccatgagctgaccctggactcaggcaaggtgcatttaaggcgcagcctggaagtgccagggagcactggaggccacccagtcatgggggacaccttcatccgtcacatcgccctgctgggctttgagaagcgcttcgtacccagccagcactatgtgtacatgttcctggtgaaatggcaggacctgtcggagaaggtggtctaccggcgcttcaccgagatctacgagttccataaaaccttaaaagaaatgttccctattgaggcaggggcgatcaatccagagaacaggatcatcccccacctcccagctcccaagtggtttgacgggcagcgggccgccgagaaccgccagggcacacttaccgagtactgcggcacgctcatgagcctgcccaccaagatctcccgctgtccccacctcctcgacttcttcaaggtgcgccctgatgacctcaagctccccacggacaaccagacaaaaaagccagagacatacttgatgcccaaagatggcaagagtaccgcgacagacatcaccggccccatcatcctgcagacgtaccgcgccattgccaactacgagaagacctcgggctccgagatggctctgtccacgggggacgtggtggaggtcgtagagaagagcgagagcggtcagacctcccaccttacggggctccttcccctggtgctcaggaacccacagccacaagccccctgccaaggctcaggcagccttgcccctgggaggactccggctctgttaggggccctaaatgtcc

SEQ ID NO: 465176 - DNA, 1492 bp, Homo sapiens
tggcaaggctgccgttggcaaaagcccagctctgccatgaatctccgttcagttactggtttcacactcatttgtgagacctcaaccctcacccccaggagatcaggtccggaccatgagctgaccctggactcaggcaaggtgcatttaaggcgcagcctggaagtgccagggagcactggaggccacccagtcatgggggacaccttcatccgtcacatcgccctgctgggctttgagaagcgcttcgtacccagccagcactatgtgtacatgttcctggtgaaatggcaggacctgtcggagaaggtggtctaccggcgcttcaccgagatctacgagttccataaaaccttaaaagaaatgttccctattgaggcaggggcgatcaatccagagaacaggatcatcccccacctcccagctcccaagtggtttgacgggcagcgggccgccgagaaccgccagggcacacttaccgagtactgcggcacgctcatgagcctgcccaccaagatctcccgctgtccccacctcctcgacttcttcaaggtgcgccctgatgacctcaagctccccacggacaaccagacaaaaaagccagagacatacttgatgcccaaagatggcaagagtaccgcgacagacatcaccggccccatcatcctgcagacgtaccgcgccattgccaactacgagaagacctcgggctccgagatggctctgtccacgggggacgtggtggaggtcgtagagaagagcgagagcggttggtggttctgtcagatgaaagcaaagcgaggctggatcccagcgtccttcctcgagcccctggacagtcctgacgagacggaagaccctgagcccaactatgcaggtgagccatacgtcgccatcaaggcctacactgctgtggagggggacgaggtgtccctgctcgagggtgaagctgttgaggtcattcacaagctcctggacggctggtgggtcatcaggaaagacgacgtcacaggctacttcccgtccatgtacctgcaaaagtcagggcaagacgtgtcccaggcccaacgccagatcaagcggggggcgccgccccgcaggtcgtccatccgcaacgcgcacagcatccaccagcggtcgcggaagcgcctcagccaggacgcctatcgccgcaacagcgtccgttttctgcagcagcgacgccgccaggcgcggccgggaccgcagagccccgggagcccgctcgaggaggagcggcagacgcagcgctctaaaccgcagccggcggtgcccccgcggccgagcgccgacctcatcctgaaccgctgcagcgagagcaccaagcggaagctggcgtctgccgtctgaggctggagcgcagtccccagctagcgtctcggcccttgccgccccgtgcctgtacatacgtgttctatagagcctggcgtctggacgccgagggcagccccgacccctgtccagcgcggctccc

SEQ ID NO: 465177 - DNA, 1371 bp, Homo sapiens
acaccaggtaccactggcaggtgccatgcacgtgaacgcggagtctgctgttggaaatgtgttgggaagggagagttcccggaagtcaggtggcaaatcataccgggatggggaggagtgttccattcattcagagggaacagaaggtgagaaggaccaaagaggaagagagccaagcttggagaaagaattggaaggcagccagtgtgtctgggggccatggaatgaagacaggatagggacagaggagcaagaaatcaaggcaggcccgtgtgaagaccggggatttgactctcaacctgcccgctctgcacaccagggcggacacccacagacgcgtccttcacccgcgcagggacctgccaggggcgcttataccggagggtgttcagagcaggaaaggaagagatcaaatctgaacccggatccgtctcctacagaacctgagtcgctcaatcatcagctagatcgccccgtgtagacaaagcaagtggaattatttgaagagtataccttgagctgggcaatcctcatagaaggtcggggacgacctgcccttcagtgttcctggagcatcttctccaaagtggaggtcgagccaggcctaggaggaaagagagggcaactgcggacgaccccaccgcagaagaggtgaaaccgacgggctccagggctttttcactcattccctaggcatgtgggacctcgaagatgccgaatcagctaaacgggaggtggcttgagtaggatttgctgccagctaaagcgtgagatgctattgcatgtgcaaggcaaggctttcttcagcggcatcatcttccaaaatagcccagtgagcatgcctttctcctgaaaaataaaaaatagttggtgtttactgcaatcgtatggcaaatactgtgttgagagattaatttacatgaactcatagaaccctcagggcaagtttatgagccgtcttgtctccattttacatagttttcagctttgctggaggaataggcctgctgtactttttggaatttcctcagccactcatcatttcaggctgaacattaatgatttatccagcaaaggttattaaaattgactatagtctctgaagaaaggatagtttgtcaaacccacatcttaagactcattggatatattttgcatgaattgtgattaatgcaaggtaatttcagaggatggcttttgctaattaataaatcaatcacattgactcatcttggtagactgaactttaaaagttcattactgacttgctcaaaaccagaatcccacacatacatagtttagtggtttaaggcaattcttaagaaagcaaacagattgagcaatactttaattcagaaacaaattgcttaa

SEQ ID NO: 465178 - DNA, 1160 bp, Homo sapiens
acaccaggtaccactggcaggtgccatgcacgtgaacgcggagtctgctgttggaaatgtgttgggaagggagagttcccggaagtcaggtggcaaatcataccgggatggggaggagtgttccattcattcagagggaacagaaggtgagaaggaccaaagaggaagagagccaagcttggagaaagaattggaaggcagccagtgtgtctgggggccatggaatgaagacaggatagggacagaggagcaagaaatcaaggcaggcccgtgtgaagaccggggatttgactctcaacctgcccgctctgcacaccagggcggacacccacagacgcgtccttcacccgcgcagggacctgccaggggcgcttataccggagggtgttcagagcaggaaaggaagagatcaaatctgaacccggatccgtctcctacagaacctgagtcgctcaatcatcagctagatcgccccgtgtagacaaagcaagtggaattatttgaagagtataccttgagctgggcaatcctcatagaaggtcggggacgacctgcccttcagtgttcctggagcatcttctccaaagtggaggtcgagccaggcctaggaggaaagagagggcaactgcggacgaccccaccgcagaagaggtgaaaccgacgggctccaggtaggtgtgtcctccccaaccacaccctcccacagggcccggagactggggaaggccggagatgagattagggtcagagccacacccctgacccgcgtacaggacaaactgaagccacgcgtctacactggcgctccgaactgcgttggcccaaagcttcttcaccgcttccagcggagggcttaaagcggtccccccagccctcacacagcgggttttctcagaacccagtctccagagaccgcctggattcaaatcctgccgccgccctcagccgctgggagagccgggccttggcctcaccttcttcccagcctcacctgcagaatgggcgtgtcccgagggttaaatgccctcatcaccatgaagccttaaaacggtgcctggcacatggcgatacgcaataaacgtccgccaaaatgacgttagccaggattcgccccggaaggcttcctgttctcatacagcccttcaatgagggctaatccc

SEQ ID NO: 465179 - DNA, 826 bp, Homo sapiens
atttcacacgatatgtatgacaagaagcctgaagaagctatgaatttccagattgatgtgaaagaaatccactctgtaccttggaaatggtatggggtggaaagcggcgaacgcagcaagggttcaggaaatgcctggcttgtgagtggaggagaggattctagcaactcttcatgcttccaagtgatgtcattgggaaaccaatcctggagaaagggggccgtcgctgataaaaatcactggacatggatggagctggaatccattatcctcagcaaactaacacaagaacagaaaaccaaacaaatgctgcatgttctcacttatatgtgggagctgaacaatgacaacgcatgggcacagggaggggaacaacacacactggggcctgttggtggcaagggagaagtttcaaaagaccctgaacagcaaaagcagtctcgagaaagaagaacgaatttggagacatcacatttctgatttcaaaatatattataaagctaaagtaattaaaacaatatgatactgacataaagacatacatctaaaccattggaattgaatagagagaccataaataaagtcacttgtttatgatcaactgatcttcaccaagggtatcaagaatacacagtaggagagggtcgtctctttaacaaatggttttgggaaaactggatattcaagtgcaatagaatgaaattgaatccttatcttacaccatacccaaagatcagttcaaaatggattaaagacttaaagctccacaggcttgctctggaccaaatgtggatgcatttcacacagcctcctgaagtgagctgcc

SEQ ID NO: 465180 - DNA, 1052 bp, Homo sapiens
cggcaagcaagtcacggtggacgcctcagatcgcagagaaattcagagacgccaacttaagaagactaaatgaaaacctacaagaataaacatcaaggctcaatgtgtcagtcttcagttggtttggtttgtttttttaccccaagttttaaaagttatgcagcccttagaaagttcagcagtcagtgtgtttatgcttctcgttctctaactcgtatacggtgcgcctatgacacttctcggccagcaacagctgctctagcatgcgccgtccctggtgctgagcacaggccctggtacaaagttgatgttcaatgtttgactgggaaatgtaaagagatagtcattacatggacatctggagaaaaaaacagcacatggaagtatcaagtgttctggggccgcccaggcagagggaaacaagagctagactacctgctcgtgatcccaggaggctaatggaacagtgatgtatcgcggttcctgcctcgtgaatttggaagcaggattctgctcctagacatcttctcctatggatttctcctgggcaagaatggcatctcggtgcaggacccgcagcactttctctggctccgcagacccgtaatgagcctccagaacctcaggcttggttttctctgtcttcagcatgtggatcacatcttctctggcctgtaatagaaagtgcagcaagatcagacgactgacaatgtaaatcgcatactgggctcaaaaaatcaacagagagcttattgaatacatccccatcttgtcagggctattggcaaattcactgggtattctgctctaatttttttttttaaccaaaagcagattggcaagcagatactctgcttcaggttgctaggaagcaggcaagcagaaaaaaggatttgtgctaatattaactacataaaaattgctttatctaagtagcaataatttgggatggggtgggggagggaggcaagcagggctggtcctggcatacttaacctgttccagtgcacatgaggtcaatgacagtctaaaatcttctagttttctattga

SEQ ID NO: 465181 - DNA, 689 bp, Homo sapiens
cggcaagcaagtcacggtggacgcctcagatcgcagagaaattcagagacgccaacttaagaagactaaatgaaaacctacaagaataaacatcaaggctcaatgtgtcagtcttcagttggtttggtttgtttttttaccccaagttttaaaagttatgcagcccttagaaagttcagcagtcagtgtgtttatgcttctcgttctctaactcgtatacggtgcgcctatgacacttctcggccagcaacagctgctctagcatgcgccgtccctggtgctgagcacaggccctggtacaaagttgatgttcaatgtttgactgggaaatgtaaagagatagtcattacatggacatctggagaaaaaaacagcacatggaagtatcaagtgttctggggccgcccaggcagagggaaacaagagctagactacctgctcgtgatcccaggaggctaatggaacagtgatgtatcgcggttcctgcctcgtgaatttggaagcaggattctgctcctaggaaaagatgagaatagagctccagtctattcttgctgcagtaatttgaaaattatgggaccatcaatctgttgtgaatgctgtctacagcagatcttatctctcagaattatcaaactgagctgatccaaaggcttgacataaattacatgttaaacgtatagtaagtt

SEQ ID NO: 465182 - DNA, 958 bp, Homo sapiens
cggcaagcaagtcacggtggacgcctcagatcgcagagaaattcagagacgccaacttaagaagactaaatgaaaacctacaagaataaacatcaaggctcaatgtgtcagtcttcagttggtttggtttgtttttttaccccaagttttaaaagttatgcagcccttagaaagttcagcagtcagtgtgtttatgcttctcgttctctaactcgtatacggtgcgcctatgacacttctcggccagcaacagctgctctagcatgcgccgtccctggtgctgagcacaggccctggtacaaagttgatgttcaatgtttgactgggaaatgtaaagagatagtcattacatggacatctggagaaaaaaacagcacatggaagtatcaagtgttctggggccgcccaggcagagggaaacaagagctagactacctgctcgtgatcccaggaggctaatggaacagtgatgtatcgcggttcctgcctcgtgaatttggaagcaggattctgctcctagaattatttcaaacacaccagtaaagccagaggtaaaacagccactgagctggggtcttgttctgttgcccaggctggagttcagtggcacagtcatggctcactgcagcttcaacctccaaggctcaattgatccccgcgcctcagcctcccgagtagctgggactacaaatcctgaagtcaaccaggaactggttgacaatgatatgcattgacctctactgagtttttgtggtcaggaaccttctctgagctgtcataatcgtgcttcatcatctccaagcaagtggtcagatgaaagcatggtgaagatgactaaatagaagaggcaggtggatgagatcagttaaccagcatcgccagatttctcagcactgaactcacttcatgttcaacagtggccagtcttgttaaataatattatgggaatatccctaga

SEQ ID NO: 465183 - DNA, 3836 bp, Homo sapiens
caggttggtgacagcagaactcagagccccttctgagggcagagccccatgtggctacacgttacatcccttgaagctggctctgttctcactgggggtccatggtatggcagcatcctccagtaccacaagatggggtctttccggagctgagcagggcaaggacaggttctggctggacccagggaagcccacctgcaggtgtggcctctatctctgcagctcacagtgggaatctggcccacaggacccagcctgccaccctccagggagccgtggagatttcaggatttctcctctgcgaaatggggataacagctccctcttcatccggttatggtcagggcgacgctaatagcctggccgtgggagcagctgcttatgagcctggcccgcagccgggccctggttaaagaccttcatgtacttcattccacgctcccagcaacttcccacagccagcacgtcacggtggcacatcccaaatgtcaagccctgaggtctagctctgggtcatggcttctcaacgttggcactattggcatttggagccagggaacactgtcccgtggggctgtccgaaatcagacctgcagcagtgtctctggcctctacctcctaggtcctagtcctgcctccaacactcactccaacactggatcacaattcaacatgggatttgggtggggacacagagccaaaccatatcagggaaccagcatctactgcacagaattccttgtgcctagttctgtgcttagaactgggaacagtggtgctaaaacacagatccaggccctgccttccacgagctgcctggttcctgggtccctctgatgcctccctccttccccacaccccccacatctcatccattggcaaatcctggagctctacttctttttaaaaatagctctattgaggcatctttggcgtacaatcaactgtaccatttggtaacttttgatctatgtatgcactgtgaaccctcaacaccatccacatgctgaatatctctgtcactcctggtgagctctctctcccgccccctctcccccaagcaaccactgatcttctcagtcactataaatgactttgtatttcctcgagttttatatataaatggaatcatacagtatgtacttttttgggtctggcttctttccttcacataattattttgagatgtgtgcacgttgttgagtgtatcagcagttcatagctttttatttctgagtagtagtctgtggcatggatataccccggtttgtttatccattcacttgttgataaatctacctcttttttacaatgcaattatgcattgaagcataacatgcatacagcaaagtgcataaaacattcatgatagtttgacagaaaaataagatctagtgtttgatggatcagaaggggactggagttcacaatactctattgtatatttcaaaatagctagaagagaataatttgaatgtttctagcatgaaaaaagacaaatatttaaggtgatggatattgtaagcagactgatttaatcttgactaatgatacgaatgtattaaattatatgtactgaaaaaaatgatatgtgaccagatgagtgcattttcatgaagtacacaccctcatccatgtaactatagcacccagattaagaaacaagacatggccagaccccagaatcccccctgagcccctccttgtccctgccttccattcccctctgtgttctgacacatagatcacactgagggttcttgaacttcatctgaatggatcacacaatacattattcttttgtgcctggcttcctccactctacgttatgactgtgagattcattctctgtgttatgtataccagtagtgtgttcctttttacagccgagtaatattccaccgtgtgaatacaccacagtttgtttctccggtcccctgttgcgggacatttgggctgtttccagtagttggccatttcagataatgcacctgcggacattgctgccatagcttttgtgcctgtgttttcatttctgttgggctgtgcccaggagtgggagtgccaggtcctagggtatgcatagggtcagctttactagatattcttcctcttaaattctttgtaagaccatttgctctccagctgtccaccaccatcctagccccagaagctgccatttgcacccgggtgacttcaacagcctttgaacaggtccctgtttacccctccccaatccactctccacatggaagccagagtgagcgttcaaaatggcaatttgggttatgttgttgccctgtcttctcatgggcctgaagcccatcaggccctgcctcgtcccacccctgactgcccgcatgagtttcttctggctgctgtgacagattgccatgaactccatggcttaaagcagcacacattatcctaagttcaggagctcagatgtctacaacaggcagcaggacccatccctttgaggggctctaggagataatctgtgtccttgccctttttcaggttctagaggtcacctgcattcctcagctgcaggccccttcctctgtggcttccatcctccaatctcctctctcactgtggctctccttcagctcccttataaggacccctgcgcttgcactggggccctggctactccaggataatttcctacctccaggtccttcacttcattatatctgcctggtccctttgccttgtaaagttgcatattcacaggttccgcagattaggacgtggacatgggggagccgctgcctctctgcccaccgccctgtcatccttctctggatacactggcctccccgctgccccatctcaaggaataagccttcttccccttcagctttggcagatggccctggcttttgcacacctggtctccctctgttcatgttttccacttgtctgccactgcattatccagtatgaccttgttcacttacctgttcgaacatttctgcatccccatcctactcctccctgcccccgttggtccctggagcaggggccttggctgtttggttccccgctgtggctctggttcctaggcgtttcgtgactcatggaaggtccacatttgttgcctgcctagggccttccgtagtgctgagcactctactcatgcttcctgggtcaactctaacagcaaccctctgctgtgagtgccagtaacaggcatgaatttgcaggtgaagaaaccacagcataaacaggtgaagtgacttgtttgaggtcacacagcttttaagtggcaaaatcaggattcatgcccaggcaggtgggctccagagggctcgagggtcttgggccgccttgtgggcagggctttgtctccttgtagctgttcttctgttcacagcaaaggcaacctcatccctttgagcccagacagtcatgcctttgggatgtgtccacttcagaacagggtctgtgcttgacttacgcataatgaaagctccactgagggaagtccccctgggtctgccccatggtgagcgcgggcctcttaaggagccacctgacacactcctaaaatggacttttcaaggtcccagctaaagcccagtgtgcttctcctcctccccggcagtcctgcaggaaggtagcttttcatcagacaaggaggcctgctctgggctgggggcccccaaccccctcccactcaaccgaacaccagatctcctcccctccctctcaggctcctgtgttacctgaatagcctgtgggtgggtctccctattgttccatagtcagatgcaaacacgaagttgaagtaccattaacttgggggatgagtccgttttcacactgcc

SEQ ID NO: 465184 - DNA, 1488 bp, Homo sapiens
cccagagagtggccaaacatagccgagctgatgcaagaacatgggaagcagaaagctgcaggtgtgtttgtgctgggaggaatggtgaccctcacctcacagacacctcctctctggatcctccagagctataaagacgggccttccaccaccagacaggcgcactctaccaccatgaatccactcctgatccttgcctttgtgggagctgctgttgctgtcccctttgatgatgatgacaagattgttgggggctacacctgtgaggagaattctgtcccctaccaggtgtccttgaattctggctcccacttctgtggtggctccctcatcagcgaacagtgggtggtgtcagcaggtcactgctacaagccccacatccaggtgagactgggagagcacaatatcgaagtcctggaggggaatgagcagttcatcaatgcagccaagatcatccgccaccccaaatacaacaggattactctgaacaatgacatcatgctgatcaagctctccacacctgccgtcatcaatgcccatgtgtccacgatctctctgcccactgcccctccagctgctggcaccgagtgccttatctccggctggggcaataccctgagctcaggggccgactacccagatgagctgcagtgcctggacgctcctgtgctgacccaggctaagtgtaaagcctcctaccctttaaagattaccagcaagatgttctgtgtgggcttccttgagggaggcaaggattcctgccagggtgactctggtggccctgtggtctgcaatggacagcttcaaggaattgtctcctggggctatggctgtgcccagaagagaaggcctggagtctacaccaaggtctacaactatgtggactggattaaggacaccatagctgccaacagctaaagcccctggtcactctgcagtctctataccaataaaataaccctgttctcactgtctgtgtctgtgcctgctctctcacactccttcacactggaaagcatcctccaatctcagttcagatatgactctcccccttaaaggtaagcagagcccccagctcacaaaatgtgttccattgtacactagattagcgcatacaaacagatggaatccaaaaataagaagcagcttcggagaaaggcagggcactgtttctagagaaacgtgtgtttcagaaaggtagtctttgggggagggtattgatttttatttgggtttctcacagtggttagagctactctgccttcagaacaatcacagcatagaaaatatgtcagcatcgtccaggtggcccaaaaaatctgaccagcggaatcttattgctaaaacacaataatgacaaatgctgttggtgatgtcatgcctctcccaggaatgtgtcagcaccaaaccctcaaccaagccctcccttctcattcacctggaaaatcagattcaagtaaatctccctggcacgctgactcttccctc

SEQ ID NO: 465185 - DNA, 238 bp, Homo sapiens
tgtggtggaattcattcttcaggaactcagagtggaaccaggaggtttggctggtggaaaagatcttcggtgagtggaccaagaaggggcagcccccatgcggcttctttctgccacccatacccacagcccacatattctggctgcgttccagggcgatcctcaccagtagccaatgccctctggctgtctcctccttccaccttgcctgttaagctcgagcaaatgtttggtaatg

SEQ ID NO: 465186 - DNA, 1276 bp, Homo sapiens
  misc_feature (4)..(6): n is a, c, g, or t
  misc_feature (8)..(8): n is a, c, g, or t
ggtnnncnagcccggttcctcctaccgggtgcgctgggaaaagggctgctcctgacagaagggacactctaagagcagcccaggaaccggtgcacttgggcggcctcggaagaagccggggctcctggaggcggaggcgaggcctgggacccaataagaagggcgcggctagagaggaggggctggccaaaagcccttgaaataaggcccaggcagaaccgcggttctagtctcccagctccagctcggcctttgggtttgctgtggtgtccttgtctcctgcaggaccggccgcagcatggacgctcccaggcggtttccgacgctcgtgcaactgatgcagccaaaagcaatgccagtggaggtgctcggtcacctccctaagcggttctcctggttccactctgagttcctgaagaatccgaaggtagttcgccttgaggtttggctggtggaaaagatcttcggccggggcggagaacgcatcccgcacgtccagggtatgtcccaaatcttgattcacgtgaatcgattggaccctaacggcgaggctgagatcttggtatttgggaggccttcttaccaggaggacacaatcaagatgatcatgaacctggctgactatcaccgccagctccaggcgaaaggctcaggaaaggccctcgcccaggatgtcgccactcagaaggccgagacccagcggtcttcaatagaagtccgggaggccgggacgcagcgttcggtggaggtccgggaggccgggacccagcgttcggtggaagtccaggaggtcgggacacagggttctccggtggaggtgcaggaggccgggacccagcagtctctccaggctgccaacaagtcggggacccagcgatcccccgaagctgccagcaaggcagtgacccagcggtttcgcgaggatgcccgggacccagttactagattatgaaggcatctcaggccctggagccagagccagtcaggggttaaagtgaaagcccgtatttccgcccagaagctggggttggggagaggatgtggattttttgttttaccctttctgttgcatggttgcaaacacaaacttgagttctaataaagaattgcaaagtggaagcccgccccccgcctcccccccgcctcacttaagtccaggaagctggggtggcgaggaaggatgatgtggattgtttttgttttacaccttctgttgaatggttgccaacacaaacttgagttctaataaataattgcatttccctaaaaaaagtat

SEQ ID NO: 465187 - DNA, 796 bp, Homo sapiens
tcctactagggtattcactggtatggctcagccacctgtttataacctggattgccataacatagcagctctaagatgcatctgtgaaggatacttattatactatctctgttgtgctttcaatagcagctgtcctggttacaaccttgctctgatccacaagagtggacacttggaaatttctttatgcgatgactttggctccatccctactccaaccacactgatttgtcaagggaggtgctatctctgctgtgactctgatatcacgtgggacccctggctcctctttgacctattctttttgcctttcattctcttccagccccttcttggtaggcctatggaaattgagagcaagtaccttttacctgggaaggggaaactcatcaaatgctatctgctcttgggacccaatcctgagttactttatcagattaacctgatagtcaccagaactccattcaaacagaacacaggactgttatatttgggtcagtaaaggacaaagatctggtgtctggactgcaggtgctgtggtatcgttggaagcaaagatggaaaacaaagcaggagatgaagggttcatagagataaacttcttcctattttgcctgggattccaggtagcagaactggagctcagacctcttttggggggatcctaagcaatacttttgctgctcccttctggtccacatcacaagtctggagaatctaaaacaagctgggcaatgagaaaatctaactcttcatgtgttattcccaataaatcagttatgacataaactttatg

SEQ ID NO: 465188 - DNA, 1290 bp, Homo sapiens
tacgggttgctaagtccactagccattctacagtgtcagcggggatggcgaaggtggggtccctgtgtcctgggaaggacagggatgggtgggaggtgtgtaggctgccatgtgacagcccccttactacagcctgtgagctggatggagaggagtttgctgagggagtccagtgggagcctgatggtcggccctgcaccgcctgcgtctgtcaagatggggtacccaagtgcggggctgtgctctgccccccagccccctgccagcaccccacccagccccctggtgcctgctgccccagctgtgacagctgcacctaccacagccaagtgtatgccaatgggcagaacttcacggatgcagacagcccttgccatgcctgccactgtcaggatggaactgtgacatgctccttggttgactgccctcccacgacctgtgccaggccccagagtggaccaggccagtgttgccccaggtgcccagactgcatcctggaggaagaggtgtttgtggacggcgagagcttctcccacccccgagacccctgccaggagtgccgatgccaggaaggccatgcccactgccagcctcgcccctgccccagggccccctgtgcccacccgctgcctgggacctgctgcccgaacgactgcagcggctgtgcctttggcgggaaagagtaccccagcggagcggacttcccccacccctctgacccctgccgtctgtgtcgctgtctgagcggcaacgtgcagtgcctggcccgccgctgcgtgccgctgccctgtccagagcctgtcctgctgccgggagagtgctgcccgcagtgcccagccgccccagcccccgccggctgcccacggcccggcgcggcccacgcccgccaccaggagtacttctccccgcccggcgatccctgccgccgctgcctctgcctcgacggctccgtgtcctgccagcggctgccctgcccgcccgcgccctgcgcgcacccgcgccaggggccttgctgcccctcctgcgacggctgcctgtaccaggggaaggagtttgccagcggggagcgcttcccatcgcccactgctgcctgccacctctgcctttgctgggagggcagcgtgagctgcgagcccaaggcatgtgcccctgcactgtgccccttccctgccaggggcgactgctgccctgactgtgatggctgtgagtacctgggggagtcctacctgagtaaccaggagttcccagacccccgagaaccctgcaacctgtgtacctgtcttggaggct

SEQ ID NO: 465189 - DNA, 2652 bp, Homo sapiens
tacgggttgctaagtccactagccattctacagtgtcagcggggatggcgaaggtggggtccctgtgtcctgggaaggacagggatgggtgggaggtgtgtaggctgccatgtgacagcccccttactacagcctgtgagctggatggagaggagtttgctgagggagtccagtgggagcctgatggtcggccctgcaccgcctgcgtctgtcaagatggggtacccaagtgcggggctgtgctctgccccccagccccctgccagcaccccacccagccccctggtgcctgctgccccagctgtgacagctgcacctaccacagccaagtgtatgccaatgggcagaacttcacggatgcagacagcccttgccatgcctgccactgtcaggatggaactgtgacatgctccttggttgactgccctcccacgacctgtgccaggccccagagtggaccaggccagtgttgccccaggtgcccagtaactactgccccccgccccaccacgctagggcccccacccccctaccccccagcttccaagtgggcacttgtgtggcggctctggactccagggctggagggactgtcaggctttgccctcatacctgcccccaccatccactgcccagactgcatcctggaggaagaggtgtttgtggacggcgagagcttctcccacccccgagacccctgccaggagtgccgatgccaggaaggccatgcccactgccagcctcgcccctgccccagggccccctgtgcccacccgctgcctgggacctgctgcccgaacgactgcagcggctgtgcctttggcgggaaagagtaccccagcggagcggacttcccccacccctctgacccctgccgtctgtgtcgctgtctgagcggcaacgtgcagtgcctggcccgccgctgcgtgccgctgccctgtccagagcctgtcctgctgccgggagagtgctgcccgcagtgcccagccgccccagcccccgccggctgcccacggcccggcgcggcccacgcccgccaccaggagtacttctccccgcccggcgatccctgccgccgctgcctctgcctcgacggctccgtgtcctgccagcggctgccctgcccgcccgcgccctgcgcgcacccgcgccaggggccttgctgcccctcctgcgacggctgcctgtaccaggggaaggagtttgccagcggggagcgcttcccatcgcccactgctgcctgccacctctgcctttgctgggagggcagcgtgagctgcgagcccaaggcatgtgcccctgcactgtgccccttccctgccaggggcgactgctgccctgactgtgatggtgagggtcatgggatagggagctgccggggtgggatgcgggagaccagagggctgggtcagaataatctttactgccctagggtggatctaaaatatttattacagtaagaaaaagccccgaggctgggagccctagctgaagcctgtgaccccgacaatttgggaggctgaggcaggaggatcacttgagcccaggagttcaagaccagcctgggcaacatagagagatcttgtctctacacaaaaaatttaaaatcagctggtcgtggtgcctcttgtagttccatctactccggaggctgaggtgggaggattgcccaggagtttgaggctacagtgaaccgtgttttcaccactgcactccaggctgggtgacagagtgagaccttgtctcaaaaaaaaaaaaaaaaaaaaaaaaaagcctgacactaaagcctggatcttctcctgcctctgttgctatttgccgtgtggtcttgggcaagttacatagcctctctgggcctaaatttggctcttgtaaaaagacccagtcccccagtccccctgtcttccctcactcttgtgcgatcttggccattttggccacttgcccttaccaactgtaattttatttactatttgccttccaattaactcacttattaatttaatttgatttagaaaggagttttatatcacactgatgccgctaccatggcgtcactactgcctccggagagacccttcctgacccacttgaccctacctgctccctctgcacctgccaggctggccaggtcagctgtgtgcggctgcagtgcccaccccttccctgcaagctccaggtcaccgagcgggggagctgctgccctcgctgcagaggctgcctggctcatggggaagagcaccccgaaggcagtagatgggtgccccccgacagtgcctgctcctcctgtgtgtgtcacgagggcgtcgtcacctgtgcacgcatccagtgcatcagctcttgcgcccagccccgccaagggccccatgactgctgtcctcaatgctctgactgtgagcatgagggccggaagtacgagcctggggagagcttccagcctggggcagacccctgtgaagtgtgcatctgcgagccacagcctgaggggcctcccagccttcgctgtcaccggcggcagtgtcccagcctggtgggctgcccccccagccagctcctgccccctgggccccagcactgctgtcccacctgtgccggtgagtccagggatgtgggggtagatgagatatgaggttagggctgccaccccctgcc

SEQ ID NO: 465190 - DNA, 2883 bp, Homo sapiens
  misc_feature (1754)..(1756): n is a, c, g, or t
  misc_feature (1762)..(1762): n is a, c, g, or t
gtgatagcgctgggcgactccgcggagctgcacggccatggacgtgggcgccgacgagttcgaggagagcctccctctgctgcaggagctcgtccaggaggccgacttcgtgggtgaagagcctgggattcgcggctgtgccggacagagccccttgccccgggcgagcttgaggagggggtggcgggacggttgccaggccacagggcctcagagagggcctcgggaaggacaggggggcttccttctccagccccggggcggtgggactttgagcagcaagtacactccgagccccacgtcccttgttggccagagccccgtgcgcccaggtgcctggctgctccttgccttggttcctccattttcccttcctgacctcacttggcttcttgagcgcagaggtctggacatagagttcacgggccttcgttctaacctgtctgggccccagcagatcaggtatatagcccattcttgtaacttctatctcttccctacaacgtttgggattttggactcagaattctccttccaggcttccagtgttcagtttttgaatcagtatggcttcaactataacaagtttctcaaaaacggaatcccatatatgaatgaagaacaggagaagaaaattagacacgatatcctgactgggaactggagagttcgcagctctccggataaagaccaaatcaaggtggtgattgacgaagtgacgcggtggctggagctggccaaggaaggcgactggatgactcttcctgggatcactggcttccaggcctttgaggtccaactggtgctgaggcaggccctccccaacatctggacggtgctgaaagatgaggggcccttagtgggacataatatgatgatggacctgctgcacctccatgagaagttcttcagacccctcccagaaagctacgatcaatttaagcagaatatccacagcctatttcctgttctcattgataccaagagtgtaacaaaggatatctggaaggagatgaatttcccgagggtgtcgaatctttcggaagtctatgaagtcctgaacaggggcacccagagccgccagtctgtccccagtcagcaggacgaggcacgagaggccatcgaccccgtgcccgagtcatcctttcctcagtaccttgacgtgctggctccttacgtgaaccaagtgaacctcatccgagcgggggtcccaaagatcaatttttctggtccagattatcccagtatccgacctcccatcctcatcctcagcgtcaaaaggtggcctggggtcagcgagcagcaagtctaccataagtttcagaatctctgcaagtttgatgtcaggcgactcacaagaagccagttcttactcctgaccaataagtttaaggatgcgcggaacatcctgaaggagtaccgggaccacccgaccctgtgcatctccctgtaccgctactggaggcactccccaaacgtcaactgcctgctccagctttcgagcacgtgctttccatcgttctcgcccctgctgcccggggcccagccagtcattagggctccctggcttccctctcactcctccatggccctgggtggtgcagctcctctggacgctctccccaagtctctggtcactctcttctcgattgccctcaactcttcccctggccctttagatgttggtgttcaaggacctggcaccatccgccgtgacagtgccgggccccagcatgactctgaagtttgtttgnnnctgctnctcagtttttggcggtttaccctgagggggttacgaggatgctgctggtggtggtggacgagaggcaggagccggcgctggggccgggtggtctgcagactctcgtcctctcctgcgcctcctcacaggtcaccaacattcccaggatcgtggccctgttcctccatcttcagcagcagcaatgtggaatctctctgatcgatctttctgctgtgggcactgggcatctttggggagccattattctgcctgccacattctccagcgacacactgatgaagcacctgcccagggagctgcccaaaccttcctcgctgctgaggccgtgtcctcagcccagtggagcagcagcagtggccactgcctgcgtgaccctgctgagacctgtgctcgtagtcagatgggatgttctgaactcctggaagccagaggtggaagggctgtctggcttcctgcacacccctacagctcactctggatacctcttgtagcctctctgtgaatgtcacatgagggaccctggtgaggctgccatgtcaactacctgagttctagaaagaccaaccaggtgacagaggccaaacattttacaatcctgtaaagttaggtgttcactttttgaaaactgataagatgcaaataattcttgtccaataacaacgaaaatagttcttgctcataggagaggataaccccaaaacctgtggttttattgtcctataggacactaatcagtctatatgtagctttgcaatttccctctagcattctctttgttgtttttgttcacttaccagttcacacttcagtctctcacctcccctttaaactggttcccatcgttattgcgaggcctggaggcacctatcttcattctcactccttccctgcccaatgccagggatccagcaacagacaaaaacccaagttttcctaactctttcctggctcctttttcctccacctgaagtggaggtgctgcaggtgctgcctgagaagccaagaggcctggaggagaggaggagggaaagcagctttgttgaataggacagacttgcaaatctttcctgttttatttttagcttaaaagccaataactgatttctttgtttctctggttc

SEQ ID NO: 465191 - DNA, 1110 bp, Homo sapiens
acacactctcctcctctgaaaactagctaggggttcgaacttgcttgtgctgcccttctcgaatgactcgcgtttcctgctttcatcactacacctcccaccgctctccatcacctgctctgctcttataaggatccagttttcagaaaaatggaatagtcgtatcactgatctacgtaaacaagttgaagaattgtctgaaagaaaatacagtgtgtctaaactggaaaagtcctgtaatagtttgttcatgagcatttacacaatggagttgctgtttcatcatgggggtactgtggacaaacccagggctgctggtgagtcatgccatccttacacgtctttccttgtaaggtactttgtagtgtctgtctaaatattagaaagtttctttgtttctagattacttgaaagctaaggaaaagttgtagttctctaattatcaattagcatttcttttatactttcagtgtggatatttgggatttctttatatatttattgcaaagccctagatcttagggatttgactgaaaaaaatatatatatatgcgtgtatatacacacgcgtatatatatacgcgcgtatatacacacgtgtccttagccgagatgtctcaccccactctctatgatgcaacaagaagcccctggggaacgtttcagtcccagtctgtactattgtcatgtgctcatcacagtctggatgtctttttgtcacttccagctggatctaccatgaaagacgtcagagtccaggaagagagactgactgggcaacatgttattcagagagaagatcttgatctgtggcccaggctgcagtacagtgacatgatcatggttcactacagcttcaaactcctggcctcaagccatcctcccacaatctcactctcgcccagagtggagtgcagtggtgtgatctcagctgcctgcagccttcacctcccaggttcaagcgattctcctgcctcagcctcttgagtagctgggattacagaagcaggaccttgctctgtcacccaggatggagttcagtagtccaatcatggctcattgtaacctcagatttccaggctcaagcaatcctcccacttcatccttccc

SEQ ID NO: 465192 - DNA, 4319 bp, Homo sapiens
tcagaggtttgatccttttggcgggacagcgaagactggcgtttccgccgctgaggggctgaggccgggagggcgcagcgtagccgtcccgagctgatgacgtcaaacgccgtgtgctcacccacgtgtggtgcccctctcccggtgtaggcgctggagctgaggacgcctttcctgcgggcgtagttgctggctgctcgggcactgggacctcggcggcttggggacgctggccgcgaagtagggagcgcaggtggccgctcggggtgagggccctgggtcatggagcacttcttgctggaggtggcagccgcgccgctgcggttaatcgcagccaagaacgagaagagccgcagtgagttgggcaggttcttggccaagcaggtgtggacacctcaagatcgccagtgtgtcctgagtaccttagcacagttgcttttggataaggactgtactgtgctggttggtcgccagcttcgccctctccttttggatttgctggaaaggaatgccgaagccattaaagctggaggccaaatcaaccatgatctgcatgaacggctatgtgtgtcgatgagcaaactcattggtaaccatcctgatgtcctcccgtttgccctgagatatttcaaggacacatccccagtctttcaaagacttttcctagagagttcagatgctaatccagtacgctatggacgtaggaggatgaagctccgggacctaatggaagcagccttcaagtttctgcagcaggagcagtctgtgttccgggagctctgggactggagtgtgtgtgtccctctcctcagaagccatgacaccttggttcgctggtatacagccaattgtcttgctttggttacctgtatgaatgaagagcacaagttatcatttcttaagaagatatttaatagtgatgaattgatccatttcaggttgaggttattagaagaggcccagttgcaggacttggagaaggccttggttttggccaatccagaagtctccctttggcgtaagcagaaggagctgcagtacttacagggacatcttggtggtaataggagttcttcacgtgaacaggagctggcccttaggtcttatgtgctggttgagtctgtctgcaaaagtcttcagaccctggctatggcggttgcttctcagaatgctgtgttgttggaaggaccaataggatgtggcaaaacttccttagttgaatatttagctgcagtgacaggtagaacaaagcctcctcagcttctcaaagtccagcttggagatcagactgacagtaagatgcttttggggatgtatcgctgcacagatgttcctggagagtttgtgtggcagcctggcaccctgacacaggcagccacaatgggccactggatccttctggaggatattgactatgcccccttagacgtggtttctgtgctgatccctctcttggagaatggagagctcttgattcctggccgaggtgactgtctgaaagtggcacctggatttcagttttttgcaaccaggagactcttgagctgtggaggaaattggtatcgaccgctaaacagtcatgctactttgctagacaaatattggaccaaaattcacctggataacctggataagagagaactgaatgaggttcttcagagcagatatcctagcctattggcagtggttgatcacctgcttgacatttatatccaacttactggagagaaacatcactcttggagtgatagttctgttggatgtgaacaggcacctgaagaagtttcagaagccagaagagaaaacaaaagaccaacccttgagggaagagaattatctctaagggatctgctgaattggtgtaataggattgcccatagctttgacagttcatctttatcagcatcattaaatatttttcaagaggtaaaatcttacctcctacaggctgaattcttttgtcaactttataaaccagaaattgtgatcaatgagctagatttgcaagtgggtcgagtgcggcttctacggaaacaaagtgaggctgttcacctacagagggagaagttcactttcgctgctacacggccgtcctctgttctcatcgagcagcttgcagtgtgtgtcagcaaaggggagcctgtgttgctgggtacattagctcaggctgtaaagaaaggagagtggatcttgttggatgagattaacttggctgctccagaaatactagaatgtctgagtggtttgcttgaaggatcttctggatccctggtgttgctggatcgaggagacacagagccactggttcggcatcctgacttccgtttatttgcctgtatgaatccagcaactgatgtaggcaaaagaaatctcccaccaggaataagaaacaggttcacagaactttatgtagaagaattagaaagcaaagaagacttacaggttcttattgtagattatctgaaaggattgagtgtgaacaagaatacagtgcaaggaatcataaacttctacacagctttgcggaaagagtctgggaccaaactggtggatggcactggccatagacctcactacagccttcggactctgtgccgggccctgcgatttgcagcctccaatccatgtggcaacattcagcgctcactctatgagggtttttgtttgggtttcttaacacagcttgacagggcatcacacccaatagttcagaagctcatctgtcaacacattgtccctggcaatgtcaagagtctgctgaagcagcctattccagagccaaaaggaggtcggcttatccaggttgaaggctactggattgcggtgggagacaaggagcctacaatagatgagacgtacattctgacatcttctgtgaagctgaacctgagagatatagtccgagttgtctctgcagggtgtgtgggcttttttctcgctgccccgaacttgatacaggcataggcattgatgacattttggtctaacttccttaactttcaaagagctttattcttattcattggccaactgaacaattacttacaaaagtcagtactataactttttcctggtagaaaactttgtttctagttgtgcaactttggagggagcactatggatgcagatgattttatctatctttaaagttatcttttgttattttgctgataaataccacagattattcagtaaatggctaaaagttctacttacagtttcttacaaatgttgccagcatagttggaattgctttccttagtattttttgaggaataatgtttacaaagatacttctcagtgtataggaataaaaatgttcttctgcttcttgcattttccagaaatgtaaaaaggggaaaaaaaaggaaaaaaaaatgctcttttaatgatgctgttaaatgatgtcgtcattcttttaaaaaaaaaaaaccaaaataatacttggccaggtgcagtggctcatgcctgtaatcccagcactgtgggaggccaaggcggtcggatcacttgagcccagggttttgagaacagcctgggcaacacggcaagactctgtctctgcaaaaaatacaaaatttagctgggcttggtggtgcatgtctgtagtcccagctactcaagaggctgaggtgggaggatcacttgagcctgggaggtcgaggctgcagtgagctatgattgcaccaccatacttcagcctgggcaacagagtgaaaccctttgtcaaacaaaacaaaccaatactcagttctggtttctcagctttgtaattttttgttgttttaagttgcttaattggctaatcttttacagaacctatccagtgctgattcagggagagacatcagttggtaaaacaagcctgatccagtggctggctgcagctactggcaaccactgtgtgcgtattaataatcacgaacacacggatattcaggagtacattggttgttacacgtctgactcctcagggaagcttgtctttaaggaaggtgttcttattgatgccatgagaaaaggctattggattattttagatgaattaaatttggcccctactgatgtgttagaggcgctgaataggctgttggatgataaccgtgaattgctagtaacagaaacacaggaagttgttaaagcacaccctcggtttatgctttttgccacccaaaatcccccaggactttatggaggcagaaaggtcctttctagagccttcaggaatcggtttgtggaattgcactttgatgagttacctagctccgagttggacctttctgcctccataaagtcctgggggattttgggtggcaaaa

SEQ ID NO: 465193 - DNA, 1685 bp, Homo sapiens
tcatccagttttaatgttgaaagtatgcagaacaagacagcttgttcaacaagtggctgttttcctactttatgcccttctctgaaagaatgtacaactgtgggttattccttgaacttctgtgtctttcagcctattccagagccaaaaggaggtcggcttatccaggttgaaggctactggattgcggtgggagacaaggagcctacaatagatgagacgtacattctgacatcttctgtgaagctgaacctgagagatatagtccgagttgtctctgcagggtgtgtgggcttttttctcgctgccccgaacttgatacaggcataggcattgatgacattttggtctaacttccttaactttcaaagagctttattcttattcattggccaactgaacaattacttacaaaagtcagtactataactttttcctggtagaaaactttgtttctagttgtgcaactttggagggagcactatggatgcagatgattttatctatctttaaagttatcttttgttattttgctgataaataccacagattattcagtaaatggctaaaagttctacttacagtttcttacaaatgttgccagcatagttggaattgctttccttagtattttttgaggaataatgtttacaaagatacttctcagtgtataggaataaaaatgttcttctgcttcttgcattttccagaaatgtaaaaaggggaaaaaaaaggaaaaaaaaatgctcttttaatgatgctgttaaatgatgtcgtcattcttttaaaaaaaaaaaaccaaaataatacttggccaggtgcagtggctcatgcctgtaatcccagcactgtgggaggccaaggcggtcggatcacttgagcccagggttttgagaacagcctgggcaacacggcaagactctgtctctgcaaaaaatacaaaatttagctgggcttggtggtgcatgtctgtagtcccagctactcaagaggctgaggtgggaggatcacttgagcctgggaggtcgaggctgcagtgagctatgattgcaccaccatacttcagcctgggcaacagagtgaaaccctttgtcaaacaaaacaaaccaatactcagttctggtttctcagctttgtaattttttgttgttttaagttgcttaattggctaatcttttacagaacctatccagtgctgattcagggagagacatcagttggtaaaacaagcctgatccagtggctggctgcagctactggcaaccactgtgtgcgtattaataatcacgaacacacggatattcaggagtacattggttgttacacgtctgactcctcagggaagcttgtctttaaggaaggtgttcttattgatgccatgagaaaaggctattggattattttagatgaattaaatttggcccctactgatgtgttagaggcgctgaataggctgttggatgataaccgtgaattgctagtaacagaaacacaggaagttgttaaagcacaccctcggtttatgctttttgccacccaaaatcccccaggactttatggaggcagaaaggtcctttctagagccttcaggaatcggtttgtggaattgcactttgatgagttacctagctccgagttggacctttctgcctccataaagtcctgggggattttgggtggcaaaa

SEQ ID NO: 465194 - DNA, 785 bp, Homo sapiens
actggatatgagcttaatggatgggttcatgggaaggaaggaatagggatgcatatgccaggttgcctgtgctttccagttagtcagatcagcccataatacctcttaccagatttaccttgcccttttaaattaaatattttactttttattttaaaatttttatttttaattatacatagagacagggtgtcactgtgttcccactctggtctcgaactcctgggctcaagctgtcctcctgccttggcctcccaaagtgctgagattacaggcatgaaccaccgtgcctggcctacccttccctttatctaccaccttactatatttaaaagttgggaagcagcatcacccaagaggttaaattttgttctggaaataagtttggttgtattgcagaaggttatttagcattatgcatatttgtcttttctttctagggtttttgtttgggtttcttaacacagcttgacagggcatcacacccaatagttcagaagctcatctgtcaacacattgtccctggcaatgtcaagagtctgctgaagcaggtatgttcttttgttatttttgacttgttacacttgaaaggctgaattaccaaattttcagctgtttggttttttttttttcacataactttttaattataaaggtaatctgttgcaaaaagtttaaacattacagaaacatatgtttagatggtgaaagtttccaataagcgtgctctttggagatttaaatactgtggataatctttccagataaattgtataatgtatata

SEQ ID NO: 465195 - DNA, 4929 bp, Homo sapiens
tcagaggtttgatccttttggcgggacagcgaagactggcgtttccgccgctgaggggctgaggccgggagggcgcagcgtagccgtcccgagctgatgacgtcaaacgccgtgtgctcacccacgtgtggtgcccctctcccggtgtaggcgctggagctgaggacgcctttcctgcgggcgtagttgctggctgctcgggcactgggacctcggcggcttggggacgctggccgcgaagtagggagcgcaggtggccgctcggggtgagggccctgggtcatggagcacttcttgctggaggtggcagccgcgccgctgcggttaatcgcagccaagaacgagaagagccgcagtgagttgggcaggttcttggccaagcaggtgtggacacctcaagatcgccagtgtgtcctgagtaccttagcacagttgcttttggataaggactgtactgtgctggttggtcgccagcttcgccctctccttttggatttgctggaaaggaatgccgaagccattaaagctggaggccaaatcaaccatgatctgcatgaacggctatgtgtgtcgatgagcaaactcattggtaaccatcctgatgtcctcccgtttgccctgagatatttcaaggacacatccccagtctttcaaagacttttcctagagagttcagatgctaatccagtacgctatggacgtaggaggatgaagctccgggacctaatggaagcagccttcaagtttctgcagcaggagcagtctgtgttccgggagctctgggactggagtgtgtgtgtccctctcctcagaagccatgacaccttggttcgctggtatacagccaattgtcttgctttggttacctgtatgaatgaagagcacaagttatcatttcttaagaagatatttaatagtgatgaattgatccatttcaggttgaggttattagaagaggcccagttgcaggacttggagaaggccttggttttggccaatccagaagtctccctttggcgtaagcagaaggagctgcagtacttacagggacatcttggtggtaataggagttcttcacgtgaacaggagctggcccttaggtcttatgtgctggttgagtctgtctgcaaaagtcttcagaccctggctatggcggttgcttctcagaatgctgtgttgttggaaggaccaataggatgtggcaaaacttccttagttgaatatttagctgcagtgacaggtagaacaaagcctcctcagcttctcaaagtccagcttggagatcagactgacagtaagatgcttttggggatgtatcgctgcacagatgttcctggagagtttgtgtggcagcctggcaccctgacacaggcagccacaatgggccactggatccttctggaggatattgactatgcccccttagacgtggtttctgtgctgatccctctcttggagaatggagagctcttgattcctggccgaggtgactgtctgaaagtggcacctggatttcagttttttgcaaccaggagactcttgagctgtggaggaaattggtatcgaccgctaaacagtcatgctactttgctagacaaatattggaccaaaattcacctggataacctggataagagagaactgaatgaggttcttcagagcagatatcctagcctattggcagtggttgatcacctgcttgacatttatatccaacttactggagagaaacatcactcttggagtgatagttctgttggatgtgaacaggcacctgaagaagtttcagaagccagaagagaaaacaaaagaccaacccttgagggaagagaattatctctaagggatctgctgaattggtgtaataggattgcccatagctttgacagttcatctttatcagcatcattaaatatttttcaagaggtaaaatcttacctcctacaggctgaattcttttgtcaactttataaaccagaaattgtgatcaatgagctagatttgcaagtgggtcgagtgcggcttctacggaaacaaagtgaggctgttcacctacagagggagaagttcactttcgctgctacacggccgtcctctgttctcatcgagcagcttgcagtgtgtgtcagcaaaggggagcctgtgttgctgggtacattagctcaggctgtaaagaaaggagagtggatcttgttggatgagattaacttggctgctccagaaatactagaatgtctgagtggtttgcttgaaggatcttctggatccctggtgttgctggatcgaggagacacagagccactggttcggcatcctgacttccgtttatttgcctgtatgaatccagcaactgatgtaggcaaaagaaatctcccaccaggaataagaaacaggttcacagaactttatgtagaagaattagaaagcaaagaagacttacaggttcttattgtagattatctgaaaggattgagtgtgaacaagaatacagtgcaaggaatcataaacttctacacagctttgcggaaagagtctgggaccaaactggtggatggcactggccatagacctcactacagccttcggactctgtgccgggccctgcgatttgcagcctccaatccatgtggcaacattcagcgctcactctatgagggtttttgtttgggtttcttaacacagcttgacagggcatcacacccaatagttcagaagctcatctgtcaacacattgtccctggcaatgtcaagagtctgctgaagcagcctattccagagccaaaaggaggtcggcttatccaggttgaaggctactggattgcggtgggagacaaggagcctacaatagatgagacgtacattctgacatcttctgtgaagctgaacctgagagatatagtccgagttgtctctgcagggtgtgtgggcttttttctcgctgccccgaacttgatacaggcataggcattgatgacattttggtctaacttccttaactttcaaagagctttattcttattcattggccaactgaacaattacttacaaaagtcagtactataactttttcctggtagaaaactttgtttctagttgtgcaactttggagggagcactatggatgcagatgattttatctatctttaaagttatcttttgttattttgctgataaataccacagattattcagtaaatggctaaaagttctacttacagtttcttacaaatgttgccagcatagttggaattgctttccttagtattttttgaggaataatgtttacaaagatacttctcagtgtataggaataaaaatgttcttctgcttcttgcattttccagaaatgtaaaaaggggaaaaaaaaggaaaaaaaaatgctcttttaatgatgctgttaaatgatgtcgtcattcttttaaaaaaaaaaaaccaaaataatacttggccaggtgcagtggctcatgcctgtaatcccagcactgtgggaggccaaggcggtcggatcacttgagcccagggttttgagaacagcctgggcaacacggcaagactctgtctctgcaaaaaatacaaaatttagctgggcttggtggtgcatgtctgtagtcccagctactcaagaggctgaggtgggaggatcacttgagcctgggaggtcgaggctgcagtgagctatgattgcaccaccatacttcagcctgggcaacagagtgaaaccctttgtcaaacaaaacaaaccaatactcagttctggtttctcagctttgtaattttttgttgttttaagttgcttaattggctaatcttttacagaacctatccagtgctgattcagggagagacatcagttggtaaaacaagcctgatccagtggctggctgcagctactggcaaccactgtgtgcgtattaataatcacgaacacacggatattcaggagtacattggttgttacacgtctgactcctcagggaagcttgtctttaaggaaggtgttcttattgatgccatgagaaaaggctattggattattttagatgaattaaatttggcccctactgatgtgttagaggcgctgaataggctgttggatgataaccgtgaattgctagtaacagaaacacaggaagttgttaaagcacaccctcggtttatgctttttgccacccaaaatcccccaggactttatggaggcagaaaggtcctttctagagccttcaggaatcggtttgtggaattgcactttgatgagttacctagctccgagttggaaacaatcttgcacaagcggtgtagtttgccaccctcctattgcagcaagttggttaaagtcatgctggatcttcaggttatatgcttctggcaggtcgagtcaggaagcaggaggaaattgatgtgattcaagaagtccttgagaaacatttcaagaaaaaattgtgtcctcaatctcttttctccaaagaaaatgttctaaaattgctgggtaaattgtctactcagatatccacattggagtgtaactttggccatatcgtgtggactgagggcatgcggagactcgcgatgctagtgggaagggcattggaatttggtgaacctgtgctgctggttggagacactgggtaaagatctgtgacagtgactcatgagggttcatttcaattccataggattacttgagttatcactgaagaactcatgaaagtattaatccccccttctttcctccttcctcttttttcttttttttttttttttttaagaagagactaagagtgggtcgggggctgggggagggatagcattaggagaaatacctaatgtaaatcacgagttgaggggtgcagcaaaccaacatggcacatgtatacctatgtaataagcctgcacattctgcacatgtaccctaaaaaaaaaaaaaagaaa

SEQ ID NO: 465196 - DNA, 2219 bp, Homo sapiens
tatgaggacaaaaagagaaaagatcgaaaatacttatgttcgattgtagagggtacattagctcaggctgtaaagaaaggagagtggatcttgttggatgagattaacttggctgctccagaaatactagaatgtctgagtggtttgcttgaaggatcttctggatccctggtgttgctggatcgaggagacacagagccactggttcggcatcctgacttccgtttatttgcctgtatgaatccagcaactgatgtaggcaaaagaaatctcccaccaggaataagaaacaggttcacagaactttatgtagaagaattagaaagcaaagaagacttacaggttcttattgtagattatctgaaaggattgagtgtgaacaagaatacagtgcaaggaatcataaacttctacacagctttgcggaaagagtctgggaccaaactggtggatggcactggccatagacctcactacagccttcggactctgtgccgggccctgcgatttgcagcctccaatccatgtggcaacattcagcgctcactctatgagggtttttgtttgggtttcttaacacagcttgacagggcatcacacccaatagttcagaagctcatctgtcaacacattgtccctggcaatgtcaagagtctgctgaagcagcctattccagagccaaaaggaggtcggcttatccaggttgaaggctactggattgcggtgggagacaaggagcctacaatagatgagacgtacattctgacatcttctgtgaagctgaacctgagagatatagtccgagttgtctctgcagggtgtgtgggcttttttctcgctgccccgaacttgatacaggcataggcattgatgacattttggtctaacttccttaactttcaaagagctttattcttattcattggccaactgaacaattacttacaaaagtcagtactataactttttcctggtagaaaactttgtttctagttgtgcaactttggagggagcactatggatgcagatgattttatctatctttaaagttatcttttgttattttgctgataaataccacagattattcagtaaatggctaaaagttctacttacagtttcttacaaatgttgccagcatagttggaattgctttccttagtattttttgaggaataatgtttacaaagatacttctcagtgtataggaataaaaatgttcttctgcttcttgcattttccagaaatgtaaaaaggggaaaaaaaaggaaaaaaaaatgctcttttaatgatgctgttaaatgatgtcgtcattcttttaaaaaaaaaaaaccaaaataatacttggccaggtgcagtggctcatgcctgtaatcccagcactgtgggaggccaaggcggtcggatcacttgagcccagggttttgagaacagcctgggcaacacggcaagactctgtctctgcaaaaaatacaaaatttagctgggcttggtggtgcatgtctgtagtcccagctactcaagaggctgaggtgggaggatcacttgagcctgggaggtcgaggctgcagtgagctatgattgcaccaccatacttcagcctgggcaacagagtgaaaccctttgtcaaacaaaacaaaccaatactcagttctggtttctcagctttgtaattttttgttgttttaagttgcttaattggctaatcttttacagaacctatccagtgctgattcagggagagacatcagttggtaaaacaagcctgatccagtggctggctgcagctactggcaaccactgtgtgcgtattaataatcacgaacacacggatattcaggagtacattggttgttacacgtctgactcctcagggaagcttgtctttaaggaaggtgttcttattgatgccatgagaaaaggctattggattattttagatgaattaaatttggcccctactgatgtgttagaggcgctgaataggctgttggatgataaccgtgaattgctagtaacagaaacacaggaagttgttaaagcacaccctcggtttatgctttttgccacccaaaatcccccaggactttatggaggcagaaaggtcctttctagagccttcaggaatcggtttgtggaattgcactttgatgagttacctagctccgagttggacctttctgcctccataaagtcctgggggattttgggtggcaaaa

SEQ ID NO: 465197 - DNA, 1696 bp, Homo sapiens
cagccttaagggtcaaagattgaactcagaatttgagatttccaggaggatgatcaagatgagcttcgattgacctgcaactagcccagtgccagccacatagtagcccattacttgcaacaaatgtaccacactgatgcaaaacaatgataggggacaccgctggggtaggaagcatatggaaactctctgtgctttctgctcgatttttctgtagacctaaaactattcttaaaaaagaagactgctcttcctctcagtcccaaattgaactcaatttggaaaaggcgagcggtggaggtaattttggctgtggtgaaaactttggtggaagaggaggctatgatggaggtgctggaagcagagatagttgcagaggaggtgatggtgaatataatggatttggaagtgatggtggcaactatggtggtggtcttggttatagtaaaataaggggctatggtggtggtggaccaggacatgaaaaccaaggtggtggatatggtggcaatggtggaggatgtgatggttgcaatgaaggaggaaattttgacagtggtaactatgatggtggtgggaagtatagtgattttggaaattatagtggacaacagcaatcaaattatggacccatgaaaggaggctttctgggtggaagaagctcgggcagtccctatggtggtgattatggatctggtggtaaaagtggtggatataataacagaaggttctaaaaagcagcaaaaaagggcttcagttcctagcaggagttaaaatgcacagaattgtgttaaccataaactttgggtgtttatatgccatcatccttgatccattcacaataccattcaataatataataaacatccaacccaacaatcagaataattttgccatggtaacacctgtggggcattcctttttgaacagtaccccttcccttgatgtctgcaatatcacctttcttatagattagcatatatgtggccaaaggaacaactccatgtttttgtaaaggcctagagaacatatatccagtgcctttcctttttgcctttgtattcatcattttggcaaattactggaagatgacggttctggccaaaaggctggttttgtttttgggtcacattttcttgcttctctgcgttagaatcttggattagatgatggacatggtgaagatggaaaatatgaggtgcagagaagtgatggaaaaaagagaagatcaggatttcagtttttttctgcatttctcatcatcccatgaagtctcttgataacataagccaagttttcatataccttgacgtgtgtgatacttacgtggtgccaagaacaagatgcatactcaataaatattcatcactataggcaaaagcgggcacagatggaaaataaaattatttgaagagtcttgctctgtcacacaggctggagcgtagtggcatgatctcagctcattgcaacctctgcctcctgggttcaagcaatcctcctacctcagcctcctgagtagcttggaccacaggagacaaaatcctactagagagaaggggcctgcttcaagcacataactggattctacctcaagacaatctgccacatttgaagcttggaatcttcaaagagcagaatagaatgtgctgtactctttcaggactaaagagacaaagacttctagggtctcaatcga

SEQ ID NO: 465198 - DNA, 1423 bp, Homo sapiens
agcacactcatgcacacacttatgacgaatgtgagagtacacggagtagctttggtccccctttctctgactgatcatgaggctgtcgttgatgttttgagggactctcagctgtggcctctccgaatgcattcacctcttctgaggcatcagagccagccagttgccatctgttctcagcagccagccccacacatctctacgggcaggacagcccattgcacatccactactccttggagtaaaagaacatgtccccagcagaacaatgtggtgctttccataagcacgggaaaacctgcctcctggtgctcccagctgcttcacgatggaagatcccacacatcacagccaacagaatcccttctgctggtctttggagaaggagagaactgctacgatgccctacctcaacccttcctccgccctccacagctcctcctgcatcccccacccccaccaccaaccaccagaaggcctcttgaggccctgtgcctatgatctgcctggccttctgcttttcttttgatctgttaaattacactttttatttatacctacaacaaagctgagaaggtggggggagcgggaatgtctttttgctggcttttgatgctttcaaaacaaagtcatggagaaaatagtggctatcatttattgttactgttttattatcaaaacacttggccacgacttggctcttgccggtgacaggggctgagtgggagccatgctgagacatcagctctgtgaaggaagccgtgtcacctagctggcccatatctcaacacaggttccttctccccttggagacaggacctggtagaaagctcaggtcatgtgtgccagggaacgctttgtcacaccaaggccacctaatggttccttcacaagcgcctcacactttcagatccaggtatgtttgtggtgtgtcttcctttgcagatgctgtctggaaagtgaagagaaggctaatcaaggaccgatctggatagaaagggacacacacggaccaagcgtctaattgggggttgcccaggtctcactggtgcctggcttcccttggagcatttccattgcagttcacagtcaatccaagaatcagcgaaattctcattttcttttttccaggtcttccaagagctacagagtcgaacagaagctgcatctatctggcgtgcaggctgtcacctgtgacagagaggaaaggcaggatggggacaaagaccaggatctcactatcagtttaggaaattctctggtcttcatgctggcttctgacccttgtgtcgccgagtttccgtgagtgccagcagtttcaattacaggtttacaaagctaagatcttcaggaagcctccggtcctttcactaactcatgactgttacaacaaagagcacgtgacagtgtcttctagacactc

SEQ ID NO: 465199 - DNA, 1208 bp, Homo sapiens
agcacactcatgcacacacttatgacgaatgtgagagtacacggagtagctttggtccccctttctctgactgatcatgaggctgtcgttgatgttttgagggactctcagctgtggcctctccgaatgcattcacctcttctgaggcatcagagccagccagttgccatctgttctcagcagccagccccacacatctctacgggcaggacagcccattgcacatccactactccttggagtaaaagaacatgtccccagcagaacaatgtggtgctttccataagcacgggaaaacctgcctcctggtgctcccagctgcttcacgatggaagatcccacacatcacagccaacagaatcccttctgctggtctttggagaaggagagaactgctacgatgccctacctcaacccttcctccgccctccacagctcctcctgcatcccccacccccaccaccaaccaccagaaggcctcttgaggccctgtgcctatgatctgcctggccttctgcttttcttttgatctgttaaattacactttttatttatacctacaacaaagctgagaaggtggggggagcgggaatgtctttttgctggcttttgatgctttcaaaacaaagtcatggagaaaatagtggctatcatttattgttactgttttattatcaaaacacttggccacgacttggctcttgccggtgacaggggctgagtgggagccatgctgagacatcagctctgtgaaggaagccgtgtcacctagctggcccatatctcaacacaggttccttctccccttggagacaggacctggtagaaagctcaggtcatgtgtgccagggaacgctttgtcacaccaaggccacctaatggttccttcacaagcgcctcacactttcagatccaggtcttccaagagctacagagtcgaacagaagctgcatctatctggcgtgcaggctgtcacctgtgacagagaggaaaggcaggatggggacaaagaccaggatctcactatcagtttaggaaattctctggtcttcatgctggcttctgacccttgtgtcgccgagtttccgtgagtgccagcagtttcaattacaggtttacaaagctaagatcttcaggaagcctccggtcctttcactaactcatgactgttacaacaaagagcacgtgacagtgtcttctagacactc

SEQ ID NO: 465200 - DNA, 1160 bp, Homo sapiens
tatttgcaaatcactgcaccaatttctgtgttgtagttggtttttgagtctccagcttcacctctcaactcctgccactttatggaacaccctcagtgcccaggggtctcttgtccttggtcctggttctccctgggctgccttgagactttgcagtgtgccaataagaggatgtatatgagacccttactcatgtatttttctcttgtgaagctgatcacactggacttttaagtcctttcttcctgacattcagtctttgactctgaattagctgaggcatgagaagttcaccacaggaaggtcctgccctttgtttgctcctaaaggttcctttaaagttcaacttgaccaacacaccattgcaagcactccagaggagaagacagccttgctgtgtcaaatccactttagtttgtaaatttcttgtcagtcacttttatgcccccactgaataggacagtgtgaagcatggattaagtatgcaataaatggttgttgaataaatcagaaaattaaatgcattctgcacagaatatgctatttctcacctttgttcccaaagctattctctctgatctacaggcaggccaaatgatctctgttctatcagaatctaacccaactagccccagagtccactggaaggagtgggaaggggatgccagaaagcctgggcatgcaggggaagttgtgcctgctgaagtctgcctgctggggctgtatagtgttactgctgtgaaaaagtcccccagtatggagccccttactgtgggccccattgtgaggttcatccagaggaacaaggtgaccaggcaataccattttcagggaacagacccagaaatgtcacacactttgtttaatatcaagaaaacagtgcttcttcgaaccaggattattgatttagatgctcgaaaggtcagagctggagagcaaacatatttctatgggaaggaggcagtgccttcctcttctaatcatagatcatgtccaccttggcaagttcagggcctttcacgggattttattgttgggaatccaaagaaaacacagttgagagtaaggtctcagagggtggcttgtcaagatgaatgtctgcaccattttcctcttacaactatgcctatgtacaaagtgtatcacagaggtaagtgact

SEQ ID NO: 465201 - DNA, 2294 bp, Homo sapiens
  misc_feature (1)..(1): n is a, c, g, or t
  misc_feature (4)..(4): n is a, c, g, or t
  misc_feature (7)..(7): n is a, c, g, or t
  misc_feature (9)..(9): n is a, c, g, or t
nctnctnanatgacaccggcaaagcgtgacaaagcgtgacagacagcgctgctctccccgactgtctttctcctccgctccttctgcatctccccaacgcatctcatcgccaccctcacctccacctccctccctcggcctgtctctttcttctttatcaagccacgagtggcctcagatgcggttacaaacctactggggctggcaggccatggagacggtctatgacgccaaccccaggctctgcgaggacgtggtcatcacggacgaggcctcaggtcacagcacagcccggcacggccatgccaccgccgcggcgctgagtcccgtcctgtgcagggagcctcaatgggctggcggctgggagattccctctcttcttaaagcaaagagccacttggccgagggcaggcaggtccagaccttgggcggtggggctggctttgagcaggggcaggcccctgggggtgccgctgtgcagccgggaagagggtgtgaggcccagagagtgtttgctgctctgcaggcacgtcccagtgtctcaccccagaggccatcgggacccgcggattccctcagggagggcgcctggcctggctgtggcaccggaggaagtgcagccccgctgaccatgctgtttacacctgagctgaacccgcaggctgctccctaccaggcactggcctcctgcccatccctggctgcaagggcagaggctcctgagagacctgtttccttcttcctcctcagccagtgcctgccttcatggagctttgcagacgctcggtgcgaggggagcatgtgtgcacagacggacgctgggtacgaggtgagcgtgtgcacggacggacgctgggtgcgaggtgagcgtgtgcacggacggacgctgggtgcgagcgtgtgtgcacggacggacgctgggtgcgaggtgagcgtgtgcacggacggacgctgggtgcgaggtgagcgtgtgtgcacggacggacgctgggtgcgaggtgagcgtgtgtgcacggacggacgctgggtgcgaggtgagcgtgtgtgcacggacggacgctgggtgcgaggtgagcgtgtgtgcacggacggacgctgggtgcgaggtgagcctgtgtgcatggatggacgctggttgcgaggtgagtgtgtgtgcatggacactgggtgcgagggatctgtcagcatgaaggtggggatggatgtccaaggctgtgaatgtggctcctgggggcgggcccagcagatgccagaatcaaggcagagtctttagaggaagaatacaaatagcctggggctggctggaattttctcccgtgcagtcgtccagcctcccgtggcagggagcggcatctcagtgtgcgaagccctttgtatacttccctggaatgtggcttttattttgtaacaaagcaaatgttttactgctggttttcctttaacaaataaatattggctccaacacatgtcagagaaagtcgacaacaataaacccaagtgtctgtgattaatgaaggagaaaatgatcctccccactcttcccctcccaaaacataggtcccaagatgggattttcagccgtggacccctccagagcctgggtgggttctgtacttttgggtggttgagttttttctctggcctggggaagccccatcctggagtcctttatctgctgtttcccacctgtcaagtggggttggaatccgataatgggagaaatggcccctctgcgctctaaggaagggctctgcgtggtgctagtacctgctttcatatctgtgtttttaaaaacacaaggccaaagtgttgattctcccaggagatttatggtatcagccaacccctgggcactgtggggctggggtagcccttccaagtagcccccataagagcaggggccttatggacctttatacactgtatccttccctattggcttatttaggggaggaaaacctttatcactcccctcaggttctgttcctgaggtttgcaaattaaactgacaaaaggcagatttgcagcagaaaagatagcagaaaattaaatttaaatttgaatgttatgtgcacggaagcttcacagacaagaagcaaaaacccaaagaagggatgagacacggggacttatataccattttaacaaagggtgataaattgtggagaaggacaaaggaaaaagggggtttgggctcctaggggtggtagattgttggcggtgattaaaaaatgcatgggagcaccttctgctctctctcaccccacaggtctgagtctgaaccccaaggaccc

SEQ ID NO: 465202 - DNA, 264 bp, Homo sapiens
tgtttgtttgttaatgaagattgcttcttcctttcgagtctttagaggaagaatacaaatagcctggggctggctggaattttctcccgtgcagtcgtccagcctcccgtggcagggagcggcatctcagtgtgcgaagccctttgtatacttccctggaatgtggcttttattttgtaacaaagcaaatgttttactgctggttttcctttaacaaataaatattggctccaacacatgtcagagaaagtcgacaacaataaa

SEQ ID NO: 465203 - DNA, 369 bp, Homo sapiens
  misc_feature (59)..(59): n is a, c, g, or t
  misc_feature (335)..(335): n is a, c, g, or t
cacacaatgtcctacctaccccccttctgtcacaaccgccccgcttactttgaaagcanaaccaattacctggggctggctggaattttctcccgtgcagtcgtccagcctcccgtggcagggagcggcatctcagtgtgcgaagccctttgtatacttccctggaatgtggcttttattttgtaacaaagcaaatgttttactgctggttttcctttaacaaataaatattggctccaacacatgtcagagaaagtcgacaacaataaaaaaaaataaaacaaaatgagcctcgtttggccctcagcaggaggaagctctgccggcacgtcttnccctttagcagagaggctaacttcatagactcct

SEQ ID NO: 465204 - DNA, 257 bp, Homo sapiens
tcacaagaaaattttcggatattaccaggcccctgctgtacacgagatccaagtacctggggctggctggaattttctcccgtgcagtcgtccagcctcccgtggcagggagcggcatctcagtgtgcgaagccctttgtatacttccctggaatgtggcttttattttgtaacaaagcaaatgttttactgctggttttcctttaacaaataaatattggctccaacacatgtcagagaaagtcgacaacaataaa

SEQ ID NO: 465205 - DNA, 367 bp, Homo sapiens
gcccatcatagtcctcattcccccgccccgacacacaaacctaacctcaggatctgtcagcatgaaggtggggatggatgtccaaggctgtgaatgtggctcctgggggcgggcccagcagatgccagaatcaaggcagagtctttagaggaagaatacaaatagcctggggctggctggaattttctcccgtgcagtcgtccagcctcccgtggcagggagcggcatctcagtgtgcgaagccctttgtatacttccctggaatgtggcttttattttgtaacaaagcaaatgttttactgctggttttcctttaacaaataaatattggctccaacacatgtcagagaaagtcgacaacaataaa

SEQ ID NO: 465206 - DNA, 414 bp, Homo sapiens
gcccatcatagtcctcattcccccgccccgacacacaaacctaacctcaggatctgtcagcatgaaggtggggatggatgtccaaggctgtgaatgtggctcctgggggcgggcccagcagatgccagaatcaaggcagaggtgaggggttggctcaggtcttttggatctgaggggctcagggaggtgcaatcagggaaatcaagtcagcccctggacagaggagttcagagaaggagcagggacagcaccccggatggggagggcgtgcgctgtgaccagggagcagcagagacaaaggtgcaaaccaagcctgatacccagggggctggggaggaggttccgaggagagtgggacgggttcctgtggctggctcggggccaccgtggccctgatgggagcggctctggaca

SEQ ID NO: 465207 - DNA, 1599 bp, Homo sapiens
cgtatggtggaaatgctacatcatgttgcgctactgcacatctcttcccaccttcacattatcgctcggtagttcctcctgtgttcacttctcttttctgccgccttatgaagaagattccttgcttccccttcaccttccaccattatttagcagaggaacactgagtaaagaagaacaagaagcagaagtggaggaagcagaaaacaagaggcaggaaacaagaggtctggaaaggaaaaagctccctggacctctcacaaggatgtcagccagagctcaactaacgctagattctactgcaagatgtgaagggaagcaacgcagctcttacacagtcaacaagtgtcctttctgcagtctatgtattgccacattcttcatatttttgtgctttttgctggggatttcactttttaaaatgctacccccggccagataatcggcattctgaaagtgtctgaagatatcatgtatgatagacaccaaagagtgaccctgtgcatttcactcctgaattactggttggcagaaatggctgagcaacacaaacagatctgagaaggacaaaacagataaattcagaaaacagagctggactaaattggtctaactaggacacttgaaggcttgtgaatcagttcacacgatcagtgtgaaaagcgggtatgaagacccagatgctggtgtgtacgtgtgcatataagccccaacagctagaaatcaagcctttctggcttccgattgttggagaagtggaaacagttaatggagtatgcaatgagttctggcggtcagaagtccaaaatgggtcttacacgactaaaatccagatgtcgacagggaggaagaactgaggatcctacatcatgttagggagcagcaagagcactgtagtaagacataaccctcctttgcctctctatgtcctctgccccatgctgcttatgtccttattgaagttaagagtccggctgtcattgagaacctctgatactgcaccatttgatgaagggctatgaaaaattcccccgagaacagcaatgcacactgatcctaccagctcattcactagaatacactttctaaagccaatactaatggctgtaggcaaatagagcaggacggtcaagatacctctacccacttcattctacgcatagactgtctggttctctgaggtcacagcagtataatcttaaggtgaccattaagatctgattgacacattttcaggatttaaagtaaaattaaaagaacgtggaaggcagctgtttgtggcactgtaacagatagccatgtttacgaaaacaaattcaagttgagcaatgatctggcagattttgtttgccagggaggaccattgagccaatgggacccacaattttcccacttcaagagattttttttttctcaatgacattatataactgattcagatatcatttttcctttacatacccagacacaaccctagagatgccgagcccccagatatttcactttttatcagatatttggcacaaagaaacacttctgcagtctatagtttaaactatacaactgtctgggaaaactttgtgattgtaggtgctaatt

SEQ ID NO: 465208 - DNA, 1159 bp, Homo sapiens
gaacatcggactccaagttctccagcttttggactcttggacctacaccagtggtttgccaggggctctcgagtctttggccacagactaaaagctgcactgccagtttccctacttttgaggttttgggactcagactggcttccttgttcctcagtttgcaggcagcctatggtgggacttctccttgtgattgtgtctctttatggcatggatgtggagggtaaatttgaagcctcaccaaacagcttcctgctcctggagcctggaccattccttggggacctccaagaagagtctgtgcctggggactgctcctcacagccctacctcccgttctattttagagccgggacactggtgactttcctggggaaatctctagatgtgacctctatggccggggacaggggactgggtttgagtcttgagtcctttccagcaagcgccttcccgcttggagccttgtttccttcctggataaatgggcggggaagcatcacggaggtgtgcgggtttaatcggcacatgcgctgctgcctgcaggccaagctcaggataagctcttgcagtaaatagcaacgtttatgtccctcgactcctggctcagagacgcgacccagaatctggcaaccatacccgccccttagctggcccccctccactgatgactaatggccaggtgtaagacagtcttccgaaggggccgtaagaccaccatgggctcaagatagacattgagtcctgccctcgcccacctcctcctctctccacctccacatcttggtttcttgtcctccgtgtgcaaaatgtgctttcctgccccacctacgtctccacatatgaagaatcaataacaattttagagagaaaatacagttgtcatggaaaaaaaatggagtgaattcagagttcattaggcaagttaatcaaattgtccagccgtgtcttgctatttctgggaaccatctggcccgcctgatcgatgtgattccaggtgggaagtgtttgggagtgagggtaaccgtgacttctctgaggtcacagcacggagatgccaggtaaccggatgggagggcttggcatgtccctgggaggcactgggaatgcattgtcccatgcctgggcaggggcagctttggctgggaccctccattgg

SEQ ID NO: 465209 - DNA, 1375 bp, Homo sapiens
ccctcaaaagttttttcgaagccctttggaattatcacgggtggataatccagggatttttgtggccataagggcctatcccgattaaatgctaacgccagcaggggtttgacccaacagttttggaacttaagcgcaaggacttctcttatttacccccgttaccagaagcgggaaataaatgatatctttcattctatcggcaagaacacaagactggttattgtgaaaggaggaggcgtcattcctgcggaagccctatcccacatgacgaacgacaaggccaggggcaagcaaaaagaggaaggactctcttgctctgctccgacttggccagtagaggcagtgaggagctaaagatcattccttctttccttccttcactctccgtagacagctctgcagggaagtctgtgacaacctggccagacatagggctcacgatctgatcagagtcatggcaccccagactctgctgcctgtcctggttctctgtgtgctgctgctgcaggcccagggaggataccgtgacaagaagaggatgcagaaaacacagctatccccagaaatcaaagtctgccagcagcaacctaaactatatctatgcaaacacttatgtgaatctcaccgagattgtcaagcaaataacatatgctgttctacctactgtgggaatgtttgcatgagcatcctgtgagtgggagagtgggctgggatgtgcatcctgcttcccaactcctctatccaagactgtgcccacatccgaagcacaaggacctcaagtcaccagcataagaacatcaacaggaatgccgccctctctactgtctgaaccccttgtccctgtcaaataaaccagaacaaatgcccagggatcctacctcttttgctgccactacagatgatcattgagagctcactgtggcccctacagatgccccacttgtcttgcgtcctggttctagtgcttcttgctgggccattcaatgaaagagacatcagagaagaaaacttccttcatcagaccagaggctgtgagccacctctgaggcatcaccgggctctgggtatctcaggcttgtcttcacctttctcaagagcttcccttggacaaggaggtcttaggaaagagatcatgatcaaccatcaacacagacaccatcagatgtactctgtgggctgtaagggcatgatctccaagagaccttatttggtgtttccttggatagcctcccttaccaagcatcctctcaagccacccccaaacatgcctactagacactacaggcatatcttgttttattgagccttgctctattgcacttcacagctatagcgtttcatacaaattgaaggtttgtggcaactctgcatc

SEQ ID NO: 465210 - DNA, 915 bp, Homo sapiens
ccctcaaaagttttttcgaagccctttggaattatcacgggtggataatccagggatttttgtggccataagggcctatcccgattaaatgctaacgccagcaggggtttgacccaacagttttggaacttaagcgcaaggacttctcttatttacccccgttaccagaagcgggaaataaatgatatctttcattctatcggcaagaacacaagactggttattgtgaaaggaggaggcgtcattcctgcggaagccctatcccacatgacgaacgacaaggccaggggcaagcaaaaagaggaaggactctcttgctctgctccgacttggccagtagaggcagtgaggagctaaagatcattccttctttccttccttcactctccgtagacagctctgcagggaagtctgtgacaacctggccagacatagggctcacgatctgatcagagtcatggcaccccagactctgctgcctgtcctggttctctgtgtgctgctgctgcaggcccagggaggataccgtgacaagaagaggatgcagaaaacacagctatccccagaaatcaaagtctgccagcagcaacctaaactatatctatgcaaacacttatgtgaatctcaccgagattgtcaagcaaataacatatgctgttctacctactgtgggaatgtttgcatgagcatcctgtgagtgggagagtgggctgggatgtgcatcctgcttcccaactcctctatccaagactgtgcccacatccgaagcacaaggacctcaagtcaccagcataagaacatcaacaggaatgccgccctctctactgtctgaaccccttgtccctgtcaaataaaccagaacaaagccgagcgtccgaaacacaccccctaccgcaacccccgacaccctaaacg

SEQ ID NO: 465211 - DNA, 3702 bp, Homo sapiens
acaggacaatatttttaagctggagaactcacattttgaaaacggccgtgggaagagtccatatgaccctaagctgctgacagcatcccttttaatagatggagaattatactctggaactgcagctgattttatggggcgagactttgctatcttccgaactcttgggcaccaccacccaatcaggacagagcagcatgattccaggtggctcaatggtaggtggtttatgaaagaacatagacatgtaacatgtgtaactgtattaagttactagagaactcttttacagtacatgcaatatgacttgaaatttattgtgcagttaagctaatggtggtgacttcatgatggtgggtttgggggtacacgtgaaggtttgctttatagatccaaagttcattagtgcccacctcatctcagagagtgacaatcctgaagatgacaaagtatactttttcttccgtgaaaatgcaatagatggagaacactctggaaaagctactcacgctagaataggtcagatatgcaagaatgactttggagggcacagaagtctggtgaataaatggacaacattcctcaaagctcgtctgatttgctcagtgccaggtccaaatggcattgacactcattttgatgaactgcaggatgtattcctaatgaactttaaagatcctaaaaatccagttgtatatggagtgtttacgacttccagtaacattttcaagggatcagccgtgtgtatgtatagcatgagtgatgtgagaagggtgttccttggtccatatgcccacagggatggacccaactatcaatgggtgccttatcaaggaagagtcccctatccacggccaggaacttgtcccagcaaaacatttggtggttttgactctacaaaggaccttcctgatgatgttataacctttgcaagaagtcatccagccatgtacaatccagtgtttcctatgaacaatcgcccaatagtgatcaaaacggatgtaaattatcaatttacacaaattgtcgtagaccgagtggatgcagaagatggacagtatgatgttatgtttatcggaacagatgttgggaccgttcttaaagtagtttcaattcctaaggagacttggtatgatttagaagaggttctgctggaagaaatgacagtttttcgggaaccgactgctatttcagcaatggagctttccactaagcagcaacaactatatattggttcaacggctggggttgcccagctccctttacaccggtgtgatatttacgggaaagcgtgtgctgagtgttgcctcgcccgagacccttactgtgcttgggatggttctgcatgttctcgctattttcccactgcaaagagacgcacaagacgacaagatataagaaatggagacccactgactcactgttcagacttacaccatgataatcaccatggccacagccctgaagagagaatcatctatggtgtagagaatagtagcacatttttggaatgcagtccgaagtcgcagagagcgctggtctattggcaattccagaggcgaaatgaagagcgaaaagaagagatcagagtggatgatcatatcatcaggacagatcaaggccttctgctacgtagtctacaacagaaggattcaggcaattacctctgccatgcggtggaacatgggttcatacaaactcttcttaaggtaaccctggaagtcattgacacagagcatttggaagaacttcttcataaagatgatgatggagatggctctaagaccaaagaaatgtccaatagcatgacacctagccagaaggtctggtacagagacttcatgcagctcatcaaccaccccaatctcaacacaatggatgagttctgtgaacaagtttggaaaagggaccgaaaacaacgtcggcaaaggccaggacataccccagggaacagtaacaaatggaagcacttacaagaaaataagaaaggtagaaacaggaggacccacgaatttgagagggcacccaggagtgtctgagctgcattacctctagaaacctcaaacaagtagaaacttgcctagacaataactggaaaaacaaatgcaatatacatgaacttttttcatggcattatgtggatgtttacaatggtgggaaattcagctgagttccaccaattataaattaaatccatgagtaactttcctaataggctttttttcctaataccaccacctaacagagaacacaggtgaatgcagatgttcactttagcagacttaatgtttcctatgagatttcactgtacaggtttgtctttcttctttgcctgagaaataaaaatgtcatttgccatattgccatctaaaggagaaaaactgcatcagcaaagccattgtattgaactaaaagtttaaaatgaactgcatggatttactaagctgatgaatattccaaaacgtggttggattcaaggatatattttgtctaccggccctcatgtttgtatgtacttgaggagtaaaatgagtaaaatgatactgaatgaaatgttctgtggaaatattaaaaaaaaaaaaaaacataagccatccatcatccagaagaaaaatggaatacactgatctactactgatgtcttctttcagctttgatctaaagatgtattttattaaaactataatttaaatgtaccatgaaaaatatgcagtaaaaattagttgttttctaagctagagtaggatttgtcttacaattattgtgctatgtagtttttgttttaaaaattccaatggtgtgctgctttctttggacattttattttcaattctataagagggatagatgacattgttctagaaacacatatacatcattaagagtgaatctctaaaaccaggatataaattatgctttatttctctgagaaaatcaaacaaatggaagctgttcacacctccccttctttaagcattatctaaattaatttttacttgcataatgttcttagaaaaaaaaacagaacatttaagcaggaaaaaaggaagaaacaagttgatttttaagtgcattttactataatgaatcaatgaagggaaaaggaactgcatatttcatgaaaataataagcattgtcttaatatactgttaatagaaaatgtgtcttaattccgtgcttgaatccctgcatgatatttgagactaagatctctcttatgattctaccaagaattatatctgtgtcacttaatttttttaaaagagagagatcaataactattcagagcaacatgttaaaggcaaagtttccaatcatttacatctgtatcaggtgcctcttacctttccttatttaagacaattatttgtacaagaaacacatgactcttttcatatcaatgggagggacttttctacaaagtattttccaggatgcaacccacatttaaacaatgtaaaattctttgtttcctgcaacaacttacaaaataaggaaggatggaataaagacatcttattccttcttcactttcaacggtggtgaaattcacaatcgacaattcacaaactcaaaatcaaaagacataaaggagtaagctatttcagctaatgatttgaatcagtctgacaagtgatggtgatagctctataaaatgagtaacaggtcagtattagtgtgcaggctaaaacagtcaagcc

SEQ ID NO: 465212 - DNA, 487 bp, Homo sapiens
acaggacaatatttttaagctggagaactcacattttgaaaacggccgtgggaagagtccatatgaccctaagctgctgacagcatcccttttaatagatggagaattatactctggaactgcagctgattttatggggcgagactttgctatcttccgaactcttgggcaccaccacccaatcaggacagagcagcatgattccaggtggctcaatgatccaaagttcattagtgcccacctcatctcagagagtgacaatcctgaagatgacaaagtatactttttcttccgtgaaaatgcaatagatggagaacactctggaaaagctactcacgctagaataggtcagatatgcaaggtgaggtaaagaaaaaaaaactgagaaggatgtcattttcccataacagctttgctttttaaaattttctacctgtgtgcatatacaataaaaattatggctaaagcttgactcacataaaaataa

SEQ ID NO: 465213 - DNA, 4161 bp, Homo sapiens
gcactgaccctgtcctcctggctgctggtgacccctgactccctgcctcctgactgctggtgagcatgctgagtctgtttagaggggcgactcggggagttcctgaatgcaaagtgaggggtggttcaggccacacacctgtgagtgccctgggtaccagcccgcggcccagagcctggctcaggagctcagctggggcgctcgcggagactgtgacaaggattcagcctctgggtgctttgcttgtcaaagaacagggaagaaggacggagccacctaagcctgtgcaggctggaagcgctggtaacgtgggccaggctgggtcccaagctctggggccccttgcagtgcccttgggtgttgctagggtcttggaaagagattgagttttaggagagagcaaagcgatgactgccaccaactcacctctgcttggcaatgaccagccagtccctgaagaggaagaggtgcctcctggtggtctcagggccctgggtcagcaccatggggctgtgaaggacaggctcagcgtgcttgaggggcaggcccagctgcagggacagctgctcgagggtcactgcggatgccaggctcttcctgagggcgggggagacggagtggggcctgctggtggcttcgcacagcgaaagtgccgccgggccctgctccatggagacctgatcttctctccccagaacttcacatgggaaatgatctacaacctgccgggtatcagctaccccactctggggtggcggtggctcggggagcccgtggttctgccgcagcagcggagcctccagcgccagtcggcctctgttcatggagaggctcagtgccttcatgggctccctggcagcggttcagtgtggtgggttttcacctacctggtgtgtggccgtgccttgcctaaaatcttgtccagtccagcagctggcactgaggagcagctctgagccaggttcctgagctgtgggaacaaacaaagcagggctgatcattgtcttgcttggtaggaaacggcagctgcacttaaggcactcatgtaaaaagtgtgttcctaaacaaaatggagaaaaccaaattgtctccttgttatcctctgctctgctgcactgcctggaagggacttacacctaaattcggaataaatacatttatcaacgaggtcccaactctcggaccattggtgaatggccagggatgcctgattagatgataacataagacagttccggcagaaaggggcgggctgtggacccttctgaagctccagtggttgaactactggattcaacttaaaacatcagtccatttttgcattaagtgaaagcagtagttgtgcaaatcattgtactcacactggccgaggaagcaccagggaccgaaaaggacagggtggaaatctccctccccagccctctcttagcctgcttggtgtgatcaggactcttgatttctgggtctccaatgcagtgactctaactctgaacattggctgtgtttccagcccctttcatgtgtggctatttgacaaccagtaagcaacactttgacttcatttctgcaaaataaagatcaccattgttttctcgactgtgtccagctgtgtttattttaaagtaccttgttttccattttattgagaatggctacagaactctgccatatgctctgcattaatgagagggcatctgttccatcccatcatctacttcctggctcagaccacctgcaacacactggtttggcatctagcgggttgtgcttgcagaacagcaggctggctccgtgcacctgctcagtggggctgggctttagcaacctgcattgaggctgctcttcttaacttttctctaacttgcttcatgaaagttaattctgctgggaccccacgaggcagcggagagcccactctgcccatgattggtgccctgggctggcacgcagagtttaatggaggagcccgggagagagggatgcctgagaaccagggatgtgggctggagcagtgccacctcctctaactcacccgcaagcccagccaaccggctaaaccttccccacagagcctcagtctccttatctgtaaaatggattacctggcacttgtccagtctttctgcagtcaacatcgcccagattccatgcagaaccctttgcagactcctgaggaggtacagacaaggagtgtccctgtcctcatggtgctacatgaaaagggatcaggacagcatagtgtgtcctctgtcttgagaagttcgcatccagctctgccatggaccagccatgctcatggattgcctctcattttgctacggacaggagacaggaaaatactgggtagaagagggcggttcccgacaaaggccccaacctcaagcctgaagacccacgaccctaaatgaggacagccatttctgattttgtgcccaaaaatttgccttttggcctgccacacccaacatcttgcccctatataaacccgagaccttagcgggcacacacacaatcagccaaatgttgggattagcagaccagtggaccagcggaccagcagaccagttaacggtggaacaacgcagcagagaaagagagaagaggagggatgtctgaatgccaaggggaattcggccgcgggcagttagaaaagtctggctgctgggcggcccgactctaggggaagaccaccttcccactccatcccctgttctggctccccatccatctccctgagagccacctctaccactcaataaaacctttcattcatcctttgagcccatatgtgatttgattctttcaggacgctcagcaagagctcagaatatagaaggttgtctcagtggtcccctgcccttgcgataaggcagagggtccattgagctgattaagacacaagcccagatggcaaatctgaaagagctttataatacacacccacttgggcttggggagtcacagacacccattcctagatgctgccgtggggccagagcccaaaagggctttccctggcctctgcacctgcccatctgcatgctccccccagggttttgagctgtaggcgagccacacccctgttgcgcgtcctgccaaggggaattggggaactctactgtttcagtttcatgttccccatatttgtctgttaggcagagactgcttttgagtaaatttcttacaactaacaaaagaaatacgttctactttaaattatatcataattctgtgccccaatggaaataaagtttccaaaggaacaacacttttataattttaaatgcattttaagaaaaacagttccatgggttgaggatgcaggaacgagtgattctgagggcaaggctgcagttctcaggcttggttagccgtttctatgaagtgagaattttggcctgagaacccaggttgaacctcagatgtgagtagataattccaaatctaggaaatgcaagtcggtttccttcagaggagttgggagagcaggtgacttcaacctccagctcagtaagtcagggacccgagacttttctgaggtgctcagggaaggtatttcacccagttctgcgggatggttgctgtgtgtgtggagggctgaggagcacctcccatggcttgccagtgccttgacaattggagtcaactcaagaaggaacgccagggctctgtacctctggaaacttggcagtgagagatgagcagagacattcctgagctgtcatttggcaacagttccccatggagcatggccttgctctgaaatcagcctgtgtctccagtgagaaagcctctggcaaaatattgcttcatttcatgaagtcacagcctgggggatctttctcattccggaacaatctttctgaagcaccacaggctgattctatttcaatcagcaacaactggatttcgggcaaccacccaaggaaccctctttattgatatttcaggcctttaagttatattacagtcatattccggcagatatgatatgtatcaataagtcatgctacaacaggacaatgattttctaaatatgtgggaaatcttcactgattcatggaatcggggggtcgctgggttgaccttgtgccccaaaccatcagaagtgaagatgggtttgctaagtcagggtgtcaccagtgactgcctctctgttac

SEQ ID NO: 465214 - DNA, 2348 bp, Homo sapiens
atatgataagaaaagggcagggtgagaaatgatgcatctcagaatcaaaggctcagagaaacagaaattttacaaactcaggcaggaggagaggaaaatgggcccagcagagctgagaaacaaagcagaagagaaaaataactccagtacagaaatgaaagggacattggacaaaatgaaatggaaaatagatgttgatgcaaataaagtcaggaacatgaaagatgaccttgttagacccaggtggtttgctacagctgctgtgggggatgcagttgtggttccaaagtcaatggagttatgttcccaggagaattatggctgcctctgctgtgtcatgcagcttgtcagggaagtcggagaaagccggcagctacaggcctcaaccagctcctatgcaacccaaaaggctggtctcactcccaccatgcccccccgcaccccacctaatagcaaggaatttgcttccagacggtgggttagtgaggctaagaacttgccccaggccaccagagtccccgctgagaaagcaagcaaggcttttgcaccttcatgcctgttgagtctgcacactggattcttcttctggcagccctccccaaggacccctgtgagacaaatcaggaatggcttccctggggcccaaggagctgacagggcttttcctgctgcttcttctacccctgtatttcactcagctttctaaatgacccagttccaggccttttgtaaaagttctttctcatttatagtgcacctgcagaatgtcatctgtggttgtaacatagatatgacaggtctcaacttatttaaaaaaggatatggtgattcactggccagtagtataaaaaattggcctaccaattaaattcaagatagctttaagtctatttaatagacacagtataaatgaattactaccaaaatcttagaatattataccttaagtatgcactgactaactgtgccaggcaaaattaattcttatgtaattgaagccaacaggagtaaaacattggcaaaaagtcaatttgtgtgataaagagggagctaggcagtcccaaacagcttttagtgaatgcttttttgctttttttctatcgttgctgaagctaaatgagcaagagataaaagtcaaatatgtgcagactatattctccatgtcattctattctttttctgaaactaataaattggaccatgaggagtgttgctgaggctatatctttactcctcagaataaatgaaagaaaagacagaaaagcccctgagttcaggtcgatttgcacagccaaaaaaagtgtttctttttactgtattaatgattaaaattgcctctactgattaattatattgattaactttatagaaattcatctatcaaattcacaataggttgtgaattaaaatggaaaactcttggaataatgtaaatggactggatggacatggggcaactttaaatgcagataaatgagacttttttgctcacctggaacttcaaaaagtgcttaccagagactgtctcctcactgctatttcttatacacaaatttcttgttggcttcctgactcaatacttcaatttatagttatctggatttgctgtttgatgatttgaatgtgtcataaaatcacaaaattcgaaaggcaaaatcctagtaactggaataatcagagaagtatggcttctaggtctgtcacctctaattcatctcctcctcccccaagtgtgtaatcatagcctttagtttttacaaaactttcattactttaagtaaaaataagcaaatgtatacaagaacatttttatttctgtttcttatataaaggcaaacaaaataaaatgaggacaagaaaaacctaagagtttgctaatttcctgttaaagattaaaacacaatgtaagattaggaacatcaagttaaagttgtgacctgagatgacaaaccctaatcactgctctctgttatctcaacagtcaactgagtttggatacataaactaatatgaaatactttaggacatgcagaaaaaattttgaaaacagagaaagagaagcaacccaaggaaaaccaaacaagaaagcaaaataaaaaactgtcttgtgaaaaggccaaggccattattaagaagcacatgccagccgtcacccaggcctccttgcaagtttactgccttttattctacataaaatatgtaatggtttataactatttatggaaataatgcatgctaattttaacttatccatacaataaagtttgaaaacaaacaaaacctaaactctcaagccatcacttcgggttcacacagacatgtttgcagctcatttaatttccataggc

SEQ ID NO: 465215 - DNA, 1455 bp, Homo sapiens
gacaaggtttgtccagcagcaagtgaagaaattgacacatcaagactctttgagtggcatgatgggcctctggttcaggccatgaaggaggacggctttttcctcttggatgagatctcattggccgatgactctgtcttggaaagactcaacagtgtccttgaagtagaaaagtctctggtattagctgaaaaaggcagtccagaggacaaggatagtgaaatagagctgttgactgctgggaaaaaatttcgtattctagcaaccatgaaccctgggggtgactttggaaaaaaggagctgtctcctgccttaagaaaccggtttacagaaatatggtgccctcaaagcacaagccgtgaagatttaattcagatcatcagtcataatcttcgtccaggattgtgtctgggcagaatagatcctaaagggtctgacatacctgaagtgatgctggatttcattgactggctgacccaccaagagtttggcagaaagtgtgtggtcagtatcagagatatcctgtcctgggttaacttcatgaacaaaatgggggaggaagctgctttgaaaaggccagagatcatctccactgtgacatcttttgtccatgctgcatgcctggtgtacatagatggaataggttcaggggtaacttcctctgggtttggtacagcccttttggcacgaaaagaatgtctgaaatttctaatcaagaggcttgccaagatagtacgacttacagaatatcagaaaaatgagttgaagatttatgacagaatgaaggccaaagaattcactggaatagataacctttggggaattcatccattttttataccaaggggacctgtcctacacaggaataatattgcagactatgcactcagtgcagggaccactgctatgaatgcacagaggctcttaagagctaccaaactgaagaagcccattctcctggagggttcccctggtgttggcaagacaagtttggtgggagcattagcaaaggcttcaggaaatacccttgttagaatcaacttatcagagcaaacggacatcacagacctgtttggagcagatctacctgttgaaggtggcaagggaggagagtttgcctggcgtgatggccccttactggcagctttgaaggcaggccattgggtggtgttggatgaggtgaggggcctgtttgtcatgcccaagacggtgatcatgtgtgtgaggagcagtcatcctttcacagctccatttcacaatccatttctcagtggaagatcccgctgatgacttttctctaatgaaaagatcctctgtagttttctttaagaatgaggaaggtcacttggcagaatacacaaaaagaggcccttgtacataaaacctacaaactctcccactgtttaaagttatccttcagaggaaaactgcatcgtcactagtttagtctctgac

SEQ ID NO: 465216 - DNA, 2181 bp, Homo sapiens
ccagagtcagtgactccaaacagtttcttaacaaccatcagcccttccactctgcctatttgcctcttcgtttaatagcatctagagctctcagtaggtaggtgtccatttagctttcattttaaaagagccattgtggccgtgtggaagcatcgatcacttgggttctgaaatctcgcatgcagaagaacccaggtgtcaatactactcctgggaagtgtcaacccacttccactctgggtccctagacccatgtgttttaattaatcaggagcaaatttgtgtaaaaacacgtctggataaaaatcaatttagcaaaattgtttttaagatatttatacagataaaatgatataattatttcttagtctttcataatgaagccaacatttaacaataaattcaatattgcctttaaaaagccatttgtttagatatccaaagaatacccaatactatgttgaacaagaatgaatagaagaggaaaaaaatgaatgggtataataaggttgtcctggaaatctctatataggcaagaaaactataatttggaaaaaccatctatagaagatttcctggcagttctagaggaaagatatatggaggtttatggggacttcataggaagtattgcaggctgcataagacgcatggtgccagcatctccttctggggagagtttcaggaagtttccactcatggtggaaggtgaaggggagcaggcatcacatggcaagagggaggaagaaggagagaacatggaggaagaagaagaagaaaaaaggcagaaaaagggaagctctaatgttagggaagccagaagaattgaatccataaaccccaaaccacaacggatgaggactagaacacaatacatagtggtaaatgattcaacaggaagtgtgcttcacagggatgagttggatgaagccactagaggatatgtttttctaaatgaggaattaaaccaagaaagaggaagaataggagccaggcaacaggagagaggtaaagggaattcccagaacgacagcaggggaagtgccaggaccacagctgtgtagcaggcctagaagccaccagcccaggctggaggaggggggggtcaaggttctaagagtgtttgtatgtggggatcatatctccaaaaaagtactagaatacataaattatttgacctttgggaatattgtatagaaagatttataggcctcttacgctgtttgggaagacagagtattctcaatactaggcaaatgaaaagaaaaagaaattatcaactccaggaaaaacagaaagttgcatatgaatagaactataatcacaatgctctacctggtttaacagtaaacattatttcaataaagacaatataggatatgaattaaacattgagatataattttgtggggaaaatgaagagaggagaaaaaggggagtgtaaacaatgaaaatcttcatctatcattatgagaagacaataaataatgtcaaaaattggtgagttgtaaataaaatcaaggcattttatttaaaaatgataaagtaaatcccccccccaaaaaatatctacaacagttttatgttattacctctagaaagcatcacaaggttggaggaaggtggaagaacaaggagttattgtttcttgggttaagctttttagcatcatttgaattttcaaattattttcctgtgatatttgcgtaaacagttagatgtattttcaaaaaataagtgtattctttacaaaagttcaaagccttagacgtgtaatttgtgttcttttaacgttgatttgacaataaaacactgagctctattaatttgctgtctttattaacttatcccagttttttgggcccctatcaggccacagataaattcttgggagtcacagttttgcatgtttgtattattttcaattatacttgaaaatgcatatgcctgttttggatctgggtagccactgtgctttaaaatgtatacattttaaaatttatgtaactactgtaagcataaggaatttatcctattttcattttagtacatgtaggttcaaataataatataatccttcaaataatttccacattatttaaattattctgttaagtgagtctatacattatttaaatttgaaaagcactgacttgtttatatttactaagagatgtgatc

SEQ ID NO: 465217 - DNA, 674 bp, Homo sapiens
gtgcttagaggatcccgatgctctctccgtggggcggggttgattagcacgtggagctcgggctgccgcctcaaggaacttgctgggacgctttgctgagcgtggcgagtctggcgtgaggggcgcgtggagggaaaggagggagactttgaaccgtcgactcgcacccccgcagacaagtgagcgagcttagagagcccgggcaatgctccgaaagcctctgacctcagtcttctcgtccgtttgaccttcctacaaggcctctagaattcccagcctgcgtcagaataggaagaaacttccaaggcccggagcagctgcctccaagaaaaaggctcccaactcccgggcatggttctaaggccttgggattggtttttaactctaaatatcatattgtagcccttgcagtttgctggagacccctagggaaagaacaaagcgtcctgccacggtgcaccagaggaaggtgccacggactgtgggtgcacgcgtgggacctttacaccccaacctatttctcagagaaaacccttcggggctgggccaggccacccttttcttttgactgagatgtgggtaatgtgtgcccagacttgacgttgtttattgtgcgacattgtgtacaaatgtcctttataaaagtaaaggccactcgcacccccttttacgct

SEQ ID NO: 465218 - DNA, 1735 bp, Homo sapiens
caagtccaggggcgaacggcgtcatggagcccataggggcgcggctaaaggccccgccggccgaggagctgcccgccccggtggtcccctgtgtgcagggtggcggcgacggcggtggcgcttcggagaccccgagtcctgacgctcagctaggggataggcccctgtccccgaaggaagaggccgccccccaggagcaggaggagctgctggaatgccgccgccgctgccgcgcgcgctccttttccttgcccgccgaccccatcttgcaggcggccaagttcctgcagcagcagcagcaacaggcggtggcactgggcggcgagggggcggaggacgcacagctcggcccgggcggctgctgcgccaagtgcaagaagcgggtgcagttcgcggacacgctggggctaagcctggccagcgtgaagcacttcagcgaggcggaggagccgcaggtgccgcccgccgtgctctcgcgcctgcgaagcttccctatgcgtgccgaggacctggagcagctcggggggctgctggccgcggcggcagtggccgcgcccctttcagcgccgccttcccggctccggccgctcttccagctcccggggccgagcgccgcggccgagcgtctgcagcggcagcgcgtgtgcctggagcgcgtgcagtgctcgacggcctcgggcgctgaggtgaagggctccggccgggtgctcagctgccctgggcccagggccgtgaccgtgcgctacacctttaccgagtggcgctccttcctggacgtgccggctgagctgcagcccgagccgctggagccacagcagccagaggcaccgtctggggcctccgagccagggtccggggatgccaagaaagagccaggcgccgagtgcttccacttctcgctgtgcctgcccccgggcctgcagcctgaggacgaagaggacgccgacgagcgcggcgtcgcggtccacttcgctgtctgctaccgctgcgcgcagggcgagtactgggacaacaacgcgggcgccaactacacgctgcgctacgcgcgccctgcggacgcgctctgagcctggagagtttcgaagagccgtggggcggggttgattagcacgtggagctcgggctgccgcctcaaggaacttgctgggacgctttgctgagcgtggcgagtctggcgtgaggggcgcgtggagggaaaggagggagactttgaaccgtcgactcgcacccccgcagacaagtgagcgagcttagagagcccgggcaatgctccgaaagcctctgacctcagtcttctcgtccgtttgaccttcctacaaggcctctagaattcccagcctgcgtcagaataggaagaaacttccaaggcccggagcagctgcctccaagaaaaaggctcccaactcccgggcatggttctaaggccttgggattggtttttaactctaaatatcatattgtagcccttgcagtttgctggagacccctagggaaagaacaaagcgtcctgccacggtgcaccagaggaaggtgccacggactgtgggtgcacgcgtgggacctttacaccccaacctatttctcagagaaaacccttcggggctgggccaggccacccttttcttttgactgagatgtgggtaatgtgtgcccagacttgacgttgtttattgtgcgacattgtgtacaaatgtcctttataaaagtaaaggccactcgcacccccttttacgct

SEQ ID NO: 465219 - DNA, 1518 bp, Homo sapiens
tacacctcagtgtttgcattgcctctctatagactggcagtgacccagccatttctggcaatgagacacagtatctcccattcattagaggacaggaaaataacgtgttcatcaaatggcctgacaccaatgacattgtctggggaaagggcctacgttgcctttcctgacttctttcgtaatagcacagctgcgtggtggaagaaagagatagaagagctctatgcaaaccctcgagagccagagaagagcttgaagtttgatggattgtggattgaaataactcaacatttcccctcagatttggaatctagggacaagggcctgagcagcaagactctgtgcatggagagtcagcagatcctgccggacagctcccccgtggagcactacaacgtgcacaacctgtacgggtggtcccagaccagacccacatacgaagctgtgcaggaggtgacaggacagcgaggggtcatcatcacccgctccacatttccctcttctggacgctggggaggacaccggttgggaaacaacacagctgcatgggaccagctggggaaatctatcattgattttagtgagtcagcgcctcatgaaattcccacctcatgctctcattatgcatcttctcagacaggagcagatatctgtgggttctttggagatgctgaatatgagatgtgtgttcgctggatgcaactgggggcattttatccattttccagaaaccacaacaacatcgggacaaggagacaagatcctgtggcctggaattcaacctttgagatgttgtccagaaaagtcctagagaccagatataccctgcttccttatctctatactctgatgcataaagctcacgttgagggcagcacagttgtccggccccttctccatgagtttacggatgacaggacaacatgggatatagaccgtcagttcatgttgggccctgctatcttaatcagccctgtgttggaaactagcacatttgagatctctgcttattttccgagagcccgttggtatgactatagcacgggaactagcagcacatcaacaggtcagaggaaaatcctgaaggctccccttgaccacatcaaccttcatgtcagaggaggctacatcctgccctggcaagagcctgctatgaacactcactccagtcgacaaaattttatgggattgattgttgctttggatgacaatgggacagctgaaggccaggtgttctgggatgatggacaaagcattggtgcctacaccaccaggaccctgggtttcaagcacaaaactgatggtgcctggaacaccagtgagacagaaccattcactcccctggaaagccagggagccgagtgcccttgctcagcggatcccaaccccacagagcccagcaagctaagatccacaggcttgaaatactcgccgccagcacagctgtctgaagttgacgtgggaagctcgagtttggtggagggaggggcatccgccattactgaggcttgagtaggc

SEQ ID NO: 465220 - DNA, 2697 bp, Homo sapiens
  misc_feature (2)..(3): n is a, c, g, or t
  misc_feature (6)..(6): n is a, c, g, or t
  misc_feature (9)..(10): n is a, c, g, or t
  misc_feature (12)..(12): n is a, c, g, or t
tnnttntanntngagatggggtctcgctatattgcccaggttggtcttgaactcctggcctcaagcagtccttcccccttggcctcccagactgctgagatgacagtcacgggccactgtgccaggcccctcatgccatgagactgcgtctctcagacctccaactgcagaaagcataattaacctttggcctcagctgctgtactctgaaattcatgactactgcatttgctcagagactacactttccatgggctgctcccagccaacagccaagcacatcagggatactaaggcaggctcattcctttgatagatgatattggatacaatgtctgaaagagtcaaaggcaagaatggtatgcaacatgtgcaattctagtctcaagtcaggtggttagcttctgaaaaaacataggcacagaatttttgttgagataggggagcacctgatatcatgcacagtgtgtgatttcagccatgtaaggccatgttacatattagtgtaaacctggatcagggcagaaataaaaaggttctcagccacaggaatcctggaaaccaggcattttcactgcttctctcaaggagatgaattacccactttctgattcaagatggcggcctcctggtcgctcttggttaccctgcgccccttagcacagagcccgctgagagggagatgtgttgggtgcggggcctgggccgccgctctcgctcctctggccaccgcccctgggaagcccttttggaaagcctatacggttcagacatccgagagcatgaccccaactgccacttcagagacttatttgaaagctttggccgtttgccatggacctctggaccactatgattttctgatcaaagctcatgagctaaaggatgatgaacatcaaagaagagtcatacagtgtttgcagaaattacacgaggaccttaaaggatacaatatagaggcagaaggccttttttcaaaggccgttaaccagcgtaaagattggcttacctatggtcccatgcagggctgctcctgtgagcatggcagttgctctcagaagtggactgtgagtgtggtgggcaccatgagtgaccagtccagcacaatggttataggaatacatcgccttaaacagagtttgccaaaaaggaaaccaggattcatggctaaatcatatgacccaatagctcccatagccgaagaaatcagcgaagaagcatgtctcctatgttttgatgaatttcaggtcactgacattgctgatgccatgattctgaaacagctttttgaaaatctgttcaaaaacggggtcgtcgttgtggcaacatccaacaggccaccggaagactgctacaagagctggcagagggttgaggcaaagctgagtggctggagaaatgacccatttgaggtagccagtggggctagagtggagaatctttctccacccctttacttggagcgtatgggtgtcattacatgtgagatgcgtctcttgaagacaacagatggatgggtcttgtttctttatccaacttgccactctttgccttggtctgtgggctatgtacttaagtgtgtttttgtggtagcaggagagtgggtgctccagatgcctggcgcactgcctggacatggagcagagagggtcttgctgcactatgatctatacccaggaagcgtggggcagcttaggctgctgaaccagatgagagggtgctctgaatgcctggagatctgcctggttgtgaggcagagagggcctctccataccagactctctgcacaggaagagtggggcaggtcaagctgccgatccaggcttgtgacaggggagagcacaattccagcacctactgctgaagcactttccacagttctggatgtggaggccccctatccaactctggagcaggtgttccaatctctggcctgagactaaaatgcccatacagccatgctgcaggtcaccaaagaatggccgagattaaaaatggtgtcctgctctcagtctcagatctgggaaaatgcctgcagcatttcccagtgtctttccttcacagtgtctccaatcctctcctcaagttaactctcgggcttgggagaagcaaaatgctttcccttggcctgggttgcttggatccccagtggaaagaaagctttatttgccaggctaaacgataaattaacatcatgatttaggctaagcaaaaaactaatatcatttttttctttcagatctctataaaaatggactccaaagagctaactttgtaccattcatagcagtcttgaagggtctcctgatgtttcttttatatataatttccagattgtacatatgaggagggatagggaaaagtacatctccatcttcccagaagcagaagtcagcttatttaaggtccttgtctgctaattccatcatttctggttatgtttctatggtttgattttttccccctggttgtgagtcctattttcctgcttctttgcaagtcaataatttaggaacttagagccatattttatcatagaaacaaaaaaataaataggataacaataaaaagacagttgtgggcacaggaattttgtttcagctttctctcacacatttagaggaacagttaggtaaatgatgatgcagtcacatgaggggatataacagttatacggaatatttttcaaaagctttc

SEQ ID NO: 465221 - DNA, 913 bp, Homo sapiens
ccggtcggggagaaggggagggacttagaagatgggtcaataggtgcagcaaaccaccatggcacatgtttacctgtgtaacaaacctgcatatcctacacatgtgtcaaataaaataaaataaaataaataaaataaaataagtcatgaagaggctcccttacccaaggttccatatagagccaaacaattccttttgcttttttgttatgtgtagtggtgcagattaataaaatgagactatcctttattgtgctaaagccctatcattcagtgtttttaggaacaactctacaagtccattttggcttctgcatggagagaagtgtgctcttaccttgtcctgtggaaagggcggccagtgcataccaaccataccgacaaacacgttacaccttgggccctttttggagctattcaggaaagtcaatgggagctttgttgattccgattaaaccattgttgactgtgagcaaatttattgacctagttgcaatgaaataccctggcatattatgtcagcttccaactggccaacacacagatgccatgcttgctgctgacggctatcagacgtgtgccagttggcagcttcagccacaagccatagatcaaatggagatggagaaaacattgctctccattttgcctgctaagccagtcctgttctcaattcaagactggaacagcccaaaccaagttttggtatcaagacaaccagaaagaaatatcatccttctgtggcctcacgcagtgaaacttctgcgagtgacaaactttcccaaagaacccacggtagtctttgcatctatatacttatactaaagtttcccaaataattaataagcatttctcacccacaggttactcatcttagggcttaatttgtaaagcttcttgaaagctttggtat

SEQ ID NO: 465222 - DNA, 762 bp, Homo sapiens
gagacagagtgtctcactcttgcccactgcactccagcccgggcaactaagtgaagccaagaagatttctttctgaaacaagatactttcaataaaactgcaaagaagaaaaccaccacctcttaaagaagtacattggtgttctttattcactcaatctgtatcatgagacttcgggaaaacctggtggattaaataccctcctgcaacctcactgaaagtggcagaaaagggattaaaatggatatgagctgcaaggataaagagaactgcaaaggagaagagaacaataacaccttagaacaataaaatctcagaactggaaagcaaatggacgagctgaaattgttcacagtgtcctggaatcgtaggcacttggctggccttgccctgagctgccacagtccgaaagagaacttcgtttccgatagcagctttatgctgactttttccatgcccggctctctgatggacataatcagggtaatggtacctcatacaatgccaagcacacagggtaaacaacaggcatttgccagaggaaaaggtgaattagaaaatatacatctatctgctcatttggctgaagagaactataggaaggataaacaagaggctaatgtgattggttacctacaggatatgattggggatggaaaagaaggaaggagaaaaggaggaaaggaggaggaaaggaggaagggaagaaggaagaaaggaaagaaggaaggagacagagagaaaggaagaaagtagggagga

SEQ ID NO: 465223 - DNA, 1739 bp, Homo sapiens
aaataatagctgtttgtattttggctgctgcaggagccattttagttgtcaaatttaaaagttttgaatcactccccaatgtctgatgcctctgtcaattttgactacaaatctccatccccatttgactgcagcactgatcaagaagagaaaattgaagatgttgctagtcactgtctgcctcagaaggacctgtatactgctgaagaggaagctgctaccctttttcctaggaaaatgacatcccataatgggatggaggacagtggaggaggaggtactggagtgaagaagaaacggaagaaaaaggagccaggagaccaagagggtgcagcaaagggaagcaaggacagagagcccaagccaaagaggaaacgagaaccgaaagagccaaaggaacccagaaaggccaaggagccgaagaaggccaaggagcacaaggagccgaagcaaaaagatggggcaaagaaggcacggaagccccgggaggcctcgggcaccaaggaggccaaagagaagaggagctgcactgactctgcagccaggacgaagtccaggaaggccagcaaggagcaaggaccaaccccagtggagaaaaagaagaaaggaaaaaggaaaagtgaaactacagtggagagtttagagctggatcagggcctgacgaacccatctctgcggagtcctgaggagtccactgagtctacagacagccagaaacgacgctcgggaaggcaagtaaagcgcagaaaatacaatgaggacctggacttcaaagtggtggatgatgatggggaaacaattgctgttcttggagctggtcgaacatctgcactctcagcctctacactggcctggcaggcggaggagcctccagaagatgatgcaaacatcattgagaagatcctggcatctaagactgtccaggaggttcacccaggagaacctccgttcgacttggagctgttctacgttaagtatagaaatttttcctacttacattgtaaatgggccacaatggaagagctcgaaaaggatcctcgcatcgcacagaagatcaagcgatttaggaataaacaagcccagatgaagcacatttttacggaggtgaagcaatatttactgactcatttgactgctgcttttcttgcagcagtaaatactgtgtttacgtttctaagtccaagttaaattcctatacagatctgttgctcaagtcaaattgataaatgtgtgctgatttgcaacaaaactagtctagattcaagtcaaagaaaactatccaccaaagttaaggatcaaaccttataaactgacaactcataacggcgtgcatcttggtctgaatactaataaatagctagagtgagaggaatacgcacacaattcttttgtccctgctccctcaacccactgcaacccaaaaaggacatttcagaaggtcctaaagtttgaatgtaaaaaacaaaacaaatctaaaagtgagagaaagtaaacaaataaataattttatttatgtaaacttgggaatttctaagtattgtacctatagcaagaggaaggactgatggattttaatattaaacaaatctataatgctatatatcagaaaatgccacaaaccttaaccttaatgtgttattcttggaataaagactaaaccctgtaatagagcctacacagccctttgtgtctgttttctgatctattcccaaagtagtggtttttccttggccgagaat

SEQ ID NO: 465224 - DNA, 1052 bp, Homo sapiens
aaataatagctgtttgtattttggctgctgcaggagccattttagttgtcaaatttaaaagttttgaatcactccccaatgtctgatgcctctgtcaattttgactacaaatctccatccccatttgactgcagcactgatcaagaagagaaaattgaagatgttgctagtcactgtctgcctcagaaggacctgtatactgctgaagaggaagctgctaccctttttcctaggaaaatgacatcccataatgggatggaggacagtggaggaggaggtactggagtgaagaagaaacggaagaaaaaggagccaggagaccaagagggtgcagcaaagggaagcaaggacagagagcccaagccaaagaggaaacgagaaccgaaagagccaaaggaacccagaaaggccaaggagccgaagaaggccaaggagcacaaggagccgaagcaaaaagatggggcaaagaaggcacggaagccccgggaggcctcgggcaccaaggaggccaaagagaagaggagctgcactgactctgcagccaggacgaagtccaggaaggccagcaaggagcaaggaccaaccccagtggagaaaaagaagaaaggaaaaaggaaaagtgaaactacagtggagagtttagagctggatcagggcctgacgaacccatctctgcggagtcctgaggagtccactgagtctacagacagccagaaacgacgctcgggaaggcaagtaaagcgcagaaaatacaatgaggacctggacttcaaagtggtggatgatgatggggaaacaattgctgttcttggagctggtcgaacatctgcactctcagcctctacactggcctggcaggcggaggagcctccagaagatgatgcaaacatcattgagaagatcctggcatctaagactgtccaggaggttcacccaggagaacctccgttcgacttggagctgttctacgttaagtatagaaatttgtacgtctatttaaagtattctctgtatttgggttttatatgaataaaactttttttctcttgtga

SEQ ID NO: 465225 - DNA, 1817 bp, Homo sapiens
tggttcatgttgtggaggcgttgataccctcatgagaaattctgttacttccataaaagtcctgaagaaataaatatcttccttcaatagatgaaaatgaaaatacagaaaaaagagaagcagttgtcaaatttaaaagttttgaatcactccccaatgtctgatgcctctgtcaattttgactacaaatctccatccccatttgactgcagcactgatcaagaagagaaaattgaagatgttgctagtcactgtctgcctcagaaggacctgtatactgctgaagaggaagctgctaccctttttcctaggaaaatgacatcccataatgggatggaggacagtggaggaggaggtactggagtgaagaagaaacggaagaaaaaggagccaggagaccaagagggtgcagcaaagggaagcaaggacagagagcccaagccaaagaggaaacgagaaccgaaagagccaaaggaacccagaaaggccaaggagccgaagaaggccaaggagcacaaggagccgaagcaaaaagatggggcaaagaaggcacggaagccccgggaggcctcgggcaccaaggaggccaaagagaagaggagctgcactgactctgcagccaggacgaagtccaggaaggccagcaaggagcaaggaccaaccccagtggagaaaaagaagaaaggaaaaaggaaaagtgaaactacagtggagagtttagagctggatcagggcctgacgaacccatctctgcggagtcctgaggagtccactgagtctacagacagccagaaacgacgctcgggaaggcaagtaaagcgcagaaaatacaatgaggacctggacttcaaagtggtggatgatgatggggaaacaattgctgttcttggagctggtcgaacatctgcactctcagcctctacactggcctggcaggcggaggagcctccagaagatgatgcaaacatcattgagaagatcctggcatctaagactgtccaggaggttcacccaggagaacctccgttcgacttggagctgttctacgttaagtatagaaatttttcctacttacattgtaaatgggccacaatggaagagctcgaaaaggatcctcgcatcgcacagaagatcaagcgatttaggaataaacaagcccagatgaagcacatttttacggaggtgaagcaatatttactgactcatttgactgctgcttttcttgcagcagtaaatactgtgtttacgtttctaagtccaagttaaattcctatacagatctgttgctcaagtcaaattgataaatgtgtgctgatttgcaacaaaactagtctagattcaagtcaaagaaaactatccaccaaagttaaggatcaaaccttataaactgacaactcataacggcgtgcatcttggtctgaatactaataaatagctagagtgagaggaatacgcacacaattcttttgtccctgctccctcaacccactgcaacccaaaaaggacatttcagaaggtcctaaagtttgaatgtaaaaaacaaaacaaatctaaaagtgagagaaagtaaacaaataaataattttatttatgtaaacttgggaatttctaagtattgtacctatagcaagaggaaggactgatggattttaatattaaacaaatctataatgctatatatcagaaaatgccacaaaccttaaccttaatgtgttattcttggaataaagactaaaccctgtaatagagcctacacagccctttgtgtctgttttctgatctattcccaaagtagtggtttttccttggccgagaat

SEQ ID NO: 465226 - DNA, 1072 bp, Homo sapiens
ctagaggaccccgttcactttctacacactagtctacagacagccagaaacgacgctcgggaaggcaagtaaagcgcagaaaatacaatgaggacctggacttcaaagtggtggatgatgatggggaaacaattgctgttcttggagctggtcgaacatctgcactctcagcctctacactggcctggcaggcggaggagcctccagaagatgatgcaaacatcattgagaagatcctggcatctaagactgtccaggaggttcacccaggagaacctccgttcgacttggagctgttctacgttaagtatagaaatttttcctacttacattgtaaatgggccacaatggaagagctcgaaaaggatcctcgcatcgcacagaagatcaagcgatttaggaataaacaagcccagatgaagcacatttttacggaggtgaagcaatatttactgactcatttgactgctgcttttcttgcagcagtaaatactgtgtttacgtttctaagtccaagttaaattcctatacagatctgttgctcaagtcaaattgataaatgtgtgctgatttgcaacaaaactagtctagattcaagtcaaagaaaactatccaccaaagttaaggatcaaaccttataaactgacaactcataacggcgtgcatcttggtctgaatactaataaatagctagagtgagaggaatacgcacacaattcttttgtccctgctccctcaacccactgcaacccaaaaaggacatttcagaaggtcctaaagtttgaatgtaaaaaacaaaacaaatctaaaagtgagagaaagtaaacaaataaataattttatttatgtaaacttgggaatttctaagtattgtacctatagcaagaggaaggactgatggattttaatattaaacaaatctataatgctatatatcagaaaatgccacaaaccttaaccttaatgtgttattcttggaataaagactaaaccctgtaatagagcctacacagccctttgtgtctgttttctgatctattcccaaagtagtggtttttccttggccgagaat

SEQ ID NO: 465227 - DNA, 1741 bp, Homo sapiens
ttaaactaatacccgatttgctaatagcctaaaactttcctaaatagttgtcaaatttaaaagttttgaatcactccccaatgtctgatgcctctgtcaattttgactacaaatctccatccccatttgactgcagcactgatcaagaagagaaaattgaagatgttgctagtcactgtctgcctcagaaggacctgtatactgctgaagaggaagctgctaccctttttcctaggaaaatgacatcccataatgggatggaggacagtggaggaggaggtactggagtgaagaagaaacggaagaaaaaggagccaggagaccaagagggtgcagcaaagggaagcaaggacagagagcccaagccaaagaggaaacgagaaccgaaagagccaaaggaacccagaaaggccaaggagccgaagaaggccaaggagcacaaggagccgaagcaaaaagatggggcaaagaaggcacggaagccccgggaggcctcgggcaccaaggaggccaaagagaagaggagctgcactgactctgcagccaggacgaagtccaggaaggccagcaaggagcaaggaccaaccccagtggagaaaaagaagaaaggaaaaaggaaaagtgaaactacagtggagagtttagagctggatcagggcctgacgaacccatctctgcggagtcctgaggagtccactgagtctacagacagccagaaacgacgctcgggaaggcaagtaaagcgcagaaaatacaatgaggacctggacttcaaagtggtggatgatgatggggaaacaattgctgttcttggagctggtcgaacatctgcactctcagcctctacactggcctggcaggcggaggagcctccagaagatgatgcaaacatcattgagaagatcctggcatctaagactgtccaggaggttcacccaggagaacctccgttcgacttggagctgttctacgttaagtatagaaatttttcctacttacattgtaaatgggccacaatggaagagctcgaaaaggatcctcgcatcgcacagaagatcaagcgatttaggaataaacaagcccagatgaagcacatttttacggaggtgaagcaatatttactgactcatttgactgctgcttttcttgcagcagtaaatactgtgtttacgtttctaagtccaagttaaattcctatacagatctgttgctcaagtcaaattgataaatgtgtgctgatttgcaacaaaactagtctagattcaagtcaaagaaaactatccaccaaagttaaggatcaaaccttataaactgacaactcataacggcgtgcatcttggtctgaatactaataaatagctagagtgagaggaatacgcacacaattcttttgtccctgctccctcaacccactgcaacccaaaaaggacatttcagaaggtcctaaagtttgaatgtaaaaaacaaaacaaatctaaaagtgagagaaagtaaacaaataaataattttatttatgtaaacttgggaatttctaagtattgtacctatagcaagaggaaggactgatggattttaatattaaacaaatctataatgctatatatcagaaaatgccacaaaccttaaccttaatgtgttattcttggaataaagactaaaccctgtaatagagcctacacagccctttgtgtctgttttctgatctattcccaaagtagtggtttttccttggccgagaat

SEQ ID NO: 465228 - DNA, 1174 bp, Homo sapiens
aaataatagctgtttgtattttggctgctgcaggagccattttagttgtcaaatttaaaagttttgaatcactccccaatgtctgatgcctctgtcaattttgactacaaatctccatccccatttgactgcagcactgatcaagaagagaaaattgaagatgttgctagtcactgtctgcctcagaaggacctgtatactgctgaagaggaagctgctaccctttttcctaggaaaatgacatcccataatgggatggaggacagtggaggaggaggtactggagtgaagaagaaacggaagaaaaaggagccaggagaccaagagggtgcagcaaagggaagcaaggacagagagcccaagccaaagaggaaacgagaaccgaaagagccaaaggaacccagaaaggccaaggagccgaagaaggccaaggagcacaaggagccgaagcaaaaagatggggcaaagaaggcacggaagccccgggaggcctcgggcaccaaggaggccaaagagaagaggagctgcactgactctgcagccaggacgaagtccaggaaggccagcaaggagcaaggaccaaccccagtggagaaaaagaagaaaggaaaaaggaaaagtgaaactacagtggagagtttagagctggatcagggcctgacgaacccatctctgcggagtcctgaggagtccactgagtctacagacagccagaaacgacgctcgggaaggcaagtaaagcgcagaaaatacaatgaggacctggacttcaaagtggtggatgatgatggggaaacaattgctgttcttggagctggtcgaacatctgcactctcagcctctacactggcctggcaggcggaggagcctccagaagatgatgcaaacatcattgagaagatcctggcatctaagactgtccaggaggttcacccaggagaacctccgttcgacttggagctgttctacgttaagtatagaaatttttcctacttacattgtaaatgggccacaatggaagagctcgaaaaggatcctcgcatcgcacagaagatcaagcgatttaggaataaacaagcccagatgaagcacatttttacggagcctgatgaagacttgttcaatccagactatgtagaagttgatcgcatcttggaggtggcccacaccaagg

SEQ ID NO: 465229 - DNA, 1309 bp, Homo sapiens
aaggcaagtaaagcgcagaaaatacaatgaggacctggacttcaaagtggtggatgatgatggggaaacaattgctgttcttggagctggtcgaacatctgcactctcagcctctacactggcctggcaggcggagcaaggagcaaggaccaaccccagtggagaaaaagaagaaaggaaaaaggaaaagtgaaactacagtggagagtttagagctggatcagggcctgacgaacccatctctgcggagtcctgaggagtccactgagtctacagacagccagaaacgacgctcgggaaggcaagtaaagcgcagaaaatacaatgaggacctggacttcaaagtggtggatgatgatggggaaacaattgctgttcttggagctggtcgaacatctgcactctcagcctctacactggcctggcaggcggaggagcctccagaagatgatgcaaacatcattgagaagatcctggcatctaagactgtccaggaggttcacccaggagaacctccgttcgacttggagctgttctacgttaagtatagaaatttttcctacttacattgtaaatgggccacaatggaagagctcgaaaaggatcctcgcatcgcacagaagatcaagcgatttaggaataaacaagcccagatgaagcacatttttacggaggtgaagcaatatttactgactcatttgactgctgcttttcttgcagcagtaaatactgtgtttacgtttctaagtccaagttaaattcctatacagatctgttgctcaagtcaaattgataaatgtgtgctgatttgcaacaaaactagtctagattcaagtcaaagaaaactatccaccaaagttaaggatcaaaccttataaactgacaactcataacggcgtgcatcttggtctgaatactaataaatagctagagtgagaggaatacgcacacaattcttttgtccctgctccctcaacccactgcaacccaaaaaggacatttcagaaggtcctaaagtttgaatgtaaaaaacaaaacaaatctaaaagtgagagaaagtaaacaaataaataattttatttatgtaaacttgggaatttctaagtattgtacctatagcaagaggaaggactgatggattttaatattaaacaaatctataatgctatatatcagaaaatgccacaaaccttaaccttaatgtgttattcttggaataaagactaaaccctgtaatagagcctacacagccctttgtgtctgttttctgatctattcccaaagtagtggtttttccttggccgagaat

SEQ ID NO: 465230 - DNA, 2269 bp, Homo sapiens
agaagaatttaggatctagtctagtctgtcccctttctgctctgatcaagctggacaaaacgtcgtggggccacagcacagggggccaacgcaagctgggatcgtcagacgttaggaaatcccaaggaagaagagaaaggggacacattcgggagacgtcggcacacgctcgaagcagcggacaggcacctctctgtggacaaggcagactgggcggccgagattccgcatagatgcctgcttcctccacgacctccacgtgtggctggcccagtccgggtccccctcacctcctctgtctgtcttggtggcctcacgccgtgggctgtgatgccggctacgctgcttgggtggccaagggagatgatgcaaccacatcctgttggagcccagagaagtgcggatgcagcccggggctctttctttcctagaaccctgcctgggagtggcttccctgaactaaggacagagactttgtcttcgttgcctctcggcctgtgggcactgagcatacagagtaattggggaagttgcaaattgtgtgacctccggaataatggctgttacaatttttgcaaaggcagtttcacagggatgaggccaggacagagggcacagcccgctgggactccagggctgcccctgcaccccccatatcagctcagagaggcctggtgtccccgctgccaggggttgacacccactggtaccccctgtggagcagctgtgggcgggggctctgcagggagggtgtcgggggggccaggcctgttctgcctgaccccgctacctccatccggctgccttccatgagcagcagctgcctcccccccacacccttccttggtggccccgcccctctgatctccgtgagccaggatctcccccaggatccctatttcccacgggcttttggcaatgggctgctcaccccctccttcccctcctcctcattcatctgccatctgtgaaatgtggaggaggggcctgccctgtgccaggatctgtgccctagacacttccccagccaggcccaagggctgagcgtgaggctggcaggtctgcacttgaggtggatggtgagggtgccctcgcccacctgcagccattgtctgctgagtacctgtggtgcagatggggatggctgcaggggggtctcagctcacgcagtattgcggccatgggtgctggacattggtaggtctctctgagcagagcccgatggaagtgagaagggcgtgcgttaggggagcatttggagagggagccacgggtacagctgccctgcaagctccagcgcccatgggaaaaagggaccgagggggagaggggaggggatagggggaggggaaggggatggggcgtcggtggttgcttgggctcttagggtgggggtgatgcctgcagtcttggtgttgaagggaagaccagggaagagggaaggcaggaggcctgggagagaaagggaagagctgttgggtgctggcggagtggagcgggctcttgcatcactccatcccaggctccaccctgcctgcacctggaggcctccctcacctggctcctctgtgctccagacccctcccctttccaggtccaggattccccctgcccaaacagcactgaccaggcccccagggcctgtgcctgcagcccccagggacgggtgggcgtaaaaagattgcaggcgtgagtcaccgtgcccagacaaattaaggctcttgagacgaggtcatcctgggttatgcagatggaccctgaatccgacactagcacccgtgtggaaggaacgagagggagatttggggtccgcagaggcaaaccacaggaggacggagtcggagactggagcaccgcggccttgatcgggggacaccagggctgccggctgtgccagaaggggctgaggctggaccggattctctccgagttcccagaaggagccagtcctgccgacgccttgatgctggactctggcctccagaaatgtgcgaggacaaacatctgcggtttctaggccccgcctgtggtcctctgttgcagcagcctggacagtctggactgcctggacagcatgcagatgggctctgcccgcggctgcccacgagttcccaccgcccgcccgtccgtgggagagccagtcctcgtatgtgaagcgtacctgtatccctttactccgcgtacacaggtgcctttgtcacttctcctttgacctggctggcacatcttaccggtttctgcgctaacaatgagttgaaggaaatcttga

SEQ ID NO: 465231 - DNA, 445 bp, Homo sapiens
taggcggagtctcactcttgttgcccaggctggagtgcagtggcacgatctcggctcactgcaacctctgcctcctgggttcaagcaattctcctgcctcagcctcccaagtagctgggattacaggcacccaccaccacacccagctaatttttgtatttttagtagagatggggtttcactatgctggccaggctggtcttaaactcctgacctcaggcaacctgcctgccttggcctcccaaagtgctgggattgcaggcgtgagtcaccgtgcccagacaaattaaggctcttgagacgaggtcatcctgggttatgcagatggaccctgaatccgacactagcacccgtgtggaaggaacgagagggagatttggggtccgcagaggcaaaccacaggaggacggagtcggagactggagcaccgcggccttgatcgggg

SEQ ID NO: 465232 - DNA, 2180 bp, Homo sapiens
acagctcattgagaacgggccatgatgacaatggcagttttgtggaatagaaaggggggaaaggaggaattaatggcaaggggagatgtgtatcgatgctattttagcccaagtcaaattaaacctgtagaactgacaacacacattaatctcccattgcctccagtagctgtgcaaatgagctcctcgtttctttatacaaacaactgtcattttgacgttactactttggcaaaaaattctagcgatggcctgaccaatatttttggaaatttttcactaaagcagtcaatgacaactcaacatagtcaacaagtcaatgtcaactttgacattggtccattgattgccctttcttttcccagaaactctggagttaccacacaacccataccactatcaatgagaggccaccttctaactgcgaatggtggaccacaggaaaggcccagtagagcagaggagagtacagtggcataactattaagaaatttttaactctaaaatttaggaaatacagggaaaactcttctgtgtctgagaatacatagaaagaatatacataacaacaagttttgcttggtcgggtaattttcattccaaataaacttatcacaaaaaaactcagcttcccaaggtcattcccccgctgccagatacatacttatctctgaaagagtttggaagatggacctttcaattcctctacaattagtagctgagttacagagtaacctgccagcaatcctatcagcattcatcagactatttaaatagagcaaagtccacaaaaagttccactgaggacatgctgagcaaaggccggagccccagaagaaaacaagtacagactcagaggaaagctgccctggtcctgagtgtgactcccatggtccccgtggggtctgtgtggttggcaatgagctctgtgctgtcagctttcatgagggagctccctggctggttcctgttctttggggtcttcctccccatgactttgctgctgctcctcctcatcgcctacttcaggatcaaactgattgagggtaagtgtgaggccacacaaggaagaacttgggcatcctttcccacagcacatcttgaaatataccgatgcactgtcagtgttttctggccaggagaaacatatatatatatattttgtaggtacttctcaatcagtgttctctcaagttccttgatcaatttggccaagtttgatcctttccactgtgtggatcttgtgctgagatgtgaaggtctgctgtagggggccctcacgtgtagcacctcacagacatactgtgaatcagcaattttgacatatggttgcttgtctctctctctcaaggcaatagagtcacatatgtgaaaacattgttcatggtctgccttctttacatgacagatgtgtttatgtggccatgtgtgtgcatgtccgtgcgtgtgtatgcgcccgtgtgtgcacacacacaactttctcatccactgaacttctggtcagggaatgttccaaacattctgctgtcacagtctttgtaaatgtaaagccctgatagataaatacttgaccttggtgtaaacgttcccaggggattaatagtccttaaggtggaaaaaaaccaaaccaaacaaataactcaggaagccttaaggtgatttggaatggacattcgggtccttggattgacactgtttattctgctataattaaaattaatgaaactgggctgtaactagatagactatgtgttaatactgtgccaagtacacatgagattaatatcatcaaggttaataactattttagcaaaatcaacaaagaccagtcatatttcttaatttggatagtgtcatattaaaacaaatttgaaaaaccctcctctttgaacatctgtttatgtaataacatacatgaaggcatttcttggacttgccaagcttttgtggtaatcttagatcactaatgctataatatataacctaacagaagtgcaatgagggatatttcttcctaagatgagatttggaacataaagaaatcctaggagacacagacagtatgtcatggaatcaagtttttcatcacaacttactcaaatatgcccctagcctttcatttttcgtgtgtctcatttttatgaacagcccttttgctgaggggtcaagccatattctgc

SEQ ID NO: 465233 - DNA, 1493 bp, Homo sapiens
acagctcattgagaacgggccatgatgacaatggcagttttgtggaatagaaaggggggaaaggaggaattaatggcaaggggagatgtgtatcgatgctattttagcccaagtcaaattaaacctgtagaactgacaacacacattaatctcccattgcctccagtagctgtgcaaatgagctcctcgtttctttatacaaacaactgtcattttgacgttactactttggcaaaaaattctagcgatggcctgaccaatatttttggaaatttttcactaaagcagtcaatgacaactcaacatagtcaacaagtcaatgtcaactttgacattggtccattgattgccctttcttttcccagaaactctggagttaccacacaacccataccactatcaatgagaggccaccttctaactgcgaatggtggaccacaggaaaggcccagtagagcagaggagagtacagtggcataactattaagaaatttttaactctaaaatttaggaaatacagggaaaactcttctgtgtctgagaatacatagaaagaatatacataacaacaagttttgcttggtcgggtaattttcattccaaataaacttatcacaaaaaaactcagcttcccaaggtcattcccccgctgccagatacatacttatctctgaaagagtttggaagatggacctttcaattcctctacaattagtagctgagttacagagtaacctgccagcaatcctatcagcattcatcagactatttaaatagagcaaagtccacaaaaagttccactgaggacatgctgagcaaaggccggagccccagaagaaaacaagtacagactcagaggaaagctgccctggtcctgagtgtgactcccatggtccccgtggggtctgtgtggttggcaatgagctctgtgctgtcagctttcatgagggagctccctggctggttcctgttctttggggtcttcctccccatgactttgctgctgctcctcctcatcgcctacttcaggatcaaactgattgaggttaatgaagaactgtcccagaactgtgatcgccaacataatcccaaggatggctcttccctgtaccagagaatgaaatggacgtgaagttggggactttccaataactaaagcacaatgagtttctactggtcagcaagcaatggccaacagttcagctaataaagtaggttgataaactagaaccatagcaaaatagaaagaatactaagatactcattctgaaccatactgaaaagtggcagctattatctaaggggacttctcagagactcagtataacagcagctcttgaaaagtaccaagaatggatttcctgggtatatacactggacacattgtaactttttaacttttattgtgactgtgtctgctctaaacggcatatttaaaaaataaaattctgcagcatcttactacataatcccataggaacccctattattcc

SEQ ID NO: 465234 - DNA, 1928 bp, Homo sapiens
atctagaatggcagtctggccacaaccgctttgctgcactctgttgagttctgctcagtccaaactttccagcctctttagcactgtcagagaaaaactgactactgaagcctcagtaatggtggacaccccttcccttaccaagctcaatcatcccaggttgacttcagactgctgtgctggcaacgaccatagtccacttatgacactattaaaaattgcccttttttcccaagctggtattggactcacagccaacaccttcctccttttcttctgtatctgcacactccctctggactgcaggcctaagcccactgacctcatcacctgtcacctggcccttgtccacttagtgatgctcctcactgtgagcttcttggcatctctggacctctttgagtcacagtattttcagaatgacttcaagtgtaaggtattcttctacatgcatagagggatgagggctctccatctgcaccacctgcctccggagtgtgctccaggctgtcaccattacccccggcacctcctggttggcaagaattaaacagaaattcacacattgcatctttcacttcttggggttctcagtttctttctcagtagtaacctgccttcctccactgtggcctcttctaatcttattttcttctgtgcttcatactttttatttattttttattttttacaataggatccggtttattctgccttggcagggtgatcctgagagtggtgggtgtcaccctctcctgggcagagggaggggccgtgggccagtcaagccaatggtaggagaagcgctggtgaggggtggaatttggggttcaggggtgtaaccccaagaatgcagtgaaaccaggccgaggcccagaggcagctgtggtaggccagggcagggtggaaggcagtggactgggcccgggccgggatgacagggccaaggactcaggccacactggcaccccgggaggcggggcgcagtgtcgcatgacgtagaaaatgaatcacaggcccagggctcacaataagcacatggacaagtgggcacagactcacaggccagatggacctccagccacggccgggccagactcgtggacacaggcgcagtgtcacgtacagaccacggggagacatggcactaggggacaaatggacgtgacaccacaatgcacagggcaggccacagagctcgagggacgtgggcaggggccttttggcatttctgcgctggaatcatgtgagacaagggtggtggccgctctggaggtgcctggggggttccctcattacccctctgggcttagtccatcctccacactgttgtgcagcttctccacctcctggtagaggataaatactgttacccttatccctggtcacatccagggagacgcggtccagcggcccaggcgggggacagtgccgttctagaggtccttgagcccctccttcctcaggatctgcagccataggccggtgtgttccgcatttgtgctgctccaggccccgcatccggtctcgatcccatccagaggagcgtttcccaagacactggctgcgcccacaatggctccgaagaccccagcgaccagcgggtccatgggcttgctggggttgtcccctcggtaccagctgtgcagggaggtcaggaggagaagcagacggcctggttccagccctgctttagcgtgggtgccatgaggccccgacgtttaaagtattgctgtgtgtttcaagtggaggaggtcatattacaactgacatttgtccttgactactggacatatcacaccagccctgattgcagttatacttgaagccagatctacccttaacgtatattcattttactattcaataaatattaacttatcatgaatggtatatattgttacagttgtaggtttatggacctgaat

SEQ ID NO: 465235 - DNA, 2324 bp, Homo sapiens
atctagaatggcagtctggccacaaccgctttgctgcactctgttgagttctgctcagtccaaactttccagcctctttagcactgtcagagaaaaactgactactgaagcctcagtaatggtggacaccccttcccttaccaagctcaatcatcccaggttgacttcagactgctgtgctggcaacgaccatagtccacttatgacactattaaaaattgcccttttttcccaagctggtattggactcacagccaacaccttcctccttttcttctgtatctgcacactccctctggactgcaggcctaagcccactgacctcatcacctgtcacctggcccttgtccacttagtgatgctcctcactgtgagcttcttggcatctctggacctctttgagtcacagtattttcagaatgacttcaagtgtaaggtattcttctacatgcatagagggatgagggctctccatctgcaccacctgcctccggagtgtgctccaggctgtcaccattacccccggcacctcctggttggcaagaattaaacagaaattcacacattgcatctttcacttcttggggttctcagtttctttctcagtagtaacctgccttcctccactgtggcctcttctaatcttattttcttctgtgcttcatactttttatttattttttattttttacaataggatccggtttattctgccttggcagggtgatcctgagagtggtgggtgtcaccctctcctgggcagagggaggggccgtgggccagtcaagccaatggtaggagaagcgctggtgaggggtggaatttggggttcaggggtgtaaccccaagaatgcagtgaaaccaggccgaggcccagaggcagctgtggtaggccagggcagggtggaaggcagtggactgggcccgggccgggatgacagggccaaggactcaggccacactggcaccccgggaggcggggcgcagtgtcgcatgacgtagaaaatgaatcacaggcccagggctcacaataagcacatggacaagtgggcacagactcacaggccagatggacctccagccacggccgggccagactcgtggacacaggcgcagtgtcacgtacagaccacggggagacatggcactaggggacaaatggacgtgacaccacaatgcacagggcaggccacagagctcgagggacgtgggcaggggccttttggcatttctgcgctggaatcatgtgagacaagggtggtggccgctctggaggtgcctggggggttccctcattacccctctgggcttagtccatcctccacactgttgtgcagcttctccacctcctggtagaggataaatactgttacccttatccctggtcacatccagggagacgcggtccagcggcccaggcgggggacagtgccgttctagaggtccttgagcccctccttcctcaggatctgcagccataggccggtgtgttccgcatttgtgctgctccaggccccgcatccggtctcgatcccatccagaggagcgtttcccaagacactggctgcgcccacaatggctccgaagaccccagcgaccagcgggtccatgggcttgctggggttgtcccctcggtaccagctgtgcagggaggtcaggaggagaagcagacggcctggttccagccctgctttagcgtgggtgccatgaggccccggtgagtccccttgttctcgcacaatctctctaacctggtgggagactcctctgcactggaggtctgggaaggtctggccgtggatgaacttcaccttgatggtgtccatggaacatacgaccaccatggcctcggccacgccagcgccctggccgcaccgcagccagcgctgccgtcaggccgtccctgggcatcccgcgtctggctgctgtggaactggaacattcagaacccaacgccgccctggagacaagagccgcagagcagggagccgaggccgcggtgccggcccgggacgccatgaccgcgacagtgcgcacgcgggatccatgcgcggtgcccggctggtgccagcgctcgtccggctgcagctacgacctcccgcgctccgtggggagcggacgcccatttcaatgccgccggccaggccgcctgctggtgtcgccttccccggagcctccgctgggccttcccggacgcggcgcggcgtggccacggcgggcgggaggcgggcgcccgctgtgatctgaagtcccagcctcctaaactccgcactggcaccttaatttggttttaacacaaatgaagatctcactaaagataaaaa

SEQ ID NO: 465236 - DNA, 649 bp, Homo sapiens
cggagaaacccagaatgttcttccacatctgctcctggatccggtctgtgtcattttgcccggatcctgggcccgctcccaaggagggctcccccagctgcagggactcacttgctttgcagcagtgtggctatgttatgggcccacatccgaaatccacacagcccacaccacctgcaggacaagggcagccactcgaggaggaaaccggaagcggccatgaacccacgcctgggcagccacctggaaacgtggtcagatgtgacctcttcacagactcgggggtgctgggctctgagcagaagcggccgggtggtcctcctgggtgcctcaggggcccggggagcatgggtcagggcgagtggctgctccctggcctcaggttatctgggtgcccggtgagtgaggcatggcaggcgataccggaccccacccaccgcgtatacctctggaatagcgattgccatgattgatgtcagtagcctgggctgggagcctgcaggtaatcagaactgcgaagatgattgggtcacagccaggagactgattttgtatccagaagtttctgtttcacaatcactaaactactcatgctcaaagattagtgtcaacaagaaataaacagactctgataccgatataaaatgaa

SEQ ID NO: 465237 - DNA, 1962 bp, Homo sapiens
gtaaccggcggaaaactagggacgcgggcacagccgcagactgggcgtggggggcaccggaatggccgagcctgggacgctgggacctctggccgccgcggggcgaccaggcgggcggagacgtctcgcgccctcccgggccgcgcggctccaggcgcattcctgcacccagctcccgcgcgccgcgctgcgctgcctcccccggacagctgattcattggctcggccgcccagactgcctggcgccggctgcgtgacgtcacccattcacggagcccgcctcccccgctccgctggcgccggccgggcggtcgccctgacaacgcagacgccagcccgcacaatgacttccagctggagcagcccagccagcctgcgcgctcactcgcttgcttgcgctgggcttcagggcgcccgggtgagtttttttctctccctctcgtttttttttttttcccaggctctcgcgggtttcccctgccagggaatccactcgctgtagttttctagggctctggtcccagtcctttctgaagcgcgcttgcaggctgtcttcctcagtcgccctctccctgggtgctgttttgctgggcagcatcccatgctaggctcggcagacattctggcggttgggttcggcccttacagcgctaacacctgcagagtcgaggctcctgccaaaaggcagaaagcaaaggaggaaaaaattcattgtcataatagcgaaaatgataaacctcagctgtttaagagaagaatgtctgagtagctgttgattatctcccataatcacaaaacaacttttttttaaaaagaatttgcactgtctgttaaaacgcggtcattgttttgctttcaaatcgaacttcacgacagttagcaacttcaagaacgcttccaaatggataaatctttccagaagatttcttgcttcaaaacagctgcatttttggaagaaagtccacaactgacaactaagcaaaaccctcctggtggatagcataaatctgctttgttgaagctgctcatttgtctgatctatgagtccagaagatgcaaactcccttcccagcttatgcaaaaatacttccagtaaaaacaagccctttggcccttttcttttgtcagtccagatttcagcatgttcttcgctttgttattcatcattttatgtatttggacccatcctcaaacagactttaaaccgtttaaaggcaaggagggactctttcctaaacctttaatcccctggcccagctgagtagatgcacagtgtcttttgatgatggtgatatagaatgattaataaccacacaaggcattcggttggtcaagtcactgtttattggctcaaaataatccttggtttctgtatgtctacagctcacttcctaaacagttaaatccggagaagtctaatagataatagttggtgatcataaatataaataaccaatacattagaatgtgtagtcaaaataggaatacttgcttttcacttacttcccacgggtcgctgctggtggtagtcaacacaaataaaaatttgaactcattttgttattcatctaaaatgagaaactcggtgaaacattgattttctaaaattgctgcatatttaaatgtgattataattgctttttagcattttaaaattgtaacatcgataccaaatgcttaagaatctaaagaatagtctattggggctggcctattttgtgtaaaatggtttggttccagaccaccacaataaagcaaatatcatagtaaaacaagtcacacatttgttttttggtttctaaatgcacataaaggttacactataccatatatactcatattaagtttacactataccgtatatagtctattacactatgccatacatactctataagtttacactataccgtatatactctattaagtttatactataccatatatactctattaagtgtg

SEQ ID NO: 465238 - DNA, 1069 bp, Homo sapiens
cttatgcgtggggtgggcttcagggcgcgatttcttgcttcaaaacagctgcatttttggaagaaagtccacaactgacaactaagcaaaaccctcctggtggatagcataaatctgctttgttgaagctgctcatttgtctgatctatgagtccagaagatgcaaactcccttcccagcttatgcaaaaatacttccagtaaaaacaagccctttggcccttttcttttgtcagtccagatttcagcatgttcttcgctttgttattcatcattttatgtatttggacccatcctcaaacagactttaaaccgtttaaaggcaaggagggactctttcctaaacctttaatcccctggcccagctgagtagatgcacagtgtcttttgatgatggtgatatagaatgattaataaccacacaaggcattcggttggtcaagtcactgtttattggctcaaaataatccttggtttctgtatgtctacagctcacttcctaaacagttaaatccggagaagtctaatagataatagttggtgatcataaatataaataaccaatacattagaatgtgtagtcaaaataggaatacttgcttttcacttacttcccacgggtcgctgctggtggtagtcaacacaaataaaaatttgaactcattttgttattcatctaaaatgagaaactcggtgaaacattgattttctaaaattgctgcatatttaaatgtgattataattgctttttagcattttaaaattgtaacatcgataccaaatgcttaagaatctaaagaatagtctattggggctggcctattttgtgtaaaatggtttggttccagaccaccacaataaagcaaatatcatagtaaaacaagtcacacatttgttttttggtttctaaatgcacataaaggttacactataccatatatactcatattaagtttacactataccgtatatagtctattacactatgccatacatactctataagtttacactataccgtatatactctattaagtttatactataccatatatactctattaagtgtg

SEQ ID NO: 465239 - DNA, 861 bp, Homo sapiens
gtaaccggcggaaaactagggacgcgggcacagccgcagactgggcgtggggggcaccggaatggccgagcctgggacgctgggacctctggccgccgcggggcgaccaggcgggcggagacgtctcgcgccctcccgggccgcgcggctccaggcgcattcctgcacccagctcccgcgcgccgcgctgcgctgcctcccccggacagctgattcattggctcggccgcccagactgcctggcgccggctgcgtgacgtcacccattcacggagcccgcctcccccgctccgctggcgccggccgggcggtcgccctgacaacgcagacgccagcccgcacaatgacttccagctggagcagcccagccagcctgcgcgctcactcgcttgcttgcgctgggcttcagggcgcccggatttcttgcttcaaaacagctgcatttttggaagaaagtccacaactgacaactaagcaaaaccctcctggtggatagcataaatctgctttgttgaagctgctcatttgtctgatctatgagtccagaagatgcaaactcccttcccagcttatgcaaaaatacttccagtaaaaacaagccctttggcccttttcttttgtcagtccagatttcagcatgttcttcgctttgttattcatcattttatgtatttggacccatcctcaaacagactttaaaccgtttaaaggcaaggagggactctttcctaaacctttaatcccctggcccagctgagtagatgcacagtgtcttttgatgatggtgatatagaatgattaataaccacacaaggcaaaaaagaaaaaaaagtcgacgcggccgcgaatttagtagtagta

SEQ ID NO: 465240 - DNA, 669 bp, Homo sapiens
gcagcggcggcggcgttgttggctgaggggacccaggacacctgaatgcccctggccccagcttctctgacgcgatggggaaagtgctatgcaaaatcttcgggaacaaggaaatgtggatcctcatgttgcgcctggatgcggccggcaagacaacaatcctgacaagatccgcgctctcgcggcataactacactgggacccaaggtctgatcttcgtagtggactgtgccgactgccaccgcaccgatgaggcttgccaggagctgcaccacattatcaatgaccgggagatgagggatgccataatcctcatcttcaccaacaagcaggacctgcccgatgccatgaaaccccacaagatccaggagaaactgggcctgacctggattcaggacaggaactggtatgggcagccctcctgtgccacctcaggggacggactctgtgaggggctcacatggttaacctctaactacaaatcttaatgagcattctccacccatcccctggaaggagagaaatcaaaaacccattcacaggattatcgccaccatctcctctttcaattgccacttttcttttgaatttgaactctggagttactgttctacagtttggggggagagggcttgggggtcttctgtttcccgttctttttcctttttc

SEQ ID NO: 465241 - DNA, 1569 bp, Homo sapiens
agcggaggtactcgggacgctgaggcgggaggatcacatgagcccaggaggttgaggctgcagtgaggtatgatcgcgccactgcactcctgcctgggcaactgagcatgaaccctcctcaaagctaatggcgcttcaaaattctgcagtgcaaagaagttgctggggttgcggagcggagaaccgccaggaggctggagcccagccaggcagcctcctcgggcacacggtgaaggcgccggaactacagctacctccgcggcgccgcttcggccgccatatctgggtacacgggaaccgcagaggacaaactctcacccgcgttttcgatttctgcgctttcttcgagtgaggcaagacctagcagaggcccaagcccgtccctccctgccaggagcagcctcatgcggaccgagccgctgtgcggggcatcccctctgctggtgcccggcgacccctactctgtggtggttctgctgcagggctacgcggagccagagggtgtgggcgatgccgtgcgcgccgacggctccgtgaccctggtcctaccccagacccggggcccggcctccagccaccgagagtccccgcgcgggagtggcggcgcagaggccgccctggaggaggcggcccgtggccccatcctggtggacaccgggggcccctgggctcgggaggcgctgctgggggcgctggcggggcagggcgtggccccgggagacgtgacgctagtggtggggacccacgggcactcggatcacatcgggaacttggggctgttcccaggcgcggctctgctggtctcgcacgacttctgccttcccggaggccgctacctgccccacgggctgggtgaggggcagcccctgcgcctgggcccggggctcgaggtgtgggccacgccgggccacgggggccagcgcgacgtgagcgtggtggtggccggcacggctctgggcaccgtggtggtggcgggagatgtgtttgagcgagatggggacgaggattcgtggcaggcactgagtgaagaccccgcagcccaggagcggagccggaagagggtcctggtcgttgccgacgtggtcgtacctggtcacgggcccccctttcgagtgttaagggaagcctcgcagcccgagacggagggtggagggaacagccagcaggagccggtggtcggagacgaggagcccgccctgcactaatcagcctcgagagggactgcactcttgtcagggaagccctaacagcgaagagctgctggagacagagtcagagcagtcaagggtgggagcttccagcccttccaggaggccagttttctagtgaagacagagtgcacctgacactgccatcacatcgtcagtatcactgcctgtctctgccaccaaactaagatcaaaggaggggctcagctccctgtgcattctccctgggcctcagtaaaatgggagaaggttcgtgggaggggcctccaaaataaaaatggaaactgcattgaaaatcatagtgccctagtgtaaatgtgaagcattgacaatgataatcgtgcaaacatggtaatctaca

SEQ ID NO: 465242 - DNA, 225 bp, Homo sapiens
ctacagctacctccgcggcgccgcttcggccgccatatctgggtacacgggaaccgcagaggacaaactctcacccgcgttttcgatttctgcgctttcttcgagtgaggcaagacctagcagaggcccaaggtagagcgcggctaggattcgatggagggaaacataaaggatagcctttggagggtgacgggcaaggacgtacgtaccgcgaacggaatgggg

SEQ ID NO: 465243 - DNA, 1599 bp, Homo sapiens
agcaaaccacttcaggctctctaaggctgcggcatgtttaccttcctgtcatctgtcactgctgctgtcagtggcctcctggtgggttatgaacttgggatcatctctggggctcttcttcagatcaaaaccttattagccctgagctgccatgagcaggaaatggttgtgagctccctcgtcattggagccctccttgcctcactcaccggaggggtcctgatagacagatatggaagaaggacagcaatcatcttgtcatcctgcctgcttggactcggaagcttagtcttgatcctcagtttatcctacacggttcttatagtgggacgcattgccataggggtctccatctccctctcttccattgccacttgtgtttacatcgcagagattgctcctcaacacagaagaggccttcttgtgtcactgaatgagctgatgattgtcatcggcattctttctgcctatatttcaaattacgcatttgccaatgttttccatggctggaagtacatgtttggtcttgtgattcccttgggagttttgcaagcaattgcaatgtattttcttcctccaagccctcggtttctggtgatgaaaggacaagagggagctgctagcaaggttcttggaaggttaagagcactctcagatacaactgaggaactcactgtgatcaaatcctccctgaaagatgaatatcagtacagtttttgggatctgtttcgttcaaaagacaacatgcggacccgaataatgataggactaacactagtattttttgtacaaatcactggccaaccaaacatattgttctatgcatcaactgttttgaagtcagttggatttcaaagcaatgaggcagctagcctcgcctccactggggttggagtcgtcaaggtcattagcaccatccctgccactcttcttgtagaccatgtcggcagcaaaacattcctctgcattggctcctctgtgatggcagcttcgttggtgaccatgggcatcgtaaatctcaacatccacatgaacttcacccatatctgcagaagccacaattctatcaaccagtccttggatgagtctgtgatttatggaccaggaaacctgtcaaccaacaacaatactctcagagaccacttcaaagggatttcttcccatagcagaagctcactcatgcccctgagaaatgatgtggataagagaggggagacgacctcagcatccttgctaaatgctggattaagccacactgaataccagatagtcacagaccctggggacgtcccagcttttttgaaatggctgtccttagccagcttgcttgtttatgttgctgctttttcaattggtctaggaccaagatcaaggaggcaaacaaattggctcaaataatgggaaacattggaggttcaggccaataagaagctccaacttgtaaacatgaagaaagtaagaagggaaaccctttggggattacaaagaatgatagagctaaaataaataaataaagcctaaatttatttttttaaaaacgatagaggcttgaggagatttacatgtcattttttggtgaactctgtggcagctgctgcc

SEQ ID NO: 465244 - DNA, 343 bp, Homo sapiens
agcaaaccacttcaggctctctaaggctgcggcatgtttaccttcctgtcatctgtcactgctgctgtcagtggcctcctggtgggttatgaacttgggatcatctctggggctcttcttcagatcaaaaccttattagccctgagctgccatgagcaggaaatggttgtgagctccctcgtcattggagccctccttgcctcactcaccggaggggtcctgatagacagatatggaagaaggacagcaatcatcttgtcatcctgcctgcttggactcggaagcttagtcttgatcctcatattgtgaaatattaaaataattccacaatagttgagaaaaa

SEQ ID NO: 465245 - DNA, 1825 bp, Homo sapiens
acattctgccccggctgacgccttccttgggccagtgctcgggggtgtgtaacaaacgccaagacgcattgtaaagaaggaagcctgcgtttccatcaccggcttaatatcaaacaaaagtgcaattttgaaaatgtagtccaaggttttctgtggtgcggaaatggccaggccagacctccgtgggtggtccttcgtgtccacgtcagcgccctacatccacactgtgggcaccatgacctcacatgcggagcggagcagggccggcgcccggagagccaggctggtcacgaacgaggcctagagggcgtcaggccccaaagcactcacaggcttctcctctgtcctcggggccttcagacacctgcatgcgccgattcagccacccgcgcgcgccgattcccctggccatggggtttccaaagtgtgtgctcagaggacagtttcctccaggatgacctgtcagtggctctctgtgccggggacgtcgcgtgctgggtcccggtctgaatgcttcctaacgatttacccagttccttttctccactcaggaggcgtttgctgagaggcacaggctgagcccccgtgctgatgccacgaccgagggaacgggtctccctgtcggcgtgaactgacccggccaggcgtccactgccactcggactgtctcccaggcacgtggcgcccacacgggcagaacacgccctccacacacgcggcttcgggcagaacacgaggcgccctccacacacgcggcttcggggcttgtcatgaaaaaagctgaatgctgggggtgcagctttcaccaacagaatcccgtttggaagggacgcgcctgcaggcctgcagaagctgcatctcgggatggccaagagcccggccaggccccacggctgcacccaggacgggattcatgccccatgcctggcttctcacgaccacagagtgcctttcccgggactggatggaggcagaagaagtgtccttggaggcttcacccacgcagacccacggcttcctggtagaagccgtctgcacccccgcactgacctggctctgtgaggagagcggggaggggctccagggaaacatcctggccccttcccaggaccctctgcgtgtccctggtcctcgcggcctgcatctgagcgaggccccctccatcctccctccagcctctcccaggaccctctgcatgtccctgggccgctgagtgaccaacctctcctcctgggggttcagctccctctggtttcagtccctccccacccagcggggacacggccactcacttccaggttcacaaagctgagtgaagtccaaacaggaaaagcccaaatagagccacactcagacacaccacaactcagacacatcacaactcggacacaccacaactcagacacaccacaactcagacacaccacaactcggacacaccacaactcggacacaccacaactcggacacaccacaactcggacacaccacaactcggacacaccacaactcggacacaccacaactcggaaacatcacaactgagacacaccacaactcagaaacaccacaactcagacacaccacaactcagacacatcacaactcagacacaccacaactcagacacaccacaactcagaaacatcacaactcagacacaccacaactcagacacaccacaactcagaaacatcacaacacagacacatcacacactcaagacacatcacaacctaacttctgaaaactaaagacaaaaatataaaagaacaacaattgaaatgactgcaaatttcccattagaaaccatggaagcagctgc

SEQ ID NO: 465246 - DNA, 693 bp, Homo sapiens
tcacatgcagtcccttctctggcacctccatacccctccgagatgggttctcagtcagcttcctcggcccctgacaacctgaacttgatccagtttccccctcctggctccctgcccagcccctgctgccgccctccaatggggcccactgagtcaagtgcaccgacagagaggcccgcattccgggaggtgcctgcgcagggaggagccagcatcaagtctcaaaaactcagtatttatgggagtcaaactgaagttcttagtaaaaatccagactctctgagcaagaagccccccagaaatttggattcagctgtgctagatgcctggtaccagcatctgcttctgatgatggcctatggctgcttccactcacagcagaaggtgaagcagggagatcaggctgatccagcacttgtccttgtaaaagccgaaaccctttccttgggatgcagcagccttatcacatgacctcggctggcctagcagagcagacctgcccaaaactgtgtaaatactgctggactggatggaacacaggatgtattagaatatttttcctgtatttaaatgtacacaagaaaggaagacatgctcatggattgacacatcttgagaaagacttgggagaaaaagacaaaacaaatgtgtcaaaaagagagaatgtaatacacaaccttgcttcatttgaaa

SEQ ID NO: 465247 - DNA, 612 bp, Homo sapiens
agtcaactgggaaattttgaatatggactgcaggttagattatattgaaatagcgagtttgttaggtgtgacaagggcactgaggacgcgtagaagaatgttgatacacaggcagaaatatgtgcagggagcctcgtggcatctgcaacttacaaatgtcccaacagcaaaaaaaaaagtgacagggagcgcattcggcaagacaccaacaattggtgaatccggatcctccctcctagagtctaagataagcagcatcaacagtccgtggtataaaagcagacaggaatggaagaatggagagacacctgtttgcaagaagagtgaagtcactgcaataaggaacacctactccaagcagcagcgaggagccctgacaccacaggtgctgcaggtgccccagagctgctgctgagctccgaacgtcaatgaatgacagtccagcatcccatgagcctgctgcggtgacctcctggatgttccacttctctgcagtgccatggggaaacccaagaactcaacatagagtgggatccaatctacgagccattcaggaaacacatagggagcagctaccattgtcaccagtgctgttccaggcaccgagggtgg

SEQ ID NO: 465248 - DNA, 724 bp, Homo sapiens
ctggagccgaggcacaaaaggtcaggccatgaaattccctgcaggagcccgggtcccaccattccactctcaggctctttggaaagctgactcccagggccacaagcaagtctttgtgtgtcaggagggcccactgctggggctttcagtgcacacaataactcacaggctgtgtccaatttcagaacacaacgaagaggcaatgaccacacccacgtgggcctgggctttcactcaggagttcggatctcatggaaaaacaccgtggaagatgccctggggcagcaccactacccggatccacatccactcaatcgccctagtagggcctccagagcactcctgcaagcgtcacgtggtttcacagatcccaggcagaggcagggcaagtgttactaccaccaccagtgaggaaatgaaagcccagagaagctgtgagacttgatgaaggtcaccaactggctaaatgatgataggtgctctaatgagaagttttattacctcactatattgttttactcaaaaatatttcctgtctgacagctgcttcccggatttactgcttaaacttttgaagataaagcaggaaataatcttctttgaacatacttgataaaaattccccaaaaaagcaaaaacacatgcttctactgcattgaaaaaaatttactgcagtgtggcacttaagagtaataacaaatagcaataaaaagtaatttcaaaa

SEQ ID NO: 465249 - DNA, 1003 bp, Homo sapiens
caaaggcttggctaatactgcaacgtttgggatccacagcctacaaaaccccacagctcctaagaattctctcacctgccttctgcccttaagctccggtagattgcaaataacctgctttctttctgttcctgagctgcgttcggacccctgtcgtattgtaaatcccacgcaaggtacctgccgtcggaagatttgagctttcttcttgaacacctcatacccacagtcctccagacagaaggacaacaggtacaaagtcctaaggattataaaggtatgctgcttgccatcatcttagtgaccaaggcagcgaagctgtttctgtaccttggaacagtcttccctgacaagccagagaacagcgataaagccaccagccttgggatcaggactgaaaaggcaagagtgatggagatttctcctgcgctaagccaagagaaggtttcagcacctcagacagctcccaccgaagtagcggcgctcccagctgcttgcagatgtggaaaaggaaagcctcggtttgtcttgaggttgtcagcagttgcaagacacgtaataaaatgcaatgtgttcctaattcattgcatatcctcagctttaaatttgggtagcaaaatgattactctagattcttcagccttgccttggcaagtatctgtacctaaaaagcagtttttctacctaatctctttttttgtttttgtttttcaatacactttaagcaaattgaagcttttgttcctggaggaaaagtggtttgatatgttcatctatcttttagtaaatttgggggcataacttttcctattctgaggaacttttctaagaagagtgcataaaagtttgttgttgtttttaaaggatgcaacattcagcctgtgtcatgagtttaattatacaatttaaaggacatatgtgcaatgcattttgcagatgtgtgccagatatatatgtgcagataatgggcaagtatatatgtgtgcatatatatatcgggagt

SEQ ID NO: 465250 - DNA, 228 bp, Homo sapiens
cacttccggaccgcggatagcactggcgaccctagcgggtgagaggcccttcagggccgcggcgggttgagcgcaccatcacatctaagccatcagcaagtttgttggttttaatctccaaaatacgtcttgattttgtctgactctttgccaccaccctgatctaagcccttatcatctgcttgaatcactaacttgtctccacttgcagttgcgctttagagttgt

SEQ ID NO: 465251 - DNA, 1704 bp, Homo sapiens
cacttccggaccgcggatagcactggcgaccctagcgggtgagaggcccttcagggccgcggcgggttgagcgcaccatcacatctaagccatcagcaagtttgttggttttaatctccaaaatacgtcttgattttgtctgactctttgccaccaccctgatctaagcccttatcatctgcttgaatcactggtcattgatgcagtcattctcagtctcctcggagggagtctgaagatgcttaaagagcatccagagatggcggaagctcctcagcagcagttgggtattcctgtggtgaaactggagaaagagttgccatggggcagaggaagggaggaccctagtccagagacttttcggctgaggtttcggcagttccgctaccaggaggcagctggaccccaggaagctcttagggagctccaggagctctgtcgtcggtggctgaggcccgagttgcacaccaaggagcagatcctggagctgctggtgctggagcagttcctcactatcctgccccgcgagttctacgcctggatccgggagcatggcccagagagtggcaaggccctggccgccatggtggaggacctgacagaaagagcactggaggccaaggcggtgggtgaggaggggatccagctggggccagtggaggtcaagcctgaatgggggatgccccctggggaaggagttcaaggtccagacccaggtaccgaggagcagctcagtcaggaccctggagatgagacacgggccttccaggagcaaggcggtgggagcaaggaaaaggaggcaaaacccccacaggaagacctgaaaggggcgctggtggcactgacatcagagaggtttggggaagcctctctccagggccctgggctcggaagggtctgtgagcaggagcctggtggccctgcaggcagtgcgcctgggcttcctcctccccagcacggtgccatccccctgcctgacgaagtcaaaacccacagctccttctggaagcctttccagtgccctgagtgtgggaaaggattcagtcggagctccaatctcgtcaggcaccagcgaacccacgaagagaagtcttatggctgtgtggagtgtgggaagggctttaccctgagagaatacctgatgaagcaccagagaacccacctgggaaagaggccctacgtgtgcagcgagtgctggaaaaccttcagccagagacaccacctggaggtgcaccagcgcagccacactggggagaagccctacaagtgcggggactgctggaagagcttcagccgcaggcagcacctgcaggtgcaccggaggacgcacaccggggagaagccctacacctgcgagtgtggcaagagcttcagcaggaatgccaatctggcggtgcaccggcgtgcccacactggcgagaagccatatgggtgccaggtgtgcgggaagcggttcagcaaaggggagcggctggtccgacaccagagaatccatacaggggagaagccctaccactgtcctgcctgcgggcgaagcttcaaccagaggtccatcctcaaccggcaccagaagacccagcaccgccaggagccgctggtgcagtcaaacgggtatttggtcaactcatagatgggcctccttttgtatgacaaggcatctgtggttgcctcacattgtgatgatgctgtacaccttcagtgtct

SEQ ID NO: 465252 - DNA, 1461 bp, Homo sapiens
taacgcgagcagtgtgactatctgtacttcataaaggtccatggagagtggcctctgctgtgccacagtgcagtgtgtggagggtgcagtacagcagctttgcagtgtagagacagaatactgttatacaatgcagggagcagagcccacagtgtgcacaggcctcattacagacatctggtacagcatggcagaactggccagggccatgatgcaccatggaagtgccacatccatcatgggcatgacccagagctgcacaaggcacaccgcgccactgcagtgcatttagtggtacactgagctgagacccagagcccctgcggatgacatgtttggagtagggaatcacaaagtgaatgccgagactgctaaaaggaaaagcatccggcgcagacatacactaggagggcacagagatgctactgaaatcagcgttttgaatttttggaaagtgcatgagcagagcggggagagagaatctgaactttcagctgtaaatcgattaaaaccaaaatgctcagcccaggacctttccatctcagactggctggccagggaacgcctacgcaccagtacctctgaccttagcagaggagaaatcggagatccccagacagagaagccaagcacacgggaaatagccacgaccgacacacctttgtctcttcattgccccacaggcagttcttccagcatcttggcttcaacaaacaggccccttctttccataccaccacagtcacctgaccaaataaatggagaaagcttccagaacgtgagcaaaaatgctagttctgcagcgaatgcccaacctcataaactatctgaaaccccaggcaataaagcagagtttcatccctgtctttaaactgggggtatgtccactctagcaagtaaaaaaactactgttacacgttccagtaactctgtcaatattttcttgtatcagaattgttattatgcagccttcatttgggctggtttcatcattttgcactgtgaaatagctttacagtgcattactacagccagaagtacatatatatatatattttaaaatatatcggatagttgtatacaaatgagcaaggtatttgttgcaacttactacatagcatatacccaaaatcactgaagaaaatcgctggcatcagtgtgcagcaaatttgttcttttggtttcatcactaacaaaagtgcctcatcataaaaacacagttggtttttagggtgccatattgttaaaattagataacttacattgaataaacgaatgcgttttattggtaacaaatttcattacatttaccagttttaacacaggtggatacagaacttccattctttagtcattccaggtggatctgaattttatattcaaacttttaatacagtttttgagttttgtgtgacttgaatttttaatctttctgtaaaatacgtaacttaaatgaacata

SEQ ID NO: 465253 - DNA, 5972 bp, Homo sapiens
ggatctctctaggagctgacactcgaaccttcacgacccattcggatttttccaggactcaggagtggcactgggaagaaggggaccgctttctgcaattggcctcgacactggctgccaagaagacctgtcgcctttgttttgaagtctccagaaatggaagaagaaggcgaagtcagttgaagtcacgagaaatcagcgaggcatttgaaggcgcttcctgaaaacatttattccctgagtctgcaattcaattttcatataaggatgaagaaaatggaaacagaggagacttttgagattgatggaagctctgtgcagctggtcagtctctcagccattactttggaaacaggaaacacctcaaggaaaacaaagaaaccgcttggacccaatggataccattttgttaagcaagttaaagaaggaggacctgcttttgaagctggattatgtacaggtgaccaaattataaaagtcaatggagaaagtgttattggcaaaacctattcccaagtaatttctttaattcaaaacagtgatacaacattggaacttagtgttatgccacaatatgaagacattctccaagtggcatattctcaagatgcctacctgaaaggcaacgaagcttatagcggcaatgcccgcaatatacctgaacctccaccaatctgctatccctggctgccatctgccccatcagccatggcacagccagttgaaatagctcctcctgactcatcactgagcaaacagcaaaccagtacaccagtactgacacaacctggtagggcctatagaatggaaatacaagtgcctccatcaccaacagatgttgcaaaatcaaacacagcagtgtgtgtttgcaatgaaagtgtaaggactgtcattgtgccttctgagaaggttgtagatttgttatccaacagaaacaaccatacaggtccttcacatagaattgaagaagtgaggtatggcgtgaatgagcagacctctttaaaaacagtgtcaagaaccacatcaccaccattatcaattcccaccactcatctaattcatcagcccgcaggctccagatcattggaaccttctggaattttacttaaatctggaaattacagtggacattctgatggaatctcaagcagcagatctcaagctgtggaggctccctctgtatctgttaatcactatttgccaaattcccatcagcacatagactggaaaaactataaaacttacaaagagtatattgataacagacgattgcacataggttgtcggacaatacaagaaagattagatagtttaagagcagcatctcaaagcacgatggattataaccaggtcgtccctaaccgcactactttgcagggacgacgtcgaagcacctctcatgatcgagtgccccagtctgtccagatacggcaacgcagtgtgtcccaagaaagactggaagattctgtgctaatgaagtattgtccaagaagtgcatctcaaggagcactgacgtctccatctgttagttttagtaatcatagaactcgttcatgggattatattgagggacaggatgaaaccttagaaaatgtcaattctggaactccaatacctgattccaacggagagaaaaaacagacttacaagtggagtgggtttactgaacaggatgatagacgaggtatttatgaaagacctaggcagcaagaaattcataaatcttttcgaggttccaattttactgtggctccaagtgttgttaattctgataacaggcgaatgagtggtagaggagtgggatctgtgtcgcagtttaaaaaaattccaccagatctaaaaacactgcagtcaaacagaaattttcagactgcttgtggaatgtcactgcctcggggtatttcacaagacaggtcacctcttgtgaaagtccgaagtaattctctgaaagctccttccacgcatgtcacaaaaccatcatttaaccagaaatcatttgtttctatcaaagaccaaagaccagtaaatcacttgcatcagaacagtctgttgaatcagcagacatggtcgagtgaaaacgctggtacttcagatttagaactacctgtcagtcaaaggaatcaagatttaagtttacaagaggctgaaattgagcaatcagatactttagataataaagaagctgtcatcctaagggaaaaacctccatctggacaccagacaccgcagcctttaaggcatcagtcttacatcttggcagtaaatgaccaggagaccaggtcagacactacctgctggctgcccatgatgcacctctcacatgaccacgaatctgttggccctcatagcctgaatgctcagcccaactcaaagacagaaagatcaaaatcatatgatgagggtctggatgattacagagaagatgtaaaattgtcctttaagcatgtatctagtctgaagggaatcaaggtcgcagacagccaaaagtcatcagaagactctgggtccagaaaagattcttcctcagaggccttcagtgatgctgccaaggaagggtggctccatttccgatcccttgtcaccgataacggcaatgagaccaagaggaaaaatgtgtttcgactcaccacgtccgactgtgaatgcctgtttcaggctgaagacagagatgatatgttagcttggatcaagacgatccaggagagcagcaacctaaacgaagaggacactggagtcactaacagggatctaattagtcgaacaataaaagaatacaacaatctgatgagcaaagcagaacagttgccaaaaacacctcgtcagagtctcagcatcaggcaaactttgcctggtgctaaatcagagccaaagactcaaagcccacactctccgaaggaagagtcagaaaggaaacttctcagtaaagatgataccagtcccccaaaagacgaaagcacatggagaaaaggcattccaagtatcatgagaaagacatttgagagaaagccaactgctacaggaactttcggcgtccgactagatgactgcccaccagctcatactaatcggtatattccattaatagttgacatatgttgcaaattagttgaagaaagaggtcttgaatatacacgtatttatagagttcctggaaataatgcagccatctcaagtatgcaagaagaactcaacaagggaatggctgatattgatatacaagatgataaatgcagtttactaaaatgcttctccagaaaactccctgagtctctcttcacaaatgataaatatgctgattttattgaagccaatcgtaaagaggagcctctagatcgtctgaaaacattaaaaagactaattcacgatttgcctgaacatcattatgaaacacttaagttcctttcagctcatctgaagacagtggcagaaaattcagaaaaaaataagatggaaccaggaaacctagcaatagtgtttggtcccacccttgttcgaacatcagaagacaacatgacccatatggtcacccacatgcctgaccagtacaagatcgtagaaacgctcatccagcaccatgactggtttttcacagaagaaggtgctgaagagcctcttacaacagtgcaggaggaaagcacagtagactcccagccagtgccaaacatagatcatttactcaccaacattggaaggacaggagtctccccaggagatgtatcagattcagctactagtgactcaacaaaatctaagggttcttggggatctggaaaggatcagtatagcagggaactgctcgtgtcctccatctttgcagctgctagtcgcaagaggaagaagccaaaagaaaaagcacagcctagcagctcagaagatgaactggacaatgtattttttaagaaagaaaatgtggaacagtgtcacaatgatactaaagaggagtccaaaaaagaaagtgagacactgggcagaaaacagaagatcatcattgccaaagaaaatagcactaggaaagaccccagcacgacaaaagatgaaaagatatcactaggaaaagagagcacgccttccgaagaaccctcatcaccacacaactcagaacacaacaagtcaccaactctcagctgtcgctttgccatcctgaaagacagccccaggtcacttctggcacagaagtcctcccaccttgaagagacaggctctgactctggcactttgctcagcaccgagtttttggccaacgtcagcaccatcacctcagattattccaccacatcgtctgctgcatacttgactagcctggactccagtcgactgagccctgaggtgcaatccgcggcagagagcaagggggacgaggcagatgacgagagaagcgaactcatcagcaaagggcggcctgtggaaaccgacagcgagagtgagtttcccgtgttccccacagccttgacttcagagaggcttttccgaggaaaactgcaagaagtgactaagagcagccggagaaattctgaaggaagtgaattaagttgcaccgagggaagtttaacatcaagtttagatagccggagacagctcttcagttcccataaactcatcgaatgtgatactctttccaggaaaaaatcagctagattcaagtcagatagtggaagtctaggagatgccaagaatgagaaagaagcaccttcattaactaaagtgtttgatgttatgaaaaaaggaaagtcaactgggagtttactgacacccaccagaggcgaatccgaaaaacaggaacccacatggaaaacgaaaacagcagatcggttaaaactgagacccagagcccctgcggatgacatgtttggagtagggaatcacaaagtgaatgccgagactgctaaaaggaaaagcatccggcgcagacatacactaggagggcacagagatgctactgaaatcagcgttttgaatttttggaaagtgcatgagcagagcggggagagagaatctgaactttcagctgtaaatcgattaaaaccaaaatgctcagcccaggacctttccatctcagactggctggccagggaacgcctacgcaccagtacctctgaccttagcagaggagaaatcggagatccccagacagagaagccaagcacacgggaaatagccacgaccgacacacctttgtctcttcattgccccacaggcagttcttccagcatcttggcttcaacaaacaggccccttctttccataccaccacagtcacctgaccaaataaatggagaaagcttccagaacgtgagcaaaaatgctagttctgcagcgaatgcccaacctcataaactatctgaaaccccaggcaataaagcagagtttcatccctgtctttaaactgggggtatgtccactctagcaagtaaaaaaactactgttacacgttccagtaactctgtcaatattttcttgtatcagaattgttattatgcagccttcatttgggctggtttcatcattttgcactgtgaaatagctttacagtgcattactacagccagaagtacatatatatatatattttaaaatatatcggatagttgtatacaaatgagcaaggtatttgttgcaacttactacatagcatatacccaaaatcactgaagaaaatcgctggcatcagtgtgcagcaaatttgttcttttggtttcatcactaacaaaagtgcctcatcataaaaacacagttggtttttagggtgccatattgttaaaattagataacttacattgaataaacgaatgcgttttattggtaacaaatttcattacatttaccagttttaacacaggtggatacagaacttccattctttagtcattccaggtggatctgaattttatattcaaacttttaatacagtttttgagttttgtgtgacttgaatttttaatctttctgtaaaatacgtaacttaaatgaacata

SEQ ID NO: 465254 - DNA, 1244 bp, Homo sapiens
acagcttcagaaaggaaaggagacagaagcagcaacatctcaacaaccaatttccaatactatgaatcagatcatttcaaagcagttcccagaaacatgatacccagggagaacccaacaatgaagttatggttgttatttttttgagaagggaaagactactgatgagagatgcttccaaattaaaagtggcaaaggactcaggatatttaaggatgagattccattgcctgatctctttgtctttacattcacttatctgcagtctgactctctcctctcaccatggaatggaaacttagaccttgggaagacttcataattttttctctactgtcatgtttgaataaatggaataaaaacaacttcatgctttggaaactgggaggaaaataaccctagaaggatcttctggagccaaccctcttcaaagaagacaggatagtataattatgaactcagtctctgtagtcatgatgctcacatccaagcccctgcacatcctaggaagattcatcactaagccattactcttcactaattccatggaaaacttcgaactaactcctagcagacatggccgtgtgcaccatcaatcatgtcatgaagcacccaggacctacaaggtggctgctgaagacagcagaaagacagaacctggtgctcagtggccaaggccatcttgtgggccacccggcagccatcttggccaagtgggttctgctgggaaggaaactggtggttgagcaccacgagggcatcaacatttctggcaatttctggagaaacaaattaaagtatctggccttcctctgcaagcagatgagcaccaacccttcccaaggcccacccgccccgccattcctgggcccccagcgcatcttttggtggccttgcagaaccaagaagaaaaagcagctcatgcggctgcagaaacaggccacaaagaacgtggagaagacaaatgacaaatacacagaggtcctaagaccgagggactccctgtttgagaccagaaaagactgtttattcctcatgcttggcctggcctacccttctgccattgcgaccttgggatatgggggagcctacccttcctgcatcaccgccctgggatgtgggggatccaagggcagcaatataggtgccatgggcagcctgggacttaagctgggggcaagggaagggccttagtcactgcctttctataaggttattttaaacagctctaagatttgtacagg

SEQ ID NO: 465255 - DNA, 1259 bp, Homo sapiens
cacatagattctctccatgggctacacaactactatgcctcttctacaacgtcaattcccagatccaagccctagagacattgtgaagatctacagattatttttcacattcacctcccttcttcgagctgtaacacttactgtgaaggtccgcggctttttgaagttagagaaagcacgaacccgccggcagttacacaaccgcctgcagggaagtgtggcgggaaccggggcttccgcggcgtttgcgggccagctaaagctcccggtgtgcgtgggcttgggccccacagggagccgccggccggccctgcccactggctctgccgtccctaggcacagtaccgacccaaaggcgctgcgctcgatttctccaggcgccttagctgctaccccagggactagggctcgggacccgcaccccgccatgcctgcgtcccagcccaccccttgccgtgggctcctgtgcggccggagcctcccgaacgagcgccgccccctgctctccggtgcccggtctcatcgaccgcccaagggctaaagagtgcgggcgtagcaggcagctccacctgtggccccgtgtaggagccactttatatctagctaagggattgtgaatacaccaatcagcactctgtatctagctcaagctttgtaaatgcaccaatcagtactctgtgtctagctcaagcgaatgttactatagtgagctatggtcaaggctgtgttatctgcaaagaagccactggggattttaaggtcaattagaagtaagcaactaaaagcatgcaagcaggttcaatttggtgagcttaatcaggctgtacaggaagcatggctggagaggcttcaggaaacttacaatcatggcagaaggcgaagagggaggaggaacgtcttacatggccgaagcaggagaaagagagcaaaggtgggaggtgctatgcacctttaaacaaccagatctcatggaactcactgtcacaagaacagcaagggagatgtctaccatcatgtgggtagactcccagtcacctcccaacaggccccttctccaacattggggattacaattcaacatgagatttggacagggacacaaatccaaaccatatcaacaaccatatgcgttatatattttaattcccttattacagatgagaaacctgatactttaagaaataaactttcctaaataagaaactcataaatggcagaagtgaaatttgatttcaggtttttaagaccccagagcatgt

SEQ ID NO: 465256 - DNA, 1336 bp, Homo sapiens
caagcaagaccttaaggtataggcattttccatgtcctaaaagccagtgctctttttttttttcaggttctgtatctacagcaaatctgataatagatgatatatatggaatgtgatgagccaaatgaacatcttcaagaatttgtagcatgaccttgttaaaagttgcagaaaaacatcagtcattatggaaaacagatcttccccaccacagctgggtctccagatagaaaatactgagaaattcaaaaattcatttgagctggaccaactgtacaatgtgcaaatatccctgagtttcaaatggctgtcatttaccttctgtctctaaacttctactgagaataatttttaaaaatattttgtaatatctctggagcaaaagccttacttctttggtgacatttttcacttatttttttcatgtctacttgataaactactgaagagaataaacaaaacgactatggttgatggctggcaactatgtttatgtgaagaggctgaagcttttcacattggtgctgagttgacttgtaaaatatccagttttacatagttctgaatggtttaaaatgacattcaggtgggccaaagtaaggtggtcaacttttttttttaattgtaaatatatttcattacatctgaaagttatttttacttggagccaggatggttctattttagaaaaattatgcctatgtttatttggtcttaagaaaaagaacaccaaaatcacccagtagattgtttacttaatgccagaggacttaactgtcactcatctcaggaagtgaactcatttgctggtaaaagcatcatttctgtggcctgctgcatgcactggagtatttcagcacctcaaggagttacccataacaccagagtccatgaaggaaatgatatacttttcccttttcttgttcaccctgtgatgcaaaaaccttacaatgtatttattttttatctggcgaaaagcaataatgaaaagaaatgacactgaactgataatgaggaaaagcaagacgacattcctaaaggttaaattgacaagggaaagaaaatggtaggccaggaaacaatggcaagataatcccaaagtttacagggtgtgaacctgaaaactgatttgaataagctcagaagtaatttgtcttggatcccaggtatattgacattggaatgaccaaaggaaagtttgtgtttaatactttttcatgaaatggccattccacccctaaacggatggataatttacaacttctctctgcttaacattcattggctgcatcagaacacaccagagtcattgcctcaagggccatctcttgggcct

SEQ ID NO: 465257 - DNA, 2677 bp, Homo sapiens
cagccattactaacccacattgcctctaattccacagtcttttcactgtcctacattgcctctttgaattctttggcatacactcttaacctgtgaaaatgtgtcacaaccatgatgcccaactcaggttcttcttagttgttcaagttgtggaccttgatcgtgggttagtattgaatgcagaaggaaggtacctccaagattcacatggaaatcctcttcggattaaactaggaggagatggtcgaaccattgtagatctggaagggacccccgtggtgagtcctgacggcctcccactctttgggcaggggcgacatggcacacctctggccaatgcccaagataagccaattttgagtcttggaggaaagccgctggtgggcttggaggtcatcaaaaaaaccacccatccccctaccactaccatgcagcccaccactactacgacgcccctgcctaccactacaaccccgaggcccaccactgccaccacccgccgcacgaccaccacccgccgcacgaccaccaggcgtccaacaaccacagtccgaaccactacgcggacaaccaccaccaccacccccacacccaccactcccatccccacctgtccccctgggaccttggaacggcacgacgatgatggcaacctgataatgagctccaatgggatcccagagtgctacgctgaagaaggtaactgcctttgttctaatgctaactacttaccaggcacactagcacgccgcaactcagagcagggtggcagagcctgcaggggaggtatgagcaccgtgcacagcaaagcagcaacccgatgcatttttggtcccagcagccctcctttggagaatgccaatcctcatgtagctgggcttcctgtgggagtgtgggctttccactgggtaagaatgcaccattttcccttctctgctgatctgcactatcctgccgcccctgatgtcatcgtggagcccgtatatcaatatatctccatcttttctgctcagtcccctgctcaagctgctttggaagaagtcattctagatttgcatcaggcatggaggagagagattcatcttctttccctcagtttgaaatgaattgcaatgtcaattataaagcttaagtctttttaaaccaaggcagagtgaagatgtttcctttcaggaatcaagctggaattcttatgcaacgttattgactatgataagcccaatcagtttgaacatgaatactgtatccaaaatgggaattctgttggaagttagtctttccgtgaaaaagttacaaataaacaggaaaacttgacacatctaaaaaattcacaccaaaaaaacatggaaacacgtacagagggagaggaacaatgggaagaaaatttctactctgtccattgacccagttctgtatctacagcaaatctgataatagatgatatatatggaatgtgatgagccaaatgaacatcttcaagaatttgtagcatgaccttgttaaaagttgcagaaaaacatcagtcattatggaaaacagatcttccccaccacagctgggtctccagatagaaaatactgagaaattcaaaaattcatttgagctggaccaactgtacaatgtgcaaatatccctgagtttcaaatggctgtcatttaccttctgtctctaaacttctactgagaataatttttaaaaatattttgtaatatctctggagcaaaagccttacttctttggtgacatttttcacttatttttttcatgtctacttgataaactactgaagagaataaacaaaacgactatggttgatggctggcaactatgtttatgtgaagaggctgaagcttttcacattggtgctgagttgacttgtaaaatatccagttttacatagttctgaatggtttaaaatgacattcaggtgggccaaagtaaggtggtcaacttttttttttaattgtaaatatatttcattacatctgaaagttatttttacttggagccaggatggttctattttagaaaaattatgcctatgtttatttggtcttaagaaaaagaacaccaaaatcacccagtagattgtttacttaatgccagaggacttaactgtcactcatctcaggaagtgaactcatttgctggtaaaagcatcatttctgtggcctgctgcatgcactggagtatttcagcacctcaaggagttacccataacaccagagtccatgaaggaaatgatatacttttcccttttcttgttcaccctgtgatgcaaaaaccttacaatgtatttattttttatctggcgaaaagcaataatgaaaagaaatgacactgaactgataatgaggaaaagcaagacgacattcctaaaggttaaattgacaagggaaagaaaatggtaggccaggaaacaatggcaagataatcccaaagtttacagggtgtgaacctgaaaactgatttgaataagctcagaagtaatttgtcttggatcccaggtatattgacattggaatgaccaaaggaaagtttgtgtttaatactttttcatgaaatggccattccacccctaaacggatggataatttacaacttctctctgcttaacattcattggctgcatcagaacacaccagagtcattgcctcaagggccatctcttgggcct

SEQ ID NO: 465258 - DNA, 1355 bp, Homo sapiens
ttagatttaagtatttgatccatcttgagttgattcttgtataaggtgagagatgaggatccagtttcattctcctacatgtgacttgccagttatcccaggatggctggaaaagccaccatagaaattgaagtgtcatgtgtcatagagtcagacaggcgtcatgacagccattcacaatcgtggaaccttgagccgggcggttaacctgtgtaagccttggtttcttcatctgtaaaatgagggtaatgctatccactcttcagagccattgccagaaatatatgaatgaatgactccaaaatgtctcccatatttgcctcttcaaccgacgtttaattccctctttgctaacagggaaaatgtccctttactgcttaagggagagagaataaaggcggaagcaccaggttaagaaattctgatgttttcacgcattagctggtgctcctagctttctgatttccattttctagataaggctttaaggataaatttttccttaaaataataaacattcattctcatcatatttggagccgcggatagtccacctgggccgtctgggtggtcagcccccaaatgcaaaggaaggaagagcagggctgtcacttgactcttggtggcagctccaaaaaggcaatggtgcctgctcaccaaccaggaatgaagaccttccaatcaaaaaacaagacaagaaaagctgcccctgatgaatcattttcaggaaacacagagaagcagcagcaacaggagaaaaaccacattgcatacgtaaatctaagtcacaggaaacacaaatcccagagacaacctcagttatgtggccctctagttggactcagaatggttctgaccaacactgggttcagtgtggccgaatttacatggagggtgggtttgcagcagaggatgccatctctgtgggctttcagaggcattgaagaaggagatccttttccctccctggggttccaagaaaacactctcttgggttgactttacattttacaagtaaatgcaaataatacctggaagagataacactcttttttcagatcaaacattaacacttaatttgaattaactttagcagttgaggagcattgagaccattatgaaataatgctatttctctggttaaagctggttcttacttccaatgacatgttttggaacacgctcgtcgatggacaaacacatgtgtccttccttcgagattaaacagtttgagttagtcttaagtttgtcttctccattgttgtttggcaagaaaacttgctacctcctttcagaaaacaatgtgtcaatgcatttttaattaaagtcttattttgagataattatagattcac

SEQ ID NO: 465259 - DNA, 1512 bp, Homo sapiens
  misc_feature (1483)..(1483): n is a, c, g, or t
tcctattcgaccatcttggctccaccccctggagaaatcttctatgcagaaaaattccaaatgcatactccctcttcttaagtgtgggctgaccatggtgacttctttcaaagaaagatatatagatgacagtttttcttctctaattaagagaatcttatcttttcttctcctccattatgacaagaaaagaaataaattgatgctgccttgttttaaaataatagaagtatatagtacttttaaaaagtattttacaaggaagatttggagaattcactttatcatcgataaactcacaaaaaatacaggaaagaagaaagataaccaaggacattacaaaggagctctgtgtcagaagctaggattaaagaacaaatacagaacaaattattcctccagcacccctactgcaaggattttaagaactctatctcaggataaagacctgagggtcacaagatgtacattgctggcctcagctggattttcccagggtcaggtgcccattcctacctaatcaaaggtcatgagtcctcacacgttttcaagagtttggaaaatgatctcccttgccagactgccaatcttcaaagggagttctatatgtggaagaaaaagaaaaaatttatgtgcatttaccctgtttaatacactcatcatatatagtatttttgcaacagcaaaaataacactcttaatttagtatgtaattatatatgtcatatacttaatatacaaaatattttccttgctaacctatacgatttcaaatgcctggaacaatagataattcatgtgattacttgagagtatgtaaattttaatatgttaacatatactggcaaagttctaaaagttgcgattttatgggaggccaaattatgtacatattagtttgtctgaagacttgagccaaaaggaaactaatacacttctgagctacaatatggacataatgtcatgaagcaggaacattatgctccatttcaggacacttctgctgacctgcacctagaataccctgttctgtgctgatgactcagatgtaagaatgatgaagtgcatcggctggcatgcagagaacaataagaaaaagaactgagttgtgggaagacatgaggaaaggacatgaggctcttaataacagctgccaagtactgcagtcgggaatctggagcaaagtgattcaattctgaccactgcctgtgagtaaatgggattttatttttcaatacttttgtttaatagtacctccttcattacatgtgaacagcactccaggacagtaaatcatgaaatgggaataaagcctgtaattttaattaacatattttaaaatgtttctaatttgtatgcatttgatcaaattttcatttgcattgagctattttttttctttctcatgtaatgtttgacattaccatttctttctttaatgaaatactaatatttaataaaatatattacatccttaaaaaanaaaaaagggggggcccggtccccattccg

SEQ ID NO: 465260 - DNA, 1045 bp, Homo sapiens
  misc_feature (1016)..(1016): n is a, c, g, or t
tcctattcgaccatcttggctccaccccctggagaaatcttctatgcagaaaaattccaaatgcatactccctcttcttaagtgtgggctgaccatggtgacttctttcaaagaaagatatatagatgacagtttttcttctctaattaagagaatcttatcttttcttctcctccattatgacaagaaaagaaataaattgatgctgccttgttttaaaataatagaagtatatagtacttttaaaaagtattttacaaggaagatttggagaattcactttatcatcgataaactcacaaaaaatacaggaaagaagaaagataaccaaggacattacaaaggagctctgtgtcagaagctaggattaaagaacaaatacagaacaaattattcctccagcacccctactgcaaggattttaagaactctatctcaggataaagacctgagggtcacaagatgtacattgctggcctcagctggattttcccagggtcaggtgcccattcctacctaatcaaaggacacttctgctgacctgcacctagaataccctgttctgtgctgatgactcagatgtaagaatgatgaagtgcatcggctggcatgcagagaacaataagaaaaagaactgagttgtgggaagacatgaggaaaggacatgaggctcttaataacagctgccaagtactgcagtcgggaatctggagcaaagtgattcaattctgaccactgcctgtgagtaaatgggattttatttttcaatacttttgtttaatagtacctccttcattacatgtgaacagcactccaggacagtaaatcatgaaatgggaataaagcctgtaattttaattaacatattttaaaatgtttctaatttgtatgcatttgatcaaattttcatttgcattgagctattttttttctttctcatgtaatgtttgacattaccatttctttctttaatgaaatactaatatttaataaaatatattacatccttaaaaaanaaaaaagggggggcccggtccccattccg

SEQ ID NO: 465261 - DNA, 430 bp, Homo sapiens
tttttcctggtgtctccatttttatcttatgtcatctctgatgctctctgaagccacgcccttttcagtagttgaaaaccttttatttgctgctttctcataatgccaattggtacgtaaatttgattgtcttggccctggcttaaagctacacatgcttctgccttttgccttcctggttgcttaccagcttttgtatttcccaactgaaaattactgcaaaaaatactttgggtacaatatatacttttttccttttaggtcacaagatgtacattgctggcctcagctggattttcccagggtcaggtgcccattcctacctaatcaaaggtaaggatgaagttggccttctgtgtgagccggtgggggaggggatgagatggttaacttcatgtgtcaactcatccaggttatggggtcaagttct

SEQ ID NO: 465262 - DNA, 3304 bp, Homo sapiens
gagaactctgtacgttctttgcaacttctctgaaagccacacacaaacccatccatggtgacaaagtgccagtcagtgattgtatgaggtggggcggtttgttgcggatgatatgaggggtctttttggggtgatggatgttactgatgatatgaggggtctttttggggtgatggatgttactgatgatatgagggatctttttggggtgacagatgctgtggatgatatgagggatctttttggggtgatggatgttactgatatgagggatctttttggggtgatggatgttactgatatgagggatctttttggggtgatggatgttactgatgatatgagggatctttttggggtgatggatgttactgatgatatgaggggtctttttggggtgatggatgttactgatgatatgagggatctttttggggtgatggatgttactgatgatatgaggggtctttttggggtgacggatgttactgatgatttgaggggtcttttcggggtgatggatgttactgatgatatgaggggtctttttggggtgatggatgttactgatgtgagggatctttttggggtgtggatgctgcagattctgcacccaccgccctccatgccctctaccctgctgaccaactccccgtccaccttctcccagttggcccagctcaaggggcagccccctgcatcgaaagcagttagggcctcctcctccggcaccacctgggaaaaggtgactgtggcctctggaaaggcttcctggctccgactcttgggacctggcaccctcatccctggaggtcaacactccaatgtccgctgggcgtctgacctggaggacagggctccaaggcacagcccatggctgagagtgaagaaacggcgccctcatggcggaccctccaccaagcggccagtgaacgaagtgtgtttgtacgggagggcttccagccgccgcgacccccaccatcgagaaaccatcctctgggcccaccgcagaactcactgtgcccacagcggggctctctggggagggtcctcggagcacagtggcgaaccacttgctgcggtggtcactggtggtcagcccatagcaaagcgtctggccctgtgcccccaccctgccagcaccaggctggacagtccccagcggctgcacggtggcctgggcagctgtgatgggagaggcccccacagacgaggccccaagtcggctcctggctctgccctggaccggctctgggttctcgagaggctggcccagccctgcgctgctctgagccatgcggaccccgtggggaggaccccatactgcagatccctcaccgagtcctacaagaaggagcctcagagaacagagcccctggcgccccagcccctgtggaaagacatggtctgtgtgcctggaaaacgatgcaaggccgtggtgcctgtgacgtcctcagactcacaccccaatgcgggggactgaacgtttgtgttctccccagttcacaggttgaaggccttgcccccagtgcagctgtgtctggacactgggcctctgggaagtgatgatggtctgtgttctccttgtggctgcagcagccgcactaagacactggccacacctggtttctccacagccgctgcagccacgaggagaaggccaccctctcgcgttcaaacacaggtgcacccaccgtggaaccacagccacagtggagctgtggaatgtgcccgtcacccacagcccgcctctgagtcactgccgtcacccacagccctgccccgacccacagcctgcgtctcagtcactgcccatcacccacagccctgcatctcagtcactgcccgtcacccacagccctgcctctcagtccctgccgtcacccacagccctgcctctcagtcactgcccgtcacccacagccctgcctctcagtcactgcccgtcacccacagccctgcctctcagtcactgcccgtcacccacagccctgcctctcagtccctgccgtcacccacagccctgcctctcagtcactgcccgtcacccacagccctgcctctcagtccctgccgtcaccctggctgctcctggagttgcacagaaatggaattgtgtgcttggatgcctccgtgcccagcccctgtccctccgcgattcctccttgctgctttgcggagcagttgttggccgctcacagctgggcagggcccgtcctggcaacagacccctcctgctgcggtggttccctcggtggtggacggggctgtcggcacattttagctgtcaccaataaagctgctgtgaacatccctgtacacgtcgttgtgtggaatgagtttggtgtgtcttagggaactccttgggagtggaatgcctgagtcaccagaccctccctccctctgccccgcacagcccccctccctccctctgccccgcacagcccccctccctccctctgccccgcacagcccccctccctccctctgccccgcatagaccctgcctccctctgccctgcacagccccctccctccctctgccctgcacagcccctccctccctccacctcacacaggccccctccctccctctgccccacgcagaccgcctgcctccctctgccccgcacagggatcctgcaggttcagggtggagtggcctagcccaagccctcagcctttcctttcctaactttgaggagggcacacgtgagatttccttttaccaacagagaatctccaaatccagccttttaccagaagcctctccgagaaactgggcgtctctcccaggaccacagccccccagcgaccgctcagcacttctgtggcttcggcggcagcgcccgcggcttcctgtcactctcccagctggctgaaggcacagaccctcagcttccacaacccacaactccgggaggggattcccaaccacagacaggggtctttcccccgcaggaaacctcccacccttcttcaggctgtcagtgaaacggcagccacttttcaaaataacagtttctccctttacgtgacattaaagaggaaagcactctgccttcacctcagttccgtcgcccacacgacaatctctagggggctggggcttgtgctgatgggaccttccctcccactcataaccacctagaatgcagccggtgtctccctgcggctggtggtgtttcagagctaacagtccgcacaatgtgtcactggccctggccgttactccatgcggagccaccactcctggcccctttccccatggaaaagccagctcctctcctccttcctgtggaca

SEQ ID NO: 465263 - DNA, 248 bp, Homo sapiens
attgatagttaaaatttcatgtgccctggattgatgtttgtgcatcaggacaaatgattagtgtcttgccgatagtttgaacaggtgtacgttaaagattatttaacaccaagttctgttttctgtcttcagattctctaggaaacaagaaatcaaatctccggggactatccaggtgggaaatggaaataaatgaagatgcgacaagccaaaatctcccactctcgcgtgatagaatgtaaaataaa

SEQ ID NO: 465264 - DNA, 1716 bp, Homo sapiens
acagtgaaaaaaaaaaaaaaaagaaagaaaagaagcattgatgcggctgtccagcctgttggatcagctgcaacccaccctggtatggactgaggggtctccctgggctgggccgagcaggaggaggctgagcagtgaaaacggtgacccctgccctcacggagctaacgagaagagcaaatggctggcaacggtgcatgacacagaatgagcaacgggctgcacacatcgcgatttacgtggctttggaaaaaacgcgtctcacaagttggggctgtcatacattggcttcttggtaatcaatgcgtttcagcaatatatgggggtgagtttagtttccagttggcttccctgagggtgttggataaaattgcaatttagattcaatcaatacacatttagttccagcagcactgcgctccctgcagcctccctggatgatcttctccgcagctgcctctacctacagatgctctctgcctcaaagcctgcaaaccgataacgatgacctcacccaccctctgccacctccagggagccccggtttctcaggtcctcagtgcgctacagatgcttgcttcaagggagtgcccagatgctatgctggggagtctgggttcaccgtggccaccacaaattacagcaccttcaacaccatatgtgagtgctgggtgtggccgggaaagatctcggagcctcctggcacacagacacggaagctccagtgtcagcgacgatcacacctccctatgcgtgcgaatgccagcaatgtgtgtagaatccctgagtcttcacaagaactgcgtctgaacataccagagcctgcagtggagaccttggaatcggacccgggaaggggcactcaccaggacgataactggcagccctcggaaatgacggaaatgcaagactttgaaagtaaagatgcttttaggctcttaggtcccggggatgaagtcaacacttctcatccaggatcccctagtgcaagctggggaaggttctggaggccagaagcccaaaatcaaggtgctggcagggtcggttcctcctgcaagctctgagggaggagctgtttcatggctctctcctggcttccagtaattgctgtcacagctacccagcaggccagagggaaggtggggaagcagccaccattgctgatgggcggaagaactcctgatggctgagagcccaggcaagtctgggaaaggaaggtgagcggacaggttctcgctctgtgagccaggctggagtgcagtggcatgatcacagctcactacagcccaaactcctgggttcaagcaaacctcctgcctcagcctcccaaaagaggaatcaattctggaccggaggatgtctccctgcctttgccctgcctgcctccccccacatccttctctggcaaggggaatgaggctgagaatgacctccatccgcaggacgagagcagattatggacggcagagctgtaccttgtgattgaacagaatctgatcaggaaccttggcctgaaagctcggcagactgaacgcttcagtgggatgcagctcatttgaagtcatccagacctcaagagctcctttctcctgacctttgacgttggctggtgcctggtgtgcatcatggggagttccccaaggacccagatgcctgccactgtgccatcagggaggtctggcctccaaaggcctgggcagatcctgggagagaggg

SEQ ID NO: 465265 - DNA, 2369 bp, Homo sapiens
  misc_feature (5)..(6): n is a, c, g, or t
  misc_feature (8)..(8): n is a, c, g, or t
  misc_feature (13)..(14): n is a, c, g, or t
cccanntntcttnnaggaagcattgatgcggctgtccagcctgttggatcagctgcaacccaccctggtatggactgaggggtctccctgggctgggccgagcaggaggaggctgagcagtgaaaacggtgacccctgccctcacggagctaacgagaagagcaaatggctggcaacggtgcatgacacagaatgagcaacgggctgcacacatcgcgatttacgtggctttggaaaaaacgcgtctcacaagttggggctgtcatacattggcttcttggtaatcaatgcgtttcagcaatatatgggggtgagtttagtttccagttggcttccctgagggtgttggataaaattgcaatttagattcaatcaatacacatttagttccagcagcactgcgctccctgcagcctccctggatgatcttctccgcagctgcctctacctacagatgctctctgcctcaaagcctgcaaaccgataacgatgacctcacccaccctctgccacctccagggagccccggtttctcaggtcctcagtgcgctacagatgcttgcttcaagggagtgcccagatgctatgctggggagtctgggttcaccgtggccaccacaaattacagcaccttcaacaccatatgtgagtgctgggtgtggccgggaaagatctcggagcctcctggcacacagacacggaagctccagtgtcagcgacgatcacacctccctatgcgtgcgaatgccagcaatgtgtgtagaatccctgagtcttcacaagaactgcgtctgaacataccagagcctgcagtggagaccttggaatcggacccgggaaggggcactcaccaggacgataactggcagccctcggaaatgacggaaatgcaagactttgaaagtaaagatgcttttaggctcttaggtcccggggatgaagtcaacacttctcatccaggatcccctagtgcaagctggggaaggttctggaggccagaagcccaaaatcaaggtgctggcagggtcggttcctcctgcaagctctgagggaggagctgtttcatggctctctcctggcttccagtaattgctgtcacagctacccagcaggccagagggaaggtggggaagcagccaccattgctgatgggcggaagaactcctgatggctgagagcccaggcaagtctgggaaaggaaggtgagcggacaggttctcgctctgtgagccaggctggagtgcagtggcatgatcacagctcactacagcccaaactcctgggttcaagcaaacctcctgcctcagcctcccaaaagaggaatcaattctggaccggaggatgtctccctgcctttgccctgcctgcctccccccacatccttctctggcaaggggaatgaggctgagaatgacctccatccgcaggacgaggtattaaatattcagcccatgccagagtgaggatctccttttcaccttctgtctgaattgtgccttgaatctgtttcgcgatgggtgcgaactgggtgagacacttgtcttagaaccgcagccctggcaactccacgccgcctgacctcgagccggtttccatagcctgaatccttcctctcatttgcaaacaactttcttagtaaatgatgacaaagcagaatgcaatcccttctataagagatatgactcagaacaaattgtagccgcgttttcctcacttttctcctgcgtggatacaagatcaatatatagaaattaatggaattttctatactagtcatgaacaatttgagaatgaattttttaaagttcattcacaatagcatcaaaaataaacagtttggaataaatttaacaagaaaaatgaaaaattggtacactgagcattataaaggattgcttagagaaatgagagaaaatataaatggagagatattccatgttaatggattggaagattaaatattattaagatgtcaatccatagatcaaattgatctatagatgcaatgtaatccctgttaaagtcccagcaggattttttgaagaaagtgacaagctggttctaaaatgaatgcagaaatgcaaaagacatacaattgctgaaacaatttggggaaagaaaaacaaagctggaggacttatcctacccaatttcaaagcttactctaaagctacagtaatcaagaccgtgtggcattggagtaaggataggcatatattgataatggtacagaagtgaaagccaagaaataagcgcttatgtatatggccaacggatttttgacaatgatgtcaaaacaattgataatgatgtcaagacaatggaatggggtgggatactcttttcaaacatggcattgtaacagttgg

SEQ ID NO: 465266 - DNA, 1564 bp, Homo sapiens
acagtgaaaaaaaaaaaaaaaagaaagaaaagaagcattgatgcggctgtccagcctgttggatcagctgcaacccaccctggtatggactgaggggtctccctgggctgggccgagcaggaggaggctgagcagtgaaaacggtgacccctgccctcacggagctaacgagaagagcaaatggctggcaacggtgcatgacacagaatgagcaacgggctgcacacatcgcgatttacgtggctttggaaaaaacgcgtctcacaagttggggctgtcatacattggcttcttggtaatcaatgcgtttcagcaatatatgggggtgagtttagtttccagttggcttccctgagggtgttggataaaattgcaatttagattcaatcaatacacatttagttccagcagcactgcgctccctgcagcctccctggatgatcttctccgcagctgcctctacctacagatgctctctgcctcaaagcctgcaaaccgataacgatgacctcacccaccctctgccacctccagggagccccggtttctcaggtcctcagtgcgctacagatgcttgcttcaagggagtgcccagatgctatgctggggagtctgggttcaccgtggccaccacaaattacagcaccttcaacaccatatgtgagtgctgggtgtggccgggaaagatctcggagcctcctggcacacagacacggaagctccagtgtcagcgacgatcacacctccctatgcgtgcgaatgccagcaatgtgtgtagaatccctgagtcttcacaagaactgcgtctgaacataccagagcctgcagtggagaccttggaatcggacccgggaaggggcactcaccaggacgataactggcagccctcggaaatgacggaaatgcaagactttgaaagtaaagatgcttttaggctcttaggtcccggggatgaagtcaacacttctcatccaggatcccctagtgcaagctggggaaggttctggaggccagaagcccaaaatcaaggtgctggcagggtcggttcctcctgcaagctctgagggaggagctgtttcatggctctctcctggcttccagtaattgctgtcacagctacccagcaggccagagggaaggtggggaagcagccaccattgctgatgggcggaagaactcctgatggctgagagcccaggcaagtctgggaaaggaaggtgagcggacaggttctcgctctgtgagccaggctggagtgcagtggcatgatcacagctcactacagcccaaactcctgggttcaagcaaacctcctgcctcagcctcccaaaagaggaatcaattctggaccggaggatgtctccctgcctttgccctgcctgcctccccccacatccttctctggcaaggggaatgaggctgagaatgacctccatccgcaggacgagattctctaggaaacaagaaatcaaatctccggggactatccaggtgggaaatggaaataaatgaagatgcgacaagccaaaatctcccactctcgcgtgatagaatgtaaaataaa

SEQ ID NO: 465267 - DNA, 923 bp, Homo sapiens
gaaaacttgtttttagggagaaaatccctatatctttgtttaaagtctcagatatgtctttatcagcagtgtgaaaatggaccaatacactaaattggtatcagaagagtggggtgttgctgaaaagatacctgaaaatgtggaaacaattttggaattgggtaacaggcagaggctggaacggtttggaggatcccagaatggtagatccactgacagcttgcaccatgtgcctggaaaagccacagacactcaatgccagcccgtgaaagcagctgggaggaaagctgtaccctgcaaagccacaggggaggagctgcctaacaccatgggaacccacctcttgcatcagcatgacctggatgaggttacagctcctaaatttataactacatttccacatctggatttacaaaaagcaaagttaatgtttgtgaagagtggacaatatccaaggggtgtatatgtcaatcccaaaccacatgactttcgacagctgatggaccaaaacagcatagggcttcctgaactctggcctgaatgttcatctcccgtgcatttcccagtgagaacattgatgaattctggcaccttcctggattctacagaaatctgcactctcccagaggcatgagaaagtgctaaaacaacaaatgaaagttgcataatttgaaattcccttgttaccacagggatcagaatccaatcataaggcttttgatttagtttgtgaaagttagatcttgcaactatgagtggaaatgctgataatgtgctttctgttaatgtccaaagttaaagatgctctagtctcagttttttctaatacactttaagaagcttctctgagacactcaagtatatcaaaagagagaagatctccaagtaacagaaataataaatgtccttcttaaagaacacca

SEQ ID NO: 465268 - DNA, 4731 bp, Homo sapiens
gctcaccaagtacttactaagcttctctccagaaattacctcgagctgcaaagtgagttgggctcaggttggcatgcaggcattttccattccaagggacaggaagtggctgttttggacgagtcccgccataaaaccactttcccatgacttcccgaacagtaaaccccagcttgggtaccagggaatggcgctttcagtttttaatggactgcagctgaagcaagttcaaaagtgcgaggattgtaaacttgagagcaactctgcagatgccgcacaccgtggcagaatgattcagggggccaaactttgcctcatcaagtcagagaattttctgcaaatgaacttttcaagaattatgccaaaacactggcaaacacacgcacagaaatgcacagaaaaagaataccccaacattgaacaccaaaggccctcagactttggcgcctccattttgaagtggtttgccaccattaccaattaaaatcctatacctctctgagatccagttcaaatgctacttcttgaagctctttttgatactgctttctcactttcctcaagaggccattatgtcctgtccttttgaagggcatgtttctcaaaagccaaggttgtacctttagtttcttgagagccaaggttgcatctttagtatcttcagtcatctttgcaccccagaatgtttagcacagagcttgcccatgatggctactcaaatgctgaaaggatgaatgactaaataaatcttgagatcagttgtatttttttctttaaaataactggctacagtcactggctctcaaccctggtgttgggctcatggggacattgtaatcagttgtaagcgggttgaagtgatttgttatgaatgattgttaggttttggaagtttgcaaactatgtactgtttgtataaattagaatgtttcccttcagtaatattctttaatgataatatcatcatcctgcagtgttaatacttcagtgtgacactctcccttgcattgtgatttgtcttaaatggaagaaaaaaggatggacttagagtcaggacccaggaaattgtatgttaatccacagcctatcttttctgtgccaaagcccataataagccagaaatcactgctaatggttatggaactatggaaatatgatagtcctctactactgtacgagatgtgggggccttgtcaaaatgaacattatctgtcaatttagagaaaagaataaccattactctaaaccaggggtcagcaaacttttacagtaaaggtctagatagtaaatatttgagggcttttgagggccatacagtctctgtagcaactacccaacttcgctattgtaatgcaaaaaagctattgtaatacataaatggatggacatcactatgttccaataaaactttatttacaaaaataagacggaggtcacattgggcttaatgagctgctctaagccatagagtacatgggaatgtaaaccatactgcttattttttttaattgtattaatggcatttattctacttcctttgtaatagctaaggagttcctgcaaagaaagaaaaattaggggttagtaaatttgttacttatttgcaagaatattcagtatatatttcagggttaatattctctagactttctcagcataagaaatgagatgaaattctgttgatgttgtaaataccactattgaggctaattcgtgaaagaaaggtgactacggtatttgatgaagtaccttgtcttccaagaagtttgcttttgtggtattatctgtggcacgttattttctgtcttggtactttctctcagtgggatatttaggctctactttcctgcttggcacttttgttaataatgactttaaaaatcctcacttctctttttaaattgctgcatggagtaatagcctctctccttgacagtcaaaaggccaagaagtgcaactatgtgaaataaacttttaaaacaaggccccaagtgcactgcaagttgacttgaaataattagtccctggagtttggacacccacaaagtatctttcggaactcggattcagaaatgtctcagtgacagcctgtggcgggaagccatcacagcagcagggcccattgctcttgggacatcccacactgtagagttactttggcagtgcctggaagcagcggcccctgcccacatggcttttccactgtctcacagccaagaaccatgacaggcccctcagaacttgggccctctccagtccttgagccagtgttcaccctcacaggaagagtgtttccctgttttatcagcaagtaacagaaaacccagatgactgcagcttacaaagtaaagacatttctctcccattacaagaagcgtggagaaagcatgttgtagaggctcagtgttgtcacagaggacctaggacccttccaccttcctatgctgccatctcagtgttgggggatgacttccctcatggatgcaagaaggttactgaaacgccaagtataatgtcactacctcatgtggcaccgtgctttacgcgtcactccttcactaagggatctgagctgtaacctgacctgtagctgtcatcagggctttttttccatccctgtcatggcatgggatcccagtatggagaagcttagttggtattcaagtcatccgcatcgtacttgaccacgtgtgaacaagtaacctcatgtttctggggacaggcagggagaaacttgagaacttgatccccttgggggcccttggaggattgcttccaccaagccctgggttttgcaagtgactcgtttcccaatctatggcacatccaagcctctttggttttctttttccctgttcacacggatatatttgaggcaccatactctatctgcccaagaaaggaagaggggcaaggaaaaccgtgtaagtcatgcttgtttaaatattttggcttctgccaaagcagatatgagaacaattggactataatgagagttttccattggcctcaactatcctggacagttgaacgccaagcctagtttgataggtacctactatggacctggtggagctccttcttaaaattagacagtgtgtactggccagaatgtctcagcttgcagcctgaggatgattatgctgatcctggaggccctggggaactgtctagggcactaggggtgcctgtgctaacagcaaaagaccactcccccccaacaccacacttgcacatgcctcatgcacagaggaagtaggtgccaggtcttttcagagaagagcttcaaagccctgctgccacctacgagagcctttgatccatctctcggctgaatccagcccctcacggggctgatccgctttgaaaccagagccagcagcccctctacaactccctctgagttacctcacacagacaagagcacaggcttctggggggcttctttttatcttccctaaattgcgagaggtacttctttcagcgttgtcctataggattcttaagaactgccggggagatgtcttagggccaacacaaagaattgcaaacaacagcccagtgtcttggaaactttctctacagtttagtacggataaaccacatgcagatagaaaataggaagaaaaggaaattcatggtaagcctgcgtattttcttatttcgggtgcgaggggagtggagaaatccgtcatggataaaatccaactttaatgacagtctgaagccctgaagcacagacatattgcagagctaatgtattattttgtttttgtttattctgcagaaatggggaaatttcattttttagtagaattacaagctccccttttactattcacaagccctaacatgcatggcatcctgagccagagagccttccgtgattttaataccagcttctttgtgaatctaaactggttttccagtccactccctggcgggccacgggggttgttggagtggtgttacacatacttagctttctttgggtgcttgaccaccgcctgttctcaggggggacaaggagccttgctgtgggcattaccagtgggagtccttctctgttacactcttcaaaaatcgtctgtacatacttgcctctatgttcttacaactttgtttagaacttaacatttaatatgtaacctagcttcaaccccattttctaacaattctcctgctattcaccagagacctcctaaatcagcgatccacctgtcttttctcagtccttctcctccagcacctctaacacatctgccatttttgagttctcctcctcctggaaatcccttcttgtcattcaactctgtctgtgactccttccccagcgcagtaaacgtggacactgtccaggtgtagtccttggttgtgttttcttttcacgccacgacattccctcatctctttgcagaagacatttgcaacttatctgcaaatccgagctctctttctgatgttccactcccaaatttctgaccgtggctaggctttcctcacggtcttctaaattcatctcgtcccaagcaaagtctctatattcccctgaaagcctccacatgcttctgtgttcctgatgttaaccagttccccagcctttacatcttagcatcgccctttgtgttgcatcactgccacacactcgtgcgttccttgaggttctgcctcctaagtgtgttttctcaccttagctttgccccgtgtctcctgccattttcctcgagtcac

SEQ ID NO: 465269 - DNA, 3741 bp, Homo sapiens
  misc_feature (11)..(11): n is a, c, g, or t
gagatggagtntcgctctgtcacccaggttggagtgtagtggcgtgatctcagctcactgcaagctctgcctcccgggttcacgccattctcctgcctcagcctcccgagtagctgggactacaggcgcccgccaccatgcccaactaattttttgcatttttagtaaagacagggtttcaccatgttagccaggatggtctcgatctcctgacctcatgatccacctacctcagcctcccaaagtgctgggattacaggcgtgagccaccatgcccagcataaaattgctaatttttgacataaggcaatttctttctttttttgtttgagatggagtctcgctcagtcacccaggctggagtacagtggtgcgatctcagctcactgcaagctctgcctcccaggttcacgccatgctcctgcttcagcctcccaagtagctgggactacaggcgcccgccaccgcgcccagctattttttttgtatttttagtagagacggggtttcaccatgttagccaggatggtctcgatctcctgacctcgtgatccacccgcctcagcctcccaaagtgctgggattacaggtgtgagccactgtgcccagctgacataagacaatttctaatccaccactgcactgtctcaaggaagacatggacatagagccagatagaaatggtcatgtctctcatttaaatcggaaacatggaacatgggagaaaacaagtatgtggcagtgtttcagagacaggctccctaggttagtatgggtgtgacagtagccctgtggactccccaccgtgccggactctcagaggcacctgcaggactgtgggcctcgaggacagaggggaggtggcagtgtgaggatggtgtggtcggagctgctcagagcttggaagaggaagaaaagggcctcccataagtaaggccagagttgtgggcatttcaggtctgccaaactccagaacgtggtttcctctggctgcgggcagcacacagtgtcaggggtcagaggcatcaggaattggatgcagacgagggagttaacaagggaagagacagagaaggccatagcatggagtgggcagaagtgaaagatcggagcaggcagagcggggcctaccagaagcagtatctgcttctatcagcttcttcagggcagatatccaaaggagaggggaaaggaggaacgcagctttgtgaagaaaggaagagggcttgccacagggatcctttctatcaagatgagaagatgtgggcaagtccctgcgtgtcagccccaccgaggaggatgcagggggagcatgtgcataggcaccagcgtgcacatcgatgacagtcccaggaaagcagggacccacaggcgtgtcatgaaggaggagaaaatggggctacctgggaaagaaggcgttacttgtaaaagagctgggaggtccagtagggccgggctgggatcccacggagcaggccaagagtaaacagggccccatctactcagggacacagtggctaacgcaaacgctgttgtggccttggccagacaaggaaagtgatgcatacagtctccagaaatgaaacaagcacattagggtgtattcgggggaattgtgtttaaaattaaattctatcagagaggatgagtttaacaacaacatattaggagcttctcacatttttaagaaccccacacaaatgtcatagctgtcccggctccacagccatgcgagggtggggacccaggacgcctgggcacctgggcagcccatgggagcaccggccggtggtgacgaagcaccatgcagtggtctgtggactgcatggctctgtcctcttttctaaaattaaagcttacaaaccagtaaggctgggaaataaactgaggctggcaggcaggcagccacccatgtttccgggatccaggatgaactacggaaaaacatttgggctcatgctgtcagtatgataggtgcagacagatttcctgagctcctaagaggaggagctgaaggaagatactggaagaggaaaggagaggagggagaggaatttatcatttggataaggggaagaagggacaaaccacctgcccagatgagcgagaacaagcagggagaacaaataagacagcaaatcaactccagaagtctctgttcatctgaaaaccacaacagaggaaaagaaagcatggggagtggcatcgactatttaatgccgccccctccccaaattcatactttgaaatttttcccctgaagcgatggtgttaggaggtggactttgggagtgattaggtggtgagaataaagcccacaagaatgggactagcgcccttagcagagacacttcagagagacccctcaccccttccaccacatgaggacacagcgagaagccatcctctgtgggtcaggaagccacatgttcccagaatgcagaagacggccaagtgcttttcaaactatgtactattagaaagtgatggctataataagcaaactctgaagaatcaagtaagttaacatgaccaaaaaaaatgtttagaaacagtgaaggtgtcagagaaattcagaaattattattagttaagagtcctcaaaaattcttttctatttcctggtgggaagtgagctagccgtgtgggatgaattatttgataagatgctatattaaattcatattttttaaaagtactcatgctatgtttaatttcctttagaactccctgatcataattaaatttcaaagcttttacaacaaatctcttttgcattattttcccaaacaaaacaagaaaacacaaggacaaaccctactgtgaagcagtggagactggagtcctgcatttgctgaactttctttttatgtgttggattctgattttatattcatttccattcatgtggactctgaagagttaaactcactaaggacacttgaagaagtcacgtccagggatcactgtcatcacagatggagaaaaggccaatgtctttccatgctgcctcaccagaaaaggactgagttggtacagaccttcattccagcttaatgtccatgacctcatcacactccaggcccaggcttgagctacatgttctagaaagcccttaacttctctaggtctcaagtctaatctctgcatctgcgccaggttccctgagactactctaaagcttgatgattcactaggattcacaggactcagaaaagcttacttttctgaattagatgtactgttctgatatattacagcaaaaggatatgagttcaaatcagaataaaataaaaggtacatggggcagagtccaggagaaaccaggtgaaagcttccaggtgttctttgctagtggagtctcacgggctctattaattttcccagaaaccatgttaccaaccacggacgctcacccatggcttggcgtccagggttcttactggggaataatcagaacttcaaaggtcataggtaagcatttgaaggtagtagaactcaacctaatcttgctgcaggacaagtactgggtacctcaggctgtagaaggttcttcctcctggaggagaaggggaattggctttgtactgacccttggattagaagttaagaaagagtcagctgtcaaaccacaagccacatgcaaaccagttggcagttgggttctccccgctctttgatgtctgaggaagacaagctccaacctctgtctcatcctagtgcaagaccacaatctgcact

SEQ ID NO: 465270 - DNA, 1209 bp, Homo sapiens
cggaatctcaccctgctgccaaggctggagtgcagtgtagtaccgggcgtcaaagcagaacgctttgaagaaggaatgacggtaaagcactgtgcattgtccctcgtgggagaaccaataatgtacccagagatcaacaggtttttgaagctactccaccagtgtaaaatctccagcttcctggtcacaaatgcacaatttcctgcggaaatcagaagacttccgtcagtgattgatggagggaggtggcccagcagcacagaccccatgtggaacctcgagccagttactcagctgtatgtcagtgtggatgccagtaccaaagacagcctgaagaaaatcgaccgcccactcttcaaggatttctggcagcaattccttgacagtttaaaagccttggcagtcaagcctatttctgatctagtactacccaaagaagaagatgggatgacccaagaagtgcctaaagaaggcaaagagggagcctgcgggaacaaaagtgttgaagatttcaacgtgaagcacatagagagtgagtctgggaagaatttgataaagatattggttcaattccatgcaactcaaggaaacagtgagtttccagaaagattaccaagtaaaggattttgatctctgtttacattgtccatctgttcttgtgtgctgtgtactttatccactggagccctttgcatctggtcgggttatcccaacatccctgccgtgtcagagcctggtttggatgcttgtgctatctctttaaactttgctttttgccttttagtgtgccttgtaacttcttgttactgaatgtgatatcctgggtaaaaggaactgctctcactagacctttaataatgtgatggtatggtatatggggaagggaagcattctgtagtcttatgattaggtctcagtgttttgttttgttttgttttgttttgagtcggagtcttgctctgtcactcaggctggagtgcagtggcacgatctcggctcactgcaacttctgcctcccaggagaatcacctgaacccgggaggcggaggttgcagtgagccgagattgcgtcactgcacttcagcttgggagacagagagagactccatctaaaaaaacagacggccgggtgcggtggctcacttctggaatcccggcactttgggagactgaggtgggtggatcacgagttcaggaggtcgagaccat

SEQ ID NO: 465271 - DNA, 903 bp, Homo sapiens
aggtcctgaacaccactccttgcaccatggctatgaacgggggaaggggtgtccttgggaatcactactggttgcagcccgatgagataccctcatatccactgctctatggaacatgctcctcctgggtgttcctagggatgggtttggggcaagtgggcatccatgtcctggggctccacggcctgcactgtctgcagccagggtgtctggggctgggaaagagccccaggctaaaggatggatggagactatgtccacccttttgggagaataatctccaagaatttcaaagagatggtggctggcataatgaaatgaaagcagcagcctctgagaagcagaaagaggagtctggactaaatgcccatctggcgttcccaccctggggttcccatcccagcccagccaaatgtgctaccgtttggtgacgctgctatattaactaaaattagcaagtgacctctgcttcaaaactatgttaggtcaaagcacttttgttatatctacaaagaatattttcccttaccagtttcacagttgtgccagctttcccaagttctaaaaggcccttggcatttaggagtagagaagcaatgatttatatagtttctgcatcactctcagccctacttgataggaatcaagggtgttttaaagaggaaaatgagtggtgtcggtgtaacaaagcaatttggttctgttgttggtcagcccgtgttacattttaatctaaatttgcagctttagtatctaaatgaaagtttgctttcaggtgtattttctctgattgtttttcctctcagataatgctactgtaatggaaactaagccagcctctttgccatctctttgtagctacgatttatttttccaaataaaaccatattgactatatatatg

SEQ ID NO: 465272 - DNA, 4966 bp, Homo sapiens
gcggttaaatgtcaggtctttcttctttaggttatggaaacaaaggacatgctttacatcgtcactgaatttgctaaaaatggagaaatgtttgattatttgacttccaacgggcacctgagtgagaacgaggcgcggaagaagttctggcaaatcctgtcggccgtggagtactgtcacgaccatcacatcgtccaccgggacctcaagaccgagaacctcctgctggatggcaacatggacatcaagctggcaggcacggaggattttggatttgggaatttctacaagtcaggagagcctctgtccacgtggtgtgggagccccccgtatgccgccccggaagtctttgaggggaaggagtatgaaggcccccagctggacatctggagcctgggcgtggtgctgtacgtcctggtctgcggttctctccccttcgatgggcctaacctgccgacgctgagacagcgggtgctggagggccgcttccgcatccccttcttcatgtctcaagactgtgagagcctgatccgccgcatgctggtggtggaccccgccaggcgcatcaccatcgcccagatccggcagcaccggtggatgcgggctgagccctgcttgccgggacccgcctgccccgccttctccgcacacagctacacctccaacctgggcgactacgatgagcaggcgctgggtatcatgcagaccctgggcgtggaccggcagaggacggtggagtcactgcaaaacagcagctataaccactttgctgccatttattacctcctccttgagcggctcaaggagtatcggaatgcccagtgcgcccgccccgggcctgccaggcagccgcggcctcggagctcggacctcagtggtttggaggtgcctcaggaaggtctttccaccgaccctttccgacctgccttgctgtgcccgcagccgcagaccttggtgcagtccgtcctccaggccgagatggactgtgagctccagagctcgctgcagtgggtgagtgcccacagcgggtgtgcagagggctcgcctcagcccagccctggtgcccccggtgtgcccggctgcagcggagtgttccggccccggcccgtgtccccaagcagcctgctggacacagccatcagtgaggaggccaggcaggggccgggcctagaggaggagcaggacacgcaggagtccctgcccagcagcacgggccggaggcacaccctggccgaggtctccacccgcctctccccactcaccgcgccatgtatagtcgtctccccctccaccacggcaagtcctgcagagggaaccagctctgacagttgtctgaccttctctgcgagcaaaagccccgcggggctcagtggcaccccggccactcaggggctgctgggcgcctgctccccggtcaggctggcctcgcccttcctggggtcgcagtccgccaccccagtgctgcaggctcaggggggcttgggaggagctgttctgctccctgtcagcttccaggagggacggcgggcgtcggacacctcactgactcaagtacgtgactttgtccgtgatggcagatggcaccccctgttctccaccgggcctgggtgggaccctcagtgctctgggcaggctggggtgctcagtgctctggtggctcggggcgtcacggcctgctgggatagacacacatgggtccctgagcacgcggcctccatggctggttctgaaagcacaggagacgactctgtgctgggcagcacctcccgacttggaggagggagggcccctggctgccggctgcctccacgccatcctggggcttaggtgccagactcctgtccagacgtgcttgtgtcacccgtcctttccttacccccaacctgaggcttggaaaccccttaagccaagggccgtggatgctgggctgagagccgggtggccgttgacctcctgattcattctccctgcagggctgaaggcctttcggcagcagctgaggaagaccacgcggaccaaagggtttctgggactgaacaaaatcaaggggctggctcgccaggtgtgccaggcccccgccagccgggccagcaggggcggcctgagccccttccacgcccctgcacagagcccaggcctgcacggcggcgcagccggcagccgggagggctggagcctgctggaggaggtgctagagcagcagaggctgctccagttacagcaccacccggccgctgcacccggctgctcccaggccccccagccggcccctgccccgtttgtgatcgccccctgtgatggccctggggctgccccgctccccagcaccctcctcacgtcggggctcccgctgctgccgcccccactcctgcagaccggcgcgtccccggtggcctcagcggcgcagctcctggacacacacctgcacattggcaccggccccaccgccctccccgctgtgcccccaccacgcctggccaggctggccccaggttgtgagcccctggggctgctgcagggggactgtgagatggaggacctgatgccctgctccctaggcacgtttgtcctggtgcagtgagggcagccctgcatcctggcacggacactgactcttacagcaataacttcagaggaggtgaagacatctggcctcaaagccaagaactttctagaagcgaaataagcaatacgttaggtgttttggctttttagtttatttttgttttatttttttcttgcactgagtgacctcaactttgagtagggactggaaactttaggaagaaagataattgaggggcgtgtctgggggcgggggcaggaggggagcggggtggagggaacacgtgcagtgccgtggtgtggggatctcggcccctctctctgggttcgtcgtggttgagatgattacctcggacgtctacggaaacgagcgggcgcattgttgtccgcttgtgtgtgtgtgtgtgtgtgtgtgtgtgcgcgtgcattgattactatccatttctttagtcaacgctctccacttcctgatttctgctttaaggaaaactgtgaactttctgcttcatgtatcagttttaaagcagcccaggcaaagatcatctacagattctaggaattctctcccctgaaatcaaaacctggaagacttttttttcttattttagttgagaagtttcataaactgctcaaggattagttttccaggactctgcggaggaacggcaggaagaacctcagagagggcagaggtgacttcaaagtgctggggactccgtcctgagggtcacttggccctgagcccctgcgtgcccttgcggaagcccagaagcttcttcctgctgcacctcccgtttccgctgctgctgacgtttatgcatttcatgatggggtccaacaagaacacctgacttgggtgaagttgtgcaatattggaggctgactgtagggctgggcagctgggagacaggctcatggctcatggctcatggctcagggcggtgcctgccctgggccgggacccccctccccaccccccacctaggctttttgggttttgttcaaggaaggtaaagtgagaggtttaggtcagtgtttttaagtttttgttttttttttaaagcaaatcctgtatatgtatctacatgggagacaggtagacactacttatttgttacattttgtactatacgtttgtgttccaggtttcagcttccctcgctcctgttgttaagaagcgtccctgtcagcacaggtgtgcattgaggaaggggccccagggccttcgctccctcagcactggggtggaggcggcaggaaggggcggcccttacctggcaggtctgggcgcacctttagcaggtggactccgtggggctccaccagccagaagcctctggaaggcaacgaaggcaatgctgctccctgagtccagtccccgcccccaaacccagcccaggtgccttcagctacttcggcttcttaaaccctgcagtgttaaacagaggcattgagaaaggggaaaggcgggtatttttaaaagccaaagattgacccagttacttgagggtagggaggcgggcccagtgcaggaggctgcatccctggcctgctggtgcccaccgggggctgtgcctgtgccgggccgcagggaagctggctgcccccattcctgctgctgctgctgctgctgctctgtggctgtttcaaagactgggcgaaaggctgtccggagggcagaccaggtgccttgccgcagagaaaacaccaaagtctcctgttcgctcataaagaagtttttgggatgggagagaatccagaccatcttggggcagccaggcccttgccttcatttttacagaggtagcacaactgattccaacacaaaaccccttcccctttttaaaatgatttctgttctaatgccatagatcaaaggcctcagaaaccattgtgtgtttcctctttgaagcaatgacaagcactttactttcacggtggtttttgttttttcttattgctgtggaacctcttttggaggacgttaaaggcgtgttttacttgtttttttaagagtgtgtgatgtgtgttttgtagatttcttgacagtgctgtaatacagacggcaatgcaatagcctatttaaagacactacgtgatctgattgagatgtacatagtttttttttttaccataactgaattattttatctcttatgttaacatgagaaatgtatgccaaatgattagttgatgtatgttttttaatttaatatttaaataaaatatttggaaggaaaaaaccttgactttttcccttcctctctctctcatctctctgggagctctttccttccaagcggcttccctgagaggccacatcctccaggcttgtagaagtttcaaatcttaaagaggagggcagggagccaactcctgcattccacctcactgcagggaa

SEQ ID NO: 465273 - DNA, 520 bp, Homo sapiens
agacgactctgtgctgggcagcacctcccgacttggaggagggagggcccctggctgccggctgcctccacgccatcctggggcttaggtgccagactcctgtccagacgtgcttgtgtcacccgtcctttccttacccccaacctgaggcttggaaaccccttaagccaagggccgtggatgctgggctgagagccgggtggccgttgacctcctgattcattctccctgcagggctgaaggcctttcggcagcagctgaggaagaccacgcggaccaaagggtttctgggactgaacaaaatcaaggggctggctcgccaggtgtgccaggcccccgccagccgggccagcaggggcggcctgagccccttccacgcccctgcacagagcccaggcctgcacggcggcgcagccggcagccgggagggctggagcctgctggaggaggtgctagagcagcagaggtagggcctgcccccgccctgggaccccgggtgggcacacggcaggttatctcc

SEQ ID NO: 465274 - DNA, 2987 bp, Homo sapiens
tagtgtggaacctggggagcggggagtcaccataacaacggtaatgcaggcgatggggagtggtataaatacagatgaagcttctctcggtcacctgccactcaccttctgctgtgtggcctggttcctaacaggccatggaccagtactggcccatggcctgggggtgaattttgtggtatgccagcttgttgctctgtttgctgctttctggtttcgcatctacttacgtcctggtacaaccagctctgatgtccggcatgcggttgccaccatttttggcatctattttgtcatcttttgtttcggctgcaatgggatatcttacaatatgccacatcagccgaatatacatcttccactatggaattctcactacggatttttctgggattggatgatcgtcttccacactgacgagggtggatcttccttattcagtccatggattcaaatgctaatctcttttggaaaccctcataggcctctgatgattgtcactcagaagatcacaaccttggcattccaggttcatgatggtaagaacagcagccctccttttggttctcagagattaggtcgaagagctgaagacctttctgctgaacaacatcgacttgctatcaagaactcaggcctggttgccaaagcagacaacaggctgctactgcggttcttctgcgtggcctctttcagtggaaactgtgtcatagctggtccttgtaacaatttcaaggactacatagccttcattgaggggaagcatatacacatgaagttgctggaggtgaactggaagcgaaaaggtttccacagcttgccagaaccttctcccacaggagctgtgatacacaagttgggcatcaccttggtgtctctccttttgtttttgacgctaacgaagacctttcctgtcacctgccttgtggatgactggtttgtccataaagcaagctttccggctcgactctgctacttatatgttgtcatgcaagcctcaaagcccaagtattactttgcatggacattagctgatgcagtgaataacgcagctggctttgggttcagcggagtggataagaatgggaatttctgttgggatctgctttcgaacctaaacatctggaaaattgagactgccacaagtttcaaaatgtacttggaaaactggaatattcagacagctacttggctaaagtgtgtgtgctatcagcgggttccatggtaccccacggtgctaaccttcatcctgtctgctttgtggcatggtgtctaccctggatactattttaccttcttaactggaattcttgtcacattagcagctagagcggtcaggaacaactacagacattacttcctttcttcaagagctctcaaggctgtgtatgatgcaggcacctgggccgtcactcagctggctgtctcttacacggtagcaccctttgtgatgttggcagttgaaccgaccatcagcttatacaagtccatgtacttttatttgcacatcataagtctcctgataatactatttctgccaatgaaaccacaagctcatacgcaaaggcggcctcagactctgaactctattaataagagaaaaacagattgatacctccaagagaagcggaacaagcaaaactgcagaacgttcgaaagatgagatgacaaggcttcaagggctcctccggtggcttagaggcgatgtttacatgcatctttattttgttcttttttaaagtgcagggatttcatagctgagaaattcagctttgttttagttgaatcatcatattggaaagcagacattgaaagttttcttttctatctttgttatgaatgtgctatggccccttttggagacttctattgggtaatattctatgtgagagaaggaaacttggtattaaatgttgtggaaaataataatgatgataataataaagtatatgctgcaatggtgtactgccaatcagattgcttgggagaagaaaatttattcaaatccaacgataaaaaattaatttcttattgaataaacagtatgttcccatataaaagaaatgtttctgatgggaataattgctttttgtctgtgtcaatagagacacaggtccataaggtgtcctactgctgcttctcttaggatagtgaaatgtgaatgtgatgtgcctgttcctctacagcatgtaaacagtcctggtgctgggggagaaattagtttccgaaataaaggcttgtgttttcagggaattctgaaagtacattacgtgatataattactcaggcagccagtttacatagtctgaacccctctggtccacccttccattaattaatgcattcacttatttatcaaatgtgtcatgtctggaacaccagttattcttaggtttggatatttaacacagtcccaaacttcttaaaggctatgttcattttttaaaaaattattttttccttgtctttaatagattgggttaattcaaagccttgtcttcaagctctgaagttttttcttatgcttgttcaattctattgctgaggctttccagtgcattttgcatttctctaagtgtgtccttgatttccagaaattgtgattgttttttatttatgcagtctatttcactgaagaattttcccttcatatcctgtatcatgttcttgatttctttaaattggacttcaactttctctggtggctccttgattagcttaataattgactttcttgaccttattcgttttctgtcaattcagagattttgtcttggtttgattccattgctggtgagctggtatgatcttttgggggtgttaaagaaccttgttttgtcatattaccagaactgtttttctgattctcatttgggtggactctctcagagggaagatctagctacgactcaagggctgttgttcagattcttttgtcccatggggtgctccttgatgtgatgttctcccttcccccaggaatgggg

SEQ ID NO: 465275 - DNA, 1869 bp, Homo sapiens
tggtaaaatcaattgtccccagcagttgtccccagccttagaactcaaggtgacaactgacaacattctagatgatcgagccatgtccttgggaagaagctgtttgttttgattctgagctagatgaacatattaagtggttccagcaagaatacgtgaaaacagaaaaggactggagagaaattgacaagagaatgagccaaactttggaaataagaagaaagatgattggcagccgaacacctctgaaggacattcttaaactgtttcctttcttgaagtgcccttatcagaataagggctgcggcatttttgaggtctcctcattgctggctgatcttgctggtacaggtcctgatgtctgtgacctgtgttcatctgctactgcttctcgccttggaaacacagtgactcatcctgcatgcccaactggctactgcccagagtccagttctatctgttctgctcttaacaatggctgcataagtactttttgggtctaacaagactcagtgcactctccctctttccaactatttcacaagtcctttattcccaaataaacttaccaagttcttacagattcttttccttataaggtatacatccctatggctgaagttgaatgacagcctctctcaggccatgacaggatgacaaggtgagctacaaggaaactgcagtgaagtttggctccaagcatgacacagacatgggctgaccttgaagaaaaaaaaagactaaacgctacctacgctcaatgttccacacctcttaagccagtaatcctgtatctggtgtcgggcagcaaagaaaataaaatatacctcgtctgtgctccatttggaaactttactggcagggattcctgcgacagttggaagaagtttgctttgctgctcccagcgcaagggcagacatggaattggggacttaaaggacagaaagacagctgaccgacgctgtgcctgctggacggtgggttcttcccgggcacctggtcaatgaaaacaaatgggaaatcactctctgaaagcagcaagaaagccccaaatgccgtgcatctcccagataacgagactggaggtgggagtggttaaagcattggttcctttcagcattatactattgaataggctcttctttgtctttactgaaggtcactataaaaaacaacctgtaaattcaactgatatcatttgctacagcactcattactaaagacatgcttcattatgttgttcaacgttgtctctttaatgcttcagataagaaacgtgcctcaaagttttaatgggaaggaaagttagtcttattctaggaagttgtttatttgctcccctttctgctttggatgttgtaaaggtaacagccaagttgcatctcacgtctaacacctgtgcttaccatgtattcacagttggcatactttctctctccttttgtctcagggcttggtttggttttttaacttcttatttactaatcatactgattttttaaatagccaattcaattttttgacagggatatgaaattattgcaataaaaataaaacagcagaaatgcaaatgtttttgtaattttttacttgttcagatcaaaattaaaactactaaatattcttactgtagcctgggcaacaagacaaggtcccatctcttgaaagaaaaaaaaaaaccctactgaatattctatttatgttagagcttctgaacccaaagctagttttatggctgctttcctaaaacggccattctctagcaaaggatttttgtcctctggacgcttgacttagagctgtcaatcgtcgtctccttatggtcctttagaacagaaaccttttctgaaaactctgtattcaaagca

SEQ ID NO: 465276 - DNA, 619 bp, Homo sapiens
cccaccctaatggacctgtttaaaggccctgtctccaagtacagccacattctgagatactgggagttagggcttcaagatacaaattttagagaggcccactccagcccatcacaaagacataagggaccagagagagaagcatccctgctgatgagaaagaacagacactcccagaggacaaggtccacctgtcaggcagccacagcccagcatactctggagtctgaggtgggggtcagttgtgaagaaagggaagaaggaagaaaaaggatacgttgtgctccgaccacaggccaaggtacaaagaagaggggaaaagaaaatagctgggccctgagactcatacctgtaatcccagcactttgagaggctgaagcagaaggtttggttgagtccagagtttgagaccagcctgggcaacatagtgaaaccgtgttaaaaaatacaaaaattagctgggtgtggtggcatgcacctgtagtcccagctactcaggaggccaaggtgggaggattgtttgagcacagcaggttgaggctgcagtgaaccatgattgcaccaccgtactccagcctgggagacagggtgagacactgtctcaatcaatcaatcaatc

SEQ ID NO: 465277 - DNA, 439 bp, Homo sapiens
cccaccctaatggacctgtttaaaggccctgtctccaagtacagccacattctgagatactgggagttagggcttcaagatacaaattttagagaggcccactccagcccatcacaaagacataagggaccagagagagaagcatccctgctgatgagaaagaacagacactcccagaggacaaggtccacctgtcaggcagccacagcccagcatactctggagtctgaggtgggggtcagttgtgaagaaagggaagaaggaagaaaaaggatacgttgtgctccgaccacaggccaaggtcagaagacggtatttaccaagtctcttcccaaaatacttgcaaatgcacataatctcaaagtgtttttgagggctcttccgatctaaaattggtcctagtgacaaggggtgtttggggaaatcaaagggctggctt

SEQ ID NO: 465278 - DNA, 993 bp, Homo sapiens
cacagatttcagagaaataggatcagtgctctgaagttaaaagttaagtttttgcttatataggaagaagacaaagaaatttaacaggattatatttcctatatactggtttaagagttataacaaattaattagttagagtttgttttcttttctgtatggcttgttttattcatagctgattttcatttcctttccaatttaaaagagtatgtttaacattccatcttaagacaatgtggtagtcatgaagtctttgtgtgagaaaggtgagagggaggttaatctacaatgaagatcaacagaggagaaggaaggggtcttccttggtgcccttctgtcattcatgtcattttattaacacaaaacaatacaggcactcccttgcattgctagcttatctaattatgcttgcttagaagttccagagattgaatcttgagacaatccaggtgcctatggaattatcccccaccaggagattacttcaagcctgcagctaatttacaacccagtcaagcccgagatggcaccagctcattcacaagttggagcaataactcaagagggccatacaactttcattgggcatttaaataagcagagtatgctcctggacaactggaaggacaccattgaaggcactggttattttaccaaggctttgactggaatggcatggtttcagttataaacagactgctttaaggaatcaaagttgacttacagagctgataaaaggcccctaagaaaaactggcctcacctcttgtctatatagtccctatataggtttcctgacctgtgttttttgacttggactcaataaaattgctgctacctttttactgaggccttacaagctaaagcttattccttgagacacagaagttccagggattgaatcttgagacaatctgggtgcctatggaattatctcccaccagaagattacttcaaggcagcagctaatttacaacctggtcaagcctga

SEQ ID NO: 465279 - DNA, 926 bp, Homo sapiens
aggagtggcttgacaggatttaggaactgattggatatgacatggatagaaaaataacagtgttttccctgctctctactctcagtcactcagtgcaacacttctgccaccagttgtacaggggttttccccacatgaagcaattcttaccccacatgaagcaatttcatgtcctctctgtctcctccaggcacctccatgtgttcacctatgtggaagctccccaaacccagctacaaaatgttctagatggtggctgctcctttagcaaggatccaagtcaggatgacagggacacaaaacagagctcctggctgactagcaaagggcacctagctgacattatggccaaaaccctggggaatttccctgaaactgacagttttgtcctggggaacctccctgctctttctgccatggcactggctggcttctacacttcactggtacaaagaaagtgacctctgaaatttgaaaactatttgtaagtatacttaatttatggcagtatgtttatttctataagttcaataaaaatctgttttctttttttttaaacaggacaccattgaaggcactggttattttaccaaggctttgactggaatggcatggtttcagttataaacagactgctttaaggaatcaaagttgacttacagagctgataaaaggcccctaagaaaaactggcctcacctcttgtctatatagtccctatataggtttcctgacctgtgttttttgacttggactcaataaaattgctgctacctttttactgaggccttacaagctaaagcttattccttgagacacagaagttccagggattgaatcttgagacaatctgggtgcctatggaattatctcccaccagaagattacttcaaggcagcagctaatttacaacctggtcaagcctga

SEQ ID NO: 465280 - DNA, 654 bp, Homo sapiens
atatttggtgaattgttggttctttttgaaaacacaactgcatccattcattacaatctctatatctgttgctttctttatagggcatcacaaaaaaatgtgaaggagaagaaattttcctaggtcagtttatatataacaaaacaggaaccaccgttcaaacatttgaactccagcatgcagtttctgaatatttattatgtgtgaaacttaatatctttagcaactggggacacccgaagtatacttgtttatatcgattcagggtccatggcacaccaggcaagcacatctagaagagttggtacagaaggccatgccacatgtccagaatattcaagaatgcttattctcttagatgataccgcacccataggaattgagaattgggagtgggaagaaaacctcaaagtggttcatacttgcctgtaaaaagtaaatgcattttactaataaaaaaatatggaagtaaattaaatatccttgccatagtttagtctttaaggatgcttcatgttgttagagcattgaaaactcattttgtatttagaagaagatagtctcatcatcagtctttcccataatagcatctttgccttcacggactcatttatttacaccaggcatggatgtccactatcactactatcattt

SEQ ID NO: 465281 - DNA, 1695 bp, Homo sapiens
gctctggctgggaaccacagttactgaattttatggttagaggtcttatgtttaagtcttttatctatttcaaggatgatgcaacagaagaatcagaagcttttcaaaattccgtcttcaagaagaaacacccgtggaggaagaagacattatacaaaacaaatttagaaactgtatgtatagcttcatgtttttcataaaataggaatgaggacaaatgttgctcttcatcctaccagctgtttgttctttggtaggggatcatgagtggaaaaacaaaggcaagaagggctgccatgttttttagacgttgctctgaagacgccagcggtagcgccagtggcaatgctttgttatcagaggacgaaaatcctgatgcgaatggggtaactcgatcatggaagattattctaagtacaatgcttacactgacttttcttcttgtaggactcctaaatcatcagtggcttaaagaaacagatgttcctcagaaatccagacaattatatgccataattgcagaatatggttcaaggctttataaatatcaggccagacttcgtatgcctaaagagcaactggaacttttaaagaaggaaagccagaatctggaaaacaattttcgtcaaattctatttttgatcgaacaaatagatgtcctgaaggcattgctaagagatatgaaggatggtatggacaataatcacaactggaacacccatggagaccctgtggaggacccggaccacacagaggaagtgtcaaacttggtcaattatgtacttaaaaagttgagagaagaccaagtcgagatggctgattatgccctgaagtcggccggagcctccatcattgaagctgggacctcagaaagttataaaaataataaagcaaaattgtactggcatgggataggtttcctaaatcatgaaatgcctccagatattattcttcagccggatgtctaccctggaaagtgctgggcttttccaggttcccagggtcataccctaatcaagcttgctacaaagatcataccaactgctgttaccatggagcacatctcagagaaggtgtctccgtcaggaaacatctccagtgcacccaaggaattttctgtctatggcatcacaaaaaaatgtgaaggagaagaaattttcctaggtcagtttatatataacaaaacaggaaccaccgttcaaacatttgaactccagcatgcagtttctgaatatttattatgtgtgaaacttaatatctttagcaactggggacacccgaagtatacttgtttatatcgattcagggtccatggcacaccaggcaagcacatctagaagagttggtacagaaggccatgccacatgtccagaatattcaagaatgcttattctcttagatgataccgcacccataggaattgagaattgggagtgggaagaaaacctcaaagtggttcatacttgcctgtaaaaagtaaatgcattttactaataaaaaaatatggaagtaaattaaatatccttgccatagtttagtctttaaggatgcttcatgttgttagagcattgaaaactcattttgtatttagaagaagatagtctcatcatcagtctttcccataatagcatctttgccttcacggactcatttatttacaccaggcatggatgtccactatcactactatcattt

SEQ ID NO: 465282 - DNA, 1611 bp, Homo sapiens
gctctggctgggaaccacagttactgaattttatggttagaggtcttatgtttaagtcttttatctatttcaaggatgatgcaacagaagaatcagaagcttttcaaaattccgtcttcaagaagaaacacccgtggaggaagaagacattatacaaaacaaatttagaaactgggatcatgagtggaaaaacaaaggcaagaagggctgccatgttttttagacgttgctctgaagacgccagcggtagcgccagtggcaatgctttgttatcagaggacgaaaatcctgatgcgaatggggtaactcgatcatggaagattattctaagtacaatgcttacactgacttttcttcttgtaggactcctaaatcatcagtggcttaaagaaacagatgttcctcagaaatccagacaattatatgccataattgcagaatatggttcaaggctttataaatatcaggccagacttcgtatgcctaaagagcaactggaacttttaaagaaggaaagccagaatctggaaaacaattttcgtcaaattctatttttgatcgaacaaatagatgtcctgaaggcattgctaagagatatgaaggatggtatggacaataatcacaactggaacacccatggagaccctgtggaggacccggaccacacagaggaagtgtcaaacttggtcaattatgtacttaaaaagttgagagaagaccaagtcgagatggctgattatgccctgaagtcggccggagcctccatcattgaagctgggacctcagaaagttataaaaataataaagcaaaattgtactggcatgggataggtttcctaaatcatgaaatgcctccagatattattcttcagccggatgtctaccctggaaagtgctgggcttttccaggttcccagggtcataccctaatcaagcttgctacaaagatcataccaactgctgttaccatggagcacatctcagagaaggtgtctccgtcaggaaacatctccagtgcacccaaggaattttctgtctatggcatcacaaaaaaatgtgaaggagaagaaattttcctaggtcagtttatatataacaaaacaggaaccaccgttcaaacatttgaactccagcatgcagtttctgaatatttattatgtgtgaaacttaatatctttagcaactggggacacccgaagtatacttgtttatatcgattcagggtccatggcacaccaggcaagcacatctagaagagttggtacagaaggccatgccacatgtccagaatattcaagaatgcttattctcttagatgataccgcacccataggaattgagaattgggagtgggaagaaaacctcaaagtggttcatacttgcctgtaaaaagtaaatgcattttactaataaaaaaatatggaagtaaattaaatatccttgccatagtttagtctttaaggatgcttcatgttgttagagcattgaaaactcattttgtatttagaagaagatagtctcatcatcagtctttcccataatagcatctttgccttcacggactcatttatttacaccaggcatggatgtccactatcactactatcattt

SEQ ID NO: 465283 - DNA, 1522 bp, Homo sapiens
gctctggctgggaaccacagttactgaattttatggttagaggtcttatgtttaagtcttttatctatttcaaggatgatgcaacagaagaatcagaagcttttcaaaattccgtcttcaagaagaaacacccgtggaggaagaagacattatacaaaacaaatttagaaactgggatcatgagtggaaaaacaaaggcaagaagggctgccatgttttttagacgttgctctgaagacgccagcggtagcgccagtggcaatgctttgttatcagaggacgaaaatcctgatgcgaatggggtaactcgatcatggaagattattctaagtacaatgcttacactgacttttcttcttgtaggactcctaaatcatcagtggcttaaagaaacagatgttcctcagaaatccagacaattatatgccataattgcagaatatggttcaaggctttataaatatcaggccagacttcgtatgcctaaagagcaactggaacttttaaagaaggaaagccagaatctggaaaacaattttcgtcaaattctatttttgatcgaacaaatagatgtcctgaaggcattgctaagagatatgaaggatggtatggacaataatcacaactggaacacccatggagaccctgtggaggacccggaccacacagaggaagtgtcaaacttggtcaattatgtacttaaaaagttgagagaagaccaagtcgagatggctgattatgccctgaagtcggccggagcctccatcattgaagctgggacctcagaaagttataaaaataataaagcaaaattgtactggcatgggataggtttcctaaatcatgaaatgcctccagatattattcttcagccggatgtctaccctggaaagtgctgggcttttccaggttcccagggtcataccctaatcaagcttgctacaaagatcataccaactgctgttaccatggagcacatctcagagaaggtgtctccgtcaggaaacatctccagtgcacccaaggaattttctgtctatggcatcacaaaaaaatgtgaaggagaagaaattttcctaggtcagtttatatataacaaaacaggaaccaccgttcaaacatttgaactccagggtccatggcacaccaggcaagcacatctagaagagttggtacagaaggccatgccacatgtccagaatattcaagaatgcttattctcttagatgataccgcacccataggaattgagaattgggagtgggaagaaaacctcaaagtggttcatacttgcctgtaaaaagtaaatgcattttactaataaaaaaatatggaagtaaattaaatatccttgccatagtttagtctttaaggatgcttcatgttgttagagcattgaaaactcattttgtatttagaagaagatagtctcatcatcagtctttcccataatagcatctttgccttcacggactcatttatttacaccaggcatggatgtccactatcactactatcattt

SEQ ID NO: 465284 - DNA, 1567 bp, Homo sapiens
ccatttcaattgtctacacatcatttccacagtgttgagagccggatgcaggtgaggcccaggcctgtggtggagattctggaatgcagctgccagatgaaaaggaagactagggacaaacgaggtggagcaggaaagagaaaggagaaaacatgtctgccagcccatagatatgaccctggggccctgggggaaaagagaaagcaggcactttcccatcattacggctgcaccaccgcagccatccccaccggcctgcagggagcgccgctgaccctgggccaaacgtcctgtagcacaaaattcctttccaagttgaaaggaaaaaatgaatgggctgcatgcagccagcctccaggaacagggaaaagagggtccttctccttcaggagtatcccctccactaagaagggtgtagaaggagcagaaaatgtcccacactccgaagctctgctaccacgtggccctccttttggggaggagcatggttggaatgagagcgaggtaagaagatcccagccaaatgtgactgttgctgagggtgaggggaaggttgggaaaggggagggagatggaggccaggaaacctgctaggtggcagtaattgcaggtttgcctgaaattttcatcacaattctatatttcaagtacttcgcctgaaagaaaatatttttttcctttggtgcttactgaaaatttagcaaacagtaggaggtgatttagtgtgcctggcatatgtagaaaataaaatgctttgttattttcatgtctgaatacaaaaatccatagaggctacacttttcagacattcttgatgattgccattgtacaagaaaaattattttctttacttctcagtccaacaaagatcagcattccagcaatcaaggaaggaatcaccatacttgcagatgtaattgacgttggtcactgagggaggtagaacaggcattacataatgagggcaaaaaagaaatttggtcccccaagtgatccagtgacacatctctcagtatgctccagtccaaatttgacaagaaataggtttcctcaagaagagcgccagccacagttctggagtatctgttcctagacggaggtgaatgcactagatgaagtgcatgaacctgaacaacttgagggaaggacagtagtagatgctgggctgctgtcaagatcccccttacagttggggcacccattcatccagctgcccgggttgttgaagggtagtgatggctctcagatgactccctgtcctgaaatatcctcagccaagggaaactgactcatctaaaattttgccccctccctgggcacaggctgcacccatgactagtctttctggggacacaaagacttgattcccttgtctcaattgagacaattctcacggctgtctcaagtccagagctccctgtcagcctctgttgaaactgtattgcaattcaactgctccatttgccaagttctgcctttgcttctccctttgccccattctcatctttcaagatctttactcgataaatattttgcataaaaagctcagggttgtggagtctgtttt

SEQ ID NO: 465285 - DNA, 1144 bp, Homo sapiens
tatactatattgctgacattatgttaattggacttggtgaacaggaagtggccggtactctggatgtcatagtaaaacatatgaaagtgaaacataaatcatttacagtatcaaagtcctgccatattggtgaagattttaggagtcccatggtttgcagcatcctaagggccttctcagaagacttctcagcccatttggcccaggatcaacacagcccagaagtgcaggggcattaccacgccaggggcaatcctccagcagtgggagatacaagcctatggatgaaggttcccacctcccatcactcagatgagaaacaccaagaggcttcttgtacctttctcagaggccacagcaggatcaatcccccattgcacacagcagccatctcaataatgcaccattctattagttaactgctcccaagtcctgccccatgttctactttcaggagttcccaaactaaggcaatagctgcacctgcaaagaaagcgactacttgttaatatgtgatataatccagaaaagcaagagtccacccaaagtcagaagagaagaattcagaagagtaagagcgtctccacttggtcatctctaacagaccggaccccgccactttgctaggatatcccagaggagaccagagcagaattccctgtgaagatattgcaaatgctgcaccactttgacacagacgaatattgccttaatgctttctcattgcagctccattctcattcctcttgttctaatctcactgggaacagtaagaagctgccatcattttatgttatacttttacatactttaaggttattactgattaatgagaattaaaggaagctgagaatatataaagcatttcttatttgcagtttttcactccatttgatatacagactgtgtatatcaaatagatttacaaactgtgctacaatatttttttctcttattggtaggggctgaatcagactcccctccccctgcaagaaagagatgttgaaatcttaactcttggtacctcagaactgacttcattaggaaacaggattgttgcaaatgtatacttaagatgaggccatactggcgtagggtgggccctggtctaacatgactgatgtccttacagaaagacagccac

SEQ ID NO: 465286 - DNA, 805 bp, Homo sapiens
tagctggcctcaagagaagggcggtggctcgcacggcgcgggcggctttgctcactgcagctggggagatgcaggtgatcttaattgcacacctattgaaataaacctgtagtttctagaagtggaagaaaatttgctgagacgtcagctggggattcttcctggagaactccagaaatggagagcttccacaccagatttagtgcctggacaccttttagcaacaagtcattaaatagacagctctttcaggaaagagtggctcttataagtcattggtttgacctctggactaacaagcaacgtcaagaattcttattcgcaatttttttaagatgcactaaatcacaattaagaagaaaacatcgaatgaaacttgctgaagacagtaaggcggacgttactgagaaccttggagatagctacagggactgctgcatggggtcacgggagagagattgggctcaacttcaaatgcagcatgggcggatagccaaggagcaggatggggctcaatggatggaaaattactcgaggaaacatcagggagaggagaggggagtattcaaagtgaaagtgtacacttgtatctaaaacgactgttttctaaatatccaaggcaagtctggaaatttgagtcatcttcacttccttcccctttgcccagtattctgcacatgttcctgcccttctacctgcatgggctggttaaggataactgtatgaaatattagcatttgcaattgggatggtttttagaggtggatgatgcttaaaaaaaaaaaaaaaaaaaggaaatcattgc

SEQ ID NO: 465287 - DNA, 1118 bp, Homo sapiens
ccgcattccgatcgtgagaacatcctgggcacacccaaactgagagacaccatacaaagtgactggtcagtgcactcaaaggcaaaaagctcatggaaggcaacagaagacaggagaagtgacagctaaaagcagcgtggaatcctggaagggacaaagaacacgagcagagaaactgtagaagctgagtgagggcagcggtccagcttgcgctgttttgctgggcctcaggttttccttaggattccgtgtgtgttccccgcctggcccctccgcagcgactctgctgtcagtggctgccccagggtggagagtgacctacctccggcttctcctgtcccggcttctcctgtgccagccggtcaggcacactgtaagatccccacagcggggtgcccccaccctcacctggaccctacaccatcaccatcacaccttctcgtgtgtcataaaccccacaacacattgttatgatttttgctttaaatcaattatcttttaaagggattaaaataatgtgagctgtgaagttggtatgttaaaagtggaagagatgccacagccaaacccaaacgttacagtatattttcagtgaattcatgcagttgccactgaacactgcagcgtagacaggaatgaatccgcagacgttaccaagagtgaaggaggccaggcatgcaaaggacacctggccagcggttatgcgtccctctagtttcggcatccagtacagcattgttaaccatggccacctaggacagcgctccccagaaactgaatttgccagcaccttgatcgtggacttccagcctccagaacagcgagaagaatcgcttctagacacaaagccagtcacctggggacgctgccacctgaaggcctgcgtggccgggtctgtgactgtagacacaaagccagtcacctggggacgctgccacctgaaggcctgcgtggccgggtccctctacaaaaggaggcaaaacttcctcccacagagccgctgttggtgtgtggctgggcccaagcaggcacccacagacagctcagccacggggccccctgggggcactgctggagtaggcagcagccccgggttggaggagcagcgcttctaggag

SEQ ID NO: 465288 - DNA, 1235 bp, Homo sapiens
ccgcattccgatcgtgagaacatcctgggcacacccaaactgagagacaccatacaaagtgactggtcagtgcactcaaaggcaaaaagctcatggaaggcaacagaagacaggagaagtgacagctaaaagcagcgtggaatcctggaagggacaaagaacacgagcagagaaactgtagaagctgagtgagggcagcggtccagcttgcgctgttttgctggggtgattctggctttgatgaccttgttttgaggtgacgagcgctctggccgggcccggtgtgtgctgattcttccctggccgctccacacagccctgttcctctgtcctctcttccagcctcaggttttccttaggattccgtgtgtgttccccgcctggcccctccgcagcgactctgctgtcagtggctgccccagggtggagagtgacctacctccggcttctcctgtcccggcttctcctgtgccagccggtcaggcacactgtaagatccccacagcggggtgcccccaccctcacctggaccctacaccatcaccatcacaccttctcgtgtgtcataaaccccacaacacattgttatgatttttgctttaaatcaattatcttttaaagggattaaaataatgtgagctgtgaagttggtatgttaaaagtggaagagatgccacagccaaacccaaacgttacagtatattttcagtgaattcatgcagttgccactgaacactgcagcgtagacaggaatgaatccgcagacgttaccaagagtgaaggaggccaggcatgcaaaggacacctggccagcggttatgcgtccctctagtttcggcatccagtacagcattgttaaccatggccacctaggacagcgctccccagaaactgaatttgccagcaccttgatcgtggacttccagcctccagaacagcgagaagaatcgcttctagacacaaagccagtcacctggggacgctgccacctgaaggcctgcgtggccgggtctgtgactgtagacacaaagccagtcacctggggacgctgccacctgaaggcctgcgtggccgggtccctctacaaaaggaggcaaaacttcctcccacagagccgctgttggtgtgtggctgggcccaagcaggcacccacagacagctcagccacggggccccctgggggcactgctggagtaggcagcagccccgggttggaggagcagcgcttctaggag

SEQ ID NO: 465289 - DNA, 2392 bp, Homo sapiens
  misc_feature (6)..(8): n is a, c, g, or t
  misc_feature (11)..(12): n is a, c, g, or t
  misc_feature (14)..(16): n is a, c, g, or t
tgcccnnnttnncnnngggcaatggtagcatggaacatgcaacccctagcttacttgaaagattggacttgaaaaaaatcagcagttccttctggaatctgcaaggattggggaatttgaaagattcaggggaattagttcggcttcccaaactagttggttttagtgaccccttcttcttcccagctgctgtgcatattcacgtgcacatttttgtgtggacacctgttttcagttctacgggatctactcaggagtcagatggttatatggtgacccagtcttcggggcaagctcaggagcagaatcatcgtacggtgactcggtcattggggtctactgaggagtcgaatggtcatatggcgactcggtctttgggcaatggaagtttctccagttccagtacacgctctcaagcgactctccccctctcctcaaaatgcttacctgcattttcatgatgcagctatgatgtgcaacattcactaattgatgtctgtgaaccctggtggctgtgtgccaggccttccagaacagggtgtaccatgtgctccagcacgagggagacgtgcttctgatgtcagctatagcagtgcctccagggtcgatggcacgagcccagttgacaatccccacagccagatgctttgaaatatgtgatccttgataaatttttaatttagggtaattttaagtttgcatattgcatgagactttactgctctttgaaatctgcataaatcacagtcatgctgcatgtttgggttgtcacttggcatactggccagctttttgttggccccccaatcctacttctgctaagggctggcctggtgtgtgtgaccagaatgccaggcccagaagccaccagcactaagtcaatgggaagtgctttgctcagtgcagagctgctgctgctggaatcactgcaccacttattccccatgacactgggcctcctcgccaccaggtcaagccagactcaagacgcaggcaaacggaaaaatgcagaactgtttgctccttctccctccctggaaacccctgctcttataggttggctttgttggtccagccccagcttcttgacttggtagggagttccacaggatgaggacatgctttttgtgtttttctttgcactaaactatgtgtaacatcaaatttaccatttcaacccttttaaagggtacgattcatgtgtgccaatcatgctagatataatttgcattttcctgaatattaattagggggaacatcttttttatatgctgttgacggtttggatacctccttttggaaggtgttcccggactttgcatattttccacagggttatttgactttgttcatttgtgggagttcttttgatattctagaaactggactatgtccagttaaatatgttacaaacatcttttcctgcactgtgttttgtcttttcattttacagtgtttttgattaaattcttaatttaaataaccaaagagtacagttcagtgctctgtgcagtgagtgcagtcacattgttgcaaaaccatcactgctgtctaattccagaacctttcatcacctacaaggaaattgtgtgatactcctcattctcccctcctccaagcccctgataactacgcatctactttctgtctgtatgaattggtctgtgctgaacatttcatgtaaatggaatcatacgctgtacggacgctatatggacttttgtggccggctgtccccatgcagcatcatgttatcagggtccctccacactgtagcaggtgtccaggcctcattcccttttatggctggggaatgttccatggtctggatagactatacttgatgtgtccatttgtccgctgatggacatttgggctgtttttgctttaggtcatactttctgcctgatgtaaaagtgccagtcgtgtataaggactgtagtcagcgccaccatgccacagcttagagaagggatgggggaactactgggttgtcagaggcgccgttcttgaccctcagagactttctgtctcctggaggagaagtggctgtgttgggcaggtttgaatcttgagaattcacggtccctgggtttgaggcctcgctgtgccacttgatgccatgtgaccttgggcaagtcacctctccctctgagcctcacttttctcacctgttaaatgaggtacttataaagccgaatagcctaattcaaacattttaagtctgaaatgctctgaaattcgaaacttttttagtgttgacatgatgctcaaagaaaatattcatcagaacattttggatttcaaagttttggatgctcaactggtaatgcaaatattccaaaatcagaagaaatctgaaatccgaaacacttctggtcccaagtgtttc

SEQ ID NO: 465290 - DNA, 1249 bp, Homo sapiens
cacagaatggcctggcacggtgaccacggagtgccctggcaccggtgcccgcggctgtgacggaaaaagggtgggaagaacagggaagaggaagcagaaacaggcactccttgatgaaataagtaagaaagcttgtcaagagccatcactcttgctcatgggacaagagaaggcactgacctgtgcccaccagcaccccatcactgagccaacaccaccttcaggaagacagtctccagcagggcttcccccaattcccctagctgctttgcctctgctactccggtaagcacctgcagggaggcaggcaccccagcacccactagcattctgcaacagctgttgcaccttggctcccccagtacagtggattccaaacctcaaggagtcaaagaacagatggggcccaatacaaattccccagaattacaacatgccgtccaggagttgagagctgagtgttgaccttctaaaatctcccagaaacaaagccaggtggctgaatccaccttatattatagtcaaaccctcaaggtcatcaaatcatcaaataggataaaagaaaaaaaaatccaaaggtcagcaacatccaagattgaagacagataagctcacaaagatgagaaagagtcagcacaggaaaactgaaaactcgaaaaaccagagtgccctctttcctacgaacagccacatcacctctccagcaaaggttctgaactgagctgagatggccaaaatgacagaaatagaattcagaatatggataagaatgaagatcattgagctacaggagtatgttgaaacccaatgcaaggaagtgaaaaatcatgataaaacaatgccagagctgacagacaataatggacagtatagaaaagactctagactaataaagaagaaaagagagaagattcaaatgaaaacaatcagaaatgatgagagggatattatcactgacctcacagaaatacaaacaaccaccagagactattatgaacacttctatgcacataaactagaaaatctagaagtggataaattcctggacccattcaccctcccaaaactgaaccaggaagaaattgaaagatacaccaaaaaaagaaaacttcagaccaatatttttgatgaacatcaatgcaaaaattctcaacaaaataccggcaaaccaaatccagcaacatctgaaagcctatccaccacaatcaagtaggctttatccctgagatgcaacgttggttagacatac

SEQ ID NO: 465291 - DNA, 318 bp, Homo sapiens
cacagaatggcctggcacggtgaccacggagtgccctggcaccggtgcccgcggctgtgacggaaaaagggtgggaagaacagggaagaggaagcagaaacaggttatctgttcactctgatggtagagaagaccttaaatgacctgatggagctgaaaaccatggcgagaacttcctgccttcgatttctcacaagctcgggcataccacgaggcttggagactcaaaacctgaagagcctgcaatcagatttctcccttactattcctgctcattgtcttctgtggactaatactgaacatgaaactttgcttaca

SEQ ID NO: 465292 - DNA, 816 bp, Homo sapiens
gggtggagctgcctgccagtcctgtgccatgcggtcacactcctcaacccttgggcggtcgatgggactgggcgccatgaagcagggggcggcgctcgtctgggaggctcaggccgcacaggagcccatggagggggtgggaggctcaggcatggcgggctgcaggtcccgagccctgccctgcgggaaggcagctaaggcccaggtgagaaatcgagcgcagcgccagtgggccggcactgctgggggacccagtacaccctccgcagccactggccagggtgctaagcccctcactgcccggggccggcagggccggccggctgctccgagtgcggggcccgccaagcccacgcccacccagaactccagctggcctgcaagcgccgagcgcagcccccaaaactggagaagaaagagccagggtagtcaaaggactgctcgttaattttaagatgtgcaggatgaagaggagaacaatgcaaggacatcagcagatcggcattggtgacatctgctaattatttggtttgactcgtgactggcatgagacttccatctgcatcaatcaatggaggcaataagcacagacagatctggaacccttgcctactgtgacatacagccgcagtagcaggcaagcctgggtcagctccagagcggcaatggagggaaattcccaggactctgggtgtcttggaagtttccaaggcctgcaactgatcacagatcctggttttcctcccattggctaaaaagataataaatacaagttacagcttgactactgtctgaaaaaatcttgtaatggttaat

SEQ ID NO: 465293 - DNA, 1384 bp, Homo sapiens
tcatccatggatattctaaatatatgcatgcaatttgtatgtatatgttttatacacagattttaagagaaagactgagagagtcaattcacaatgttcagtatgtggagcctccttttgatgactcaattgctgatataggtaaagaatggaagagtgccctggcaaaattaaagtttgctaattcatatagaatggagccattgaagaaattccaagctcattcagtagaaactaaagtccagcagatactaacagaaagtcttaaagatgtcaaatatgatgataaagtattctctcacttgtcacttgaattggcagaccgcatactgttagcagtcaaagaatttgggtaccaccgttataagttcattataaaagtattatttattcaaaagactggccaagcaataaatattgccagcagatggatctgggacattgcatgggacagctgggtcgcagctaaacacgaagcagaatcctacgtggcactggtcttggtgtttgccctttattatgaatagctcattacaggtactaaggattgtttacttccgaacttttcaaaaataaatgaaatttacatatttgtaaacctcataatatttctgatttgctatattcttattctcatttgaggcctttcaattgtattattttaacaacaaagtagaagccagatttttatatttatacttactgttatattaactaacataatattatgccaaagtagtataaaaggtgtatgcatgtgtgtctgtgtgtgtatatatgtatgtatatacaaattcttatagtagagtatagggaaaatatcatttttgtaagatttaagaaaatgataatttgctacaggaaattaaaatgcaaccttgtaaagtatcaaattcagtagatgttaagatagattttggaaatttctaatgatattttaatactttgtattcattgttttgaaaggaattaccaagtttgaaagaaagatgttattatatttcataattccctaatatcctcccgctccagccaaactgcttacaagtgtgtagtcaatttactaatctattaggctctgttaggctctgtgagccttctaggatctttttttcagatgcaagaactgaaaattcatattaattgtttaaagaaatgaggaaaattttatttcccagggatttgatcaaggatccaggttctctccaacttcccattctccccacagacttccacgtacattcattttgcttgacagaatttaatcatgttcctatgactagaccagttgtaattccctccttaagattggggctggagcctaccttttctgaagcgtgagatcatgtgaaaagtgtggctatttgccagccacagtggctca

SEQ ID NO: 465294 - DNA, 825 bp, Homo sapiens
aagggagtccctgaccaaaactctggtgcttctgaattgttaaagacagggttgcaacttaaaatttggaaataagtacaggccagaagaatggaagtaaacctcccccttataaataagaagagtcattcagaaatagagtgttgcaatgaagtccctgactctgaagactgactgtggagttcaaatcccagctgcactgcttactggctatgtagaagtccttctgcctctatatattttccttatgtgtaaaataataataataataactattatagtgttgtgaggatttatacaattctcatgtaaaataagaaagaaaaataaactcatgctaatctctatgacacacgtagttcagtgccctgccacataataagcacatgggaagagtggatagccatgaggattatgattattcacaacatgaatggcacccccaggcattgtgtttgcaaacttattctgaactaggaaatgcctccaccagtgatacccaggaaaacagggtctggagtggacccccagcaaactccagcagacctgcagaacaggggcccgactgtgagaagaaaactaacaaacataaagcaatagcatcaacatcaacaaagaggaccaccatgcaaaagcttcatctgaaggtcccaacagcaaagaccaaagcagcaagggaacaaaactggatggagaatgagtttgatgaattgacagaagtaggcttcagaaggtgggtaataataaactactctgagctaaaggagcaggttctaacccaatgcaaggaagctaagaaccttgaaaaaggttagaggaattgct

SEQ ID NO: 465295 - DNA, 388 bp, Homo sapiens
aagggagtccctgaccaaaactctggtgcttctgaattgttaaagacagggttgcaacttaaaatttggaaataagtacaggccagaagaatggaagtaaacctcccccttataaataagaagagtcattcagaaatagagtgttgcaatgaagtccctgactctgaagactgactgtggagttcaaatcccagctgcactgcttactggctatgtagaagtccttctgcctctatatattttccttatgtgtaaaataataataataataactattatagtgttgtgaggatttatacaattctcatgtaaaataagaaagaaaaataaacccagatgcggccaagccctcctctttttcttattctcgacgtgcactaaccacccc

SEQ ID NO: 465296 - DNA, 955 bp, Homo sapiens
tacaaggacacgccgagtcccatgagtccttctggtgagtctcagtctttgaaagtgaagggccctcaagagttccataagtctcagtgcaaggaggtgggaaaggctcctaagtgcttctgcggtggcagtggcttcctctggcaagggcaggctcaggaagaagaagctggtgaaaggcagaggcaacacctgcttcctgcagtaacctcagagccttaccagccagctctgcttcctgcctgcttttggaacgaatgtattcctggatggtggaatagaaggaggctacccctttcttcccaaaagcttcctaccacaagtagagcctcacagagcccgtcattgtttttgccaaatcattatcatctccagacaagaaggggcccccttcccggttttcaggcctactctcaaacctcagagatgagttccttgcccccagaccccttcatggtgagaggtgcagctctaacagtttccattccatgcattgagaaaggagtgattgctatcaggaccttagctctgatctaagaggagtattctctctttttctatttcttcaccactgctttctggaaaaaaatgtagggagagagcttggctctacttcagccacaggtgtttgcattttcctggcaaatcctccatatcctagctgtgaattcgggtattcttaagagagggaaaacaactttcattctaaaaacccactgcaagtaaataatttcatgttacttagtaaaccttgacatcccaaatagcaaaatctttcagaatttactcgcgtccacatagctcactattagtggatattggatttcccaacattccgtggtgtttcaaagttgaacaggtacataattacacttcagagtattataatttttcccaatgtcttttcatattagattaattcaagatttaggaggtagctaattctatattctgt

SEQ ID NO: 465297 - DNA, 5657 bp, Homo sapiens
acgatggcagcgtcagtggcagctgcagcccggaggctgcggcgggccattcgaaggtcgcccgcatggcggggcctcagccatcggccgctctcatcggagccccctgcagccaaggcctcggccgtgagggccgcctttctgaacttctttcgggaccgccatggccaccggctggtgccctccgcttccgtgcggccccgcggcgaccccagtttgctttttgtcaatgcgggcatgaaccagttcaagccaatctttctgggcaccgtggatccacgaagcgagatggcaggcttccgacgtgtggccaacagccagaaatgtgtgagagctggaggacaccataacgacctggaagatgtgggtcgagacctttcccatcataccttctttgaaatgcttggcaattgggcctttgggggtgaatattttaaggaggaggcttgtaacatggcctgggaactgctgactcaggtctatgggatccctgaggaaaggctctggatctcctactttgatggtgaccccaaggcagggctggacccagacctggagaccagggacatctggctgagcttaggggtgcctgctagccgtgtgctttcctttggaccacaagagaacttctgggagatgggggatactggcccttgtgggccctgtactgagatccactacgaccttgctggtggggtgggagccccccagctggtagagctttggaacctggtcttcatgcaacacaacagagaggcagatggaagcctgcagcccctgccccagcggcatgtggacacaggaatgggcctggaaaggctggtggctgtgctgcaaggcaaacactccacctatgacactgacctcttttccccgctgctcaacgccatacagcagggctgcagggcacccccttacttgggccgagtaggggtggcagacgaggggcgcacagacacagcgtaccgcgtggtggctgaccacatccgcacactcagtgtctgcatctctgatggcgtcttccctgggatgtcaggtcccccgctggttcttcgtcggatcctgcgtcgagctgtgcgtttctccatggagatcttaaaggcaccacctggcttcctaggcagcctggtacctgtagtggtggagacactgggagatgcttatccagaactgcaaaggaactcagcccagatcgccaacctggtgtcagaggacgaggcagccttcctggcctccctggagcggggtaggcggatcattgatcggactctgaggaccctggggccttcagatatgttccctgctgaagtggcctggtccttgtcactgtgtggagacctgggactccccttggacatggtagagctgatgctggaggagaaaggggtccagctagactccgctggactggagcggttggcccaagaggaggcccagcaccgggcacggcaggctgagccagttcagaagcagggattgtggcttgatgtccatgcgcttggggagctgcagcgccaaggagtgcccccaactgacgacagccccaagtacaactactccctgcgacccagcggaagttatgagttcggcacctgtgaggcccaggtgttgcaactgtatacagaggacgggacagcagtggcctccgtggggaaaggccagcgctgtggcctcctcttggacaggaccaacttctacgcagaacaggggggccaggcttcagaccgtggctacctggtgcgggcagggcaagaggacgtgctgttcccagtagcccgggcccaggtctgtggaggtttcatcctgcatgaggcagtagcccctgagtgcctgcggttaggggaccaggtgcagctgcatgtggatgaggcctggcgtctaggctgcatggcgaagcatacggccacccacctgctgaactgggcactgaggcagaccctgggccctggcacagagcagcagggctcccatctcaatcctgagcagctgcgcttggatgtgaccacccagaccccattgaccccagagcagctccgggcagtggagaacactgtgcaggaggccgtggggcaggatgaggctgtgtacatggaggaggtgcccctggcgctcactgcccaggtccctggcctgcgctctctggatgaggtttacccagaccctgtgcgggtggtatcagtgggggtgcccgtggcccatgcattggacccagcctcccaagccgcactgcagacctctgtggagctatgctgtgggacgcacctgttacgtactggggctgtaggggacctggttatcatcggggaccgccagctttccaagggcactacccgcctgctggccgtcactggggagcaggcccagcaggcccgagagctaggccagagcctggcccaggaagtgaaagcggccactgagcggctgagtctggggagccgggatgtggcggaggcactgaggctgtccaaggacataggacgactcattgaagctgtggaaactgctgtgatgccccagtggcagcggcgggagctgctggccacagtgaagatgctgcagcggcgtgccaacactgccatccgtaagctgcaaatgggacaggctgcaaaaaaaactcaggagctgctggagcggcactcgaaggggcctctgattgtggacacagtctctgctgagtctctctcagtgctggtgaaggtggtacggcagctgtgtgagcaggcccccagcacgtctgtgctcctactcagcccccagcccatggggaaggtgctgtgtgcctgtcaggtggcccagggtgccatgcccaccttcacagcagaggcctgggcactggcagtgtgcagccacatggggggcaaggcgtggggctcgcgagtggtggcccaaggcaccggaagcactactgacctggaagctgccctcagtatagcccaaacctatgccctcagccagctctgacccaggtccgcccagggacccacatggactaaaggcaatgccaggagccctgaaggagccagcagaaccttcccacatgctgaagcgaggactagaggctggaggccaagcagctgagccaaagaagatcacctgggccagggcctacatgacacaaggagacatgggctagggaaggcagaactgggcccaaagacacacacccccttggtgaaagagaagacatggacaattatggctgtgactgcacattagaaattatttcactggccgggtgtggtggttcacacctgtaatccaagcactttgggaggccgaggcaggtagatcatgaggtcagaagatcaaaaccatcctggctaacacggtgaaaccccatctctactaaaaatacaaaaaattagccgggtgtggtggcacacacctgtagtcccagctactcgggaggctgaggcagaagaatcgcttgaacctgggaggtggaggttgcagtgggccaagatcgcaccactgcactccagcctgggtgacagagcgagactctgtctcaaataaataaattatttcacagaggatagcaagctccagaaggttctattacctttaaaaaagagtagttttgcccctcccagcaacctggtatgggtgccctaagaccagtctgaactcacactgtctgaaaggccacccaggatccaaatcgggccatcttcattgccatgagtgttcggacaggctctgcgtgccaggcaacagtgggcagacaaagggctccctggctactgggaagatacagaaccatcctgtgaaaatcatttcagcactggagaccttctttgctattacttctttcattaacaatgacctctaatttaaattgggccctgctggtttgttgatgaattgagcaactgagaacgtggcgggcactaaactgacagttccttccttcatggagcctgcttcatgtggaggaaacaggaaataaagcaaaagaagagggtcaggcttggtggctcatgcctataatcctggcattttaggaggctgaggttggagaatcgcttgaggccagaagtgcaagaccagcctgcgcaaacagcaagaccctgtctacaaaaaaaaaaaaaagtaatctttatgcctcagcctcccaggtagctgagactacccacaccttggtcccagctacttgggaggctgaggtgggaaaatcactttgcccaggaattcaaggccgcagtgagctatgattgcaccactgcactccaggcaacagagtgagaccctgtcttaaaaaaaagaagggagaaagtgtcagatggtgatgaggtctgggggggaaatagagaatggggatcaggagtgtggatggtggtattccctcaccaagaggtgacatgtgagcagggagctgggaggtgagggtgtgacccgtgtggaaatcagggaaaagcattccagcctgagggaacagccaatgcagaggccgtgaggtggccagtgccactgagcagtgagctgggataggggcaggtgaggaggctggagagcggggtcagacaaacaatatgcttattaaaacaagttgtacagcacctgcctcaagcctgagctgaagctgaaaattggcacttcaaagcaggaggaagcaaagagatggaggaaagccctccttccctaccagaatgagtccacctcagacagccagactttggacctctgcctttgttcctagatctctgttgctagatgaaggaaagggcctcaggggatccatcttcaaatcaagggctccctggctaccaaattctgtctagtaaaaattattcgagcagcgtgggcccgcctggcatcattttctgcagtttctcattctaattaaggcactgatgatttgctggtaaggcactgctgagggcttgaagggacccaatcccgggtgcctggcccctcactgcttgcaaagcagcatcctggccactggggcagtagcctgtttagcagtgctcaccacaggcccaggttcaagctcctctgcgagcgccaagatgagttttggcacccctgatttattgatgagttaacagagcttcgagatgttcatccagggtaaccaactagtagtcctcggcagagctgaagtcaaagctaccctttgaaagccccgccaccctggctgcctctcccttcctgaaggccaatttctttttttttactagccgtccctctggtctgtccctctcgccctccaggagatctggggccccaaccacatcttgtcgcgccagggctggaagagagtttggcacagggcatggactgtgtgaaggagcgctgtgttggcctggaaccttcctgcgtctggtaccagaccttcagctgggggaaaggtggaaggtgccctccctcccgcagggcctaaggtcaacaggaggcctcacgggagttccagtgacttctacaggtgccttggagaaggtgcgtccaccctcctcttcttccacagacgcttttcctggaccagctccctatccattgccacacaaaagctaccaagagagcacaagcactccagaccagcagccctgcccgacccccgcctcccgcagaaagcccacccgttcctagacacgtcccacggaagcacagggcatagcgcaaggccacagtcccactacccgcaaagcggccgc

SEQ ID NO: 465298 - DNA, 4816 bp, Homo sapiens
acgatggcagcgtcagtggcagctgcagcccggaggctgcggcgggccattcgaaggtcgcccgcatggcggggcctcagccatcggccgctctcatcggagccccctgcagccaaggcctcggccgtgagggccgcctttctgaacttctttcgggaccgccatggccaccggctggtgccctccgcttccgtgcggccccgcggcgaccccagtttgctttttgtcaatgcgggcatgaaccagttcaagccaatctttctgggcaccgtggatccacgaagcgagatggcaggcttccgacgtgtggccaacagccagaaatgtgtgagagctggaggacaccataacgacctggaagatgtgggtcgagacctttcccatcataccttctttgaaatgcttggcaattgggcctttgggggtgaatattttaaggaggaggcttgtaacatggcctgggaactgctgactcaggtctatgggatccctgaggaaaggctctggatctcctactttgatggtgaccccaaggcagggctggacccagacctggagaccagggacatctggctgagcttaggggtgcctgctagccgtgtgctttcctttggaccacaagagaacttctgggagatgggggatactggcccttgtgggccctgtactgagatccactacgaccttgctggtggggtgggagccccccagctggtagagctttggaacctggtcttcatgcaacacaacagagaggcagatggaagcctgcagcccctgccccagcggcatgtggacacaggaatgggcctggaaaggctggtggctgtgctgcaaggcaaacactccacctatgacactgacctcttttccccgctgctcaacgccatacagcagggctgcagggcacccccttacttgggccgagtaggggtggcagacgaggggcgcacagacacagcgtaccgcgtggtggctgaccacatccgcacactcagtgtctgcatctctgatggcgtcttccctgggatgtcaggtcccccgctggttcttcgtcggatcctgcgtcgagctgtgcgtttctccatggagatcttaaaggcaccacctggcttcctaggcagcctggtacctgtagtggtggagacactgggagatgcttatccagaactgcaaaggaactcagcccagatcgccaacctggtgtcagaggacgaggcagccttcctggcctccctggagcggggtaggcggatcattgatcggactctgaggaccctggggccttcagatatgttccctgctgaagtggcctggtccttgtcactgtgtggagacctgggactccccttggacatggtagagctgatgctggaggagaaaggggtccagctagactccgctggactggagcggttggcccaagaggaggcccagcaccgggcacggcaggctgagccagttcagaagcagggattgtggcttgatgtccatgcgcttggggagctgcagcgccaaggagtgcccccaactgacgacagccccaagtacaactactccctgcgacccagcggaagttatgagttcggcacctgtgaggcccaggtgttgcaactgtatacagaggacgggacagcagtggcctccgtggggaaaggccagcgctgtggcctcctcttggacaggaccaacttctacgcagaacaggggggccaggcttcagaccgtggctacctggtgcgggcagggcaagaggacgtgctgttcccagtagcccgggcccaggtctgtggaggtttcatcctgcatgaggcagtagcccctgagtgcctgcggttaggggaccaggtgcagctgcatgtggatgaggcctggcgtctaggctgcatggcgaagcatacggccacccacctgctgaactgggcactgaggcagaccctgggccctggcacagagcagcagggctcccatctcaatcctgagcagctgcgcttggatgtgaccacccagaccccattgaccccagagcagctccgggcagtggagaacactgtgcaggaggccgtggggcaggatgaggctgtgtacatggaggaggtgcccctggcgctcactgcccaggtccctggcctgcgctctctggatgaggtttacccagaccctgtgcgggtggtatcagtgggggtgcccgtggcccatgcattggacccagcctcccaagccgcactgcagacctctgtggagctatgctgtgggacgcacctgttacgtactggggctgtaggggacctggttatcatcggggaccgccagctttccaagggcactacccgcctgctggccgtcactggggagcaggcccagcaggcccgagagctaggccagagcctggcccaggaagtgaaagcggccactgagcggctgagtctggggagccgggatgtggcggaggcactgaggctgtccaaggacataggacgactcattgaagctgtggaaactgctgtgatgccccagtggcagcggcgggagctgctggccacagtgaagatgctgcagcggcgtgccaacactgccatccgtaagctgcaaatgggacaggctgcaaaaaaaactcaggagctgctggagcggcactcgaaggggcctctgattgtggacacagtctctgctgagtctctctcagtgctggtgaaggtggtacggcagctgtgtgagcaggcccccagcacgtctgtgctcctactcagcccccagcccatggggaaggtgctgtgtgcctgtcaggtggcccagggtgccatgcccaccttcacagcagaggcctgggcactggcagtgtgcagccacatggggggcaaggcgtggggctcgcgagtggtggcccaaggcaccggaagcactactgacctggaagctgccctcagtatagcccaaacctatgccctcagccagctctgacccaggtccgcccagggacccacatggactaaaggcaatgccaggagccctgaaggagccagcagaaccttcccacatgctgaagcgaggactagaggctggaggccaagcagctgagccaaagaagatcacctgggccagggcctacatgacacaaggagacatgggctagggaaggcagaactgggcccaaagacacacacccccttggtgaaagagaagacatggacaattatggctgtgactgcacattagaaattatttcactggccgggtgtggtggttcacacctgtaatccaagcactttgggaggccgaggcaggtagatcatgaggtcagaagatcaaaaccatcctggctaacacggtgaaaccccatctctactaaaaatacaaaaaattagccgggtgtggtggcacacacctgtagtcccagctactcgggaggctgaggcagaagaatcgcttgaacctgggaggtggaggttgcagtgggccaagatcgcaccactgcactccagcctgggtgacagagcgagactctgtctcaaataaataaattatttcacagaggatagcaagctccagaaggttctattacctttaaaaaagagtagttttgcccctcccagcaacctggtatgggtgccctaagaccagtctgaactcacactgtctgaaaggccacccaggatccaaatcgggccatcttcattgccatgagtgttcggacaggctctgcgtgccaggcaacagtgggcagacaaagggctccctggctactgggaagatacagaaccatcctgtgaaaatcatttcagcactggagaccttctttgctattacttctttcattaacaatgacctctaatttaaattgggccctgctggtttgttgatgaattgagcaactgagaacgtggcgggcactaaactgacagttccttccttcatggagcctgcttcatgtggaggaaacaggaaataaagcaaaagaagagggtcaggcttggtggctcatgcctataatcctggcattttaggaggctgaggttggagaatcgcttgaggccagaagtgcaagaccagcctgcgcaaacagcaagaccctgtctacaaaaaaaaaaaaaagtaatctttatgcctcagcctcccaggtagctgagactacccacaccttggtcccagctacttgggaggctgaggtgggaaaatcactttgcccaggaattcaaggccgcagtgagctatgattgcaccactgcactccaggcaacagagtgagaccctgtcttaaaaaaaagaagggagaaagtgtcagatggtgatgaggtctgggggggaaatagagaatggggatcaggagtgtggatggtggtattccctcaccaagaggtgacatgtgagcagggagctgggaggtgagggtgtgacccgtgtggaaatcagggaaaagcattccagcctgagggaacagccaatgcagaggccgtgaggtggccagtgccactgagcagtgagctgggataggggcaggtgaggaggctggagagcggggtcagacaaacaatatgcttattaaaacaagttgtacagcacctgcctcaagcctgagctgaagctgaaaattggcacttcaaagcaggaggaagcaaagagatggaggaaagccctccttccctaccagaatgagtccacctcagacagccagactttggacctctgcctttgttcctagatctctgttgctagatgaaggaaagggcctcaggggatccatcttcaaatcaagggctccctggctaccaaattctgtctagtaaaaattattcgagtatgccaggtgaaaaaaaaa

SEQ ID NO: 465299 - DNA, 6101 bp, Homo sapiens
acgatggcagcgtcagtggcagctgcagcccggaggctgcggcgggccattcgaaggtcgcccgcatggcggggcctcagccatcggccgctctcatcggagccccctgcagccaaggcctcggccgtgagggccgcctttctgaacttctttcgggaccgccatggccaccggctggtgccctccgcttccgtgcggccccgcggcgaccccagtttgctttttgtcaatgcgggcatgaaccagttcaagccaatctttctgggcaccgtggatccacgaagcgagatggcaggcttccgacgtgtggccaacagccagaaatgtgtgagagctggaggacaccataacgacctggaagatgtgggtcgagacctttcccatcataccttctttgaaatgcttggcaattgggcctttgggggtgaatattttaaggaggaggcttgtaacatggcctgggaactgctgactcaggtctatgggatccctgaggaaaggctctggatctcctactttgatggtgaccccaaggcagggctggacccagacctggagaccagggacatctggctgagcttaggggtgcctgctagccgtgtgctttcctttggaccacaagagaacttctgggagatgggggatactggcccttgtgggccctgtactgagatccactacgaccttgctggtggggtgggagccccccagctggtagagctttggaacctggtcttcatgcaacacaacagagaggcagatggaagcctgcagcccctgccccagcggcatgtggacacaggaatgggcctggaaaggctggtggctgtgctgcaaggcaaacactccacctatgacactgacctcttttccccgctgctcaacgccatacagcagggctgcagggcacccccttacttgggccgagtaggggtggcagacgaggggcgcacagacacagcgtaccgcgtggtggctgaccacatccgcacactcagtgtctgcatctctgatggcgtcttccctgggatgtcaggtcccccgctggttcttcgtcggatcctgcgtcgagctgtgcgtttctccatggagatcttaaaggcaccacctggcttcctaggcagcctggtacctgtagtggtggagacactgggagatgcttatccagaactgcaaaggaactcagcccagatcgccaacctggtgtcagaggacgaggcagccttcctggcctccctggagcggggtaggcggatcattgatcggactctgaggaccctggggccttcagatatgttccctgctgaagtggcctggtccttgtcactgtgtggagacctgggactccccttggacatggtagagctgatgctggaggagaaaggggtccagctagactccgctggactggagcggttggcccaagaggaggcccagcaccgggcacggcaggctgagccagttcagaagcagggattgtggcttgatgtccatgcgcttggggagctgcagcgccaaggagtgcccccaactgacgacagccccaagtacaactactccctgcgacccagcggaagttatgagttcggcacctgtgaggcccaggtgttgcaactgtatacagaggacgggacagcagtggcctccgtggggaaaggccagcgctgtggcctcctcttggacaggaccaacttctacgcagaacaggggggccaggcttcagaccgtggctacctggtgcgggcagggcaagaggacgtgctgttcccagtagcccgggcccaggtctgtggaggtttcatcctgcatgaggcagtagcccctgagtgcctgcggttaggggaccaggtgcagctgcatgtggatgaggcctggcgtctaggctgcatggcgaagcatacggccacccacctgctgaactgggcactgaggcagaccctgggccctggcacagagcagcagggctcccatctcaatcctgagcagctgcgcttggatgtgaccacccagaccccattgaccccagagcagctccgggcagtggagaacactgtgcaggaggccgtggggcaggatgaggctgtgtacatggaggaggtgcccctggcgctcactgcccaggtccctggcctgcgctctctggatgaggtttacccagaccctgtgcgggtggtatcagtgggggtgcccgtggcccatgcattggacccagcctcccaagccgcactgcagacctctgtggagctatgctgtgggacgcacctgttacgtactggggctgtaggggacctggttatcatcggggaccgccagctttccaagggcactacccgcctgctggccgtcactggggagcaggcccagcaggcccgagagctaggccagagcctggcccaggaagtgaaagcggccactgagcggctgagtctggggagccgggatgtggcggaggcactgaggctgtccaaggacataggacgactcattgaagctgtggaaactgctgtgatgccccagtggcagcggcgggagctgctggccacagtgaagatgctgcagcggcgtgccaacactgccatccgtaagctgcaaatgggacaggctgcaaaaaaaactcaggagctgctggagcggcactcgaaggggcctctgattgtggacacagtctctgctgagtctctctcagtgctggtgaaggtggtacggcagctgtgtgagcaggcccccagcacgtctgtgctcctactcagcccccagcccatggggaaggtgctgtgtgcctgtcaggtggcccaggtgagggaagtgggagagcagcccaccgcccccattaatacccatcctggtccagctctctgattttacacctttaattcctcccaaaggggccaaggctgggtggaagtatctatgaggatactccaggacagggatggggaatctccttgttcctgaaaacagcccctccccaccccagaaggcaccaagagattccttaattcctaacccctcccaggcctcacatcccttgtaaacaagtagcagatgttcacgttcatacacctccccacacacatttccagcccaaaccttctccggctcatcacctgactgccccaccatgtgcccagctgggaagggggcactgatgaccttcagctccactcttgagggtaccttgagtggatgctggcagggagggccactctgcatcgcttcctcttctgattctgttcctagggtgccatgcccaccttcacagcagaggcctgggcactggcagtgtgcagccacatggggggcaaggcgtggggctcgcgagtggtggcccaaggcaccggaagcactactgacctggaagctgccctcagtatagcccaaacctatgccctcagccagctctgacccaggtccgcccagggacccacatggactaaaggcaatgccaggagccctgaaggagccagcagaaccttcccacatgctgaagcgaggactagaggctggaggccaagcagctgagccaaagaagatcacctgggccagggcctacatgacacaaggagacatgggctagggaaggcagaactgggcccaaagacacacacccccttggtgaaagagaagacatggacaattatggctgtgactgcacattagaaattatttcactggccgggtgtggtggttcacacctgtaatccaagcactttgggaggccgaggcaggtagatcatgaggtcagaagatcaaaaccatcctggctaacacggtgaaaccccatctctactaaaaatacaaaaaattagccgggtgtggtggcacacacctgtagtcccagctactcgggaggctgaggcagaagaatcgcttgaacctgggaggtggaggttgcagtgggccaagatcgcaccactgcactccagcctgggtgacagagcgagactctgtctcaaataaataaattatttcacagaggatagcaagctccagaaggttctattacctttaaaaaagagtagttttgcccctcccagcaacctggtatgggtgccctaagaccagtctgaactcacactgtctgaaaggccacccaggatccaaatcgggccatcttcattgccatgagtgttcggacaggctctgcgtgccaggcaacagtgggcagacaaagggctccctggctactgggaagatacagaaccatcctgtgaaaatcatttcagcactggagaccttctttgctattacttctttcattaacaatgacctctaatttaaattgggccctgctggtttgttgatgaattgagcaactgagaacgtggcgggcactaaactgacagttccttccttcatggagcctgcttcatgtggaggaaacaggaaataaagcaaaagaagagggtcaggcttggtggctcatgcctataatcctggcattttaggaggctgaggttggagaatcgcttgaggccagaagtgcaagaccagcctgcgcaaacagcaagaccctgtctacaaaaaaaaaaaaaagtaatctttatgcctcagcctcccaggtagctgagactacccacaccttggtcccagctacttgggaggctgaggtgggaaaatcactttgcccaggaattcaaggccgcagtgagctatgattgcaccactgcactccaggcaacagagtgagaccctgtcttaaaaaaaagaagggagaaagtgtcagatggtgatgaggtctgggggggaaatagagaatggggatcaggagtgtggatggtggtattccctcaccaagaggtgacatgtgagcagggagctgggaggtgagggtgtgacccgtgtggaaatcagggaaaagcattccagcctgagggaacagccaatgcagaggccgtgaggtggccagtgccactgagcagtgagctgggataggggcaggtgaggaggctggagagcggggtcagacaaacaatatgcttattaaaacaagttgtacagcacctgcctcaagcctgagctgaagctgaaaattggcacttcaaagcaggaggaagcaaagagatggaggaaagccctccttccctaccagaatgagtccacctcagacagccagactttggacctctgcctttgttcctagatctctgttgctagatgaaggaaagggcctcaggggatccatcttcaaatcaagggctccctggctaccaaattctgtctagtaaaaattattcgagcagcgtgggcccgcctggcatcattttctgcagtttctcattctaattaaggcactgatgatttgctggtaaggcactgctgagggcttgaagggacccaatcccgggtgcctggcccctcactgcttgcaaagcagcatcctggccactggggcagtagcctgtttagcagtgctcaccacaggcccaggttcaagctcctctgcgagcgccaagatgagttttggcacccctgatttattgatgagttaacagagcttcgagatgttcatccagggtaaccaactagtagtcctcggcagagctgaagtcaaagctaccctttgaaagccccgccaccctggctgcctctcccttcctgaaggccaatttctttttttttactagccgtccctctggtctgtccctctcgccctccaggagatctggggccccaaccacatcttgtcgcgccagggctggaagagagtttggcacagggcatggactgtgtgaaggagcgctgtgttggcctggaaccttcctgcgtctggtaccagaccttcagctgggggaaaggtggaaggtgccctccctcccgcagggcctaaggtcaacaggaggcctcacgggagttccagtgacttctacaggtgccttggagaaggtgcgtccaccctcctcttcttccacagacgcttttcctggaccagctccctatccattgccacacaaaagctaccaagagagcacaagcactccagaccagcagccctgcccgacccccgcctcccgcagaaagcccacccgttcctagacacgtcccacggaagcacagggcatagcgcaaggccacagtcccactacccgcaaagcggccgc

SEQ ID NO: 465300 - DNA, 4579 bp, Homo sapiens
acgatggcagcgtcagtggcagctgcagcccggaggctgcggcgggccattcgaaggtcgcccgcatggcggggcctcagccatcggccgctctcatcggagccccctgcagccaaggcctcggccgtgagggccgcctttctgaacttctttcgggaccgccatggccaccggctggtgccctccgcttccgtgcggccccgcggcgaccccagtttgctttttgtcaatgcgggcatgaaccagttcaagccaatctttctgggcaccgtggatccacgaagcgagatggcaggcttccgacgtgtggccaacagccagaaatgtgtgagagctggaggacaccataacgacctggaagatgtgggtcgagacctttcccatcataccttctttgaaatgcttggcaattgggcctttgggggtgaatattttaaggaggaggcttgtaacatggcctgggaactgctgactcaggtctatgggatccctgaggaaaggctctggatctcctactttgatggtgaccccaaggcagggctggacccagacctggagaccagggacatctggctgagcttaggggtgcctgctagccgtgtgctttcctttggaccacaagagaacttctgggagatgggggatactggcccttgtgggccctgtactgagatccactacgaccttgctggtggggtgggagccccccagctggtagagctttggaacctggtcttcatgcaacacaacagagaggcagatggaagcctgcagcccctgccccagcggcatgtggacacaggaatgggcctggaaaggctggtggctgtgctgcaaggcaaacactccacctatgacactgacctcttttccccgctgctcaacgccatacagcagggctgcagggcacccccttacttgggccgagtaggggtggcagacgaggggcgcacagacacagcgtaccgcgtggtggctgaccacatccgcacactcagtgtctgcatctctgatggcgtcttccctgggatgtcaggtcccccgctggttcttcgtcggatcctgcgtcgagctgtgcgtttctccatggagatcttaaaggcaccacctggcttcctaggcagcctggtacctgtagtggtggagacactgggagatgcttatccagaactgcaaaggaactcagcccagatcgccaacctggtgtcagaggacgaggcagccttcctggcctccctggagcggggtaggcggatcattgatcggactctgaggaccctggggccttcagatatgttccctgctgaagtggcctggtccttgtcactgtgtggagacctgggactccccttggacatggtagagctgatgctggaggagaaaggggtccagctagactccgctggactggagcggcactcgaaggggcctctgattgtggacacagtctctgctgagtctctctcaggctgtggaaactgctgtgatgccccagtggcagcggcgggagctgctggccacagtgaagatgctgcagcggcgtgccaacactgccatccgtaagctgcaaatgggacaggctgcaaaaaaaactcaggagctgctggagcggcactcgaaggggcctctgattgtgtgagcaggcccccagcacgtctgtgctcctactcagcccccagcccatggggaaggtgctgtgtgcctgtcaggtggcccagggtgccatgcccaccttcacagcagaggcctgggcactggcagtgtgcagccacatggggggcaaggcgtggggctcgcgagtggtggcccaaggcaccggaagcactactgacctggaagctgccctcagtatagcccaaacctatgccctcagccagctctgacccaggtccgcccagggacccacatggactaaaggcaatgccaggagccctgaaggagccagcagaaccttcccacatgctgaagcgaggactagaggctggaggccaagcagctgagccaaagaagatcacctgggccagggcctacatgacacaaggagacatgggctagggaaggcagaactgggcccaaagacacacacccccttggtgaaagagaagacatggacaattatggctgtgactgcacattagaaattatttcactggccgggtgtggtggttcacacctgtaatccaagcactttgggaggccgaggcaggtagatcatgaggtcagaagatcaaaaccatcctggctaacacggtgaaaccccatctctactaaaaatacaaaaaattagccgggtgtggtggcacacacctgtagtcccagctactcgggaggctgaggcagaagaatcgcttgaacctgggaggtggaggttgcagtgggccaagatcgcaccactgcactccagcctgggtgacagagcgagactctgtctcaaataaataaattatttcacagaggatagcaagctccagaaggttctattacctttaaaaaagagtagttttgcccctcccagcaacctggtatgggtgccctaagaccagtctgaactcacactgtctgaaaggccacccaggatccaaatcgggccatcttcattgccatgagtgttcggacaggctctgcgtgccaggcaacagtgggcagacaaagggctccctggctactgggaagatacagaaccatcctgtgaaaatcatttcagcactggagaccttctttgctattacttctttcattaacaatgacctctaatttaaattgggccctgctggtttgttgatgaattgagcaactgagaacgtggcgggcactaaactgacagttccttccttcatggagcctgcttcatgtggaggaaacaggaaataaagcaaaagaagagggtcaggcttggtggctcatgcctataatcctggcattttaggaggctgaggttggagaatcgcttgaggccagaagtgcaagaccagcctgcgcaaacagcaagaccctgtctacaaaaaaaaaaaaaagtaatctttatgcctcagcctcccaggtagctgagactacccacaccttggtcccagctacttgggaggctgaggtgggaaaatcactttgcccaggaattcaaggccgcagtgagctatgattgcaccactgcactccaggcaacagagtgagaccctgtcttaaaaaaaagaagggagaaagtgtcagatggtgatgaggtctgggggggaaatagagaatggggatcaggagtgtggatggtggtattccctcaccaagaggtgacatgtgagcagggagctgggaggtgagggtgtgacccgtgtggaaatcagggaaaagcattccagcctgagggaacagccaatgcagaggccgtgaggtggccagtgccactgagcagtgagctgggataggggcaggtgaggaggctggagagcggggtcagacaaacaatatgcttattaaaacaagttgtacagcacctgcctcaagcctgagctgaagctgaaaattggcacttcaaagcaggaggaagcaaagagatggaggaaagccctccttccctaccagaatgagtccacctcagacagccagactttggacctctgcctttgttcctagatctctgttgctagatgaaggaaagggcctcaggggatccatcttcaaatcaagggctccctggctaccaaattctgtctagtaaaaattattcgagcagcgtgggcccgcctggcatcattttctgcagtttctcattctaattaaggcactgatgatttgctggtaaggcactgctgagggcttgaagggacccaatcccgggtgcctggcccctcactgcttgcaaagcagcatcctggccactggggcagtagcctgtttagcagtgctcaccacaggcccaggttcaagctcctctgcgagcgccaagatgagttttggcacccctgatttattgatgagttaacagagcttcgagatgttcatccagggtaaccaactagtagtcctcggcagagctgaagtcaaagctaccctttgaaagccccgccaccctggctgcctctcccttcctgaaggccaatttctttttttttactagccgtccctctggtctgtccctctcgccctccaggagatctggggccccaaccacatcttgtcgcgccagggctggaagagagtttggcacagggcatggactgtgtgaaggagcgctgtgttggcctggaaccttcctgcgtctggtaccagaccttcagctgggggaaaggtggaaggtgccctccctcccgcagggcctaaggtcaacaggaggcctcacgggagttccagtgacttctacaggtgccttggagaaggtgcgtccaccctcctcttcttccacagacgcttttcctggaccagctccctatccattgccacacaaaagctaccaagagagcacaagcactccagaccagcagccctgcccgacccccgcctcccgcagaaagcccacccgttcctagacacgtcccacggaagcacagggcatagcgcaaggccacagtcccactacccgcaaagcggccgc

SEQ ID NO: 465301 - DNA, 3916 bp, Homo sapiens
tgggagatgcacgctggcttctcccttctctactgtcatgccccgactttctgttcactccttcctcccacaggcacctgttacgtactggggctgtaggggacctggttatcatcggggaccgccagctttccaagggcactacccgcctgctggccgtcactggggagcaggcccagcaggcccgagagctaggccagagcctggcccaggaagtgaaagcggccactgagcggctgagtctggggagccgggatgtggcggaggcactgaggctgtccaaggacataggacgactcattgaagctgtggaaactgctgtgatgccccagtggcagcggcgggagctgctggccacagtgaagatgctgcagcggcgtgccaacactgccatccgtaagctgcaaatgggacaggctgcaaaaaaaactcaggagctgctggagcggcactcgaaggggcctctgattgtggacacagtctctgctgagtctctctcagtgctggtgaaggtggtacggcagctgtgtgagcaggcccccagcacgtctgtgctcctactcagcccccagcccatggggaaggtgctgtgtgcctgtcaggtggcccaggtgagggaagtgggagagcagcccaccgcccccattaatacccatcctggtccagctctctgattttacacctttaattcctcccaaaggggccaaggctgggtggaagtatctatgaggatactccaggacagggatggggaatctccttgttcctgaaaacagcccctccccaccccagaaggcaccaagagattccttaattcctaacccctcccaggcctcacatcccttgtaaacaagtagcagatgttcacgttcatacacctccccacacacatttccagcccaaaccttctccggctcatcacctgactgccccaccatgtgcccagctgggaagggggcactgatgaccttcagctccactcttgagggtaccttgagtggatgctggcagggagggccactctgcatcgcttcctcttctgattctgttcctagggtgccatgcccaccttcacagcagaggcctgggcactggcagtgtgcagccacatggggggcaaggcgtggggctcgcgagtggtggcccaaggcaccggaagcactactgacctggaagctgccctcagtatagcccaaacctatgccctcagccagctctgacccaggtccgcccagggacccacatggactaaaggcaatgccaggagccctgaaggagccagcagaaccttcccacatgctgaagcgaggactagaggctggaggccaagcagctgagccaaagaagatcacctgggccagggcctacatgacacaaggagacatgggctagggaaggcagaactgggcccaaagacacacacccccttggtgaaagagaagacatggacaattatggctgtgactgcacattagaaattatttcactggccgggtgtggtggttcacacctgtaatccaagcactttgggaggccgaggcaggtagatcatgaggtcagaagatcaaaaccatcctggctaacacggtgaaaccccatctctactaaaaatacaaaaaattagccgggtgtggtggcacacacctgtagtcccagctactcgggaggctgaggcagaagaatcgcttgaacctgggaggtggaggttgcagtgggccaagatcgcaccactgcactccagcctgggtgacagagcgagactctgtctcaaataaataaattatttcacagaggatagcaagctccagaaggttctattacctttaaaaaagagtagttttgcccctcccagcaacctggtatgggtgccctaagaccagtctgaactcacactgtctgaaaggccacccaggatccaaatcgggccatcttcattgccatgagtgttcggacaggctctgcgtgccaggcaacagtgggcagacaaagggctccctggctactgggaagatacagaaccatcctgtgaaaatcatttcagcactggagaccttctttgctattacttctttcattaacaatgacctctaatttaaattgggccctgctggtttgttgatgaattgagcaactgagaacgtggcgggcactaaactgacagttccttccttcatggagcctgcttcatgtggaggaaacaggaaataaagcaaaagaagagggtcaggcttggtggctcatgcctataatcctggcattttaggaggctgaggttggagaatcgcttgaggccagaagtgcaagaccagcctgcgcaaacagcaagaccctgtctacaaaaaaaaaaaaaagtaatctttatgcctcagcctcccaggtagctgagactacccacaccttggtcccagctacttgggaggctgaggtgggaaaatcactttgcccaggaattcaaggccgcagtgagctatgattgcaccactgcactccaggcaacagagtgagaccctgtcttaaaaaaaagaagggagaaagtgtcagatggtgatgaggtctgggggggaaatagagaatggggatcaggagtgtggatggtggtattccctcaccaagaggtgacatgtgagcagggagctgggaggtgagggtgtgacccgtgtggaaatcagggaaaagcattccagcctgagggaacagccaatgcagaggccgtgaggtggccagtgccactgagcagtgagctgggataggggcaggtgaggaggctggagagcggggtcagacaaacaatatgcttattaaaacaagttgtacagcacctgcctcaagcctgagctgaagctgaaaattggcacttcaaagcaggaggaagcaaagagatggaggaaagccctccttccctaccagaatgagtccacctcagacagccagactttggacctctgcctttgttcctagatctctgttgctagatgaaggaaagggcctcaggggatccatcttcaaatcaagggctccctggctaccaaattctgtctagtaaaaattattcgagcagcgtgggcccgcctggcatcattttctgcagtttctcattctaattaaggcactgatgatttgctggtaaggcactgctgagggcttgaagggacccaatcccgggtgcctggcccctcactgcttgcaaagcagcatcctggccactggggcagtagcctgtttagcagtgctcaccacaggcccaggttcaagctcctctgcgagcgccaagatgagttttggcacccctgatttattgatgagttaacagagcttcgagatgttcatccagggtaaccaactagtagtcctcggcagagctgaagtcaaagctaccctttgaaagccccgccaccctggctgcctctcccttcctgaaggccaatttctttttttttactagccgtccctctggtctgtccctctcgccctccaggagatctggggccccaaccacatcttgtcgcgccagggctggaagagagtttggcacagggcatggactgtgtgaaggagcgctgtgttggcctggaaccttcctgcgtctggtaccagaccttcagctgggggaaaggtggaaggtgccctccctcccgcagggcctaaggtcaacaggaggcctcacgggagttccagtgacttctacaggtgccttggagaaggtgcgtccaccctcctcttcttccacagacgcttttcctggaccagctccctatccattgccacacaaaagctaccaagagagcacaagcactccagaccagcagccctgcccgacccccgcctcccgcagaaagcccacccgttcctagacacgtcccacggaagcacagggcatagcgcaaggccacagtcccactacccgcaaagcggccgc

SEQ ID NO: 465302 - DNA, 1654 bp, Homo sapiens
tcgtgatccgcccgcctaggccttccaaagtgctgggattacaggcgtcagccaccgtgcccagctgaatttcacaaaaaaaaaaaaaagtaatctttatgcctcagcctcccaggtagctgagactacccacaccttggtcccagctacttgggaggctgaggtgggaaaatcactttgcccaggaattcaaggccgcagtgagctatgattgcaccactgcactccaggcaacagagtgagaccctgtcttaaaaaaaagaagggagaaagtgtcagatggtgatgaggtctgggggggaaatagagaatggggatcaggagtgtggatggtggtattccctcaccaagaggtgacatgtgagcagggagctgggaggtgagggtgtgacccgtgtggaaatcagggaaaagcattccagcctgagggaacagccaatgcagaggccgtgaggtggccagtgccactgagcagtgagctgggataggggcaggtgaggaggctggagagcggggtcagacaaacaatatgcttattaaaacaagttgtacagcacctgcctcaagcctgagctgaagctgaaaattggcacttcaaagcaggaggaagcaaagagatggaggaaagccctccttccctaccagaatgagtccacctcagacagccagactttggacctctgcctttgttcctagatctctgttgctagatgaaggaaagggcctcaggggatccatcttcaaatcaagggctccctggctaccaaattctgtctagtaaaaattattcgagcagcgtgggcccgcctggcatcattttctgcagtttctcattctaattaaggcactgatgatttgctggtaaggcactgctgagggcttgaagggacccaatcccgggtgcctggcccctcactgcttgcaaagcagcatcctggccactggggcagtagcctgtttagcagtgctcaccacaggcccaggttcaagctcctctgcgagcgccaagatgagttttggcacccctgatttattgatgagttaacagagcttcgagatgttcatccagggtaaccaactagtagtcctcggcagagctgaagtcaaagctaccctttgaaagccccgccaccctggctgcctctcccttcctgaaggccaatttctttttttttactagccgtccctctggtctgtccctctcgccctccaggagatctggggccccaaccacatcttgtcgcgccagggctggaagagagtttggcacagggcatggactgtgtgaaggagcgctgtgttggcctggaaccttcctgcgtctggtaccagaccttcagctgggggaaaggtggaaggtgccctccctcccgcagggcctaaggtcaacaggaggcctcacgggagttccagtgacttctacaggtgccttggagaaggtgcgtccaccctcctcttcttccacagacgcttttcctggaccagctccctatccattgccacacaaaagctaccaagagagcacaagcactccagaccagcagccctgcccgacccccgcctcccgcagaaagcccacccgttcctagacacgtcccacggaagcacagggcatagcgcaaggccacagtcccactacccgcaaagcggccgc

SEQ ID NO: 465303 - DNA, 1880 bp, Homo sapiens
acgatggcagcgtcagtggcagctgcagcccggaggctgcggcgggccattcgaaggtcgcccgcatggcggggcctcagccatcggccgctctcatcggagccccctgcagccaaggcctcggccgtgagggccgcctttctgaacttctttcgggaccgccatggccaccggctggtgccctccgcttccgtgcggccccgcggcgaccccagtttgctttttgtcaatgcgggcatgaaccagttcaagccaatctttctgggcaccgtggatccacgaagcgagatggcaggcttccgacgtgtggccaacagccagaaatgtgtgagagctggaggacaccataacgacctggaagatgtgggtcgagacctttcccatcataccttctttgaaatgcttggcaattgggcctttgggggtgaatattttaaggaggaggcttgtaacatggcctgggaactgctgactcaggtctatgggatccctgaggaaaggctctggatctcctactttgatggtgaccccaaggcagggctggacccagacctggagaccagggacatctggctgagcttaggggtgcctgctagccgtgtgctttcctttggaccacaagagaacttctgggagatgggggatactggcccttgtgggccctgtactgagatccactacgaccttgctggtggggtgggagccccccagctggtagagctttggaacctggtcttcatgcaacacaacagagaggcagatggaagcctgcagcccctgccccagcggcatgtggacacaggaatgggcctggaaaggctggtggctgtgctgcaaggcaaacactccacctatgacactgacctcttttccccgctgctcaacgccatacagcagggctgcagggcacccccttacttgggccgagtaggggtggcagacgaggggcgcacagacacagcgtaccgcgtggtggctgaccacatccgcacactcagtgtctgcatctctgatggcgtcttccctgggatgtcaggtcccccgctggttcttcgtcggatcctgcgtcgagctgtgcgtttctccatggagatcttaaaggcaccacctggcttcctaggcagcctggtacctgtagtggtggagacactgggagatgcttatccagaactgcaaaggaactcagcccagatcgccaacctggtgtcagaggacgaggcagccttcctggcctccctggagcggggtaggcggatcattgatcggactctgaggaccctggggccttcagatatgttccctgctgaagtggcctggtccttgtcactgtgtggagacctgggactccccttggacatggtagagctgatgctggaggagaaaggggtccagctagactccgctggactggagcggttggcccaagaggaggcccagcaccgggcacggcaggctgagccagttcagaagcagggattgtggcttgatgtccatgcgcttggggagctgcagcgccaaggagtgcccccaactgacgacagccccaagtacaactactccctgcgacccagcggaagttatgagttcggcacctgtgaggcccaggtgttgcaactgtatacagaggacgggacagcagtggcctccgtggggaaaggccagcgctgtggcctcctcttggacaggaccaacttctacgcagaacaggggggccaggcttcagaccgtggctaccctccctcttccactctttcccattcactgactgcagggatgggtgccctgtccttccctggggctcatgtcttggggcctgattcccctgtctcaaggaaagggcagaaacagcaccgtgaggttcgtcaccaccccaaatactt

SEQ ID NO: 465304 - DNA, 5291 bp, Homo sapiens
  misc_feature (5290)..(5290): n is a, c, g, or t
acgatggcagcgtcagtggcagctgcagcccggaggctgcggcgggccattcgaaggtcgcccgcatggcggggcctcagccatcggccgctctcatcggagccccctgcagccaaggcctcggccgtgagggccgcctttctgaacttctttcgggaccgccatggccaccggctggtgccctccgcttccgtgcggccccgcggcgaccccagtttgctttttgtcaatgcgggcatgaaccagttcaagccaatctttctgggcaccgtggatccacgaagcgagatggcaggcttccgacgtgtggccaacagccagaaatgtgtgagagctggaggacaccataacgacctggaagatgtgggtcgagacctttcccatcataccttctttgaaatgcttggcaattgggcctttgggggtgaatattttaaggaggaggcttgtaacatggcctgggaactgctgactcaggtctatgggatccctgaggaaaggctctggatctcctactttgatggtgaccccaaggcagggctggacccagacctggagaccagggacatctggctgagcttaggggtgcctgctagccgtgtgctttcctttggaccacaagagaacttctgggagatgggggatactggcccttgtgggccctgtactgagatccactacgaccttgctggtggggtgggagccccccagctggtagagctttggaacctggtcttcatgcaacacaacagagaggcagatggaagcctgcagcccctgccccagcggcatgtggacacaggaatgggcctggaaaggctggtggctgtgctgcaaggcaaacactccacctatgacactgacctcttttccccgctgctcaacgccatacagcagggctgcagggcacccccttacttgggccgagtaggggtggcagacgaggggcgcacagacacagcgtaccgcgtggtggctgaccacatccgcacactcagtgtctgcatctctgatggcgtcttccctgggatgtcaggtcccccgctggttcttcgtcggatcctgcgtcgagctgtgcgtttctccatggagatcttaaaggcaccacctggcttcctaggcagcctggtacctgtagtggtggagacactgggagatgcttatccagaactgcaaaggaactcagcccagatcgccaacctggtgtcagaggacgaggcagccttcctggcctccctggagcggggtaggcggatcattgatcggactctgaggaccctggggccttcagatatgttccctgctgaagtggcctggtccttgtcactgtgtggagacctgggactccccttggacatggtagagctgatgctggaggagaaaggggtccagctagactccgctggactggagcggttggcccaagaggaggcccagcaccgggcacggcaggctgagccagttcagaagcagggattgtggcttgatgtccatgcgcttggggagctgcagcgccaaggagtgcccccaactgacgacagccccaagtacaactactccctgcgacccagcggaagttatgagttcggcacctgtgaggcccaggtgttgcaactgtatacagaggacgggacagcagtggcctccgtggggaaaggccagcgctgtggcctcctcttggacaggaccaacttctacgcagaacaggggggccaggcttcagaccgtggctacctggtgcgggcagggcaagaggacgtgctgttcccagtagcccgggcccaggtctgtggaggtttcatcctgcatgaggcagtagcccctgagtgcctgcggttaggggaccaggtgcagctgcatgtggatgaggcctggcgtctaggctgcatggcgaagcatacggccacccacctgctgaactgggcactgaggcagaccctgggccctggcacagagcagcagggctcccatctcaatcctgagcagctgcgcttggatgtgaccacccagaccccattgaccccagagcagctccgggcagtggagaacactgtgcaggaggccgtggggcaggatgaggctgtgtacatggaggaggtgcccctggcgctcactgcccaggtccctggcctgcgctctctggatgaggtttacccagaccctgtgcgggtggtatcagtgggggtgcccgtggcccatgcattggacccagcctcccaagccgcactgcagacctctgtggagctatgctgtgggacgcacctgttacgtactggggctgtaggggacctggttatcatcggggaccgccagctttccaagggcactacccgcctgctggccgtcactggggagcaggcccagcaggcccgagagctaggccagagcctggcccaggaagtgaaagcggccactgagcggctgagtctggggagccgggatgtggcggaggcactgaggctgtccaaggacataggacgactcattgaagctgtggaaactgctgtgatgccccagtggcagcggcgggagctgctggccacagtgaagatgctgcagcggcgtgccaacactgccatccgtaagctgcaaatgggacaggctgcaaaaaaaactcaggagctgctggagcggcactcgaaggggcctctgattgtggacacagtctctgctgagtctctctcagtgctggtgaaggtggtacggcagctgtgtgagcaggcccccagcacgtctgtgctcctactcagcccccagcccatggggaaggtgctgtgtgcctgtcaggtggcccagggtgccatgcccaccttcacagcagaggcctgggcactggcagtgtgcagccacatggggggcaaggcgtggggctcgcgagtggtggcccaaggcaccggaagcactactgacctggaagctgccctcagtatagcccaaacctatgccctcagccagctctgacccaggtccgcccagggacccacatggactaaaggcaatgccaggagccctgaaggagccagcagaaccttcccacatgctgaagcgaggactagaggctggaggccaagcagctgagccaaagaagatcacctgggccagggcctacatgacacaaggagacatgggctagggaaggcagaactgggcccaaagacacacacccccttggtgaaagagaagacatggacaattatggctgtgactgcacattagaaattatttcactggccgggtgtggtggttcacacctgtaatccaagcactttgggaggccgaggcaggtagatcatgaggtcagaagatcaaaaccatcctggctaacacggtgaaaccccatctctactaaaaatacaaaaaattagccgggtgtggtggcacacacctgtagtcccagctactcgggaggctgaggcagaagaatcgcttgaacctgggaggtggaggttgcagtgggccaagatcgcaccactgcactccagcctgggtgacagagcgagactctgtctcaaataaataaattatttcacagaggatagcaagctccagaaggttctattacctttaaaaaagagtagttttgcccctcccagcaacctggtatgggtgccctaagaccagtctgaactcacactgtctgaaaggccacccaggatccaaatcgggccatcttcattgccatgagtgttcggacaggctctgcgtgccaggcaacagtgggcagacaaagggctccctggctactgggaagatacagaaccatcctgtgaaaatcatttcagcactggagaccttctttgctattacttctttcattaacaatgacctctaatttaaattgggccctgctggtttgttgatgaattgagcaactgagaacgtggcgggcactaaactgacagttccttccttcatggagcctgcttcatgtggaggaaacaggaaataaagcaaaagaagagggtcaggcttggtggctcatgcctataatcctggcattttaggaggctgaggttggagaatcgcttgaggccagaagtgcaagaccagcctgcgcaaacagcaagaccctgtctacaaaaaaaaaaaaaagtaatctttatgcctcagcctcccaggtagctgagactacccacaccttggtcccagctacttgggaggctgaggtgggaaaatcactttgcccaggaattcaaggccgcagtgagctatgattgcaccactgcactccaggcaacagagtgagaccctgtcttaaaaaaaagaagggagaaagtgtcagatggtgatgaggtctgggggggaaatagagaatggggatcaggagtgtggatggtggtattccctcaccaagaggtgacatgtgagcagggagctgggaggtgagggtgtgacccgtgtggaaatcagggaaaagcattccagcctgagggaacagccaatgcagaggccgtgaggtggccagtgccactgagcagtgagctgggataggggcaggtgaggaggctggagagcggggtcagacaaacaatatgcttattaaaacaagttgtacagcacctgcctcaagcctgagctgaagctgaaaattggcacttcaaagcaggaggaagcaaagagatggaggaaagccctccttccctaccagaatgagtccacctcagacagccagactttggacctctgcctttgttcctagatctctgttgctagatgaaggaaagggcctcaggggatccatcttcaaatcaagggctccctggctaccaaattctgtctagtaaaaattattcgagaaaaaaaaaaaaaaaaaaaaaaaaaaaaaaaaaaaaaaaaaaaaaaaaaaaaaaagaggggggggagcgcgaaaacgagttcccctggggggcgccaagtctaacggcgaaccccggttttagggcacaaggggggcccaataaggggcgcgctaataacaagacaagcacaggggcccgcacataaacaagcgaggagacggggaaaacagggcaccagaggaaactttggataaagaccactacacacggaggtggtgaccacattattggggaaaaaactttcataaaggaagaattatgaggcccctatgagagggtaatcatttcgacaacatcttcgagaagggtgtaataacgggtagttcaaacaacgagagcgaatactatgcgctatgacatgtacagaaaaagactttgtcgcaagatcgaggaaagtacgatatattacgaaacaattatttataaccgggggacataggcgaacaaaacgng

SEQ ID NO: 465305 - DNA, 4711 bp, Homo sapiens
ccggtgttaatcggcacaggcgcgtggtggctgaccacatccgcacactcagtgtctgcatctctgatggcgtcttccctgggatgtcaggtcccccgctggttcttcgtcggatcctgcgtcgagctgtgcgtttctccatggagatcttaaaggcaccacctggcttcctaggcagcctggtacctgtagtggtggagacactgggagatgcttatccagaactgcaaaggaactcagcccagatcgccaacctggtgtcagaggacgaggcagccttcctggcctccctggagcggggtaggcggatcattgatcggactctgaggaccctggggccttcagatatgttccctgctgaagtggcctggtccttgtcactgtgtggagacctgggactccccttggacatggtagagctgatgctggaggagaaaggggtccagctagactccgctggactggagcggttggcccaagaggaggcccagcaccgggcacggcaggctgagccagttcagaagcagggattgtggcttgatgtccatgcgcttggggagctgcagcgccaaggagtgcccccaactgacgacagccccaagtacaactactccctgcgacccagcggaagttatgagttcggcacctgtgaggcccaggtgttgcaactgtatacagaggacgggacagcagtggcctccgtggggaaaggccagcgctgtggcctcctcttggacaggaccaacttctacgcagaacaggggggccaggcttcagaccgtggctacctggtgcgggcagggcaagaggacgtgctgttcccagtagcccgggcccaggtctgtggaggtttcatcctgcatgaggcagtagcccctgagtgcctgcggttaggggaccaggtgcagctgcatgtggatgaggcctggcgtctaggctgcatggcgaagcatacggccacccacctgctgaactgggcactgaggcagaccctgggccctggcacagagcagcagggctcccatctcaatcctgagcagctgcgcttggatgtgaccacccagaccccattgaccccagagcagctccgggcagtggagaacactgtgcaggaggccgtggggcaggatgaggctgtgtacatggaggaggtgcccctggcgctcactgcccaggtccctggcctgcgctctctggatgaggtttacccagaccctgtgcgggtggtatcagtgggggtgcccgtggcccatgcattggacccagcctcccaagccgcactgcagacctctgtggagctatgctgtgggacgcacctgttacgtactggggctgtaggggacctggttatcatcggggaccgccagctttccaagggcactacccgcctgctggccgtcactggggagcaggcccagcaggcccgagagctaggccagagcctggcccaggaagtgaaagcggccactgagcggctgagtctggggagccgggatgtggcggaggcactgaggctgtccaaggacataggacgactcattgaagctgtggaaactgctgtgatgccccagtggcagcggcgggagctgctggccacagtgaagatgctgcagcggcgtgccaacactgccatccgtaagctgcaaatgggacaggctgcaaaaaaaactcaggagctgctggagcggcactcgaaggggcctctgattgtggacacagtctctgctgagtctctctcagtgctggtgaaggtggtacggcagctgtgtgagcaggcccccagcacgtctgtgctcctactcagcccccagcccatggggaaggtgctgtgtgcctgtcaggtggcccagggtgccatgcccaccttcacagcagaggcctgggcactggcagtgtgcagccacatggggggcaaggcgtggggctcgcgagtggtggcccaaggcaccggaagcactactgacctggaagctgccctcagtatagcccaaacctatgccctcagccagctctgacccaggtccgcccagggacccacatggactaaaggcaatgccaggagccctgaaggagccagcagaaccttcccacatgctgaagcgaggactagaggctggaggccaagcagctgagccaaagaagatcacctgggccagggcctacatgacacaaggagacatgggctagggaaggcagaactgggcccaaagacacacacccccttggtgaaagagaagacatggacaattatggctgtgactgcacattagaaattatttcactggccgggtgtggtggttcacacctgtaatccaagcactttgggaggccgaggcaggtagatcatgaggtcagaagatcaaaaccatcctggctaacacggtgaaaccccatctctactaaaaatacaaaaaattagccgggtgtggtggcacacacctgtagtcccagctactcgggaggctgaggcagaagaatcgcttgaacctgggaggtggaggttgcagtgggccaagatcgcaccactgcactccagcctgggtgacagagcgagactctgtctcaaataaataaattatttcacagaggatagcaagctccagaaggttctattacctttaaaaaagagtagttttgcccctcccagcaacctggtatgggtgccctaagaccagtctgaactcacactgtctgaaaggccacccaggatccaaatcgggccatcttcattgccatgagtgttcggacaggctctgcgtgccaggcaacagtgggcagacaaagggctccctggctactgggaagatacagaaccatcctgtgaaaatcatttcagcactggagaccttctttgctattacttctttcattaacaatgacctctaatttaaattgggccctgctggtttgttgatgaattgagcaactgagaacgtggcgggcactaaactgacagttccttccttcatggagcctgcttcatgtggaggaaacaggaaataaagcaaaagaagagggtcaggcttggtggctcatgcctataatcctggcattttaggaggctgaggttggagaatcgcttgaggccagaagtgcaagaccagcctgcgcaaacagcaagaccctgtctacaaaaaaaaaaaaaagtaatctttatgcctcagcctcccaggtagctgagactacccacaccttggtcccagctacttgggaggctgaggtgggaaaatcactttgcccaggaattcaaggccgcagtgagctatgattgcaccactgcactccaggcaacagagtgagaccctgtcttaaaaaaaagaagggagaaagtgtcagatggtgatgaggtctgggggggaaatagagaatggggatcaggagtgtggatggtggtattccctcaccaagaggtgacatgtgagcagggagctgggaggtgagggtgtgacccgtgtggaaatcagggaaaagcattccagcctgagggaacagccaatgcagaggccgtgaggtggccagtgccactgagcagtgagctgggataggggcaggtgaggaggctggagagcggggtcagacaaacaatatgcttattaaaacaagttgtacagcacctgcctcaagcctgagctgaagctgaaaattggcacttcaaagcaggaggaagcaaagagatggaggaaagccctccttccctaccagaatgagtccacctcagacagccagactttggacctctgcctttgttcctagatctctgttgctagatgaaggaaagggcctcaggggatccatcttcaaatcaagggctccctggctaccaaattctgtctagtaaaaattattcgagcagcgtgggcccgcctggcatcattttctgcagtttctcattctaattaaggcactgatgatttgctggtaaggcactgctgagggcttgaagggacccaatcccgggtgcctggcccctcactgcttgcaaagcagcatcctggccactggggcagtagcctgtttagcagtgctcaccacaggcccaggttcaagctcctctgcgagcgccaagatgagttttggcacccctgatttattgatgagttaacagagcttcgagatgttcatccagggtaaccaactagtagtcctcggcagagctgaagtcaaagctaccctttgaaagccccgccaccctggctgcctctcccttcctgaaggccaatttctttttttttactagccgtccctctggtctgtccctctcgccctccaggagatctggggccccaaccacatcttgtcgcgccagggctggaagagagtttggcacagggcatggactgtgtgaaggagcgctgtgttggcctggaaccttcctgcgtctggtaccagaccttcagctgggggaaaggtggaaggtgccctccctcccgcagggcctaaggtcaacaggaggcctcacgggagttccagtgacttctacaggtgccttggagaaggtgcgtccaccctcctcttcttccacagacgcttttcctggaccagctccctatccattgccacacaaaagctaccaagagagcacaagcactccagaccagcagccctgcccgacccccgcctcccgcagaaagcccacccgttcctagacacgtcccacggaagcacagggcatagcgcaaggccacagtcccactacccgcaaagcggccgc

SEQ ID NO: 465306 - DNA, 3472 bp, Homo sapiens
tgggagatgcacgctggcttctcccttctctactgtcatgccccgactttctgttcactccttcctcccacaggcacctgttacgtactggggctgtaggggacctggttatcatcggggaccgccagctttccaagggcactacccgcctgctggccgtcactggggagcaggcccagcaggcccgagagctaggccagagcctggcccaggaagtgaaagcggccactgagcggctgagtctggggagccgggatgtggcggaggcactgaggctgtccaaggacataggacgactcattgaagctgtggaaactgctgtgatgccccagtggcagcggcgggagctgctggccacagtgaagatgctgcagcggcgtgccaacactgccatccgtaagctgcaaatgggacaggctgcaaaaaaaactcaggagctgctggagcggcactcgaaggggcctctgattgtggacacagtctctgctgagtctctctcagtgctggtgaaggtggtacggcagctgtgtgagcaggcccccagcacgtctgtgctcctactcagcccccagcccatggggaaggtgctgtgtgcctgtcaggtggcccagggtgccatgcccaccttcacagcagaggcctgggcactggcagtgtgcagccacatggggggcaaggcgtggggctcgcgagtggtggcccaaggcaccggaagcactactgacctggaagctgccctcagtatagcccaaacctatgccctcagccagctctgacccaggtccgcccagggacccacatggactaaaggcaatgccaggagccctgaaggagccagcagaaccttcccacatgctgaagcgaggactagaggctggaggccaagcagctgagccaaagaagatcacctgggccagggcctacatgacacaaggagacatgggctagggaaggcagaactgggcccaaagacacacacccccttggtgaaagagaagacatggacaattatggctgtgactgcacattagaaattatttcactggccgggtgtggtggttcacacctgtaatccaagcactttgggaggccgaggcaggtagatcatgaggtcagaagatcaaaaccatcctggctaacacggtgaaaccccatctctactaaaaatacaaaaaattagccgggtgtggtggcacacacctgtagtcccagctactcgggaggctgaggcagaagaatcgcttgaacctgggaggtggaggttgcagtgggccaagatcgcaccactgcactccagcctgggtgacagagcgagactctgtctcaaataaataaattatttcacagaggatagcaagctccagaaggttctattacctttaaaaaagagtagttttgcccctcccagcaacctggtatgggtgccctaagaccagtctgaactcacactgtctgaaaggccacccaggatccaaatcgggccatcttcattgccatgagtgttcggacaggctctgcgtgccaggcaacagtgggcagacaaagggctccctggctactgggaagatacagaaccatcctgtgaaaatcatttcagcactggagaccttctttgctattacttctttcattaacaatgacctctaatttaaattgggccctgctggtttgttgatgaattgagcaactgagaacgtggcgggcactaaactgacagttccttccttcatggagcctgcttcatgtggaggaaacaggaaataaagcaaaagaagagggtcaggcttggtggctcatgcctataatcctggcattttaggaggctgaggttggagaatcgcttgaggccagaagtgcaagaccagcctgcgcaaacagcaagaccctgtctacaaaaaaaaaaaaaagtaatctttatgcctcagcctcccaggtagctgagactacccacaccttggtcccagctacttgggaggctgaggtgggaaaatcactttgcccaggaattcaaggccgcagtgagctatgattgcaccactgcactccaggcaacagagtgagaccctgtcttaaaaaaaagaagggagaaagtgtcagatggtgatgaggtctgggggggaaatagagaatggggatcaggagtgtggatggtggtattccctcaccaagaggtgacatgtgagcagggagctgggaggtgagggtgtgacccgtgtggaaatcagggaaaagcattccagcctgagggaacagccaatgcagaggccgtgaggtggccagtgccactgagcagtgagctgggataggggcaggtgaggaggctggagagcggggtcagacaaacaatatgcttattaaaacaagttgtacagcacctgcctcaagcctgagctgaagctgaaaattggcacttcaaagcaggaggaagcaaagagatggaggaaagccctccttccctaccagaatgagtccacctcagacagccagactttggacctctgcctttgttcctagatctctgttgctagatgaaggaaagggcctcaggggatccatcttcaaatcaagggctccctggctaccaaattctgtctagtaaaaattattcgagcagcgtgggcccgcctggcatcattttctgcagtttctcattctaattaaggcactgatgatttgctggtaaggcactgctgagggcttgaagggacccaatcccgggtgcctggcccctcactgcttgcaaagcagcatcctggccactggggcagtagcctgtttagcagtgctcaccacaggcccaggttcaagctcctctgcgagcgccaagatgagttttggcacccctgatttattgatgagttaacagagcttcgagatgttcatccagggtaaccaactagtagtcctcggcagagctgaagtcaaagctaccctttgaaagccccgccaccctggctgcctctcccttcctgaaggccaatttctttttttttactagccgtccctctggtctgtccctctcgccctccaggagatctggggccccaaccacatcttgtcgcgccagggctggaagagagtttggcacagggcatggactgtgtgaaggagcgctgtgttggcctggaaccttcctgcgtctggtaccagaccttcagctgggggaaaggtggaaggtgccctccctcccgcagggcctaaggtcaacaggaggcctcacgggagttccagtgacttctacaggtgccttggagaaggtgcgtccaccctcctcttcttccacagacgcttttcctggaccagctccctatccattgccacacaaaagctaccaagagagcacaagcactccagaccagcagccctgcccgacccccgcctcccgcagaaagcccacccgttcctagacacgtcccacggaagcacagggcatagcgcaaggccacagtcccactacccgcaaagcggccgc

SEQ ID NO: 465307 - DNA, 2072 bp, Homo sapiens
ctatctagcaggatctctcgaggtgccttagaccagtctgaactcacactgtctgaaaggccacccaggatccaaatcgggccatcttcattgccatgagtgttcggacaggctctgcgtgccaggcaacagtgggcagacaaagggctccctggctactgggaagatacagaaccatcctgtgaaaatcatttcagcactggagaccttctttgctattacttctttcattaacaatgacctctaatttaaattgggccctgctggtttgttgatgaattgagcaactgagaacgtggcgggcactaaactgacagttccttccttcatggagcctgcttcatgtggaggaaacaggaaataaagcaaaagaagagggtcaggcttggtggctcatgcctataatcctggcattttaggaggctgaggttggagaatcgcttgaggccagaagtgcaagaccagcctgcgcaaacagcaagaccctgtctacaaaaaaaaaaaaaagtaatctttatgcctcagcctcccaggtagctgagactacccacaccttggtcccagctacttgggaggctgaggtgggaaaatcactttgcccaggaattcaaggccgcagtgagctatgattgcaccactgcactccaggcaacagagtgagaccctgtcttaaaaaaaagaagggagaaagtgtcagatggtgatgaggtctgggggggaaatagagaatggggatcaggagtgtggatggtggtattccctcaccaagaggtgacatgtgagcagggagctgggaggtgagggtgtgacccgtgtggaaatcagggaaaagcattccagcctgagggaacagccaatgcagaggccgtgaggtggccagtgccactgagcagtgagctgggataggggcaggtgaggaggctggagagcggggtcagacaaacaatatgcttattaaaacaagttgtacagcacctgcctcaagcctgagctgaagctgaaaattggcacttcaaagcaggaggaagcaaagagatggaggaaagccctccttccctaccagaatgagtccacctcagacagccagactttggacctctgcctttgttcctagatctctgttgctagatgaaggaaagggcctcaggggatccatcttcaaatcaagggctccctggctaccaaattctgtctagtaaaaattattcgagcagcgtgggcccgcctggcatcattttctgcagtttctcattctaattaaggcactgatgatttgctggtaaggcactgctgagggcttgaagggacccaatcccgggtgcctggcccctcactgcttgcaaagcagcatcctggccactggggcagtagcctgtttagcagtgctcaccacaggcccaggttcaagctcctctgcgagcgccaagatgagttttggcacccctgatttattgatgagttaacagagcttcgagatgttcatccagggtaaccaactagtagtcctcggcagagctgaagtcaaagctaccctttgaaagccccgccaccctggctgcctctcccttcctgaaggccaatttctttttttttactagccgtccctctggtctgtccctctcgccctccaggagatctggggccccaaccacatcttgtcgcgccagggctggaagagagtttggcacagggcatggactgtgtgaaggagcgctgtgttggcctggaaccttcctgcgtctggtaccagaccttcagctgggggaaaggtggaaggtgccctccctcccgcagggcctaaggtcaacaggaggcctcacgggagttccagtgacttctacaggtgccttggagaaggtgcgtccaccctcctcttcttccacagacgcttttcctggaccagctccctatccattgccacacaaaagctaccaagagagcacaagcactccagaccagcagccctgcccgacccccgcctcccgcagaaagcccacccgttcctagacacgtcccacggaagcacagggcatagcgcaaggccacagtcccactacccgcaaagcggccgc

SEQ ID NO: 465308 - DNA, 1290 bp, Homo sapiens
  misc_feature (2)..(2): n is a, c, g, or t
gntggatatggtttccatgatttttcttccagatatcactacttggaaaattgtggtgtcaatgaacttaaggtcaatcttctccagagcctgccgtttcatctgcaccagcaaggactcgtggagggtgagcacccgcttcttggttcccaccacacagcctttcagcatgacaaggtcattggtcacttcaccatagtggacaaagccacccagaggattggtgctcttgtcagacaggtcagagtcagtggaggcattgttcttgatcagcttgccatccttgataaggtagccctggccaatcttatagatcttcttgttgatctcagtgcggtgacggtagcctttctccccagcacgtgccacagagaaggccacacgagcaggatgccatgccccaatacaggccaccttgcacaggcctcggtgggtcttgcagggcagcttcttggtgtgccaacgactggtgacccctttgtagcctttgcccttggtcaccccaatgacgtcgatcatctcatcctgcccaaacacttggttcacatttacctgctgctcgagcctctcgcagacccagtccagcttctcagccacggtgcctccgttcacctggatctccatcaggtgggccttcttctggcgcagaggaagcaggcgcatctgggtgtgggcaatgacgcggatgacgtggcagtatttcttcatgctgctgaagtccttctccagctgcttcttgacatcctcatcctgccatttcttgcagtacttcgtaaaggccttctttttagatttatgccagttcttatagaaacgcctcttgcattcattactgatgtgctcagcgaagacagtcttgaaggtccggaggcctcaaggggtttccacatagcccacaatgcccacaaccaccatgggtggcgtctccacaatggtcacagcctccaccacctgcttcttgttcaccttggatgctgggctgtcgacttccctcatgatgtgggtcatgccagctttgtatcccaggaaggctgtgaggtggaccggcttggacggatcatccttagggaagctcttcaccttcccacgatgcctgctgctgcgcttctgaggcaggaagccgagggacccatgtctgggagcagaaaactttctccactgcgcctcgcctaataataacttaaaagtacattttaaaaaacttaaatagtgtcattggattgtttataactcaaaggataaatgcttgaggggatggagaccccattctccatgatgtgcttatttccc

SEQ ID NO: 465309 - DNA, 1413 bp, Homo sapiens
gagtcagcccttgcctcgggccacaaccatctcccaagaacagctcagatgaatttgaaatccacaggcttttgtgctagtgaaaaggaaacggaagcgggacacttaaacccttggtcccatgaatgctttcttctgctccatggtctggaagcagccatggccaaacttggaggtggtgtcaatgaacttaaggtcaatcttctccagagcctgccgtttcatctgcaccagcaaggactcgtggagggtgagcacccgcttcttggttcccaccacacagcctttcagcatgacaaggtcattggtcacttcaccatagtggacaaagccacccagaggattggtgctcttgtcagacaggtcagagtcagtggaggcattgttcttgatcagcttgccatccttgataaggtagccctggccaatcttatagatcttcttgttgatctcagtgcggtgacggtagcctttctccccagcacgtgccacagagaaggccacacgagcaggatgccatgccccaatacaggccaccttgcacaggcctcggtgggtcttgcagggcagcttcttggtgtgccaacgactggtgacccctttgtagcctttgcccttggtcaccccaatgacgtcgatcatctcatcctgcccaaacacttggttcacatttacctgctgctcgagcctctcgcagacccagtccagcttctcagccacggtgcctccgttcacctggatctccatcaggtgggccttcttctggcgcagaggaagcaggcgcatctgggtgtgggcaatgacgcggatgacgtggcagtatttcttcatgctgctgaagtccttctccagctgcttcttgacatcctcatcctgccatttcttgcagtacttcgtaaaggccttctttttagatttatgccagttcttatagaaacgcctcttgcattcattactgatgtgctcagcgaagacagtcttgaaggtccggaggcctcaaggggtttccacatagcccacaatgcccacaaccaccatgggtggcgtctccacaatggtcacagcctccaccacctgcttcttgttcaccttggatgctgggctgtcgacttccctcatgatgtgggtcatgccagctttgtatcccaggaaggctgtgaggtggaccggcttggacggatcatccttagggaagctcttcaccttcccacgatgcctgctgctgcgcttctgaggcaggaagccgagggacccatgtctgggagcagaaaactttctccactgcgcctcgcctaataataacttaaaagtacattttaaaaaacttaaatagtgtcattggattgtttataactcaaaggataaatgcttgaggggatggagaccccattctccatgatgtgcttatttccc

SEQ ID NO: 465310 - DNA, 1829 bp, Homo sapiens
acaccaacagaaaatcaggacatcattaattctctacacttattgatttggaacctccattgaagcagcaagctcagcacagaaataaaactgtcctggtgagtcgctcacagcctgtcccagtaactgttccggagcgtcagcctgacgcagcacccctgaaggaccacgccgtgcgggctgcgagcctcgcccttaaccatgcccagcaggaccagagctgccagcacaaatgaaggtcctggccattgaacaacttctgagcctgcactttaagaaggcgctcttgttttgaatacgtagtctgtcctgttctttcaaagtaagtgcttttatcaagggcctggactgtcttttaaacatatttttttctcacttgtacattaaagggaaatgtatttctgtctagaaaaggagaccgggagaggaatgagactgtgcggtattcaggcttggtttaaactagggcatgcacactgcatagctattttcttcaggcagcatgtggccaaaaaacatgcgtgtgtagctgactgttttgagctttgtttattttaagtactgtatactgagggattttgttcaagcaaaggagtaccagctttatatgcagccacagatgcctctcttgcttggtagtgctagatttagagctcaaaattttccttttcagcaagaactagaagttccctagtagtattttttcccctcatgcctgtttgcactgtgcagaattcttagagaacacggctttgcaaatgttctgcggcagtctcaggatagcacggtatgtcagcagatatgggtcccgggcctgtttgcttagctatgctttcttaatgcaggttcttgctttacacgatttcagacaataactcagtattttcatgatcacagctgaatatacgccacggatggataggctctcacctgggggtgattttgtcccccgcggacatttggcaatgtctggagacatgtttcattgtcatgacttggacatgctactggacctagtgggcagaggccggggatgcagctgcacatcccactgtgccctggacagcctcacagcaaagctgtatctgccccaaaatgaagacagtttcaatataggagtgaaggaagctggagaggatgattggagtgctggaggaaataaacgaattgaaaggcaagaccatccatctgggaataccccaccacagagcctacagaataaccaggaagtagaaaactggggcattcctagagcctttttaactgttgtcaaaaaagctagaaaccctgcaatgcatgggacaaccgccataacaaagaattatctggctcaaaatgtaaaacaaggttgagaagccgtgctttaacttaatatttctcagcctctatatcttcatctctgaaataggaatgtccacattagcattgttgtaagccctgttactagaatatagtaagtgctcaataattgttggatttttttcacttacattcttttgaaattctgtgtgttatctgttgcttaataataaaccataacaaatcagccctaaaatttagtgactcaaaacagcaatcatttaatagtctctcgtggtttctgccggtcagtcattcagcagcagcttggctggcaggtttagacttcggatctcttagaaggttgtaagtcagatgtcagctggggctgctgtcatctgatgggttgactagggcaggaggacccacttccaatgtgtctcactagtgtggctggcaaactagggaaactgtcagatggaggtatcagctagcaactcgggctctccacaggactgcatgtgcatcct

SEQ ID NO: 465311 - DNA, 533 bp, Homo sapiens
acaccaacagaaaatcaggacatcattaattctctacacttattgatttggaacctccattgaagcagcaagctcagcacagaaataaaactgtcctggtgagtcgctcacagcctgtcccagtaactgttccggagcgtcagcctgacgcagcacccctgaaggaccacgccgtgcgggctgcgagcctcgcccttaaccatgcccagcaggaccagagctgccagcacaaatgaaggtcctggccattgaacaacttctgagcctgcactttaagaaggcgctcttgttttgaatacgtagtctgtcctgttctttcaaagtagatcctggtcaagaatgtctccaaaactggattaagccagtgtacttgaatgggaatatagacaaccaggacagacttggaatgttttttaatgtattggcccagcaaagctagaaatcctccactttacctaacagaagataattagaattaaaaatggcactaactgaaaacgtacttgttaaattgcctgtgcttatagagttgt

SEQ ID NO: 465312 - DNA, 1803 bp, Homo sapiens
gaatacacaagaaaatgcctattaaaatattggcattctagcctttgaaacagatgtgcttcagttctcactggtacaaggatgccatctccatcagcaggctccagaatcctcgatacaaagtgctcgccagcggaggcctgcgcatccagaagctgcgtccagaggactccggaatcttccagtgcttcgccagcaatgaaggaggggagatccagacccacacctacctggatgtaaccagtgagtacacccaggcccacagctacctgacctggacgtatccactacctgacctggacgtatccagtgagtacactcagctccatggctacctggatgtaaccactgggtacacccaggctcacagctacctgacctggacgtatccactacctgacctggacgtatccagtgagtacactcagccccatggctacctggatgtaaccagtgggtacacccaggctcacagctacctgatctggacgtatccactacctgacctggacgtatccagtgagtacattcagccccatggctacctggatgtaaccagtgggtacacccaggctcacagctacctgacctggacgtatccactacctgacctggacgtatccagtgagcacacccaggccgacggctacccagatgtatccagtgggtacacccacgcccacggctacccggatgtatccagtgggtacaccttggcccacagctacctggatgtatccagtggcacacctgaagcctttgtgggtcctgtggggaaactgctgaggcccacaagcagcacagacggctgtcactccccggccctagtaccctcctcttctcagggacagagggtctgcagggaggagaaaggcagtgaaggacgagatgactccagccagccaggggtgctgcagaaaaggggagcagatatcgctccagtgttcacccagcggccagtggacaccacagttactgacgggatgacagccattctaaggtgtgaggtgtccggggctcccaaacccgccatcacctggaaaagagaaaaccacattctggccagtggctctgtccggattcctaggttcatgcttcttgaatcggggggtctacagatcgcgcccgtcttcatccaggatgccggcaactacacctgctatgcggccaacacagagggctccctgaatgcatcggccacgctcactgtgtggaatcggacgtccatcgtccaccctcctgaggaccacgtggtgattaaggggaccacggccacgctgcactgtggtgccacacatgacccccgggtttcactccgctacgtttggaagaaggacaacgtggccctgactccatcgagcacgtctaggatcgtggtggagaaggacgggtcccttctcatcagccagacgtggtcaggcgacatcggtgactacagctgcgagattgtttctgaaggagggaatgactccaggatggcccggctggaagtgatgtgagtactgagacgtttggtgttagccagtccgcggttttctccgttactgtgcccctgttagtgactgccacttcacaagtgtcacgcccggcttgtgtcccaagtcagcggtcagaggccagcgcatcatgctgcataactacatatatggacaaggtttttttgtggtttctttcaacttcggaattgagaagtttcgtttttggtgtagatggtgtgatcattggtttttatttcagttgatcctttttgtcatatttttcccgtggacaccttatcctgataggccctgtttaccactctgc

SEQ ID NO: 465313 - DNA, 2040 bp, Homo sapiens
gctcacccactccctcccatctcccccagctcaacccccagcacagcagcatccaccatgtccgtctgctccagcgacctgagctacagcagccgcgtctgccttcctggttcctgtgactcttgctccgactcctggcaggtggacgactgcccagagagctgctgcgagcccccctgctgcgcccccagctgctgcgccccggccccctgcctgagcctggtctgcaccccagtgagccgtgtgtccagcccctgctgcccagtgacctgtgagcccagcccctgccaatcaggctgcaccagctcctgcacgccctcgtgctgccagcagtctagctgccagctggcttgctgtgcctcctccccctgccagcaggcctgctgcgtgcccgtctgctgcaagactgtctgctgcaagcctgtgtgctgtgtgcccgtctgctgtggggattcttcatgctgccagcagtctagctgccagtcagcttgctgcacctcctccccctgccagcaggcctgctgtgtgcccatctgctgcaagcctgtctgctctgggatttcctcttcgtgctgccagcagtctagctgtgtgagctgtgtgtccagcccctgctgccaggcggtctgtgagcccagcccctgccaatcaggctgcatcagctcctgcacgccctcgtgctgccagcagtctagctgccagccggcttgctgcacctcctcctcctgccagcaggcctgctgcgtgcccgtctgctgcaagactgtctgctgcaagcctgtgtgctctgaggattcctcttcatgctgccagcagtctagctgccagccggcttgctgcacctcctctccctgccagcaggcttgctgtgtgcctgtctgctgcaagcctgtgtgctgcaagcctgtctgctctgtgcccatctgctctggggcttcctctctgtgctgccagcagtctagctgccagccagcttgctgcacctcctcccaaagccagcagggctgctgcgtgcccgtctgctgcaagcctgtgagctgtgtgcctgtttgctctggggcttcctcttcatgctgccagcaatctagctgccagccagcttgctgcaccacctcctgctgcagaccctcctcctccgtgtccctcctctgccgccccgtgtgcaggcccgcctgctgcgtgcccgtcccttcctgctgtgctcccacctcctcctgccaacccagctgctgccgcccagcctcctgcgtgtccctcctctgacgccccgtgtgctcccgcccagcctgctgaggcctccgctcaggtcagaagcccagctgctgatggacacgccccccagtgccagccaggctcaggtcccacctgaaagctgatagtcgcgtcctgaattgctcctgcactttgaccatttcctggtgtctgctgttgagctggacaatggaagaactgaaagtctatactcaatgctgcagccctcttgcggggggaggggggcgcttctagaaagttcccatggcagtggcctcccctccatatctcccacctctcatgagggtcagttcagccttgacccgtgaggtctctgtcctcctggctcagagccgcagagccttctttggacgccctcaagctgaccaataaaggccctgagactgcaatggcgctgacacccaggtgtgttgattaatgccttggctggagctcacggccatggttttctcctttgtgcacaaccctctgctgtccttcaggcccctgagtgttttcctgtgcccaggggcgtgtggttcccaggggtccaggctagacggacatggacgcggggagccttgcagccctttggccatttcgggcccttgggtttgtccctaaccctcctgtgttgttagtcgtgtcatagttctttttgctgatttgctttttaaattatccttctgctgcacaatacttgtcaaataagaatggtgtcttctagcgccatgcttgcccagagtgtgtccaaatgcctccctagcttcaaaatcagtagtcttcatc

SEQ ID NO: 465314 - DNA, 1445 bp, Homo sapiens
ctcaatgactacaagatgcctgcagtcataggttatttcaaagaagataatactgcaaagcgcttggaatatgcatatgtttacatgcttcaaatgatgcggaatcagaaagcagcgattgaaacttactaacccgacctgctagtctttgaactgaagctctttgctgccctctgtagatacctagagatgaaaacggcaaagtcaacattcactttctcagttatggtaattttgttctgtaatcttaatagaaaaatagactaaacagaaggtgtttcaattaaagggaaattaaggatcgttttttcctataatttcttttgtactatatcgttgaatttctgtatttgcctttaaaaaaatcactatttaaaattaaaacttcgtgtttaaaaacactatggtaagacaaagtgaaaatacacacatgaatgcatgaaaaaagaattagtaatttttcaactttcttttgacttttttatcattttatgtatattatccacattttaaaagtcatatgaattatggtagataatgtcctctaaacataagctacaagttctattttcacatgatagttttccttgcctttggcatgataattattgttgtttctagtttcttgggaggggctattcttttgcaagaaaataatcactatttcaattgttgcaattcaacttaaaattattttgctgagcattttctatgcactcagcaaaagtctacatgctgtgtaggggatatcaaaatgatgataataatagcagcaaactgctaagtgcttaaccttggaaagatattgtagcacattactttacatatgctaaccatttagtcttcccaaatattataaggtgtctgattttgtagagcctacaattttgttgaaaatagtattactcgatgttccatcatcatttctctgttaccacaaattgctatcttaaggcataagaaaggtcagccacgttttgtaatgcttgctatttcacagcgtgtatgcggttttactcctattcaggttatcagtacttcaagcttatctatagcatcttgtcttttaagcactgtgttaagactacttctcaagatataatcaactactgaatgtagtttctctaaatattagccaggcttccatctatcatatcttcaaagtagtggttatatctttatgaaaataagatcctaaaagtcctacactgtggtccttcattatttctactaaataaatttctactaattctctctttcttgtcgctgtacttcccttattttgtactggctacaagaagacttacttggttcatctttatgggatgaaattatacttaattagatgtaataataagaaaatcattattagtgaaaacagcagatacgttctagcactgatggtatggaattacagtctgtgaaaaagttagctataacagaat

SEQ ID NO: 465315 - DNA, 2221 bp, Homo sapiens
gataaacaaacatcagcaatggggaatgctcatgggttgtgtggtaacaagaaatccaaacaccaaaccctccaggggctttgggtttgtcacaaatgccactgtagaggaggtggatgcagccctgaattaaaagccacgaaaggtggagggaagagttgtggaagcaaagagggccaactcaagagaagattctcaaaaccaggtacccacccaactgtgaaaaagatatttgtaggcgccattaaagaacacacagaagaacattacctaagagactatttggaacagtgtgggaaaatcaaactgattaaaatcattactgacagaggcagtgaaacagactctgtggaggtgcatgttctcttgccccagggaatggagcaggagggacaggagaatggagcagggagaatgcaaagcatgagggtggcagcagctctgggtgggtcaggtgccaggccctgggtgcagatcacctccttgtcctccggccaggactgcttttactaccatgaagactttaaagcagcatttaacatttgtatcaacacagaagatggagaagacatagtctcactggcagcgcaaaaccttgtcctgtgcatggtcacacgctcagccaccagggcaggctcagctggctttcaatatgtgtgaatgccttgctgagaagctctagccaatggaaaaaggcaagaaatataatatgcacaaccatcagaaaagcagagagtaaaattgggaattaagtgtctcagtttacttatatgtaaaatgtgatattaatggtatctatatttcagggttatttcaaagaagataatactgcaaagcgcttggaatatgcatatgtttacatgcttcaaatgatgcggaatcagaaagcagcgattgaaacttactaacccgacctgctagtctttgaactgaagctctttgctgccctctgtagatacctagagatgaaaacggcaaagtcaacattcactttctcagttatggtaattttgttctgtaatcttaatagaaaaatagactaaacagaaggtgtttcaattaaagggaaattaaggatcgttttttcctataatttcttttgtactatatcgttgaatttctgtatttgcctttaaaaaaatcactatttaaaattaaaacttcgtgtttaaaaacactatggtaagacaaagtgaaaatacacacatgaatgcatgaaaaaagaattagtaatttttcaactttcttttgacttttttatcattttatgtatattatccacattttaaaagtcatatgaattatggtagataatgtcctctaaacataagctacaagttctattttcacatgatagttttccttgcctttggcatgataattattgttgtttctagtttcttgggaggggctattcttttgcaagaaaataatcactatttcaattgttgcaattcaacttaaaattattttgctgagcattttctatgcactcagcaaaagtctacatgctgtgtaggggatatcaaaatgatgataataatagcagcaaactgctaagtgcttaaccttggaaagatattgtagcacattactttacatatgctaaccatttagtcttcccaaatattataaggtgtctgattttgtagagcctacaattttgttgaaaatagtattactcgatgttccatcatcatttctctgttaccacaaattgctatcttaaggcataagaaaggtcagccacgttttgtaatgcttgctatttcacagcgtgtatgcggttttactcctattcaggttatcagtacttcaagcttatctatagcatcttgtcttttaagcactgtgttaagactacttctcaagatataatcaactactgaatgtagtttctctaaatattagccaggcttccatctatcatatcttcaaagtagtggttatatctttatgaaaataagatcctaaaagtcctacactgtggtccttcattatttctactaaataaatttctactaattctctctttcttgtcgctgtacttcccttattttgtactggctacaagaagacttacttggttcatctttatgggatgaaattatacttaattagatgtaataataagaaaatcattattagtgaaaacagcagatacgttctagcactgatggtatggaattacagtctgtgaaaaagttagctataacagaat

SEQ ID NO: 465316 - DNA, 1705 bp, Homo sapiens
gcgccagcccggcggcggccggctgtgggctgcagcacgcggtgcacgaggcagagcccacaagccaaagacggagtgggccgagcattccggccacgccttccgcggccaagtcattatggcagccactgagatctctgtcctttctgagcaattcaccaagatcaaagaactcgagttgatgccggaaaaaggcctgaaggaggaggaaaaagacggagtgtgcagagagaaagaccatcggagccctagtgagttggaggccgagcgtacctctggggccttccaggacagcgtcctggaggaagaagtggagctggtgctggccccctcggaggagagcgagaagtacatcctgaccctgcagacggtgcacttcacttctgaagctgtggagttgcaggatatgagcttgctgagcatacagcagcaagaaggggtgcaggtggtggtgcaacagcctggccctgggttgctgtggcttgaggaagggccccggcagagcctgcagcagtgtgtggccattagtatccagcaagagctgtactccccgcaagagatggaggtgttgcagttccacgctctagaggagaatgtgatggtggccagtgaagacagtaagttagcggtgagcctggctgaaactactggactgatcaagctcgaggaagagcaggagaagaaccagttattggctgaaagaacaaaggagcagctcttttttgtggaaacaatgtcaggagatgaaagaagtgacgaaattgttctcacagtttcaaattcaaatgtggaagaacaagaggatcaacctacagctggtcaagcagatgctgaaaaggccaaatctacaaaaaatcaaagaaagacaaagggagcaaaaggaaccttccactgtgatgtctgcatgttcacctcttctagaatgtcaagttttaatcgtcatatgaaaactcacaccagtgagaagcctcacctgtgtcacctctgcctgaaaaccttccgtacggtcactctgctgcggaaccatgttaacacccacacaggaaccaggccctacaagtgtaacgactgcaacatggcatttgtcaccagtggagaactcgtccgacacaggcgctataaacatactcatgagaaaccctttaaatgttccatgtgcaagtatgccagtgtggaggtaaagccattcttggacttgaagcttcatggcatcttagtagaggctgctgtacaagttactccaagtgtaactaacagtagaatctgttacaaacaggctttttattattcatataaaatttatgcaggaaataatatgcattctcttttatgaagttaaaatagaaaattggatttctttgtttctttgattactaattagtgaaaataatatgtaaaggtttacaaattacaaataaaccatctgtggtcaagaaataagtcccagatttgtttaaaagttctgcattttatctagtactctgggccacaaaatcaaaatgtatttgctctaacgtagaatgcagatccaatctcaatgttggctgaaatttttgagcttgattagatacaaagcagcttgctcgaagatttaagcgtagacgtttctgtttttaattacagagagaccacccttttcaaacttcaggtgtgccatagtcattttaattaatttgctttatttgtaccttctaacaggtttggc

SEQ ID NO: 465317 - DNA, 1744 bp, Homo sapiens
tcctctaccgacatgtaggttggacaggatgcggtggtgggaggcagtggtgatgttcaccagattaggagctacccccaaaaacaacatattcacgaaagccagcaacagggagctcctgtttgaggcactgttcccagtccggctctatgcagattcactggaccatgcagaaaagggagttccagagccttgccccaagtacaactccaccgtccagtgcgccaagatcctgcgctctcccctttcccacacagcacataagcaccctgtacacatgagagaggtacaagctcctcccgtgggaggaaagcagtattctgaagatgatggctgccaaggggggctcacgtgtcagtcaggtcctccaactgtacaaagacacaaagacactgtcagaagcaaaatgacaggatctagaagctcttgctgctcttgccacctcgaatatgtcacctgtctgcatggagcctcgctcatcggtctgacaacggcatgcgcccggcagccaggcggcactgaaggctggcttactgttccccgggttcacaaaatcaatacagactgactttacttgaattgtgcctcttccttatatgtcctcctcctgactgtgtgtgctacgagtgtagcacattcagatctgctgttacaaccttctttccaagttcagataatcctccttccaccacgccactataaccaccggctccaaccctcctcatgtcagctcccatgagcaaacttcaggctttttacaagtgggctgcaaaacagcatctagccattgtcctcttcaatgtacttaataagtaacttatttattaataaaatacccacatttattactttatataaatataaatgtatatattcaaataagtacgataaatattgaaacagcatgaataatatataattattaataaactatcaataagcagaatttggaagagcaaatacttttgactcattcattcaatgaaaatgtattaagcacttactatgagctgtcagtgttgaagagagaagaggaatatgatgagacatgattatgatcctagcagaactcaggaggaaagacataaagagccataatgcaatgtagtaaaagctctaataaaggcatcactaagtcctctgaagcagcaaaggaaggaaggacaactctcaatgacagaatatgaatctccaaagtttaacaagctgaaatgatgggttaaaagaaaaaaacaaaattggagctgcaatagcaccacgtgtaaggtcccacaattgaaacctgaaggactgtaaaaagcctgctgctgctaagtcttgcctctcctttcttttatttgaaaatagttggtatttggattcactttgcagtaacctgaaattcgtcaaaggcaacaccaatccaagtgttggctgtctcaataaaaatctgtcactgggaaaatggggatgacaggggctgtgcatgagttggagcacattcaaaggatgatgaacaaactcacagccatgcttccttggtagtggatgaggggaggggagccaggagggccgggaatactgctgttgtccaacatttgaagggctgtcttttgtaagaggaagtagacttgtattacatggccccaaggggaacaactacatggggaacagacttcagcctaacgtaaggaagacttttttttttttttttttttttaacaattagagctgcccaaagacagaacggtgctccttgaaaggc

SEQ ID NO: 465318 - DNA, 1158 bp, Homo sapiens
tctttgaaggagccttgaatggggtccaacaaatggtcccctcgccctcatccaggagagtgtccaaagtggagatgtccttacctcagtaccaaacagagggtgatctcacacctggatactttgctaatttgcccccgaaagtcatttcttattggggccgaagtaacactcagcagttgcgagatttgataaggagctctccagataggctcgtcagtcagtcctatgcagagagacccaaggctccacttgagaactgtgctttctcttctgaaaagccattcatccttccttctcttccctctgagtggattactgggtgggtggggaagggggttgccctcctagaacacagaagtaagggtccagaacttaacactgttcaggagcaaactttcccccaccagccatgggggaaagcatcaaatgctgagctcttattagacccaatcagatggaattttcagcaggttctttcttcacactttttaggagggtaaaaagtagtttaatcttccagtgagtcaatgttcctgttgacagagacatatttaagtaaagggtcattattttagggggactcctaacccttcactctatcctaaaaattccctattatcatcctacaggtcaacctaaattttctgtccttagcattttgtttattgggaagcccaccgtctcccatgcttctttgttctgtcttcacagggttgggggatccagctatctgtaattgtgaagtgaagaggatgtgactgccaggtaatgctaaccccgaatccttggtgcctgtgttatgcaccatatgctgaatttcggttccagctgtgtgctaggctgggtctgatctggcaaagaggaactggctccacagctctgggcagaatccactgctgctcccacacagagaagaccaggggaaccgcagtcccactctgatagtgagagcaaaggaaagtggcaacaatgaaggaataaaacccagctcgtccccctgttcctcatgcccaacccttgccaagacttcaggtaacagaaggaagagaacacatggatgggcacatgctgggcccggaagagctgtgcatgtcccacagaccacgagtgtggagcccatggccgtgtgaagggggtggggtcccagtcctagaa

SEQ ID NO: 465319 - DNA, 2097 bp, Homo sapiens
tggcaaggctgccgttggcaaaagcccagctctgccatgaatctccgttcagttactggtttcacactcatttgtgaggaagctgtggcaagtgttgacaccacagccccaagtttctttttctggcccgcggaagatgagcttcagtcccatggaggtgacaaggttgtcctcctgcatgatggggctctgcggtgcctctgcgcctgggtaacccctcaccgagaaagccacgtctacaggtcccacctgtctgcagtgcatttaaggcgcagcctggaagtgccagggagcactggaggccacccagtcatgggggacaccttcatccgtcacatcgccctgctgggctttgagaagcgcttcgtacccagccagcactatgacaaccgcaaagatggtcctcaccccaatcctctgggcttcctccagtgggtgtacatgttcctggtgaaatggcaggacctgtcggagaaggtggtctaccggcgcttcaccgagatctacgagttccataaaaccttaaaagaaatgttccctattgaggcaggggcgatcaatccagagaacaggatcatcccccacctcccagctcccaagtggtttgacgggcagcgggccgccgagaaccgccagggcacacttaccgagtactgcagcacgctcatgagcctgcccaccaagatctcccgctgtccccacctcctcgacttcttcaaggtgcgccctgatgacctcaagctccccacggacaaccagacaaaaaagccagagacatacttgatgcccaaagatggcaagagtaccgcgacagacatcaccggccccatcatcctgcagacgtaccgcgccattgccaactacgagaagacctcgggctccgagatggctctgtccacgggggacgtggtggaggtcgtagagaagagcgagagcggtcagacctcccaccttacggggctccttcccctggtgctcaggaacccacagccacaagccccctgccaaggctcaggcagccttgcccctgggaggactccggctctgttaggggccctaaatgtcctccccacactgtgggtcgccttctgtcttagtgtgcaccctgtggtggctgtgggcatctgtgcatggcaggccggggcggggcatgtctgcgtgttctgtctggatggtgtggtgaaggtgacatttccaaatctgagcattggacatcagtgtgtctgtgtccctgtgtcctcaccatccctgatggctgcagggagccgctgggccctgcccctcagtcacattcccgcacctctggcacagcccctggacagtcctgacgagacggaagaccctgagcccaactatgcaggtgagccatacgtcgccatcaaggcctacactgctgtggagggggacgaggtgtccctgctcgagggtgaagctgttgaggtcattcacaagctcctggacggctggtgggtcatcaggaaagacgacgtcacaggctacttcccgtccatgtacctgcaaaagtcagggcaagacgtgtcccaggcccaacgccagatcaagcggggggcgccgcgcaggtcgtccatccgcaacgcgcacagcatccaccagcggtcgcggaagcgcctcagccaggacgcctatcgccgcaacagcgtccgttttctgcagcagcgacgccgccaggcgcggccgggaccgcagagccccgggagcccgctcgaggaggagcggcagacgcagcgctctaaaccgcagccggcggtgcccccgcggccgagcgccgacctcatcctgaaccgctgcagcgagagcaccaagcggaagctggcgtctgccgtctgaggctggagcgcagtccccagctagcgtctcggcccttgccgccccgtgcctgtacatacgtgttctatagagcctggcgtctggacgccgagggcagccccgacccctgtccagcgcggctcccgccaccctcaataaatgttgcttggagtggaccgaggctctgcaggaatgcagggagggccgggctccgccccagggttatttctaagttgaggacaggaggttgtgagttctgctggggggaag

SEQ ID NO: 465320 - DNA, 1803 bp, Homo sapiens
ctcttactctgcagatgaagctccagttacacatgatggtggtgtttttggtggtggtggccctggcagtaccggcggtgttggtggtggtggtggtacttgtgatgttactgtttgtggtattgttgtttgtattgctgctggtggccctggcagtactggtgttggtgttggtggtggccctggcagtactggtggtgttgatgctggtggcccttgcagtaccagcagtgttggtgtcggtagtggtatttgtgatgttagcgtctgtggtattgttgtttgtattgctaggggtggccctggcagtattggtggtgttgatgggggtggccctggcagtattggtggtgttgatggtggtggtggtatttgtgatgttagtgtttgtggtagtgttgtttgtattgtgggtggtggtcctggtgatgtttatgtggttgctgttgatggtggtagtggtggcactggtggtggtggtgatggtggtgacgtgtggctccacaggacccactgaaaggcaaggatcagcctggctgcaaactgagttagcatctgactcagttgcttgctcctggcctggagcttctggggtttctgatcccttcactgcaatccatgaatctctcccagcaggtatgacagcctgacccaggggctctgggaaagaggggttttcatcctacatgagaaagaaccacaccaccctccaagggaaaaagcagtcactggcaggcctcaaggtgcgattcgcagtctcctgggtttctggggccatttgtcctggtcctgctcggctctctgcccatccctgctgtgtaaacagcactctctctcagaaggtcttagctttgcttccctaaacaccctggacctgtgatcaggactgccaccttctgccctgaaggtaaaagtgatccagccagggggaggaggggcctgaggagccaggtgcaggaggtcaggggtcaggggttaggacagtggtaccggccaggaggtgcctccgggccagctgggctccatcacacaggcactgccccctcccccagccctgccccagagttgagggaagggaagacaggggaactagaaagaaagcacgaggaccagccagctgggagaggccaggtctgtggagcacctgctctgtgcgcagcagctgctgcctcaggtggagtctgtggttcccatggttcctagagtgaggactcatcctgccagatggagggctctgggttctgctgagcaccttcaggagttcagttgtggtgttggctgtaagtgacaaggaccttgatctggctgaaggaaagagtgttggctcctgagactggaaagctgaggggtcacccacatggtccaagatggctgctggagatccagccattacacaaaactccagtcagcaagaaggaagaagcaacaaagaaggacatcacccccctcccctttaaggacactttctagaaattataagagcacatgtttatgccccttttgacagaactcagtcacatacatgatctgggtgcaagaaaaaatgcaaaatgtgattttttttttttttttggagacagagtcttgctctgttgcccaggctggaatgcagtggcacgatctcggctcactgcaacatccacctcctgggttcaagcgattcacctttctcagcctcccaagtagttgggattataggcgcttgccaccatgccaggctaatttttgtatttttagtagagacggggtttcgccatgttggccaggctggcctcgaactcctgatctcaggtgatccaccca

SEQ ID NO: 465321 - DNA, 3588 bp, Homo sapiens
ctcttgccccgttccccctccgcctctccctcctgacctacccgagtgctttcctgagtggctccacgtggcctcctgtttctagggatgggcacttctccttgctgccaccatgtgaagaaggacatgtttgcatcccttcctgccatgattcctcaactggctcactgccttctttatcccagcctccattgcagtgaggttgggggccatatgactagtgctgcccaatggactgtgaacagaaatgacagcatcactcgcatggagactcctccatctctgtcttccctgttgtgacagtctcagagcctacgttctttcaatggctgggctacaagatggtgacaggctgcccaacctgacacagcaagaaggcggccatctgcaaaccagaaagagagccctcaccaggaaccggatctgctggcaccttgatcttggacttcctatcctttagagctgtgagaaatgtcgcccccaggtcaatgggatatttgttacagcaccaggtactgcctgagaactctacctttagggagcctgcgtgctgggtcactggggagacaatgaaggtgcttgacacccagtttgaatattgtgtcactgcaaagctgactgctgttgaaggatagccagtgagaggtcatggcaagccatcagaagaagcagaagtcatgagcatgctgaagctatgaggccaagacaaaatgtcacattgccacaagaagagggacaaacaggcaacaggcagagcccatgggaatcagtaatctcctgctgacactgaggccttgggactaactcagatccagtactactctcttgggacctgttctgactccagctcctgtccttggggtccactgagatccctgtagccttgtaataagcccacattatcatatttcccctgccggctccaccctagagcatttccaacaatttccagtgcttttccccttctcataccactgggcctttgcacgtgctcgtgcctccccaacttgccctgccttctccttcacccagacaactcctactaaatctctcagactcctcagctgtgtcccttcctaggggaggactctcttccctccagtgagcccggtggtcctccctgggatcccctgctccttgtcttccctgccgtccttactgccatccttgttctctactcagaaggaggcagaggctggcctgcccccaatcccctgtagactgaccagatgaattgacctgggctgggcagggcaggcgtgtttgaccagttgtctgggcaccccatggctcagtccaagttgacacataaagttcaccgccccagggcccctttgttgtatttgtgtatgaataaaacacagcatccactccaggtatctgagggtccctggaggcaggttttgtgatccctttttacagatgaggatgcggaggtccagttgtcactcacccagatcacactctcatctgctgatgggaggagtatttgatgggatgtgtgagcccggccgtctcccttgggacacatcagctcattaaatttgccagcccctgcctgaaaaagtatttaatttgccttttacaatgcacccattgcaagttaattaactggcaattgaaagttataggtggcattagaatttattaataacattgggaataaatctccctggaattcaattaactgaaaacctcatgaaattctttttttatataatccataaagccggtctgggagagagtggggagagcacctttattgtcacatataataataacgctacaggctggtggtcccgcccgcctctgaccacccctccatgaagacagagactgcctctccagacctgcctcaagggccagaagaagatcccagggcccagagggaccaggccacagccaaacaggagtaccaagagcactggagacaggatgggatggacccagagagagcgggtgggctcagcaagactgggaggcagtggccagggatgcctatctggtttggtggacacttgcacccccaatgcttctctctcaaggtcctcaagtccgtatggctggcagtgatttattcagggtctccctggcctctgagagctgcagtccaggctgctcccccagccagtggggaagggggatgaggaagggaagccccaggccctgcaggaccctgcctaccccctcaggctggctggcccagcctccccgcagccctgcctgccttaaggagccgttctggccctgcgccctccctgtctgagttttctctcgaagaggggaagctggcagggtcgagagaacatggcttcaggaactgagggtcctgggttcaaatcctgcccctgccacccgtgatctggtggccaagagagggttatttctaccgtctgagcctcggtccccttgtgaagtggggataataagcttacctcctaagggttaaataatgagacaacgtaacgaaagttccctggacagggccagttacagcagggactcaataaatgatgggtattaggattattctcattcccagcacccagcccacccagaccccgtctccagccgggagtgggggtaggggaggggacaggccagaggagggctctgatgagggtgttggcccctccagaccctgcccctggagacattatctgtccccaaagccccccatgtcctcacaatcatccatgcctggagcccagttcccctgggggcatctttaggaaacagcggcggctcaggcctctggggctgggtctctagccaggatagggtgtcctggagcagtgggctctcacttcctgctgctggcctggtccacgctcttctgtccagggtcgggcccaagcagggcagcaaggaccccatcgggttgggcgccacccctcttcatcttgaggttggctctcagggcagcatcctggccagaacctcctctggggaggccaggggatctggaaggagagcaggagggtggactcgaggtagagccttaggaacacttgggggtacatttgatcatgatatgtggccacggagagatgctcttgcccagcgtggagaagcaaggcagcagcaggctttcagccccttatgcattcattcattcatggatccatgcatccatccattcattcactcattcacccatccacctggagactgtctttcctacaagtttgcgactcctctccctgtcccgggaagcccccccaagggccaatcaccccctctgtggcatccccacccagccaccttctcactctcttgcaatcactgctgtactcagctgagttcccatggggctgtgaacttctcagggcaggggccctgtacacccggtggcccagcacccagctcggggctggctgacggcagagaaggggagcaggtggtccggtgtgtggagagaactagtgatactaacagcgatggccagggtcccacgtgtgctgatgtcagcccagacggctcccgggagccccaggcccgtgtccagctgtcccctgacatcgccacccagctgaccatgagccatctcacctggcccctcagaggagctttttaaagatgtaaata

SEQ ID NO: 465322 - DNA, 1690 bp, Homo sapiens
ctcttgccccgttccccctccgcctctccctcctgacctacccgagtgctttcctgagtggctccacgtggcctcctgtttctagggatgggcacttctccttgctgccaccatgtgaagaaggacatgtttgcatcccttcctgccatgattcctcaactggctcactgccttctttatcccagcctccattgcagtgaggttgggggccatatgactagtgctgcccaatggactgtgaacagaaatgacagcatcactcgcatggagactcctccatctctgtcttccctgttgtgacagtctcagagcctacgttctttcaatggctgggctacaagatggtgacaggctgcccaacctgacacagcaagaaggcggccatctgcaaaccagaaagagagccctcaccaggaaccggatctgctggcaccttgatcttggacttcctatcctttagagctgtgagaaatgtcgcccccaggtcaatgggatatttgttacagcaccaggtactgcctgagaactctacctttagggagcctgcgtgctgggtcactggggagacaatgaaggtgcttgacacccagtttgaatattgtgtcactgcaaagctgactgctgttgaaggatagccagtgagaggtcatggcaagccatcagaagaagcagaagtcatgagcatgctgaagctatgaggccaagacaaaatgtcacattgccacaagaagagggacaaacaggcaacaggcagagcccatgggaatcagtaatctcctgctgacactgaggccttgggactaactcagatccagtactactctcttgggacctgttctgactccagctcctgtccttggggtccactgagatccctgtagccttgtaataagcccacattatcatatttcccctgccggctccaccctagagcatttccaacaatttccagtgcttttccccttctcataccactgggcctttgcacgtgctcgtgcctccccaacttgccctgccttctccttcacccagacaactcctactaaatctctcagactcctcagctgtgtcccttcctaggggaggactctcttccctccagtgagcccggtggtcctccctgggatcccctgctccttgtcttccctgccgtccttactgccatccttgttctctactcagaaggaggcagaggctggcctgcccccaatcccctgtagactgaccagatgaattgacctgggctgggcagggcaggcgtgtttgaccagttgtctgggcaccccatggctcagtccaagttgacacataaagttcaccgccccagggcccctttgttgtatttgtgtatgaataaaacacagcatccactccaggtatctgagggtccctggaggcaggttttgtgatccctttttacagatgaggatgcggaggtccagttgtcactcacccagatcacactctcatctgctgatgggaggagtatttgatgggatgtgtgagcccggccgtctcccttgggacacatcagctcattaaatttgccagcccctgcctgaaaaagtatttaatttgccttttacaatgcacccattgcaagttaattaactggcaattgaaagttataggtggcattagaatttattaataacattgggaataaatctccctggaattcaattaactg

SEQ ID NO: 465323 - DNA, 1064 bp, Homo sapiens
ctcttgccccgttccccctccgcctctccctcctgacctacccgagtgctttcctgagtggctccacgtggcctcctgtttctagggatgggcacttctccttgctgccaccatgtgaagaaggacatgtttgcatcccttcctgccatgattcctcaactggctcactgccttctttatcccagcctccattgcagtgaggttgggggccatatgactagtgctgcccaatggactgtgaacagaaatgacagcatcactcgcatggagactcctccatctctgtcttccctgttgtgacagtctcagagcctacgttctttcaatggctgggctacaagatggtgacaggctgcccaacctggtttgcaacgccacctcagtaagctgagacatggtaatcgccatggcaacggggctgcattaaaagcattgtgcgcacaaagtgaaaggctgctgcctggcagagttcagtctggtctcactgcacctgttccctaattaagatgcaccttttggttttgtcttttgaaaaaaacaaaatgctccctttatcgccacgaggcaaaagaaaaattaaggccaagatcctttcatgcccaatatgggcctgcccggtggttggagcatgggggatcatgggcagcaagtgagaaagtgcacagtgatttgctgctgttacatcctgagaaactggagggctgtcatcaaagtcctcgaatagctggagagtgggtgtgggatggttacgtttgaaaatgcagctctgatataaaagaaagcaaagactgcactgttttcccagcaagagcctagctggagactctaagcctaagatagaagcttctgccatcaacaggccacaaaacccatacttcctgctctatgaggcttctgaccttggttccctagaatcctccctccttatcaagtatctgtgtctaggcctaggggagaccagaccgaggtctgtccttgtctgcctacaaggacaaggcattctactgctgtagaccacttgtttatgtgcccctaaaatttgtatgttaaagcctgaatcccca

SEQ ID NO: 465324 - DNA, 687 bp, Homo sapiens
tggagctaattacagctcccgcccataatgctatcgggaagacgaagcaagttcctgcccgtggagaccttggcactaccccagacactggaggaggatcttccatggactgttggaatctaccgtaaattcagctccttcccctctgatccattcacacctagataccggaggaggatcttctgcggattgttggaatctaccagacagtcacaaatgttccgtagtcactggggcttccctttacgatgccgatgtggtgaatgcgtgtggtgtcgtgtcagtgtgatgcacctgtgtgacctcttgcctctcttgtcttctcaacaagactcggtgacatttgctctctccaagtgcacggcagcagaaaatactgtggttcgcaaggcagggaaagtggattaggcttggtcgtttattctcgttctttccttcttcctttgcacatgggtggctgggaagcagcttcgtttctaagggcagggaatgaccacagcagttgtaagagcagcagctgaggctgagccaggccatgagcattccctccgccagccgtgagagcgcctctttatcatggagaaagcagcatcagagaggccagctcagaggacagcgccgattctccggggctcgggcctccctcagctccaagcctgggtgctgctcttcttgtttgtctgtttg

SEQ ID NO: 465325 - DNA, 5581 bp, Homo sapiens
aagaaactttcgccggatctgcaagaaacactgccatctcctggggagatcaagcaattgacagcttgtgcaacatggcagtttttgttcagcactacaaaagactgctgtctctttcaaatcccagtgtctgtaagaaactgtgggaacttttctgtatacttactacaaccaactcagggatgtatgggctactgtgcggaagggttctttgccaagattgtaaagtccccccacacgtgaaagcatcaaaacagacatctcacatttttccactggacataatgattgagtgtgttaaaaattctttggtttcctcaagtccattcctgtgttcttttgatgttcccgctacaaaaaactcagtgggatttcacatagcttggtctaggctttcttctcaagaagtcaaagaggagctgacacaagagaccacagttcaggcattctctcttttagaacttgatggcataaatctcagacttggagacaggaatcctcatgtacaaagtgtagccatcgaaagccaagaattttttgcaggctttaagctacagcctgaattgagcactatatcagaggatgggaaagaatactacctgaggatagaaagcacagttcctattatttgttctgaatttagtgagcttgatcaagaatgcaaaatctcattaaaactgaaaactattggtcaaggtaatatactaactttattttatcttattattagattgcaaacaataatgcttttttttcctgtaggaaaagtcactggagtgtactcatataataaatcatgttgcatgttgacatcaaattttagcccaatcatattactaatactcggccaaactgacgattgccaaagcaattcacatttcttcttcttggctgaaagcatacattttaaaaaaagaaaaaaaatagtgaataatctcctcttcatctggttttcttctggggcatttatccgtgctgatcttggtgaatggggcatgagtctaacgatcagagcccctagtgtagattacagaaacactctgggactttgtggaacctttgatgaaaatccggaaaatgatttccatgacaaaaatgggatgcaaattgatcaaaattttaacaattatgttgcttttattaatgaatggaggaaacaaatgtttatgtacaaaattactattctttcctgttttccatctggaaggattttaccaggaaaaagcatgtctgacacactgccagtttctatgacatcacctggaaagccatcctattgtagctgttcattggacactgcagcgtatccgtcttccgaagatctggacagtgtttctcgatcagaaattgccttgggttgcaaagacctcaatcatgtcagcttatcttctttgataccagaactagatgtcacctccgaatatattaattcagacactcttgtcagagagataaacaagcatacatctccagaagaatataatctaaatttatttctgcaagaaaaaaaacacataaacctgactaaactcggcttaaatgtacaaaaacatcctggaaatgagaaagaagattcactacaatatttggccaataagaaatatacacaaggccggggaagccacagccaagaaatgaggtacaatcgacaaaacagatggaaacggcagaactttcatgagtttcctcctttgtttgctttcccgagtctcagccaaacggatctggaagaacttacttattttttcccagaggaccatgctgaggatgtacagcaagagtttttcccctcttggcccactccctctggcctcaccgagtatagcaccttgaccctctgtcaggagactctagccaactccagcataggaaggctgtgtcttgcttttcttggcaagagattagacagtgttatagagatgtgtgtgaaggatgttctgttaaaagatgatcttagttgggcagaagcaggtgtggcccttttagaaaatgaatgtgaaaagaggattgtggaggaggggaaatataacacagaagagtatggcacatcaattgaagacattctctcagtattaaaatgccccaatttatgcagcggcaatgggcagtgcatggaatgggggtgtgcgtgttccccaagctttagttcctatgactgcagtgattcctatgacaaagctcctgaaattacagagcttgggaatgctggattctgtgatgttcaaaaatataattgtatgatggtgagagtttttggcaaaggcttcaaagaattaccttcaattaaatgtgaagttactaagctacagtataatagcagtgaatggatgcctggagaacccatctatacacagactgttttccacaatagcagagctgttgattgtcagctgcccactgatgttcagcagtttgataccatggatctggtgggtgggaaaccaactgggaagtggcagttgaaggtatctaatgatggttataaattcagtaatcccaaaataacggtcatatatgatggtgcttgccaagtttgtggtctctataaaaatgactcatgtactataaaggaaaatgtttgcattattgatggactctgctatgttgaaggagacaaaaatccaaccagcccttgtttgatttgtagacccaaaatttcaagatttacttggtcatttttagaaaacaaccagcccccagtgattcaagcattgcaagacaaattacagacattttatggtgaaaactttgagtatcagttcgtggccttcgatccagaaggttctgacatccattttacgttggactctggtcctgaaggggcaagtgtttcctctgcagggctttttatgtggaaaacagatttactaactacccaacaaattactgtacgccttaatgatgactgcgatgctgaaactagagtcacgattgaggtgactgtgaagtcttgtgattgcttgaatggtggatcatgtgtatctgataggaacttttctccagggagtggagtgtacctgtgtgtctgcttgcctggcttccatggcagcctttgtgaagtggacattagtgggtgccaatccaacccttgtggtcttggcagctatattagtggttttcacagttattcctgtgattgtccacctgagctcaaagttgaaacacagtttgtaaatcaatttactacacaaactgtggttctcacaagatctgataaaagtgtaaataaagaagaggatgataaaaatgcccaagggagaaagaggcatgttaagccaacaagtggaaatgccttcaccatttgtaaatatccatgtggaaaaagtagggagtgtgttgccccaaacatctgcaaatgtaaacctggttacattggttctaactgccaaactgctctttgtgaccctgattgcaaaaaccatggaaaatgtattaagcctaacatttgtcagtgtcttccaggacatggtggagcaacctgtgatgaagaacattgtaacccaccttgtcaacatggtggcacatgcttggctgggaatctctgcacttgtccttatggttttgtaggaccaaggtgtgaaacaatggtttgtaacaggcactgtgaaaatggaggccagtgtcttacaccagatatttgccagtgcaaacctggctggtatggacccacctgtagtacagctttgtgcgaccctgtctgcctcaatggtggttcgtgtaataagccaaatacttgcctctgtccaaatggattctttggggaacactgtcagaatgctttctgtcaccctccctgtaagaatggtggccactgcatgagaaataatgtgtgcgtctgtcgtgaaggatacactggtaggagattccaaaaaagcatctgtgatcctacgtgcatgaatggaggaaaatgtgtgggaccaagcacttgctcttgtccttctggttggagtgggaaacgatgcaacacacctatctgcttgcagaaatgtaaaaacggtggtgaatgcattgcgcccagcatatgccattgtccttcctcctgggaaggagtgcggtgtcaaataccaatttgcaacccaaaatgtctttatggaggcagatgcatatttcccaatgtgtgttcctgccgcactgaatactctggagtcaaatgtgagaagaaaatacagataagacgccattgagtagcatcaagtatatgaattacaagcctgtatcttaagaatggaaatattttgttcagaaaaagttggagataacttggagtttatttgaacatcattcaaaaaatatcttaaagactgaagaaactaataaaatacataatgatctctgttgtaatcatagagaaaagcaaagaagaaatccaggtaatctaaatttgatgttgagatgggataggatatttacatattgagatgatgtatctgatattccacccattcacaatatttaataaactgaatattttctcagccctaactgtgactatgtctgcatcattaggagtcagtcagcctaatggaagccacttgatatcatcctaataaatgatgcttaatgcagaacgaggggctcacagaatttgctttgctaaacttttgataagcaatatcaggctggacttttaaagacctcttgaggctagaaagccaagccaatgcatacttgagacttttcctgcagtacctatagattcgttctatgtacattctgaaatatggcatcccagtccaaggcttggaaatatagtcaatattaccaattgtattttattataaaagcatatttttttgaatttatgaacatatattgccataaaataagaatactcatgaatagtttctggattttggagggattagataggaaaaagtaaacgtttcaatttttgatcacaagggtataccttaccaaattgctataagctatagatagcttttttaaaagtttccttaaatctgaaaaacaaaatgttaaaagaaccagcaatatttaaaattttaaaagccataaaaatccgtatctttcctcataattttttcatgttttcaaactgagacatgtttagcttctctgtatcacataaaagcaagatgccaaaagatgtatactttaaacttagattcagcaattaatatttcagtttaatttagaaatgacttgagtatttcatgaatatctattacatatattagcataactttaagatttcaagttattgaaaaagatgtttgccactatgacaactttatttataaacttttatcccatttatattaacctaatttacttgttgttaacaattatgcttgaattgcttcttcaacaaaactagccattgaagtttggaaaatgctatgcaaaatatgtcattttggtagattgatttttgagcatacctcattttatcatactttacagaactttacaaatactgtgttttttacaaattgaaggtttgtggtaaccctgaatcaaacaaatctatcagcaacaatttttccaacagcatatgcttagttcatgtttctgtgtcacattttggtaattcttggaatatttcaaacaattattatat

SEQ ID NO: 465326 - DNA, 723 bp, Homo sapiens
caacaagaaggccctcatcagatgccaaacagatgatggtgccatgctcttgaacatcccagcctccagaattcctcagctgaaaacacagaatggcctctcctggaatacggaggagacacatggtcccggccctgctgcgcctcgcctgctcctcccaagccctggaacaactctcccctgctgcgctctcactggcagggcatggctgttttttcaccatttctgaagacggatccttcactcaacagctgtgtttgtttacagacctagaaatgaacgcaggacacatacgcttgatccaacggaactcccaggataccgtcattgcaaaacggacttcagctggctgcacatctgcgtcgcacggcggcttaaacatcaagccaactattaagatcccctctagcaacatactcctatcccctggagaagaactgcgagaatatggacagaaaatcaatatgttgataagacatattatgggcactggaaaaacacttaaaatgcgtggacacacactcagacatgcacattgagttgcatctttttatttaatcagaatataaggattgttacagatgcaattatgttcagagctagaaagaatatttatttagtaagctggggatgaagcttatatttctatagaatttatgtgccgttttactcagctagcacttaggacatatgtatatatgttatatatttgtatattgtccc

SEQ ID NO: 465327 - DNA, 1503 bp, Homo sapiens
  misc_feature (2)..(2): n is a, c, g, or t
  misc_feature (4)..(5): n is a, c, g, or t
  misc_feature (8)..(12): n is a, c, g, or t
  misc_feature (15)..(16): n is a, c, g, or t
anannatnnnnnacnngcactgggaaaatacactcactccaaatgggagaaattggtcaaaatgaaggggctacaggcctcaagcaagtccaaaatccagtgaggcagtcaaaccataaaggtccaaatgatctcctttatctgcatgtctcacatccagggcatgctgatgcaaaaggtgcacagggcaagctgtcagtgggtctaccattctggggtctggaggacagtgaccctcttctcacagctccactaggcagtgtcccagtggagactctgtgtggggggtccaaccctacctttcccttctgcactgccctagcaaaggtttgccatgagggctccacccctgcagcaaatttctgcctggacatccaggcatttccatacgtcctctcaaatctaggtggaggttcccaaacatcagttctttacttctatgcacccacaggttcaaaaccgcgtggaagctgccaaggcttggagctttgactcagggacctaggatccctccaccttgtgactttaccatctcaacatatgacctccgggatagagtgattatgtgttaacaaaggccaggcattcagcctatgtcccattgcttcccacacagaaagccaatcactgagacaatgagtaatgccagggaaaaaggctttattatgggtgacatcagccaaagagatgaacaccatgaagtcatcttctacttactcacaattggattataaactgtgtgagggcagagcctaagactaactcatgtctgcgttctaagatactggagcagtgtctggctcataaaggacatcaatgggtgtcctaaatacatgtcaattgcttgaattgaatgacagggcagattggctatggggcaggtctcagagtgtgtaggtttattcctagagcatatgggcccggaactttcttcaggaaagaaggtctgggaagtatgtgtgcagtgacatttcttgtgttcctccctaacttgaaaatccccctcttctgacaacagtgaggctctaggaccctgtccttacacttagtggacccaagcatggagcatgtgaccctggccagagccaatcagaatatccctggccagtggttcaggagtgggcacataagctaagtcagcccagcaagaatgaatcttaggacttcttcaaaaattactggaaaagacacttgctctttcctgctgaacttgaatagaaagctggagtcactggagctctcatgccactatagggaccatcggaatgaagccaacacaccaaggaaagccagaatgctgaaagacactagttactgctgaaatagcttgaagcaagtaaccagttttacccttggacttttcctattcctaggtataagtccaactagtagagccacgtctctaggaaggtcagcaagacaggagccttttttattgttattctttagcattaaataaaggctggagattggacatttcaagctccagggtctatgtttgga

SEQ ID NO: 465328 - DNA, 1074 bp, Homo sapiens
gatattgggagtaatgtcgtcctccccaaacctggatgttagcaatgagatcacagagggggtgtacacaccctgcgacattggaagtaatatgatcctctccccaactggatactgggaaagataccacagcgcgggggtgctgtacaattacttcgacattgggagaaacatcatcctctattttcctggatattgggcacaaaaacacaaaagggtgtacaacccctgcgatgtgtccaagacacacagagccacagaatctcacagatgtctgagaattcctcctcctgggactctcagaggatccagaactgcagccggtcctcgctttgctctccctgtccctgtccatgtatctggtcatggtgctgaggaacctgctcagcatcctggctgtcagctctgtctctcccctccacacccccacctgtgctgggctgacatcggtttcaccttggccacggttcccaagatgattgtggacatgcagtcgcatagcagagtcatctctcatgcgggctgtctgacgcagatgtctttcttcatcctttttgcatgtatagaaggcatgctcctgactgtgatggcctatgactgctttgtagccatctgtcgccctctgcactacccagtcatcgtgaatcctcacctctgtgtcttcttcgttttggtgtcctttttccttagcctgttggattcccagctgcacagttgaattgtgttacaattcaccatcatcaagaatgtggaaatctctcattttttctgtgacccctctcaacttctcaaacttgcctgttctgacagcgtcatcaatagcatattcatatatttcgatagtactatgtttggttttcttcccatttcagggatcctatggtcttactataaaatcatcccctccattctaaggatttcatcatcatatgggaagtataaagccttctccacatgtgcctctcacctagcagttgtttgctgattttatgtaacaggcattggcatgtacctgacttcagctgtgtcaccaccccccagcaatggtgtagtggcgtcagtgatgtatgctgc

SEQ ID NO: 465329 - DNA, 2473 bp, Homo sapiens
gacggcttgtgttgagggcaggaaagggtgcacacagctccggcaggtgcttccgcgagaaaggtgactgatacaacaacgtagaggaccctgcaatgtggagaggcatgaaactggaggtccagtgccgtgagttaacaatcaagacgtccatacaggagatgcattggtggatgggtgaagagatgataaaacggataattcagtggtgatcttcagaagaattccacaaaaaaccaaattaacagatgaaacaatctcataagccacttgaaactgaatttctctagaacaagagtctataaaattttttgatcaaacacccactggaaaaattttttagcgtggacacccagtatttgaagttcttggtaaattactgtgagtaaagatttaaccaaccccttgtccttatctatgaacaaacttcactttgtgttaactttaacttgtcatagaaaccttatgaaggcagagtgttcattgtggtataaaacaacattggttgtaggccaggcgcggtggctcacgcctgtaatcccaacactttgggaggccaagacaggtggatcacctgaggtcaggagttcaagaccagcctggcccacatggcaaaaccccatccctactaaaaatacaaaaattagctgggtgtggtggcacatgcatgtaatcccagctacctgggaggctgaggcacaagaatcacttgaactcaggaggtggaggttgcagtgagccgagatcacaccactacactccagcctaggtgacaagagtgaaactccatctccaaataaataaataaaacattgctcatggtaaaaatgacctctgacatgtagactgcctctggcttgaaagtactgaataatcttaaaacacctagtgggaagccatacctttagcctctgttactgtcttaactgaatgtgggaatctaaaagacaaactcagggaactggtttcccgccggtcaaggacttccaagccaagcccccacccataatggtttgctcctgaattgcatttgggccaaagagtagagctcttccatgcctgtaccgcagtgaagtgtgtttcttctcctcagtcctccaaagtggagctgctgccaggcgtggcattatatgagtgtcaggggttaaacctaagaagactacctagtgagcgctgcagtttcatacatatcctactgaaaatcttaaaagcaagctttgcttttttgtaaataaagcgaatatagaagtctttctcgtctcagtaatgatgaactggaaattctgttcccctcctccaacaaaacagattctgtggaaaacattttttgttgtattgctaggttttaggaataatgtttccaaaggatcaagaaggaagcaaaacgctgggcacagtgggaggcagagcacagggaatcagaactccagttataaggggacctacacagaagaaggtgacaacagagatggcatgttggttatgaacagggaaattgatcagatatataaatatatgaagggtgatggagctaagtttcacactgtgcaaatagggagttacttatatgaagaaaaagctaaaattaaccctatgtattacttggaaaaacaactgatttcagaactggggcatggaattcgcaagatcagcctggaacatcttgttccctccaaaaatcaaggaagtgcttgaatagtgataaagatatgtcaaaatgacacagaagtgagatttaatgggccaaagcagagatgagatgagcatcaaattaaataatgagagcaatagactaaaaacaggaaagcttgtgtctatacaaatattgataaataataaattgaactttatatggaaacagtatatcaaaatagttaaggtgttccttcctagaaaatatatattaattacatagtagaaaagaataattttcagtggaaaagcctctaaaaccaccctaactgatcaaagtaaacattttcaataatgggataaataaaagttgccacctgatataatacaataagaagagtacagcatcacttctgtgatcatcctgtcaaagatacctaaccaaatctaattctgaagaaaaaaggacaaactcaaattgagagacattccagaaaataattggcatgtaatcttcaaagatctaattacgaaagtcaaggaaacactaagaaaacatttcagactgaagaagaaaaagacatcacaactaaatgcaataaatgatcttttcactcttattgggacaatttgcaaaaattgatagggtctgaaggttagatggcagtaacacaccaagttaatttcccgatttcagtgattaatacgctgcatgtaggaagaaagcctttgtggtaaatacatactacatacagtgcttgtggctgatggggcatctgctcagcaacttggtcacacatgattcacaaaaaaagtttaattttactcttaaactttctac

SEQ ID NO: 465330 - DNA, 414 bp, Homo sapiens
gacggcttgtgttgagggcaggaaagggtgcacacagctccggcaggtgcttccgcgagaaaggtgactgatacaacaacgtagaggaccctgcaatgtggagaggcatgaaactggaggtccagtgccgtgagttaacaatcaagacgtccatacaggagatgcattggtggatgggtgaagagatgataaaacggataattcagtggtgatcttcagaagaattccacaaaaaaccaaattaacagatgaaacaatctcataagccacttgaaactgaatttctctagaacaagagtctataaaattttttgatcaaacacccactggaaaaattttttagcgtggacacccagtatttgaagttcttggtaaattactgtgagtaaagatttaaccaaccccttgtcctta

SEQ ID NO: 465331 - DNA, 1251 bp, Homo sapiens
gacggcttgtgttgagggcaggaaagggtgcacacagctccggcaggtgcttccgcgagaaaggtgactgatacaacaacgtagaggaccctgcaatgtggagaggcatgaaactggaggtccagtgccgtgagttaacaatcaagacgtccatacaggagatgcattggtggatgggtgaagagatgataaaacggataattcagtggtgatcttcagaagaattccacaaaaaaccaaattaacagatgaaacaatctcataagccacttgaaactgaatttctctagaacaagagtctataaaattttttgatcaaacacccactggaaaaattttttagcgtggacacccagtatttgaagttcttggtaaattactgtgagtaaagatttaaccaaccccttgtccttatctatgaacaaacttcactttgtgttaactttaacttgtcatagaaaccttatgaaggcagagtgttcattgtggtataaaacaacattggttgtaggccaggcgcggtggctcacgcctgtaatcccaacactttgggaggccaagacaggtggatcacctgaggtcaggagttcaagaccagcctggcccacatggcaaaaccccatccctactaaaaatacaaaaattagctgggtgtggtggcacatgcatgtaatcccagctacctgggaggctgaggcacaagaatcacttgaactcaggaggtggaggttgcagtgagccgagatcacaccactacactccagcctaggtgacaagagtgaaactccatctccaaataaataaataaaacattgctcatggtaaaaatgacctctgacatgtagactgcctctggcttgaaagtactgaataatcttaaaacacctagtgggaagccatacctttagcctctgttactgtcttaactgaatgtgggaatctaaaagacaaactcagggaactggtttcccgccggtcaaggacttccaagccaagcccccacccataatggtttgctcctgaattgcatttgggccaaagagtagagctcttccatgcctgtaccgcagtgaagtgtgtttcttctcctcagtcctccaaagtggagctgctgccaggcgtggcattatatgagtgtcaggggttaaacctaagaagactacctagtgagcgctgcagtttcatacatatcctactgaaaatcttaaaagcaagctttgcttttttgtaaataaagcgaatatagaagtc

SEQ ID NO: 465332 - DNA, 977 bp, Homo sapiens
tacagtagccacaaactgggccctgaaagcacatagccagtgtttcaggagtcttctccgtgcccttctaagtgagtatgagagagaacttttatggttcttgaaggcattatggcccccataatctctgaagccagggaaatacttaattccacattcatggcttttgggaattcaagtagaatccagaatgttggacctgatgctccatgaatttgtgggaatcaaatcaaggttgtcagtggttacagagtgccaagaggacttgatatttccatagattttcttcttccaaatgaagcttgaaattatttgtctatagttctgccggaggcctctccagattgtgatgcactgggagcaagccaccatgaacatatcctcaggtctccagtcttctgccatcgcatgaaaaatggagcttgtcaaacacagagcagagctgaactttctgaattccacaggacagttcagagtgcttggaatgacacccacctgcaatttaaacaaaaaagaaggatgagtaagtgaggagctaaaaattgcatgtttccctaaattagatttatttgtaagctttaagtaagtgcaaacatatttcgaattatctgttatgaattgtggttttgttattaaatagacattttgtttaattcttatgtgcaaagtgaaaagagacttgttttgctggatttttctttttgcaagatgcctaactggttacttatgcaagcattgttattgaaattagggggagtaaggggaataaaaaatgtatggaaattatgagtgttagaactgagcacaatcattgcagcatctgatgcagacatttcaggtaatggatcttctttatatactttggttacagggcttctcttattgaaagaacagttacttacaaatttaagtctggactcagcaaaaaataatgctatattggacgacctcagaatattttatagagtgcttatgag

SEQ ID NO: 465333 - DNA, 1221 bp, Homo sapiens
cactgtccagccagtcccagtgagatgaacaaggtctatttgatgctgtactatgctctggccctaaatattctgtctcaattatctgtccagtatgcttccttggatctggtttcaacatacttcggtagctcaatgatctttgttcctatccatattctaaattctatttctgtcatttcagctatttctgcctggttcagaacccctgctagagaggtgatgcagttgtttggagccgcagtggtagggcagctgcagcagagtgctagtgggtgccggggttcctgcctctctgtgggtgttcatcacggtagcagaggtaatacagcttgggggccacttctggtgattgtgtgcgtagttttcctggaggcgatgttggctccagttgggtgtggcactggcaggtgcaggtccgagtgccttctctgtgcctcacaagaaagagtggtcactcaggatggatatttggctaagtattgatcaataagataaagtggaatttgctgggtggtgggcgggggtcctttgtgtaataattttgtgtcttgataaagtaggaatatggctgggaccatccctgactctcttttttccttgaatgtgaacacatgagtgaagcatacatccattgtccatggggcaagaaacatgaggatgaaaagccaatatgttaaggacatgaagtgaaaagcgggaagagcttcttattcatgttatcactgagcagcgggaactgggggctctgctcattatagttgcccacggcctccagtcaatgaaatttccggccaatgaaatgctctactgtgactgaagcagcaaagagaagatgttctgccggaggcctctccagattgtgatgcactgggagcaagccaccatgaacatatcctcaggtctccagtcttctgccatcgcatgaaaaatggagcttgtcaaacacagagcagagctgaactttctgaattccacaggacagttcagagtgcttggaatgacacccacctgcaatttaaacaaaaaagaaggatgatttgctgctacatttgtgtgggaagtgctgcttgccgatagggaagtaggagaggaaataaggaaaacaataaaccaagtacagttttgcaaatacccagacacattggatggacacagaagctttcactgggagattatgaagggtagatgctttgtgtctccattgcctcctgtgatgtg

SEQ ID NO: 465334 - DNA, 1611 bp, Homo sapiens
cactgtccagccagtcccagtgagatgaacaaggtctatttgatgctgtactatgctctggccctaaatattctgtctcaattatctgtccagtatgcttccttggatctggtttcaacatacttcggtagctcaatgatctttgttcctatccatattctaaattctatttctgtcatttcagctatttctgcctggttcagaacccctgctagagaggtgatgcagttgtttggagccgcagtggtagggcagctgcagcagagtgctagtgggtgccggggttcctgcctctctgtgggtgttcatcacggtagcagaggtaatacagcttgggggccacttctggtgattgtgtgcgtagttttcctggaggcgatgttggctccagttgggtgtggcactggcaggtgcaggtccgagtgccttctctgtgcctcacaagaaagagtggtcactcaggatggatatttggctaagtattgatcaataagataaagtggaatttgctgggtggtgggcgggggtcctttgtgtaataattttgtgtcttgataaagtaggaatatggctgggaccatccctgactctcttttttccttgaatgtgaacacatgagtgaagcatacatccattgtccatggggcaagaaacatgaggatgaaaagccaatatgttaaggacatgaagtgaaaagcgggaagagcttcttattcatgttatcactgagcagcgggaactgggggctctgctcattatagttgcccacggcctccagtcaatgaaatttccggccaatgaaatgctctactgtgactgaagcagcaaagagaagatgggtggctttgaaatcagaattggatgcagagggagtcccagaggccaacactgtgaacataagaagggaaagaccagttctgcaagcacagatgtaattttgagaagcagagctacagttctgccggaggcctctccagattgtgatgcactgggagcaagccaccatgaacatatcctcaggtctccagtcttctgccatcgcatgaaaaatggagcttgtcaaacacagagcagagctgaactttctgaattccacaggacagttcagagtgcttggaatgacacccacctgcaatttaaacaaaaaagaaggatgagtaagtgaggagctaaaaattgcatgtttccctaaattagatttatttgtaagctttaagtaagtgcaaacatatttcgaattatctgttatgaattgtggttttgttattaaatagacattttgtttaattcttatgtgcaaagtgaaaagagacttgttttgctggatttttctttttgcaagatgcctaactggttacttatgcaagcattgttattgaaattagggggagtaaggggaataaaaaatgtatggaaattatgagtgttagaactgagcacaatcattgcagcatctgatgcagacatttcaggtaatggatcttctttatatactttggttacagggcttctcttattgaaagaacagttacttacaaatttaagtctggactcagcaaaaaataatgctatattggacgacctcagaatattttatagagtgcttatgag

SEQ ID NO: 465335 - DNA, 856 bp, Homo sapiens
tccttccaggaatgctctcacctgtaaaaatcacctgtagcctctttagtgtctgggacaacaggccggcactggccttgggtcggctgaggatggctgagaacaaaggctcccacctctgcttggagcccttggtggctcgtgaagctcttcacgtggtgcctggtgaccaaccctgggaccccaggcaacttcatgccaaccacaggccacagtgatacatggaaggacgctctagcacctttaggccacgccaatggaaggaggggtcctcccgcacctgcagaccacgctgatggatgaaggggttctcccatacctgcagaccaccctgatggatggaggggtcctcccgcacctgcagaccaccctgatggatggaggggttctcccgcacctgcagaccaccctgatggatggaggggtcctcccgcacctgcagaccacactgatggatggaggggttctccggcacctgcagaccacgctgatgcatggaggcgttctcccgcacctgcagaccacgctgatggatggaggggttctcccgcacctgcagaccacgctgatggatggaggggttctcctgcacctgcagaccatgctgatggatggaggggttctcccccacctgcagaccacgctgatggatggagaggttctcccgcacctgcagaccaccctgatggatggaggggtcctcctccacctgcaggccatgctgatggatggaggggtcctcctgcacctgcaggccatgctctgtgtgtgtgtgtgtgttttaactttgttgtttttgtaaatggacaatgtgtaattgtctatatttacggagtacaaaacaatgatacaatta

SEQ ID NO: 465336 - DNA, 779 bp, Homo sapiens
  misc_feature (2)..(2): n is a, c, g, or t
  misc_feature (4)..(5): n is a, c, g, or t
  misc_feature (9)..(10): n is a, c, g, or t
  misc_feature (12)..(13): n is a, c, g, or t
tncnntgcnncnngaatgctatacgccatgttgtgtccacaaaatgcgtaccccaaaggaaagacactatcttcaaacataaaagtacaagatgaagcaacaagtgctgatggagaagctgcagcaaattgtccagaagatccaggacctcctgtgaataccaaaatccacagatgctcaagtcgctggtatacgatggaaagttgtaacaacatatattgtattccaaccctctatgaaggtgccagactccaacttgtcagtgctcagcgctatgatttaaacccttttagttttgctcttttgccaaaggaagagggatactggaggtgggctctttgcagctgtaaaagtcagaataataaccctccaactgggagaggtaatgaaagaagatgttttctcagtgattggaattgctgctgcccggactggcataagccagttgttcaggaactattggatgctggtgaagatatcatttcaacttacattttctcggcttatgtagtcaatggtttaatctatgctgatgattaaatatctctttattaaaaacatgagttttttgttttgtttttatgtctgtttttccattttagttcctaaagcacagattgctccagcactgccatccctaattcccatatacacttctctgcaaagtgtcttcattgtggtgtcacttgtgtgtatctgtgtcctctgtgctataactgcaatgtgacccgtttcccatgaatgtcctggggtggtgcttgagcttttcatgggcttgc

SEQ ID NO: 465337 - DNA, 676 bp, Homo sapiens
ctttctcatctgcagcacgagggagaggaatgggctgaggcttgccatggtgctttcagggacaggcgtgggagcatctgtgggaaagttttcactgaattcagaagtatttggaactggggctggtcatctggatcccagaaaacactggcaaacacacgcacagaaatgcacagaaaaagaataccccaacattgaacaccaaaggccctcagactttggcgcctccattttgaagcaagtaacagaaaacccagatgactgcagcttacaaagtaaagacatttctctcccattacaagaagcgtggagaaagcatgttgtagaggctcagtgttgtcacagaggacctaggacgcttccaccttcctatgctgccatctcagtgttgggggatgacttccctcatggatgcaagaaggttactgaaacgccaagtataatgtcactacctcatgtggcaccgcgctttacggtaagggggtgagcataaacagaggggattccaagtgctgttctctttgagcaggggacatttttcccagaagcccctggtggttttcttcttgggacctgcttgcttgaacagcatcacctgcctctggcataggggaaagagattgccgttattggcttagaccaatcactaccttccctggcactggacacatgccac

SEQ ID NO: 465338 - DNA, 2482 bp, Homo sapiens
cggtcataaattgccctgtgtgagaaagggggccttgccagaggggaccttgagaaatgaagcgtaagcctggaaagggaattccagacctgggaagagcaggaacaaaagttcaaagggaggagatcgcagtgcgcgtgcagcttgctattgctgcggcgaaaactgtaacacgggaagcactaagagacagaaccgggaagaagcatgacacatggcggtcagccccagaggggacagtcatcctttatgacctccctgccttcagtgaggtcctcaagatgactgagcgcttcagcaccaggattcttaaccaaggagcagaaaacaggctgacacataaccctggtcagagcctgaccctaaacccagatctcagacccttaattctaaccacagactggcccaaccctgcagagattgtccatgaccctgaccacagactgacctaaatgaggctggtctaggagtgcatgcgggaattggaaatagatgtcctgcccatggaggccagagagctgtgtccacaaaaggacagggtgtgaccagccagagttgccggagttttggcaacttgtgtcttccataatagagctggggcattgatggaaatggagggtgctagaaccttgtgactttggccaggcaccaatcatctgcctccttctgtgcctgcctggctgcccctaccctggggctccctcctagcccccacctcacctactggctcactgagacagagccaaacatgaaagggaaggtgacggcctggccatagggcccaggaaaatgcaggtatcattaacagcctggagcactgtggcctgtccactctcaaccctctgctgcccaccccttcctggaatagaccccaggccacatacagagggggcaagcccaaggtatgataccagcagggccaagtggactgtccagatgggtaacgggggcctgccttcctctggcctccacataggggccgcaggtgttcacatggttggaaatgggagggccaatgctgttcataggccgctgtctggtccacaggactcaactggccctccgaacgctatcccactttccagccaggattgaaggagatcccatcttgggtctaaaggaatgggggtgaagactgcatcttgtcgttccagttccaccccattctggcatgggaagcatgtgtgggcttctactctatgggagattcatagcctcaatccttaaggaattctcaatctgaaaggaaaacacaaaccctgacctcagggagctcccagtttgacagtggagacagagaggccctgcatcaagtagaaaaacaacccccactgctctcaagcacacagcaatgaagatatgtatccttggtgctacaggcaaatgctgacgatacgacagtgaatacaacatgaaaaaacaagcacacttctcacccctatggagctttattctggtcaggcagaaggagaaggaaatgtaaacatgcaaggtcaggtactgctgtgaagcaaaataaagctgtgggtactgtgcgaaggataggctgtgtgtgtgtgtgtctgtgtgcgtgtgtgtgtgtgtgttgtgcatattaagtcaaaaaatgaatctggatgatcctgggccaggtctgaccccagcattgccactgactgtataatctcaagcaagtcatgcctcccctctgggcctcactttcctcatctgtaaagtgagaccgtggactgaaaggccattgtgatctggcctcagtcttgaccctccaggatctaacacattttgcctctgtgaatttaatggggggaattataggcagcttagaagcagttctgaaggagaacctctctgctccagcaattccctgaggttccaatttttctgttgatgtcacataatgtgcatagatttgcatactaggcccccaaactcccagggaaggcacgtctcaaaaatgtcaacgattagcacaaatgacttgacttatattcaggcctcttcccagagcaaggggaggaagttgaggtcacctccagctacaaagaaagcagaattctttgccctgaagaggcagagagaggagccctgcttcttctcctctccctggtgccctccagcccattccctcatctctgctcagacacccctggctggactccccaacaaatgcccagggggacctcctaaagacctactccgagtcacttgatgactttgcctaagcccctaacaggagctgcgtgaccctgccctgccctgttagtgtccagagcagcagctttcagggtttacagaagcctgggggatccagagcacctccaactccagtcccgccacctcagcccatgccaggccaatcctagaggctccaacctctaatacctcccaaggtaatgggaatcctaatgcctttcttttctctgcataggcttaaaccagatggcccatgacaagcccttccaattcccgtgtcccagagatg

SEQ ID NO: 465339 - DNA, 2299 bp, Homo sapiens
cggtcataaattgccctgtgtgagaaagggggccttgccagaggggaccttgagaaatgaagcgtaagcctggaaagggaattccagacctgggaagagcaggaacaaaagttcaaagggaggagatcgcagtgcgcgtgcagcttgctattgctgcggcgaaaactgtaacacgggaagcactaagagacagaaccgggaagaagcatgacacatggcggtcagccccagaggggacagtcatcctttatgacctccctgccttcagtgaggtcctcaagatgactgagcgcttcagcaccaggattcttaaccaaggagcagaaaacaggctgacacataaccctggtcagagcctgaccctaaacccagatctcagacccttaattctaaccacagactggcccaaccctgcagagattgtccatgaccctgaccacagactgacctaaatgaggctggtctaggagtgcatgcgggaattggaaatagatgtcctgcccatggaggccagagagctgtgtccacaaaaggacagggtgtgaccagccagagttgccggagttttggcaacttgtgtcttccataatagagctggggcattgatggaaatggagggtgctagaaccttgtgactttggccaggcaccaatcatctgcctccttctgtgcctgcctggctgcccctaccctggggctccctcctagcccccacctcacctactggctcactgagacagagccaaacatgaaagggaaggtgacggcctggccatagggcccaggaaaatgcaggtatcattaacagcctggagcactgtggcctgtccactctcaaccctctgctgcccaccccttcctggaatagaccccaggccacatacagagggggcaagcccaagccaggattgaaggagatcccatcttgggtctaaaggaatgggggtgaagactgcatcttgtcgttccagttccaccccattctggcatgggaagcatgtgtgggcttctactctatgggagattcatagcctcaatccttaaggaattctcaatctgaaaggaaaacacaaaccctgacctcagggagctcccagtttgacagtggagacagagaggccctgcatcaagtagaaaaacaacccccactgctctcaagcacacagcaatgaagatatgtatccttggtgctacaggcaaatgctgacgatacgacagtgaatacaacatgaaaaaacaagcacacttctcacccctatggagctttattctggtcaggcagaaggagaaggaaatgtaaacatgcaaggtcaggtactgctgtgaagcaaaataaagctgtgggtactgtgcgaaggataggctgtgtgtgtgtgtgtctgtgtgcgtgtgtgtgtgtgtgttgtgcatattaagtcaaaaaatgaatctggatgatcctgggccaggtctgaccccagcattgccactgactgtataatctcaagcaagtcatgcctcccctctgggcctcactttcctcatctgtaaagtgagaccgtggactgaaaggccattgtgatctggcctcagtcttgaccctccaggatctaacacattttgcctctgtgaatttaatggggggaattataggcagcttagaagcagttctgaaggagaacctctctgctccagcaattccctgaggttccaatttttctgttgatgtcacataatgtgcatagatttgcatactaggcccccaaactcccagggaaggcacgtctcaaaaatgtcaacgattagcacaaatgacttgacttatattcaggcctcttcccagagcaaggggaggaagttgaggtcacctccagctacaaagaaagcagaattctttgccctgaagaggcagagagaggagccctgcttcttctcctctccctggtgccctccagcccattccctcatctctgctcagacacccctggctggactccccaacaaatgcccagggggacctcctaaagacctactccgagtcacttgatgactttgcctaagcccctaacaggagctgcgtgaccctgccctgccctgttagtgtccagagcagcagctttcagggtttacagaagcctgggggatccagagcacctccaactccagtcccgccacctcagcccatgccaggccaatcctagaggctccaacctctaatacctcccaaggtaatgggaatcctaatgcctttcttttctctgcataggcttaaaccagatggcccatgacaagcccttccaattcccgtgtcccagagatg

SEQ ID NO: 465340 - DNA, 3277 bp, Homo sapiens
tgctgtttccgctgcctgcaacactgttccctgccttttcacctccctcacacctgcctgttcttgagcatcccagggaagcgtccactgatgccctaatggtgcatccacgtcggacacgctccaagcccaagtcctctcccctgcgccatctgggctggagtttcagtttgtttgtatagttttttgggttctcctcttttcctgccaggttttaagctttttgtcagcaagaaccagccctattttattcagccctggagcggcctctccaccaggcacacagcttagcacaaagcaggcctcagatgcacgctggacaaatgtgctggtatcctctgcatccttatggccagcatgatccatccagaaacccagtggaactgagccgcgagctggattccagctcacagaacacaccaagaactctggtgaaacatcaagaactctggggggtccccccagaaaaatctggggggcactgcagagcttctgacacggctctgggggaaatcccacacggatgggcagctgcctgcatctggcactgtggaggtgggcgggcagccatggaggatggggagactcatctttctagacttctcctggggaccgcatttcctccagcctccaggtccagaccaaaatagaatgaggtaaattcagcccctttcctgaagcacactcaaggaataaacaagcaccacaaatacagtcttcgggctgggtcatctttccaacctcatttttttttttttttaagagaaccacaggctgttttaagattccaaacccagagacagaaaaagtgcagcaaagcagggcgacaaggggaaagaaacttgacagtgctttgcagacagaaacaagtgacgcaatttccaaattcaagattctcaaaaacagaggctgggttggaacatctagagaaggccagagcgggctgttctaagacttattctcacggtagcatcctgaagccgggggggtccaggaagggggcaggctgaggacatcagcttgcacttggtaggccctcaccaggtcccagaagctgtgccggtgccaaagctgccccttgccaggaagccctcccggctgccctgtgtggttgacacttggcctctgtcatgcttcagtgaccccagaggcaggtcctgagtcaaggacttgaatgcaagtagtttgtctgagaggtgaccccaggaaccacctggagagggcggggaagtaaggcaagcttggagattgtcaaaacagaacactgtgggcctgggacttcagcccgtcagaacctcctggagcagctccagaggggtgcacctgaggacgagggcgctgtctcctgagggcgagggggctgtctcctgagggcgagggggctgtctcctgagggcgaggggctgtctcctgagggtgaggggctgtctcttgagggcgaggggctgtctcctgagggtgagggactgtctcctgagggtgagggggctggggaattctccatagaccttgactccgactcctcagtgggtcagagaaagttccccgcagagctcccacataggggaaggtgtgtggggaggggaagcctcgaggtctgcggctcagcgggtccatctctccgaggaggagtggaggccctgtccaaggtggcagttggtgaggctgacatggtgggagtcaccacctgagcagccagacatgggctggaggagaaatgctgtctacattcatggcagggacccccgccaggacaacctgtggtggcatctgcagagaaaagactcaaacaccagtgatgctggggaagctggaggatccctcttatgtccaggagccagactagggcctcagagatgcttttcctactgcaccgtgagcccccgcatgtggaacacccaaggggaaagggatggaggcaggactcagctggagaaagctttccaaggagaatgaccatgacaggtttgttgggaggctcctggttccagctctcaatcccacttgcaaacctgactcccaaaccaccccacccaccctctcccacttccgggacctgtgggttcaaccccagagcaagaggctgagcccgctccctaagcccacagcatggaggggaaagagcctgctattgaggacacctcaagtgccatctttaaagcgcccctaactaggccctggggaagagttaggagacaaagaacccttaccccaaaaaggctcttataatctcatttccactcaagaagcaaagccacatggagtgctctgtgccaggcactgaggtcgccatagctgaaagcccaggggttacaaggactccagtctggggaccccgtgtggctgtgacccacgtcactcaagttcagaagacatcgagccacagccagagtgagacagctggaaatgaggctggggctgaaaggtatctgtataaagatacctatcaacacagatatcaacagacatctgtatccagggagatggcaaggccagggccggcttcatgggcatctgacccgtgcagtcacacagggcccgacacacagaatcagggcctagttagaggcccttttaaagatgggaccctgacaatatctggtgacatttttggtttcacaactgagtgtggggatgtgtcattggcatctggtgggcagaagccagggctgctaccgaatgccctactatgcccaggatggcccttaaccccagagaatgagccacccccaaaggtcactactgcggaggctcggaaaccgaaaccctgcctcaaatgacagggtataaacacttcagctctcttgacgggactagggtgagggtgcaactttgtctccagaacctctagcaggaagagtgagccaaagtcacccttcggggtgctctgcgcagcaccgctccctcacctggcctccccatctccccactgcccgatgctcctaaaggcctttcctggaaacattttctaatccttcactctcacagccacacaatcctcagctgagggtgagctttggagaaacctgacctgaaaccagtggccaacaggtttcacttgatggcagcttcactcaactggcagtggctgccttatttagagacctgtaccaaggatccagggaaagggagggaaagggatccattagcaatgcctgccttggtcccaggaggagaagggtggcatgcgtgctggaatgcaagaccaggtgtcagctttccttcctcctttcttggggtggcaaaatggaaagccatgggcattgttgaggaaaaa

SEQ ID NO: 465341 - DNA, 3066 bp, Homo sapiens
tcaaagtccacttgcaggattatgtgccaggactgccctctcccctacaagcccttccaggacctggctggctgtgcagggtgccgacacaggaacaagctctatgcagggcccatagccagactaggcatgtcgcctcaaggggaatgtggcagcgaccatgcgagggtgactgtgaccctgaagccccagaaaggggtgttacggtgttcctttagttctgctgtccatggatggtggaggctgtggacagtaaaaagacatgcagcaccaaggcaggggagaggagagtgctataaacagaccttggctaccgaaaagcaggataaagccaaagccagtctgtcccctcctgatgtctccctaggggacaagtccttgaggggacaactgaagcgcaaaataggcattttcatctacaactcttcatcttctatagaacaacattgaagtttcctgattaccactgattgattttctgtgtggagttctctgccacgacctgatagaatattggaaattatttaagatagtaatttgagaataactaataataaacccttctcactgatggcattgacagtaattaggccactgagccaattgtgtcttgagactagtcctagttgcattatcaagagcaactttctattcacaacagccacgaaatattcattgaattcttctaaaagcagcgtcatatcatgcacatgtattttataggaaagttaaaaaacaactttcacatcgtcaaaataattgccaatctgccaggctcgtgcctgccaactctggttcttattggatttttaaatgtgaatcatgtatccataactgtgagtccacattaatgttctgccagagcctggcatcagcctctgcatagacaatcacaagccaatagagagggaatggaaacagcactctattgatcttggcttatttattcataaactaggaaagcagttgaacagctatgcgagaagcctactttctcttcatgtaacacgttggcctaagagatctatagagctttttaaaaacaaagaaggcagcaagatttaaaataataaaaccagcaataggtatttttaaaagtgagagaaactatcagagagctgtagcagaaaagcaagttaaaaataaaggaaacagaaaaggaactgatacagctgatttgatactggaaaaatcacccaggaggcagcgtggacaatggattggagaagggcgaacattcagtcagagactttgtgagcttactgtaaattagagggagcaaattggaggagaaatgacaaaagaaacagaaaaaatgtttaatcagacaaaggaactaaaaaacctcagtcttaattagaagatggtcaaacaaatctcttaactgatgttcacaatgatggtttcaagtcatctaaggaatgggagaaaatacaactggtgaattgcaaagatattaagaaatttttttcatgacctccaaagaataaaattataaaacttattcttacctttttgtttcctgtaaacgtgtggtatattccccttgtccctcacgacaaacttctctatgatttcctcaatggttaaggccccaaatgatacattaaaaaatatacatttgttttatattttcaaagtattcttaatctttaattaggaactacactgaaactctgttgtcaatgcccctacgaagactgaaagagatgtgatggttttaagactggtgcctatggtcaaaagaatatactgactgcttccaaatgtctataaataaattatggtttcttaaaggcccatgaaatgaaactttatttcttgtcattagttatctaatttcttaaaggttatctttgttaggaatggaatcaatttaatgatttaaatatttttcaaacattttataacacatttttatactagaattcttgtttgctttcaattgcctttctcattctttttactttcattccatgttttccttctgaattataattgtgtattctattctggatgaaatactcatatttctctaaaatgtggctagtaaacaaaaccatgtaagagtgtacataagagggaacctcagatctctttcatctgtgatttttaaagttatccttggctttactaaaccatgggttgctatggctgttgtcattgcagttaaatatagactctaatttagataatcataggataaaacccaaagtgacgtactgtttcaaataaaacactgataccccttcatatacacaatggtgggagagacatactgtatttaacattcaaccagttgtctgggtattgaactctgttatttcagtagtcagtataaacacaaccagagagaagcaaatcagaaggaaaacaacaaagagaagcaaatcagaaggaaaacaacaaaaatttctgcattttgtttcctcaagcaaaaaggccttattaggaaaaaacaaaacacttttactaaatgcaccatattactaaatccaacatattcaggaatgtgtattgtggcatttatctgagagaatcacgtggttggattttacatcttttatcccagcccaacagttgaatggtttgtatatttgaaaactaactataactttagtcgcatttcatagctttttctttgaagtatccttattttaataagtttccaagtaatttgtcctgtataatcttatttcttctttttattttattttattttttaagttccagggtacatgtgcaggatgtgcagtgtgtaaaaagttgccagctgctacagatgtttacagaaggtagttaaaagagacaaactgtatgaattagaaatgttcattaaaacctgccgaggcctcacaagatgaagattaaaaaaaaaaaatttgtccaagcaaactgcaagatcacaagcaagatccatgtcttaccattagtattacaagcaagatctatgtcttaccgttagtgttaagtaatctgaaatgccttaagggtactaaggcaatcatattaaagaatgctttactttttacttaattagagccagattttaattatggggaaaaa

SEQ ID NO: 465342 - DNA, 582 bp, Homo sapiens
gtttgggtgaggcgttaacagtgggcgggcgtggctcgggctcgagggcgtggctcaggctcgtggaggcgtccgagctccagggcagctctggggcagaactgtccggatctaacaatccctggggagccggagaccggtgaccgccgccctgcccgcaggccatgtggcccccgctgttgctgctgctgctgctgctcccggccgccccggtccccaccgccaaagccgctccccacccggatgctaacacccaggaaggccttcagaacctgctccaaggagtcggggctggcggagacggagagctgcgggcagactcacacctggccccgggctctggctgtattgatggggctgtggtggccacgcgaccagaaagccggggaggaagacctgcggttccgtgagaggcgtccagggctgcaggccacggcgacaggctccggggaacatggggctttccctgtccactcccaaggagtgtgggcctcaacgcattggcaggggacggccgtgtgccctctccagaccccacccccagatgcatttattagaaataataaagttctttcttagcta

SEQ ID NO: 465343 - DNA, 679 bp, Homo sapiens
gccagtgaagggagaggtgaacggcgtcctttgaagcgggtatcagctgcctcagacccagttagcacagaacttttttcccaagggtaaggctgaggctgtttcacctccctccctggccacctctaaaatgattggtataggggcttccccaccccttagctcccctatcctgggctagaaggccacagggactgtcctctagaattcttcctcccctcccccacaccattcattcaattcgtgaaacaaatcttcaccgagagcagtttatgtgctaggaacatcattctatccttgcaacctggaacaagaccagctaccaccttagcttcatcccctacttgcaccaaccagtcccgggttagatctcaaatgccggaagtcagggatgcccaactctgggcagccccagtcagaacctctgggatctcagtgaagctggcctggcctctgctcttgctctcaaggggctgcttttcaaccaagagccttgtgagcctggtctgagccttgcacagccactgagtattttttattccttagccagtgtacctcctacctcagagtctatgtgagaggaagagaatgtgtgtccctgtgggtctctgcaagtgacagatgtgttgtttttaacagtattattaggttatgattaaagcctcatgaaatcctctaa

SEQ ID NO: 465344 - DNA, 669 bp, Homo sapiens
cattcggcacgaccggctcttttaaatgaccccaggcgtgggtacagtgaccgccgccctgcccgcaggccatgtggcccccgctgttgctgctgctgctgctgctcccggccgccccggtccccaccgccaaagccgctccccacccggatgctaacacccaggaaggccttcagaacctgctccaaggagtcggggctggcggagacggagagctgcgggcagactcacacctggccccgggctctggctgtattgatggggctgtggtggccacgcgaccagaaagccggggaggaagacctgcggttccgtgagaggcgtccagggctgcaggccacggcgacaggctccggggaacatggggctttccctgtccactcccaaggagtgtgggcctcaacgcattggcaggggacggccgtgtgccctctccagaccccacccccagatgcatttattagaaataataaagttctttcttagctaaaaaaaaaaaaaaaaaaaaaaaaaacacaaagaaaaaacaacgaaaagcaaaccaaagcgaacagcgcgacacgccagaacacacagcaaaagaagaacgcgggggggccgccccacgagagagagtcgacggacggggggcacacgacagcaccgacctgtagacagcggcgcgcccaa

SEQ ID NO: 465345 - DNA, 606 bp, Homo sapiens
tccctggaattaaaaaatttaaagcaaaatatttgtaagaggagcaaagcagcaacctatataacgtactaaaaaaaacacctataatataaaaaaaaatggtgaaaggattagctattattataataaatggaaaaaagttgccctcccccacaccattcattcaattcgtgaaacaaatcttcaccgagagcagtttatgtgctaggaacatcattctatccttgcaacctggaacaagaccagctaccaccttagcttcatcccctacttgcaccaaccagtcccgggttagatctcaaatgccggaagtcagggatgcccaactctgggcagccccagtcagaacctctgggatctcagtgaagctggcctggcctctgctcttgctctcaaggggctgcttttcaaccaagagccttgtgagcctggtctgagccttgcacagccactgagtattttttattccttagccagtgtacctcctacctcagagtctatgtgagaggaagagaatgtgtgtccctgtgggtctctgcaagtgacagatgtgttgtttttaacagtattattaggttatgattaaagcctcatgaaatcctctaa

SEQ ID NO: 465346 - DNA, 829 bp, Homo sapiens
ccacaactgtgtctagtacgatgctcggtgtgtaattcggccgaggcggcgtggtagcgaaggtcgccgaacccgcctggctagccggcgagttgagtggcgactcttttgaaacagatggtcaccatgtttagatattagcagtcccgtatgtgcatgtctgcatttgaaaatggaagagggaaacaacaatgaagaggtaattcacttgaacaactttcactgccatcggggacaagactttgtaattttcttctggaaaacccagattatccaaagagagaagacagaatcattataaatcccagtagcagtctgctggccagccaagatgagacaaagttgcctaaaataagacttttttgactattctaaattgactcctcttgaccagcactgcttcatccaagctgctgacctcctcatggccgacttcaaagtgctcagtagtcaggacatcatgtgggccctgcacgagctcaaaggacactatgcaatcacccgaaaggccttttctgatgccattaaaaaatggcaggagctatcaccagaaaccagtggaaaaaggaaaaagagaaaagaaatgaaccagtattcttaaattgatttcaagtttgaacaagtgtaccactggtataaaaatagacagaccagtggaacagaataaagagcgcggaaataaagccaaatactacagccaacagatcatcgacaaggtaaacaaaaacttaaagtggggaaaggacaccctattcaacaaatgctgctgggataattggcaagccacacgtagaagaataaaactggatcctcatctctcaccttatac

SEQ ID NO: 465347 - DNA, 3060 bp, Homo sapiens
  misc_feature (1)..(3): n is a, c, g, or t
  misc_feature (7)..(7): n is a, c, g, or t
nnncctncgcctcgtgggggagtcaagtctccgtaggcggagagcccggatgcaggcgcggctaggcggccctctctatggtgagccccccggtccctcctccgcagcacccggagtgcctctatggttcttcctgtcgttagtcgggagggggcgctgtacgcgcgctgtacgcttgcgcgaggtgacgccggggcagggccggaaggaatgcagcggctgccacggagctcgtagctgcagctttggaggagtaagcggcgtggtagcgaaggtcgccgaacccgcctggctagccggcgagttgagtggcgactcttttgaaacagatggtcaccatgtttagatattagcagtcccgtatgtgcatgtctgcatttgaaaatggaagagggaaacaacaatgaagaggtaattcacttgaacaactttcactgccatcggggacaagactttgtaattttcttctggaaaacccagattatccaaagagagaagacagaatcattataaatcccagtagcagtctgctggccagccaagatgagacaaagttgcctaaaataagacttttttgactattctaaattgactcctcttgaccagcactgcttcatccaagctgctgacctcctcatggccgacttcaaagtgctcagtagtcaggacatcatgtgggccctgcacgagctcaaaggacactatgcaatcacccgaaaggccttttctgatgccattaaaaaatggcaggagctatcaccagaaaccagtggaaaaaggaaaaagagaaaagaaatgaaccagtattcttaaattgatttcaagtttgaacaaggtaatgcaaactatgttggtggcagtgtgtagctgcaacaccgtaccttcttcacagtcagtgaaggaagctgtgctacaggtgtctgctgagcatctggacaggaactattttctcagcacgtcaaaatttttagaaagtggctgcccttgttggcttccttcttcctacttaagataaactgtgagaggaaaattttgtgtggtgttagaaaattcatgtgtgagaagaggccttgggctccaggacccagtcaggcagccctggacttgaccctaaaagggagtaaagacaaatgcgaagttcaatcaggggttcagagctcccaaagctcatagcctggagcttcttaacctttaggcagggtagagacatttaaaacggcccctaaacttggggggcgcgtaggctcatgggaaatagagtagggtgcttgtcctgggaccagctgtgggccccggaggctgacttccggtgcactcctgcgcgtgtgcacctctctctgtgtgcgtgttcgcgcatgcgcgccgccgctgcactgccctcgcttcctgtgcgtcctcaggtcaccgcttgctctagttcccaggctttggcctccagtggacgagaatcgcggagcctgcggggctggaggttgagcgcccgggccagcacctaggcgggcgcgggggtgtgcaggccagggttcgcgcgggccgggtggaggcttgagcggggacccccgagcttgagccccggagccggcggcgctggggccagaggggccggacgggaggtggcggaggtggcggcggaggcgaaggggcggcgggacgcgggcctggcccgtgtgtgtcctggcggcctggcccaggctgccgctgtacggtgagcccgagggaggcggatctgggtcccgggaaggacacccgcctggatttgccccttaggcccggcccgggcccctcgggagcagaacaaccttagtgaggtggacaggaggggacctcgcgagcagacgcgcgccagcgacagcagccccgccccggcctctcgggagccgtggggcagaggctgcggagccccagaagggtaggtcttgggttttcgggcccggagcgagaagggcctgagtgaagtcaccgtgtgttggggaccttagagtgtggggcagggggagggtctcgatcgcttgcaggagagacgtgtgtttgggtttgagggcagggtccggctgcaccgaacaggcgctgcatgggaaatctgggaggacgaggcttatgggggcctggagggtgtcaccagcctcagctgcggacgtcgtctccactccccgctaacccctaacagcccttcctcctcctttccgtgctccagatttcgacctcctctaaacgtccgtcagcgcctctgttctctcatttaagtgtctgctgattccccccttagatctgccctggagactggtctaccagccacagtctctgcacgtttccaagagcagcagaaaatgaacacattgcaggccagtgtcattcaaagatgtggctgtggatttcacccaggaggagtggcagcagctggaccctgatgagaagataacttacagggatgtgatgttggagaactatagccatctagtttctgtgggatatgataccaccaagccaaacgtcatcattaagttggagcagggagaggagccgtggataatgggaggtgaatttccatgtcaacatagtccagaagcctggagagttgatgacctgatagagagaatccaagaaaacgaagacaaacattcaagccgccctgcccgcaggccatgtggcccccgctgttgctgctgctgctgctgctcccggccgccccggtccccaccgccaaagccgctccccacccggatgctaacacccaggaaggccttcagaacctgctccaaggagtcggggctggcggagacggagagctgcgggcagactcacacctggccccgggctctggctgtattgatggggctgtggtggccacgcgaccagaaagccggggaggaagacctgcggttccgtgagaggcgtccagggctgcaggccacggcgacaggctccggggaacatggggctttccctgtccactcccaaggagtgtgggcctcaacgcattggcaggggacggccgtgtgccctctccagaccccacccccagatgcatttattagaaataataaagttctttcttagcta

SEQ ID NO: 465348 - DNA, 3115 bp, Homo sapiens
  misc_feature (1)..(3): n is a, c, g, or t
  misc_feature (7)..(7): n is a, c, g, or t
nnncctncgcctcgtgggggagtcaagtctccgtaggcggagagcccggatgcaggcgcggctaggcggccctctctatggtgagccccccggtccctcctccgcagcacccggagtgcctctatggttcttcctgtcgttagtcgggagggggcgctgtacgcgcgctgtacgcttgcgcgaggtgacgccggggcagggccggaaggaatgcagcggctgccacggagctcgtagctgcagctttggaggagtaagcggcgtggtagcgaaggtcgccgaacccgcctggctagccggcgagttgagtggcgactcttttgaaacagatggtcaccatgtttagatattagcagtcccgtatgtgcatgtctgcatttgaaaatggaagagggaaacaacaatgaagaggtaattcacttgaacaactttcactgccatcggggacaagactttgtaattttcttctggaaaacccagattatccaaagagagaagacagaatcattataaatcccagtagcagtctgctggccagccaagatgagacaaagttgcctaaaataagacttttttgactattctaaattgactcctcttgaccagcactgcttcatccaagctgctgacctcctcatggccgacttcaaagtgctcagtagtcaggacatcatgtgggccctgcacgagctcaaaggacactatgcaatcacccgaaaggtactctacttggtcttcctgttggggtcacacctcttgactacatcttcacacggccttttctgatgccattaaaaaatggcaggagctatcaccagaaaccagtggaaaaaggaaaaagagaaaagaaatgaaccagtattcttaaattgatttcaagtttgaacaaggtaatgcaaactatgttggtggcagtgtgtagctgcaacaccgtaccttcttcacagtcagtgaaggaagctgtgctacaggtgtctgctgagcatctggacaggaactattttctcagcacgtcaaaatttttagaaagtggctgcccttgttggcttccttcttcctacttaagataaactgtgagaggaaaattttgtgtggtgttagaaaattcatgtgtgagaagaggccttgggctccaggacccagtcaggcagccctggacttgaccctaaaagggagtaaagacaaatgcgaagttcaatcaggggttcagagctcccaaagctcatagcctggagcttcttaacctttaggcagggtagagacatttaaaacggcccctaaacttggggggcgcgtaggctcatgggaaatagagtagggtgcttgtcctgggaccagctgtgggccccggaggctgacttccggtgcactcctgcgcgtgtgcacctctctctgtgtgcgtgttcgcgcatgcgcgccgccgctgcactgccctcgcttcctgtgcgtcctcaggtcaccgcttgctctagttcccaggctttggcctccagtggacgagaatcgcggagcctgcggggctggaggttgagcgcccgggccagcacctaggcgggcgcgggggtgtgcaggccagggttcgcgcgggccgggtggaggcttgagcggggacccccgagcttgagccccggagccggcggcgctggggccagaggggccggacgggaggtggcggaggtggcggcggaggcgaaggggcggcgggacgcgggcctggcccgtgtgtgtcctggcggcctggcccaggctgccgctgtacggtgagcccgagggaggcggatctgggtcccgggaaggacacccgcctggatttgccccttaggcccggcccgggcccctcgggagcagaacaaccttagtgaggtggacaggaggggacctcgcgagcagacgcgcgccagcgacagcagccccgccccggcctctcgggagccgtggggcagaggctgcggagccccagaagggtaggtcttgggttttcgggcccggagcgagaagggcctgagtgaagtcaccgtgtgttggggaccttagagtgtggggcagggggagggtctcgatcgcttgcaggagagacgtgtgtttgggtttgagggcagggtccggctgcaccgaacaggcgctgcatgggaaatctgggaggacgaggcttatgggggcctggagggtgtcaccagcctcagctgcggacgtcgtctccactccccgctaacccctaacagcccttcctcctcctttccgtgctccagatttcgacctcctctaaacgtccgtcagcgcctctgttctctcatttaagtgtctgctgattccccccttagatctgccctggagactggtctaccagccacagtctctgcacgtttccaagagcagcagaaaatgaacacattgcaggccagtgtcattcaaagatgtggctgtggatttcacccaggaggagtggcagcagctggaccctgatgagaagataacttacagggatgtgatgttggagaactatagccatctagtttctgtgggatatgataccaccaagccaaacgtcatcattaagttggagcagggagaggagccgtggataatgggaggtgaatttccatgtcaacatagtccagaagcctggagagttgatgacctgatagagagaatccaagaaaacgaagacaaacattcaagccgccctgcccgcaggccatgtggcccccgctgttgctgctgctgctgctgctcccggccgccccggtccccaccgccaaagccgctccccacccggatgctaacacccaggaaggccttcagaacctgctccaaggagtcggggctggcggagacggagagctgcgggcagactcacacctggccccgggctctggctgtattgatggggctgtggtggccacgcgaccagaaagccggggaggaagacctgcggttccgtgagaggcgtccagggctgcaggccacggcgacaggctccggggaacatggggctttccctgtccactcccaaggagtgtgggcctcaacgcattggcaggggacggccgtgtgccctctccagaccccacccccagatgcatttattagaaataataaagttctttcttagcta

SEQ ID NO: 465349 - DNA, 1497 bp, Homo sapiens
  misc_feature (1)..(3): n is a, c, g, or t
  misc_feature (7)..(7): n is a, c, g, or t
nnncctncgcctcgtgggggagtcaagtctccgtaggcggagagcccggatgcaggcgcggctaggcggccctctctatggtgagccccccggtccctcctccgcagcacccggagtgcctctatggttcttcctgtcgttagtcgggagggggcgctgtacgcgcgctgtacgcttgcgcgaggtgacgccggggcagggccggaaggaatgcagcggctgccacggagctcgtagctgcagctttggaggagtaagcggcgtggtagcgaaggtcgccgaacccgcctggctagccggcgagttgagtggcgactcttttgaaacagatggtcaccatgtttagatattagcagtcccgtatgtgcatgtctgcatttgaaaatggaagagggaaacaacaatgaagaggtaattcacttgaacaactttcactgccatcggggacaagactttgtaattttcttctggaaaacccagattatccaaagagagaagacagaatcattataaatcccagtagcagtctgctggccagccaagatgagacaaagttgcctaaaataagacttttttgactattctaaattgactcctcttgaccagcactgcttcatccaagctgctgacctcctcatggccgacttcaaagtgctcagtagtcaggacatcatgtgggccctgcacgagctcaaaggacactatgcaatcacccgaaaggtctaccagccacagtctctgcacgtttccaagagcagcagaaaatgaacacattgcaggccagtgtcattcaaagatgtggctgtggatttcacccaggaggagtggcagcagctggaccctgatgagaagataacttacagggatgtgatgttggagaactatagccatctagtttctgtgggatatgataccaccaagccaaacgtcatcattaagttggagcagggagaggagccgtggataatgggaggtgaatttccatgtcaacatagtccagaagcctggagagttgatgacctgatagagagaatccaagaaaacgaagacaaacattcaagccgccctgcccgcaggccatgtggcccccgctgttgctgctgctgctgctgctcccggccgccccggtccccaccgccaaagccgctccccacccggatgctaacacccaggaaggccttcagaacctgctccaaggagtcggggctggcggagacggagagctgcgggcagactcacacctggccccgggctctggctgtattgatggggctgtggtggccacgcgaccagaaagccggggaggaagacctgcggttccgtgagaggcgtccagggctgcaggccacggcgacaggctccggggaacatggggctttccctgtccactcccaaggagtgtgggcctcaacgcattggcaggggacggccgtgtgccctctccagaccccacccccagatgcatttattagaaataataaagttctttcttagcta

SEQ ID NO: 465350 - DNA, 2558 bp, Homo sapiens
  misc_feature (1)..(3): n is a, c, g, or t
  misc_feature (7)..(7): n is a, c, g, or t
nnncctncgcctcgtgggggagtcaagtctccgtaggcggagagcccggatgcaggcgcggctaggcggccctctctatggtgagccccccggtccctcctccgcagcacccggagtgcctctatggttcttcctgtcgttagtcgggagggggcgctgtacgcgcgctgtacgcttgcgcgaggtgacgccggggcagggccggaaggaatgcagcggctgccacggagctcgtagctgcagctttggaggagtaagcggcgtggtagcgaaggtcgccgaacccgcctggctagccggcgagttgagtggcgactcttttgaaacagatggtcaccatgtttagatattagcagtcccgtatgtgcatgtctgcatttgaaaatggaagagggaaacaacaatgaagaggtaattcacttgaacaactttcactgccatcggggacaagactttgtaattttcttctggaaaacccagattatccaaagagagaagacagaatcattataaatcccagtagcagtctgctggccagccaagatgagacaaagttgcctaaaataagacttttttgactattctaaattgactcctcttgaccagcactgcttcatccaagctgctgacctcctcatggccgacttcaaagtgctcagtagtcaggacatcatgtgggccctgcacgagctcaaaggacactatgcaatcacccgaaaggtactctacttggtcttcctgttggggtcacacctcttgactacatcttcacacggccttttctgatgccattaaaaaatggcaggagctatcaccagaaaccagtggaaaaaggaaaaagagaaaagaaatgaaccagtattcttaaattgatttcaagtttgaacaaggtactgggctgctgggggatcccaagtgagcagagtctgttttctaccctcgaggagctcagagaaaaggaaatagataattactgtgtgatgagactccagacagaggggttggcatctgcacatccttcctgggcatctcgtgggcactgctcgattaccaccaggccttgcacacctgcctcccctccaagcccctcctgggcctgggctcctctgtgatctacgtcctgtggaacctgctgctactgtggccccgagtcctagctgtggccctgttctcagccctcttccccagtatgtagccctgcatttcctgggcctgtggctggtactgctgctctgggtttggcttcaaggcacagacttcatgctggaccccagttccgagtatcctctatttctcctggttcaacgtggctgagggccacacccgaggccgggccaccatccacttggctttcctcctgagtgacagcattctcctggtggccacctgggtgacttacagctcctggctgcccagcaggattccactgcagctgtggctgcctgtaggaggcggatgcttctttctgggcctggctctgtggcttgtgtgctactgctggctgcaccctagctgatgctgggagcccaaccctgaccaggtggacaggacccagagtctactttcctcagaggggtatcagctgcctcagacccagttagcacagaacttttttcccaagggtaaggctgaggctgcttcgccagtgaagggagaggtgaacggcgtcctttgaagcaggatcagacccagccagcagagatggagagtgactgctggcagaaggcaggcgaggataagctaacgatgctgctgtggcctccatgcactcagcaagagtgggatgcctctgctgggccgtgcaccagggatggtgctgagtggggcagaggcctgccttcaaggagttcacagtgaacaagatgagaagggctgggccctgcagggtcaagagccccaattacgtacaagacactttgggaggaaagaagactaccttttcttttccccctgccattggtatagctggtgccccaaaactttcacctccctccctggccacctctaaaatgattggtataggggcttccccaccccttagctcccctatcctgggctagaaggccacagggactgtcctctagaattcttcctcccctcccccacaccattcattcaattcgtgaaacaaatcttcaccgagagcagtttatgtgctaggaacatcattctatccttgcaacctggaacaagaccagctaccaccttagcttcatcccctacttgcaccaaccagtcccgggttagatctcaaatgccggaagtcagggatgcccaactctgggcagccccagtcagaacctctgggatctcagtgaagctggcctggcctctgctcttgctctcaaggggctgcttttcaaccaagagccttgtgagcctggtctgagccttgcacagccactgagtattttttattccttagccagtgtacctcctacctcagagtctatgtgagaggaagagaatgtgtgtccctgtgggtctctgcaagtgacagatgtgttgtttttaacagtattattaggttatgattaaagcctcatgaaatcctctaa

SEQ ID NO: 465351 - DNA, 2898 bp, Homo sapiens
  misc_feature (1)..(3): n is a, c, g, or t
  misc_feature (7)..(7): n is a, c, g, or t
nnncctncgcctcgtgggggagtcaagtctccgtaggcggagagcccggatgcaggcgcggctaggcggccctctctatggtgagccccccggtccctcctccgcagcacccggagtgcctctatggttcttcctgtcgttagtcgggagggggcgctgtacgcgcgctgtacgcttgcgcgaggtgacgccggggcagggccggaaggaatgcagcggctgccacggagctcgtagctgcagctttggaggagtaagcggcgtggtagcgaaggtcgccgaacccgcctggctagccggcgagttgagtggcgactcttttgaaacagatggtcaccatgtttagatattagcagtcccgtatgtgcatgtctgcatttgaaaatggaagagggaaacaacaatgaagaggtaattcacttgaacaactttcactgccatcggggacaagactttgtaattttcttctggaaaacccagattatccaaagagagaagacagaatcattataaatcccagtagcagtctgctggccagccaagatgagacaaagttgcctaaaataagacttttttgactattctaaattgactcctcttgaccagcactgcttcatccaagctgctgacctcctcatggccgacttcaaagtgctcagtagtcaggacatcatgtgggccctgcacgagctcaaaggacactatgcaatcacccgaaaggccttttctgatgccattaaaaaatggcaggagctatcaccagaaaccagtggaaaaaggaaaaagagaaaagaaatgaaccagtattcttaaattgatttcaagtttgaacaaggtactgggctgctgggggatcccaagtgagcagagtctgttttctaccctcgaggagctcagagaaaaggaaatagataattactgtgtgatgagactccagacagaggggttggcatctgcacatccttcctgggcatctcgtgggcactgctcgattaccaccaggccttgcacacctgcctcccctccaagcccctcctgggcctgggctcctctgtgatctacgtcctgtggaacctgctgctactgtggccccgagtcctagctgtggccctgttctcagccctcttccccagtatgtagccctgcatttcctgggcctgtggctggtactgctgctctgggtttggcttcaaggcacagacttcatgctggaccccagttccgagtatcctctatttctcctggttcaacgtggctgagggccacacccgaggccgggccaccatccacttggctttcctcctgagtgacagcattctcctggtggccacctgggtgacttacagctcctggctgcccagcaggattccactgcagctgtggctgcctgtaggaggcggatgcttctttctgggcctggctctgtggcttgtgtgctactgctggctgcaccctagctgatgctgggagcccaaccctgaccaggtggacaggacccagagtctactttcctcagaggggtatcagctgcctcagacccagttagcacagaacttttttcccaagggtaaggctgaggctgcttcgccagtgaagggagaggtgaacggcgtcctttgaagcaggatcagacccagccagcagagatggagagtgactgctggcagaaggcaggcgaggataagctaacgatgctgctgtggcctccatgcactcagcaagagtgggatgcctctgctgggccgtgcaccagggatggtgctgagtggggcagaggcctgccttcaaggagttcacagtgaacaagatgagaagggctgggccctgcagggtcaagagccccaattacgtacaagacactttgggaggaaagaagactaccttttcttttccccctgccattggtatagctggtgccccaaaactttcacctccctccctggccacctctaaaatgattggtataggggcttccccaccccttagctcccctatcctgggctagaaggccacagggactgtcctctagaattcttcctcccctcccccacaccattcattcaattcgtgaaacaaatcttcaccgagagcagtttatgtgctaggaacatcattctatccttgcaacctggaacaagaccagctaccaccttagcttcatcccctacttgcaccaaccagtcccgggttagatctcaaatgccggaagtcagggatgcccaactctgggcagccccagtcagaacctctgggatctcagtgaagctggcctggcctctgctcttgctctcaaggggctgcttttcaaccaagagccttgtgagcctggtctgagccttgcacagccactgagtattttttattccttagccagtgtacctcctacctcagagtctatgtgagaggaagagaatgtgtgtccctgtgggtctctgcaagtgacagatgtgttgtttttaacagtattattaggttatgattaaagcctcatgaaatcctctaaaaaaacacaaaaaccaccatacacaagggaacccctctccaccccccccacaaacacaagagggggggcccccaaaaagaaatccccaggggcccacgacgagaggcagaccccagccatgtgtagacaaggaggggcccacaaggaggtcgctataaaaacaccgaaagcgcggccccccgcaaaaaaccacgccgcccgaagcacaacacaccgcccacgagggacactctcgaggaaagaaccccaacctcctgcggcgggggacacaacagcgaaaaaccccccagagaatgaccacccccgagggaaaaaaacaggtcgcgcgcaatcaaggggccaccacacgcaaaaccgcgacgaaaaaagggcccccggagactatagaacataac

SEQ ID NO: 465352 - DNA, 2568 bp, Homo sapiens
  misc_feature (1)..(3): n is a, c, g, or t
  misc_feature (7)..(7): n is a, c, g, or t
nnncctncgcctcgtgggggagtcaagtctccgtaggcggagagcccggatgcaggcgcggctaggcggccctctctatggtgagccccccggtccctcctccgcagcacccggagtgcctctatggttcttcctgtcgttagtcgggagggggcgctgtacgcgcgctgtacgcttgcgcgaggtgacgccggggcagggccggaaggaatgcagcggctgccacggagctcgtagctgcagctttggaggagtaagcggcgtggtagcgaaggtcgccgaacccgcctggctagccggcgagttgagtggcgactcttttgaaacagatggtcaccatgtttagatattagcagtcccgtatgtgcatgtctgcatttgaaaatggaagagggaaacaacaatgaagaggtaattcacttgaacaactttcactgccatcggggacaagactttgtaattttcttctggaaaacccagattatccaaagagagaagacagaatcattataaatcccagtagcagtctgctggccagccaagatgagacaaagttgcctaaaataagacttttttgactattctaaattgactcctcttgaccagcactgcttcatccaagctgctgacctcctcatggccgacttcaaagtgctcagtagtcaggacatcatgtgggccctgcacgagctcaaaggacactatgcaatcacccgaaaggactttgagagtcatcagcatatggaaaatctcaccagccaggatgaggtacccagagataccaggccttttctgatgccattaaaaaatggcaggagctatcaccagaaaccagtggaaaaaggaaaaagagaaaagaaatgaaccagtattcttaaattgatttcaagtttgaacaaggtactgggctgctgggggatcccaagtgagcagagtctgttttctaccctcgaggagctcagagaaaaggaaatagataattactgtgtgatgagactccagacagaggggttggcatctgcacatccttcctgggcatctcgtgggcactgctcgattaccaccaggccttgcacacctgcctcccctccaagcccctcctgggcctgggctcctctgtgatctacgtcctgtggaacctgctgctactgtggccccgagtcctagctgtggccctgttctcagccctcttccccagtatgtagccctgcatttcctgggcctgtggctggtactgctgctctgggtttggcttcaaggcacagacttcatgctggaccccagttccgagtatcctctatttctcctggttcaacgtggctgagggccacacccgaggccgggccaccatccacttggctttcctcctgagtgacagcattctcctggtggccacctgggtgacttacagctcctggctgcccagcaggattccactgcagctgtggctgcctgtaggaggcggatgcttctttctgggcctggctctgtggcttgtgtgctactgctggctgcaccctagctgatgctgggagcccaaccctgaccaggtggacaggacccagagtctactttcctcagaggggtatcagctgcctcagacccagttagcacagaacttttttcccaagggtaaggctgaggctgcttcgccagtgaagggagaggtgaacggcgtcctttgaagcaggatcagacccagccagcagagatggagagtgactgctggcagaaggcaggcgaggataagctaacgatgctgctgtggcctccatgcactcagcaagagtgggatgcctctgctgggccgtgcaccagggatggtgctgagtggggcagaggcctgccttcaaggagttcacagtgaacaagatgagaagggctgggccctgcagggtcaagagccccaattacgtacaagacactttgggaggaaagaagactaccttttcttttccccctgccattggtatagctggtgccccaaaactttcacctccctccctggccacctctaaaatgattggtataggggcttccccaccccttagctcccctatcctgggctagaaggccacagggactgtcctctagaattcttcctcccctcccccacaccattcattcaattcgtgaaacaaatcttcaccgagagcagtttatgtgctaggaacatcattctatccttgcaacctggaacaagaccagctaccaccttagcttcatcccctacttgcaccaaccagtcccgggttagatctcaaatgccggaagtcagggatgcccaactctgggcagccccagtcagaacctctgggatctcagtgaagctggcctggcctctgctcttgctctcaaggggctgcttttcaaccaagagccttgtgagcctggtctgagccttgcacagccactgagtattttttattccttagccagtgtacctcctacctcagagtctatgtgagaggaagagaatgtgtgtccctgtgggtctctgcaagtgacagatgtgttgtttttaacagtattattaggttatgattaaagcctcatgaaatcctctaa

SEQ ID NO: 465353 - DNA, 2463 bp, Homo sapiens
  misc_feature (1)..(3): n is a, c, g, or t
  misc_feature (7)..(7): n is a, c, g, or t
nnncctncgcctcgtgggggagtcaagtctccgtaggcggagagcccggatgcaggcgcggctaggcggccctctctatggtgagccccccggtccctcctccgcagcacccggagtgcctctatggttcttcctgtcgttagtcgggagggggcgctgtacgcgcgctgtacgcttgcgcgaggtgacgccggggcagggccggaaggaatgcagcggctgccacggagctcgtagctgcagctttggaggagtaagcggcgtggtagcgaaggtcgccgaacccgcctggctagccggcgagttgagtggcgactcttttgaaacagatggtcaccatgtttagatattagcagtcccgtatgtgcatgtctgcatttgaaaatggaagagggaaacaacaatgaagagactttgtaattttcttctggaaaacccagattatccaaagagagaagacagaatcattataaatcccagtagcagtctgctggccagccaagatgagacaaagttgcctaaaataagacttttttgactattctaaattgactcctcttgaccagcactgcttcatccaagctgctgacctcctcatggccgacttcaaagtgctcagtagtcaggacatcatgtgggccctgcacgagctcaaaggacactatgcaatcacccgaaaggccttttctgatgccattaaaaaatggcaggagctatcaccagaaaccagtggaaaaaggaaaaagagaaaagaaatgaaccagtattcttaaattgatttcaagtttgaacaaggtactgggctgctgggggatcccaagtgagcagagtctgttttctaccctcgaggagctcagagaaaaggaaatagataattactgtgtgatgagactccagacagaggggttggcatctgcacatccttcctgggcatctcgtgggcactgctcgattaccaccaggccttgcacacctgcctcccctccaagcccctcctgggcctgggctcctctgtgatctacgtcctgtggaacctgctgctactgtggccccgagtcctagctgtggccctgttctcagccctcttccccagtatgtagccctgcatttcctgggcctgtggctggtactgctgctctgggtttggcttcaaggcacagacttcatgctggaccccagttccgagtatcctctatttctcctggttcaacgtggctgagggccacacccgaggccgggccaccatccacttggctttcctcctgagtgacagcattctcctggtggccacctgggtgacttacagctcctggctgcccagcaggattccactgcagctgtggctgcctgtaggaggcggatgcttctttctgggcctggctctgtggcttgtgtgctactgctggctgcaccctagctgatgctgggagcccaaccctgaccaggtggacaggacccagagtctactttcctcagaggggtatcagctgcctcagacccagttagcacagaacttttttcccaagggtaaggctgaggctgcttcgccagtgaagggagaggtgaacggcgtcctttgaagcaggatcagacccagccagcagagatggagagtgactgctggcagaaggcaggcgaggataagctaacgatgctgctgtggcctccatgcactcagcaagagtgggatgcctctgctgggccgtgcaccagggatggtgctgagtggggcagaggcctgccttcaaggagttcacagtgaacaagatgagaagggctgggccctgcagggtcaagagccccaattacgtacaagacactttgggaggaaagaagactaccttttcttttccccctgccattggtatagctggtgccccaaaactttcacctccctccctggccacctctaaaatgattggtataggggcttccccaccccttagctcccctatcctgggctagaaggccacagggactgtcctctagaattcttcctcccctcccccacaccattcattcaattcgtgaaacaaatcttcaccgagagcagtttatgtgctaggaacatcattctatccttgcaacctggaacaagaccagctaccaccttagcttcatcccctacttgcaccaaccagtcccgggttagatctcaaatgccggaagtcagggatgcccaactctgggcagccccagtcagaacctctgggatctcagtgaagctggcctggcctctgctcttgctctcaaggggctgcttttcaaccaagagccttgtgagcctggtctgagccttgcacagccactgagtattttttattccttagccagtgtacctcctacctcagagtctatgtgagaggaagagaatgtgtgtccctgtgggtctctgcaagtgacagatgtgttgtttttaacagtattattaggttatgattaaagcctcatgaaatcctctaa

SEQ ID NO: 465354 - DNA, 2280 bp, Homo sapiens
  misc_feature (1)..(3): n is a, c, g, or t
  misc_feature (7)..(7): n is a, c, g, or t
nnncctncgcctcgtgggggagtcaagtctccgtaggcggagagcccggatgcaggcgcggctaggcggccctctctatggtgagccccccggtccctcctccgcagcacccggagtgcctctatggttcttcctgtcgttagtcgggagggggcgctgtacgcgcgctgtacgcttgcgcgaggtgacgccggggcagggccggaaggaatgcagcggctgccacggagctcgtagctgcagctttggaggagtaagcggcgtggtagcgaaggtcgccgaacccgcctggctagccggcgagttgagtggcgactcttttgaaacagatggtcaccatgtttagatattagcagtcccgtatgtgcatgtctgcatttgaaaatggaagagggaaacaacaatgaagaggtaattcacttgaacaactttcactgccatcggggacaagactttgtaattttcttctggaaaacccagattatccaaagagagaagacagaatcattataaatcccagtagcagtctgctggccagccaagatgagacaaagttgcctaaaataagacttttttgactattctaaattgactcctcttgaccagcactgcttcatccaagctgctgacctcctcatggccgacttcaaagtgctcagtagtcaggacatcatgtgggccctgcacgagctcaaaggacactatgcaatcacccgaaaggggttggcatctgcacatccttcctgggcatctcgtgggcactgctcgattaccaccaggccttgcacacctgcctcccctccaagcccctcctgggcctgggctcctctgtgatctacgtcctgtggaacctgctgctactgtggccccgagtcctagctgtggccctgttctcagccctcttccccagtatgtagccctgcatttcctgggcctgtggctggtactgctgctctgggtttggcttcaaggcacagacttcatgctggaccccagttccgagtatcctctatttctcctggttcaacgtggctgagggccacacccgaggccgggccaccatccacttggctttcctcctgagtgacagcattctcctggtggccacctgggtgacttacagctcctggctgcccagcaggattccactgcagctgtggctgcctgtaggaggcggatgcttctttctgggcctggctctgtggcttgtgtgctactgctggctgcaccctagctgatgctgggagcccaaccctgaccaggtggacaggacccagagtctactttcctcagaggggtatcagctgcctcagacccagttagcacagaacttttttcccaagggtaaggctgaggctgcttcgccagtgaagggagaggtgaacggcgtcctttgaagcaggatcagacccagccagcagagatggagagtgactgctggcagaaggcaggcgaggataagctaacgatgctgctgtggcctccatgcactcagcaagagtgggatgcctctgctgggccgtgcaccagggatggtgctgagtggggcagaggcctgccttcaaggagttcacagtgaacaagatgagaagggctgggccctgcagggtcaagagccccaattacgtacaagacactttgggaggaaagaagactaccttttcttttccccctgccattggtatagctggtgccccaaaactttcacctccctccctggccacctctaaaatgattggtataggggcttccccaccccttagctcccctatcctgggctagaaggccacagggactgtcctctagaattcttcctcccctcccccacaccattcattcaattcgtgaaacaaatcttcaccgagagcagtttatgtgctaggaacatcattctatccttgcaacctggaacaagaccagctaccaccttagcttcatcccctacttgcaccaaccagtcccgggttagatctcaaatgccggaagtcagggatgcccaactctgggcagccccagtcagaacctctgggatctcagtgaagctggcctggcctctgctcttgctctcaaggggctgcttttcaaccaagagccttgtgagcctggtctgagccttgcacagccactgagtattttttattccttagccagtgtacctcctacctcagagtctatgtgagaggaagagaatgtgtgtccctgtgggtctctgcaagtgacagatgtgttgtttttaacagtattattaggttatgattaaagcctcatgaaatcctctaa

SEQ ID NO: 465355 - DNA, 1715 bp, Homo sapiens
ctactttttatttagcaaacctctctttcgctgctgttatgtgccaggtactgggctgctgggggatcccaagtgagcagagtctgttttctaccctcgaggagctcagagaaaaggaaatagataattactgtgtgatgagactccagacagaggggttggcatctgcacatccttcctgggcatctcgtgggcactgctcgattaccaccaggccttgcacacctgcctcccctccaagcccctcctgggcctgggctcctctgtgatctacgtcctgtggaacctgctgctactgtggccccgagtcctagctgtggccctgttctcagccctcttccccagtatgtagccctgcatttcctgggcctgtggctggtactgctgctctgggtttggcttcaaggcacagacttcatgctggaccccagttccgagtatcctctatttctcctggttcaacgtggctgagggccacacccgaggccgggccaccatccacttggctttcctcctgagtgacagcattctcctggtggccacctgggtgacttacagctcctggctgcccagcaggattccactgcagctgtggctgcctgtaggaggcggatgcttctttctgggcctggctctgtggcttgtgtgctactgctggctgcaccctagctgatgctgggagcccaaccctgaccaggtggacaggacccagagtctactttcctcagaggggtatcagctgcctcagacccagttagcacagaacttttttcccaagggtaaggctgaggctgcttcgccagtgaagggagaggtgaacggcgtcctttgaagcaggatcagacccagccagcagagatggagagtgactgctggcagaaggcaggcgaggataagctaacgatgctgctgtggcctccatgcactcagcaagagtgggatgcctctgctgggccgtgcaccagggatggtgctgagtggggcagaggcctgccttcaaggagttcacagtgaacaagatgagaagggctgggccctgcagggtcaagagccccaattacgtacaagacactttgggaggaaagaagactaccttttcttttccccctgccattggtatagctggtgccccaaaactttcacctccctccctggccacctctaaaatgattggtataggggcttccccaccccttagctcccctatcctgggctagaaggccacagggactgtcctctagaattcttcctcccctcccccacaccattcattcaattcgtgaaacaaatcttcaccgagagcagtttatgtgctaggaacatcattctatccttgcaacctggaacaagaccagctaccaccttagcttcatcccctacttgcaccaaccagtcccgggttagatctcaaatgccggaagtcagggatgcccaactctgggcagccccagtcagaacctctgggatctcagtgaagctggcctggcctctgctcttgctctcaaggggctgcttttcaaccaagagccttgtgagcctggtctgagccttgcacagccactgagtattttttattccttagccagtgtacctcctacctcagagtctatgtgagaggaagagaatgtgtgtccctgtgggtctctgcaagtgacagatgtgttgtttttaacagtattattaggttatgattaaagcctcatgaaatcctctaa

SEQ ID NO: 465356 - DNA, 3240 bp, Homo sapiens
  misc_feature (1)..(3): n is a, c, g, or t
  misc_feature (7)..(7): n is a, c, g, or t
nnncctncgcctcgtgggggagtcaagtctccgtaggcggagagcccggatgcaggcgcggctaggcggccctctctatggtgagccccccggtccctcctccgcagcacccggagtgcctctatggttcttcctgtcgttagtcgggagggggcgctgtacgcgcgctgtacgcttgcgcgaggtgacgccggggcagggccggaaggaatgcagcggctgccacggagctcgtagctgcagctttggaggagtaagcggcgtggtagcgaaggtcgccgaacccgcctggctagccggcgagttgagtggcgactcttttgaaacagatggtcaccatgtttagatattagcagtcccgtatgtgcatgtctgcatttgaaaatggaagagggaaacaacaatgaagaggtaattcacttgaacaactttcactgccatcggggacaagactttgtaattttcttctggaaaacccagattatccaaagagagaagacagaatcattataaatcccagtagcagtctgctggccagccaagatgagacaaagttgcctaaaataagacttttttgactattctaaattgactcctcttgaccagcactgcttcatccaagctgctgacctcctcatggccgacttcaaagtgctcagtagtcaggacatcatgtgggccctgcacgagctcaaaggacactatgcaatcacccgaaaggccttttctgatgccattaaaaaatggcaggagctatcaccagaaaccagtggaaaaaggaaaaagagaaaagaaatgaaccagtattcttaaattgatttcaagtttgaacaaggtaatgcaaactatgttggtggcagtgtgtagctgcaacaccgtaccttcttcacagtcagtgaaggaagctgtgctacaggtgtctgctgagcatctggacaggaactattttctcagcacgtcaaaatttttagaaagtggctgcccttgttggcttccttcttcctacttaagataaactgtgagaggaaaattttgtgtggtgttagaaaattcatgtgtgagaagaggccttgggctccaggacccagtcaggcagccctggacttgaccctaaaagggagtaaagacaaatgcgaagttcaatcaggggttcagagctcccaaagctcatagcctggagcttcttaacctttaggcagggtagagacatttaaaacggcccctaaacttggggggcgcgtaggctcatgggaaatagagtagggtgcttgtcctgggaccagctgtgggccccggaggctgacttccggtgcactcctgcgcgtgtgcacctctctctgtgtgcgtgttcgcgcatgcgcgccgccgctgcactgccctcgcttcctgtgcgtcctcaggtcaccgcttgctctagttcccaggctttggcctccagtggacgagaatcgcggagcctgcggggctggaggttgagcgcccgggccagcacctaggcgggcgcgggggtgtgcaggccagggttcgcgcgggccgggtggaggcttgagcggggacccccgagcttgagccccggagccggcggcgctggggccagaggggccggacgggaggtggcggaggtggcggcggaggcgaaggggcggcgggacgcgggcctggcccgtgtgtgtcctggcggcctggcccaggctgccgctgtacggtgagcccgagggaggcggatctgggtcccgggaaggacacccgcctggatttgccccttaggcccggcccgggcccctcgggagcagaacaaccttagtgaggtggacaggaggggacctcgcgagcagacgcgcgccagcgacagcagccccgccccggcctctcgggagccgtggggcagaggctgcggagccccagaagggtaggtcttgggttttcgggcccggagcgagaagggcctgagtgaagtcaccgtgtgttggggaccttagagtgtggggcagggggagggtctcgatcgcttgcaggagagacgtgtgtttgggtttgagggcagggtccggctgcaccgaacaggcgctgcatgggaaatctgggaggacgaggcttatgggggcctggagggtgtcaccagcctcagctgcggacgtcgtctccactccccgctaacccctaacagcccttcctcctcctttccgtgctccagatttcgacctcctctaaacgtccgtcagcgcctctgttctctcatttaagtgtctgctgattccccccttagatctgccctggagactggtctaccagccacagtctctgcacgtttccaagagcagcagaaaatgaacacattgcaggccagtgtcattcaaagatgtggctgtggatttcacccaggaggagtggcagcagctggaccctgatgagaagataacttacagggatgtgatgttggagaactatagccatctagtttctgtgggatatgataccaccaagccaaacgtcatcattaagttggagcagggagaggagccgtggataatgggaggtgaatttccatgtcaacatagtccagaagcctggagagttgatgacctgatagagagaatccaagaaaacgaagacaaacattcaagccgccctgcccgcaggccatgtggcccccgctgttgctgctgctgctgctgctcccggccgccccggtccccaccgccaaagccgctccccacccggatgctaacacccaggaaggccttcagaacctgctccaaggagtcggggctggcggagacggagagctgcgggcagactcacacctggccccgggctctggctgtattgatggggctgtggtggccacgcgaccagaaagccggggaggaagacctgcggttccgtgagaggcgtccagggctgcaggccacggcgacaggctccggggaacatggggctttccctgtccactcccaaggagtgtgggcctcaacgcattggcaggggacggccgtgtgccctctccagaccccacccccagatgcatttattagaaataataaagttctttcttagctaaaaaaaaaaaaaaaaaaaaaaaaaacacaaagaaaaaacaacgaaaagcaaaccaaagcgaacagcgcgacacgccagaacacacagcaaaagaagaacgcgggggggccgccccacgagagagagtcgacggacggggggcacacgacagcaccgacctgtagacagcggcgcgcccaa

SEQ ID NO: 465357 - DNA, 6716 bp, Homo sapiens
  misc_feature (1)..(3): n is a, c, g, or t
  misc_feature (7)..(7): n is a, c, g, or t
nnncctncgcctcgtgggggagtcaagtctccgtaggcggagagcccggatgcaggcgcggctaggcggccctctctatggtgagccccccggtccctcctccgcagcacccggagtgcctctatggttcttcctgtcgttagtcgggagggggcgctgtacgcgcgctgtacgcttgcgcgaggtgacgccggggcagggccggaaggaatgcagcggctgccacggagctcgtagctgcagctttggaggagtaagcggcgtggtagcgaaggtcgccgaacccgcctggctagccggcgagttgagtggcgactcttttgaaacagatggtcaccatgtttagatattagcagtcccgtatgtgcatgtctgcatttgaaaatggaagagggaaacaacaatgaagaggtaattcacttgaacaactttcactgccatcggggacaagactttgtaattttcttctggaaaacccagattatccaaagagagaagacagaatcattataaatcccagtagcagtctgctggccagccaagatgagacaaagttgcctaaaataagacttttttgactattctaaattgactcctcttgaccagcactgcttcatccaagctgctgacctcctcatggccgacttcaaagtgctcagtagtcaggacatcatgtgggccctgcacgagctcaaaggacactatgcaatcacccgaaaggccttttctgatgccattaaaaaatggcaggagctatcaccagaaaccagtggaaaaaggaaaaagagaaaagaaatgaaccagtattcttaaattgatttcaagtttgaacaaggtaatgcaaactatgttggtggcagtgtgtagctgcaacaccgtaccttcttcacagtcagtgaaggaagctgtgctacaggtgtctgctgagcatctggacaggaactattttctcagcacgtcaaaatttttagaaagtggctgcccttgttggcttccttcttcctacttaagataaactgtgagaggaaaattttgtgtggtgttagaaaattcatgtgtgagaagaggccttgggctccaggacccagtcaggcagccctggacttgaccctaaaagggagtaaagacaaatgcgaagttcaatcaggggttcagagctcccaaagctcatagcctggagcttcttaacctttaggcagggtagagacatttaaaacggcccctaaacttggggggcgcgtaggctcatgggaaatagagtagggtgcttgtcctgggaccagctgtgggccccggaggctgacttccggtgcactcctgcgcgtgtgcacctctctctgtgtgcgtgttcgcgcatgcgcgccgccgctgcactgccctcgcttcctgtgcgtcctcaggtcaccgcttgctctagttcccaggctttggcctccagtggacgagaatcgcggagcctgcggggctggaggttgagcgcccgggccagcacctaggcgggcgcgggggtgtgcaggccagggttcgcgcgggccgggtggaggcttgagcggggacccccgagcttgagccccggagccggcggcgctggggccagaggggccggacgggaggtggcggaggtggcggcggaggcgaaggggcggcgggacgcgggcctggcccgtgtgtgtcctggcggcctggcccaggctgccgctgtacggtgagcccgagggaggcggatctgggtcccgggaaggacacccgcctggatttgccccttaggcccggcccgggcccctcgggagcagaacaaccttagtgaggtggacaggaggggacctcgcgagcagacgcgcgccagcgacagcagccccgccccggcctctcgggagccgtggggcagaggctgcggagccccagaagggtctaccagccacagtctctgcacgtttccaagagcagcagaaaatgaacacattgcaggccagtgtcattcaaagatgtggctgtggatttcacccaggaggagtggcagcagctggaccctgatgagaagataacttacaggatatgataccaccaagccaaacgtcatcattaagttggagcagggagaggagccgtggataatgggaggtgaatttccatgtcaacatagtccagaagcctggagagttgatgacctgatagagagaatccaagaaaacgaagacaaacattcaaggcaagctgcttgtatcaatagcaaaaccctgactgaagagaaagagaatacatttagtcaaatttacatggaaacaagccttgttccttcaagcataatagctcataattgtgtctcatgtggaaagaatttagaatctatttcgcaattaattagtagtgatggaagctatgctaggacaaaacctgatgagtgtaatgaatgtgggaaaacatatcatggagagaaaatgtgtgaatttaatcaaaatggggatacctattctcacaatgaagaaaatattcttcagaaaattagtattttggagaaaccctttgaatataatgaatgcatggaagccttagacaatgaggctgtttttattgctcataagagagcttacataggggagaagccctatgagtggaatgattctggaccagacttcatacagatgtcaaattttaatgcatatcagagatcacaaatggaaatgaagccctttgaatgcagtgaatgtggaaaatccttctgtaaaaagtcaaaattcatcatccaccagagggctcacacaggagagaaaccttatgaatgtaatgtatgtgggaaatccttcagccaaaagggaaccctcactgtacatcggagatcacacttagaggagaagccctataaatgtaatgaatgtgggaaaaccttttgtcagaagttacacctcactcaacacctaagaactcattcaggagagaaaccctacgaatgtagcgaatgtgggaaaaccttctgccaaaagacacatctcaccctgcaccagaggaatcattcaggagagaggccctatccatgtaacgaatgtgggaaatccttctcccgcaagtctgctctcagtgaccatcagagaactcacacgggagagaagctttataaatgtaatgaatgtgggaaatcctactaccgaaagtctactctgattacacatcagagaacacacacgggagagaagccctatcagtgtagcgagtgtgggaaattcttttctcgggtgtcatacctcactatacattatagaagtcatttagaagagaaaccctatgaatgtaatgaatgtggcaaaaccttcaatttaaattcagccttcattagacatcggaaagtacacacagaagagaaatcccatgaatgtagtgaatgtggaaagttctctcagttgtatctcaccgaccatcatacagctcatttagaagagaaaccctatgaatgtaatgaatgtgggaaaaccttccttgtaaattcagccttcgatgggcaccagccacttccaaaaggggagaaatcctatgaatgtaatgtatgtggaaagttattcaatgagttgtcatactatactgaacattatagaagtcattcagaagagaaaccttatggatgtagcgaatgtgggaaaaccttttcccataattcatccctcttcagacatcaaagagtacacacaggcgagaaaccctatgaatgttacgaatgtggaaaattcttctctcagaaatcatatctcactatacatcatcgaattcattcaggagagaaaccctatgaatgtagtaaatgtggaaaagtcttctctcggatgtcaaacctcactgtccactacagaagccattcaggagagaaaccctatgaatgtaatgaatgtgggaaagtcttttctcagaagtcatacctcactgtacactatagaactcattcaggagagaaaccctatgaatgtaacgagtgtgggaaaaaattccaccacagatcagccttcaatagccatcagagaattcatagaagaggaaatatgaacgtacttgatgtggaaaatctctgaagtcagatctcaatttttagaaaactctctgaatataatgaatatggggaatccaataggaagtcaaagcgtttatctgagagttcgtgttcctgaacgaggctatgagctctgaataaatcttcattgtataaaatgaagtttttaaattgtcaggagttgatcatgaggacagtagcattaaataagtatatggccgttttttatcatgtcttaaaaatgcaatctaatggtaattctatgcaagtttggaattggatgacttgtgaagaggcagttttcttatttgagtattaggatggcaaaatgtattaagacaggacatattgttggtgagataatatttaataggtataaaatggtaaaatacctagttttctatttagaggaatttacaaatgggtttttaacaaatgcctcattagtacaggaggcagtcgttttgtaaagttttcaactgcatctgagtaagataagattttctaaaagactattttgataaactatacatacataatttggaattgtttaagtctatttcagtgaaagagaacaagcatactgcccatactctaaaatatccccagctctcacaccacccttgttttttaacccataggtttgagtgtgcctagtgccaatattttgtaatttagaaattttattcacaaacttctgtttggtacaaatacagtgtcattgttttgtgcattctcctttttcccagtatttcagaacaaattgattcaagtttctagcagatattttttgatcaattaacttaatgtcctcgctccatttcttgctggaacagtttaggtacctaccacttcttcacatgacacaggggaatcctgattagtcaaaataataatgatttcattctctttgccagtaacttgttttatagtggtcatatgacctgatactgggtaaacaaaacaaagatggacttgttctgggaaaaggtaaaatggtaatcaaatagattgtgttccaggaatgcaaaggtggcttaatattcacaagtcagttgctattatacaccacctgtagaaaagtaatctggcatgcagaacattcttgtggtacaattaatattataaaaataagacaaggatatctgctgtcaatgattttattcggcattgttcagaaggacctaaccagaaaactaatgcaaggaagagaaacaaaaggcatagagattagaaaagaagtaaaactttaaaaacgaaaaagaatataaatctctatttgcagatgccatgagtaaatttgtaaaaccattcacaatcccaggtggcagtctggatttggtctgcactcatagttttctggtccctgatctcgaatatgtaaagagcacctacaaatcaacaagggggaaactggaaaaggcaaaagactttagaggatatccactcactttagaggatatccagacggccaataagcatgaaaagatgtgttagctttattagtaatcagggaaatgcaaacttaaaacatgtagcactgctacccatccatggaaatggttaaaatgaaaagcatgaaaaagcatcacgttttggcaaggatgtaagcaagaggaactgtacactactggtggaattgctcatcgataaaaccattttgaaagctggcactaaaagccaagcatatgtatactgttttacccaaacccagcaaaaatgcatgtgtctgtccaccaaaggacatgcactagaatatttatagcctaaaactgcacaaaacagaactatcttaaggcacatgtgcaatggaatgaataaagaagtggcatatgtccatggaatactgtaaaacagtgagcatgaatgaactagaagtccgtgtaataacgcagctgaatttaacaaaccttgctgaatgaaagactccagacacaaaagccaacatgctgtatgattccttctatataaattataaagacgggcaaaacttgtatacgtggtttaaaattagggtagcagttagccttggccaaggctgaaagggggcatttatctggtgctgggaataatctgtttctaaacctaggtgctaagtatttgagtgtgttttgagctgtgcacttaagatatgtgtatttttctgcatgtgtgttaaactttccataaaagttttctaaaatcacaaatggctaacatttgtgtcgctcatcactctaatcatatttttctagatgtgtatgaatatgctgcacaacaggaattaaatggcagattttgcataattctgtgcaggaaatacatatttatagtaattttgatggcaactactaagatttcctacgctgtccttaaagcttagcataatgtatattttaagtgaaatatttgagaaggttaaagaatcattacatactttgtcatcctatacttttgcatatataaataggtctgagctgcctcttcaataaagaagctaatgtgtaacatttcatatttccctaaacaaattgttttttgcatttctgaattcgggattcatcttaacttttactgtaggggtgacctttcttggcagtgaatgaatataatgctgagttggatttgatggaaaattattttaaaagtattcagctaaatatttgagcaaatctcagatacacagttaacagcccagatgtaa

SEQ ID NO: 465358 - DNA, 1041 bp, Homo sapiens
  misc_feature (1)..(3): n is a, c, g, or t
  misc_feature (7)..(7): n is a, c, g, or t
nnncctncgcctcgtgggggagtcaagtctccgtaggcggagagcccggatgcaggcgcggctaggcggccctctctatggtgagccccccggtccctcctccgcagcacccggagtgcctctatggttcttcctgtcgttagtcgggagggggcgctgtacgcgcgctgtacgcttgcgcgaggtgacgccggggcagggccggaaggaatgcagcggctgccacggagctcgtagctgcagctttggaggagtaagcggcgtggtagcgaaggtcgccgaacccgcctggctagccggcgagttgagtggcgactcttttgaaacagatggtcaccatgtttagatattagcagtcccgtatgtgcatgtctgcatttgaaaatggaagagggaaacaacaatgaagaggtaattcacttgaacaactttcactgccatcggggacaagactttgtaattttcttctggaaaacccagattatccaaagagagaagacagaatcattataaatcccagtagcagtctgctggccagccaagatgagacaaagttgcctaaaataagacttttttgactattctaaattgactcctcttgaccagcactgcttcatccaagctgctgacctcctcatggccgacttcaaagtgctcagtagtcaggacatcatgtgggccctgcacgagctcaaaggacactatgcaatcacccgaaaggccttttctgatgccattaaaaaatggcaggagctatcaccagaaaccagtggaaaaaggaaaaagagaaaagaaatgaaccagtattcttaaattgatttcaagtttgaacaagtgtaccactggtataaaaatagacagaccagtggaacagaataaagagcgcggaaataaagccaaatactacagccaacagatcatcgacaaggtaaacaaaaacttaaagtggggaaaggacaccctattcaacaaatgctgctgggataattggcaagccacacgtagaagaataaaactggatcctcatctctcaccttatac

SEQ ID NO: 465359 - DNA, 760 bp, Homo sapiens
ccacaactgtgtctagtacgatgctcggtgtgtaattcggccgaggcggcgtggtagcgaaggtcgccgaacccgcctggctagccggcgagttgagtggcgactcttttgaaacagatggtcaccatgtttagatattagcagtcccgtatgtgcatgtctgcatttgaaaatggaagagggaaacaacaatgaagaggtaattcacttgaacaactttcactgccatcggggacaaggagtgccttctctagaactgctagcatgtcagatcagctcaagcatgaggtcatatgaagacgtgggcagactgaagtccgacaggcttccccactgcttttgccccagggtgcagatattagaacagaggctaccacttgtttctgtagaagaaaaactttgtccttcatttcctgtgcctccaaatgtcacttaacctccagaagagttctgttgactttgtaattttcttctggaaaacccagattatccaaagagagaagacagaatcattataaatcccagtagcagtctgctggccagccaagatgagacaaagttgcctaaaataagacttttttgactattctaaattgactcctcttgaccagcactgcttcatccaagctgctgacctcctcatggccgacttcaaagtgctcagtagtcaggacatcatgtgggcccggaggactccaagggccatacaattcccaaaggagtgagaagaataaattggaatatccccccaataggacta

SEQ ID NO: 465360 - DNA, 386 bp, Homo sapiens
ctggagtactagcctggcttacttttgcaggagtgccttctctagaactgctagcatgtcagatcagctcaagcatgaggtcatatgaagacgtgggcagactgaagtccgacaggcttccccactgcttttgccccagggtgcagatattagaacagaggctaccacttgtttctgtagaagaaaaactttgtccttcatttcctgtgcctccaaatgtcacttaacctccagaagagttctgttggtaagcataatgaagggattaaactagaaatgaattttgacagtttatagtgagagcttctgatttctgccatgtggaacttcatgtctgtagcatttcagtatttgaagttcttaatattgttgcaaatataaaatga

SEQ ID NO: 465361 - DNA, 762 bp, Homo sapiens
gtttgggtgaggcgttaacagtgggcgggcgtggctcgggctcgagggcgtggctcaggctcgtggaggcgtccgagctccagggcagctctggggcagaactgtccggatctaacaatccctggggagccggagaccggtgaccgccgccctgcccgcaggccatgtggcccccgctgttgctgctgctgctgctgctcccggccgccccggtccccaccgccaaagccgctccccacccggatgctaacacccaggaaggccttcagaacctgctccaaggagtcggggctggcggagacggagagctgcgggcagactcacacctggccccgggctctggctgtattgatggggctgtggtggccacgcgaccagaaagccggggaggaagacctgcggttccgtgagaggcgtccagggctgcaggccacggcgacaggctccggggaacatggggctttccctgtccactcccaaggagtgtgggcctcaacgcattggcaggggacggccgtgtgccctctccagaccccacccccagatgcatttattagaaataataaagttctttcttagctaaaaaaaaaaaaaaaaaaaaaaaaaacacaaagaaaaaacaacgaaaagcaaaccaaagcgaacagcgcgacacgccagaacacacagcaaaagaagaacgcgggggggccgccccacgagagagagtcgacggacggggggcacacgacagcaccgacctgtagacagcggcgcgcccaa

SEQ ID NO: 465362 - DNA, 7224 bp, Homo sapiens
  misc_feature (1)..(3): n is a, c, g, or t
  misc_feature (7)..(7): n is a, c, g, or t
nnncctncgcctcgtgggggagtcaagtctccgtaggcggagagcccggatgcaggcgcggctaggcggccctctctatggtgagccccccggtccctcctccgcagcacccggagtgcctctatggttcttcctgtcgttagtcgggagggggcgctgtacgcgcgctgtacgcttgcgcgaggtgacgccggggcagggccggaaggaatgcagcggctgccacggagctcgtagctgcagctttggaggagtaagcggcgtggtagcgaaggtcgccgaacccgcctggctagccggcgagttgagtggcgactcttttgaaacagatggtcaccatgtttagatattagcagtcccgtatgtgcatgtctgcatttgaaaatggaagagggaaacaacaatgaagaggtaattcacttgaacaactttcactgccatcggggacaagttgcctaaaataagacttttttgactattctaaattgactcctcttgaccagcactgcttcatccaagctgctgacctcctcatggccgacttcaaagtgctcagtagtcaggacatcatgtgggccctgcacgagctcaaaggacactatgcaatcacccgaaaggccttttctgatgccattaaaaaatggcaggagctatcaccagaaaccagtggaaaaaggaaaaagagaaaagaaatgaaccagtattcttaaattgatttcaagtttgaacaaggtaatgcaaactatgttggtggcagtgtgtagctgcaacaccgtaccttcttcacagtcagtgaaggaagctgtgctacaggtgtctgctgagcatctggacaggaactattttctcagcacgtcaaaatttttagaaagtggctgcccttgttggcttccttcttcctacttaagataaactgtgagaggaaaattttgtgtggtgttagaaaattcatgtgtgagaagaggccttgggctccaggacccagtcaggcagccctggacttgaccctaaaagggagtaaagacaaatgcgaagttcaatcaggggttcagagctcccaaagctcatagcctggagcttcttaacctttaggcagggtagagacatttaaaacggcccctaaacttggggggcgcgtaggctcatgggaaatagagtagggtgcttgtcctgggaccagctgtgggccccggaggctgacttccggtgcactcctgcgcgtgtgcacctctctctgtgtgcgtgttcgcgcatgcgcgccgccgctgcactgccctcgcttcctgtgcgtcctcaggtcaccgcttgctctagttcccaggctttggcctccagtggacgagaatcgcggagcctgcggggctggaggttgagcgcccgggccagcacctaggcgggcgcgggggtgtgcaggccagggttcgcgcgggccgggtggaggcttgagcggggacccccgagcttgagccccggagccggcggcgctggggccagaggggccggacgggaggtggcggaggtggcggcggaggcgaaggggcggcgggacgcgggcctggcccgtgtgtgtcctggcggcctggcccaggctgccgctgtacggtgagcccgagggaggcggatctgggtcccgggaaggacacccgcctggatttgccccttaggcccggcccgggcccctcgggagcagaacaaccttagtgaggtggacaggaggggacctcgcgagcagacgcgcgccagcgacagcagccccgccccggcctctcgggagccgtggggcagaggctgcggagccccagaagggtaggtcttgggttttcgggcccggagcgagaagggcctgagtgaagtcaccgtgtgttggggaccttagagtgtggggcagggggagggtctcgatcgcttgcaggagagacgtgtgtttgggtttgagggcagggtccggctgcaccgaacaggcgctgcatgggaaatctgggaggacgaggcttatgggggcctggagggtgtcaccagcctcagctgcggacgtcgtctccactccccgctaacccctaacagcccttcctcctcctttccgtgctccagatttcgacctcctctaaacgtccgtcagcgcctctgttctctcatttaagtgtctgctgattccccccttagatctgccctggagactggtctaccagccacagtctctgcacgtttccaagagcagcagaaaatgaacacattgcagtgttttagttttgtccttttcacgttgctgagtcagtctgtaaagattaccagtgatttcattgcagtcaaatccagaggggatttcctagcccctacctcccaggaccctttgtctgcctttgacatctgttacttccaaactgatactttctccatggagtctctcttttcttggcttttaaaaagattcgtctgccagtgtcattcaaagatgtggctgtggatttcacccaggaggagtggcagcagctggaccctgatgagaagataacttacagggatgtgatgttggagaactatagccatctagtttctgtgggatatgataccaccaagccaaacgtcatcattaagttggagcagggagaggagccgtggataatgggaggtgaatttccatgtcaacatagtccagaagcctggagagttgatgacctgatagagagaatccaagaaaacgaagacaaacattcaaggcaagctgcttgtatcaatagcaaaaccctgactgaagagaaagagaatacatttagtcaaatttacatggaaacaagccttgttccttcaagcataatagctcataattgtgtctcatgtggaaagaatttagaatctatttcgcaattaattagtagtgatggaagctatgctaggacaaaacctgatgagtgtaatgaatgtgggaaaacatatcatggagagaaaatgtgtgaatttaatcaaaatggggatacctattctcacaatgaagaaaatattcttcagaaaattagtattttggagaaaccctttgaatataatgaatgcatggaagccttagacaatgaggctgtttttattgctcataagagagcttacataggggagaagccctatgagtggaatgattctggaccagacttcatacagatgtcaaattttaatgcatatcagagatcacaaatggaaatgaagccctttgaatgcagtgaatgtggaaaatccttctgtaaaaagtcaaaattcatcatccaccagagggctcacacaggagagaaaccttatgaatgtaatgtatgtgggaaatccttcagccaaaagggaaccctcactgtacatcggagatcacacttagaggagaagccctataaatgtaatgaatgtgggaaaaccttttgtcagaagttacacctcactcaacacctaagaactcattcaggagagaaaccctacgaatgtagcgaatgtgggaaaaccttctgccaaaagacacatctcaccctgcaccagaggaatcattcaggagagaggccctatccatgtaacgaatgtgggaaatccttctcccgcaagtctgctctcagtgaccatcagagaactcacacgggagagaagctttataaatgtaatgaatgtgggaaatcctactaccgaaagtctactctgattacacatcagagaacacacacgggagagaagccctatcagtgtagcgagtgtgggaaattcttttctcgggtgtcatacctcactatacattatagaagtcatttagaagagaaaccctatgaatgtaatgaatgtggcaaaaccttcaatttaaattcagccttcattagacatcggaaagtacacacagaagagaaatcccatgaatgtagtgaatgtggaaagttctctcagttgtatctcaccgaccatcatacagctcatttagaagagaaaccctatgaatgtaatgaatgtgggaaaaccttccttgtaaattcagccttcgatgggcaccagccacttccaaaaggggagaaatcctatgaatgtaatgtatgtggaaagttattcaatgagttgtcatactatactgaacattatagaagtcattcagaagagaaaccttatggatgtagcgaatgtgggaaaaccttttcccataattcatccctcttcagacatcaaagagtacacacaggcgagaaaccctatgaatgttacgaatgtggaaaattcttctctcagaaatcatatctcactatacatcatcgaattcattcaggagagaaaccctatgaatgtagtaaatgtggaaaagtcttctctcggatgtcaaacctcactgtccactacagaagccattcaggagagaaaccctatgaatgtaatgaatgtgggaaagtcttttctcagaagtcatacctcactgtacactatagaactcattcaggagagaaaccctatgaatgtaacgagtgtgggaaaaaattccaccacagatcagccttcaatagccatcagagaattcatagaagaggaaatatgaacgtacttgatgtggaaaatctctgaagtcagatctcaatttttagaaaactctctgaatataatgaatatggggaatccaataggaagtcaaagcgtttatctgagagttcgtgttcctgaacgaggctatgagctctgaataaatcttcattgtataaaatgaagtttttaaattgtcaggagttgatcatgaggacagtagcattaaataagtatatggccgttttttatcatgtcttaaaaatgcaatctaatggtaattctatgcaagtttggaattggatgacttgtgaagaggcagttttcttatttgagtattaggatggcaaaatgtattaagacaggacatattgttggtgagataatatttaataggtataaaatggtaaaatacctagttttctatttagaggaatttacaaatgggtttttaacaaatgcctcattagtacaggaggcagtcgttttgtaaagttttcaactgcatctgagtaagataagattttctaaaagactattttgataaactatacatacataatttggaattgtttaagtctatttcagtgaaagagaacaagcatactgcccatactctaaaatatccccagctctcacaccacccttgttttttaacccataggtttgagtgtgcctagtgccaatattttgtaatttagaaattttattcacaaacttctgtttggtacaaatacagtgtcattgttttgtgcattctcctttttcccagtatttcagaacaaattgattcaagtttctagcagatattttttgatcaattaacttaatgtcctcgctccatttcttgctggaacagtttaggtacctaccacttcttcacatgacacaggggaatcctgattagtcaaaataataatgatttcattctctttgccagtaacttgttttatagtggtcatatgacctgatactgggtaaacaaaacaaagatggacttgttctgggaaaaggtaaaatggtaatcaaatagattgtgttccaggaatgcaaaggtggcttaatattcacaagtcagttgctattatacaccacctgtagaaaagtaatctggcatgcagaacattcttgtggtacaattaatattataaaaataagacaaggatatctgctgtcaatgattttattcggcattgttcagaaggacctaaccagaaaactaatgcaaggaagagaaacaaaaggcatagagattagaaaagaagtaaaactttaaaaacgaaaaagaatataaatctctatttgcagatgccatgagtaaatttgtaaaaccattcacaatcccaggtggcagtctggatttggtctgcactcatagttttctggtccctgatctcgaatatgtaaagagcacctacaaatcaacaagggggaaactggaaaaggcaaaagactttagaggatatccactcactttagaggatatccagacggccaataagcatgaaaagatgtgttagctttattagtaatcagggaaatgcaaacttaaaacatgtagcactgctacccatccatggaaatggttaaaatgaaaagcatgaaaaagcatcacgttttggcaaggatgtaagcaagaggaactgtacactactggtggaattgctcatcgataaaaccattttgaaagctggcactaaaagccaagcatatgtatactgttttacccaaacccagcaaaaatgcatgtgtctgtccaccaaaggacatgcactagaatatttatagcctaaaactgcacaaaacagaactatcttaaggcacatgtgcaatggaatgaataaagaagtggcatatgtccatggaatactgtaaaacagtgagcatgaatgaactagaagtccgtgtaataacgcagctgaatttaacaaaccttgctgaatgaaagactccagacacaaaagccaacatgctgtatgattccttctatataaattataaagacgggcaaaacttgtatacgtggtttaaaattagggtagcagttagccttggccaaggctgaaagggggcatttatctggtgctgggaataatctgtttctaaacctaggtgctaagtatttgagtgtgttttgagctgtgcacttaagatatgtgtatttttctgcatgtgtgttaaactttccataaaagttttctaaaatcacaaatggctaacatttgtgtcgctcatcactctaatcatatttttctagatgtgtatgaatatgctgcacaacaggaattaaatggcagattttgcataattctgtgcaggaaatacatatttatagtaattttgatggcaactactaagatttcctacgctgtccttaaagcttagcataatgtatattttaagtgaaatatttgagaaggttaaagaatcattacatactttgtcatcctatacttttgcatatataaataggtctgagctgcctcttcaataaagaagctaatgtgtaacatttcatatttccctaaacaaattgttttttgcatttctgaattcgggattcatcttaacttttactgtaggggtgacctttcttggcagtgaatgaatataatgctgagttggatttgatggaaaattattttaaaagtattcagctaaatatttgagcaaatctcagatacacagttaacagcccagatgtaa

SEQ ID NO: 465363 - DNA, 2503 bp, Homo sapiens
  misc_feature (1)..(3): n is a, c, g, or t
  misc_feature (7)..(7): n is a, c, g, or t
nnncctncgcctcgtgggggagtcaagtctccgtaggcggagagcccggatgcaggcgcggctaggcggccctctctatggtgagccccccggtccctcctccgcagcacccggagtgcctctatggttcttcctgtcgttagtcgggagggggcgctgtacgcgcgctgtacgcttgcgcgaggtgacgccggggcagggccggaaggaatgcagcggctgccacggagctcgtagctgcagctttggaggagtaagcggcgtggtagcgaaggtcgccgaacccgcctggctagccggcgagttgagtggcgactcttttgaaacagatggtcaccatgtttagatattagcagtcccgtatgtgcatgtctgcatttgaaaatggaagagggaaacaacaatgaagaggtaattcacttgaacaactttcactgccatcggggacaagactttgtaattttcttctggaaaacccagattatccaaagagagaagacagaatcattataaatcccagtagcagtctgctggccagccaagatgagacaaagttgcctaaaataagacttttttgactattctaaattgactcctcttgaccagcactgcttcatccaagctgctgacctcctcatggccgacttcaaagtgctcagtagtcaggacatcatgtgggccctgcacgagctcaaaggacactatgcaatcacccgaaaggccttttctgatgccattaaaaaatggcaggagctatcaccagaaaccagtggaaaaaggaaaaagagaaaagaaatgaaccagtattcttaaattgatttcaagtttgaacaaggtactgggctgctgggggatcccaagtgagcagagtctgttttctaccctcgaggagctcagagaaaaggaaatagataattactgtgtgatgagactccagacagaggggttggcatctgcacatccttcctgggcatctcgtgggcactgctcgattaccaccaggccttgcacacctgcctcccctccaagcccctcctgggcctgggctcctctgtgatctacgtcctgtggaacctgctgctactgtggccccgagtcctagctgtggccctgttctcagccctcttccccagtatgtagccctgcatttcctgggcctgtggctggtactgctgctctgggtttggcttcaaggcacagacttcatgctggaccccagttccgagtatcctctatttctcctggttcaacgtggctgagggccacacccgaggccgggccaccatccacttggctttcctcctgagtgacagcattctcctggtggccacctgggtgacttacagctcctggctgcccagcaggattccactgcagctgtggctgcctgtaggaggcggatgcttctttctgggcctggctctgtggcttgtgtgctactgctggctgcaccctagctgatgctgggagcccaaccctgaccaggtggacaggacccagagtctactttcctcagaggggtatcagctgcctcagacccagttagcacagaacttttttcccaagggtaaggctgaggctgcttcgccagtgaagggagaggtgaacggcgtcctttgaagcaggatcagacccagccagcagagatggagagtgactgctggcagaaggcaggcgaggataagctaacgatgctgctgtggcctccatgcactcagcaagagtgggatgcctctgctgggccgtgcaccagggatggtgctgagtggggcagaggcctgccttcaaggagttcacagtgaacaagatgagaagggctgggccctgcagggtcaagagccccaattacgtacaagacactttgggaggaaagaagactaccttttcttttccccctgccattggtatagctggtgccccaaaactttcacctccctccctggccacctctaaaatgattggtataggggcttccccaccccttagctcccctatcctgggctagaaggccacagggactgtcctctagaattcttcctcccctcccccacaccattcattcaattcgtgaaacaaatcttcaccgagagcagtttatgtgctaggaacatcattctatccttgcaacctggaacaagaccagctaccaccttagcttcatcccctacttgcaccaaccagtcccgggttagatctcaaatgccggaagtcagggatgcccaactctgggcagccccagtcagaacctctgggatctcagtgaagctggcctggcctctgctcttgctctcaaggggctgcttttcaaccaagagccttgtgagcctggtctgagccttgcacagccactgagtattttttattccttagccagtgtacctcctacctcagagtctatgtgagaggaagagaatgtgtgtccctgtgggtctctgcaagtgacagatgtgttgtttttaacagtattattaggttatgattaaagcctcatgaaatcctctaa

SEQ ID NO: 465364 - DNA, 2395 bp, Homo sapiens
  misc_feature (1)..(3): n is a, c, g, or t
  misc_feature (7)..(7): n is a, c, g, or t
nnncctncgcctcgtgggggagtcaagtctccgtaggcggagagcccggatgcaggcgcggctaggcggccctctctatggtgagccccccggtccctcctccgcagcacccggagtgcctctatggttcttcctgtcgttagtcgggagggggcgctgtacgcgcgctgtacgcttgcgcgaggtgacgccggggcagggccggaaggaatgcagcggctgccacggagctcgtagctgcagctttggaggagtaagcggcgtggtagcgaaggtcgccgaacccgcctggctagccggcgagttgagtggcgactcttttgaaacagatggtcaccatgtttagatattagcagtcccgtatgtgcatgtctgcatttgaaaatggaagagggaaacaacaatgaagaggtaattcacttgaacaactttcactgccatcggggacaagactttgtaattttcttctggaaaacccagattatccaaagagagaagacagaatcattataaatcccagtagcagtctgctggccagccaagatgagacaaagttgcctaaaataagacttttttgactattctaaattgactcctcttgaccagcactgcttcatccaagctgctgacctcctcatggccgacttcaaagtgctcagtagtcaggacatcatgtgggccctgcacgagctcaaaggacactatgcaatcacccgaaaggccttttctgatgccattaaaaaatggcaggagctatcaccagaaaccagtggaaaaaggaaaaagagaaaagaaatgaaccagtattcttaaattgatttcaagtttgaacaaggggttggcatctgcacatccttcctgggcatctcgtgggcactgctcgattaccaccaggccttgcacacctgcctcccctccaagcccctcctgggcctgggctcctctgtgatctacgtcctgtggaacctgctgctactgtggccccgagtcctagctgtggccctgttctcagccctcttccccagtatgtagccctgcatttcctgggcctgtggctggtactgctgctctgggtttggcttcaaggcacagacttcatgctggaccccagttccgagtatcctctatttctcctggttcaacgtggctgagggccacacccgaggccgggccaccatccacttggctttcctcctgagtgacagcattctcctggtggccacctgggtgacttacagctcctggctgcccagcaggattccactgcagctgtggctgcctgtaggaggcggatgcttctttctgggcctggctctgtggcttgtgtgctactgctggctgcaccctagctgatgctgggagcccaaccctgaccaggtggacaggacccagagtctactttcctcagaggggtatcagctgcctcagacccagttagcacagaacttttttcccaagggtaaggctgaggctgcttcgccagtgaagggagaggtgaacggcgtcctttgaagcaggatcagacccagccagcagagatggagagtgactgctggcagaaggcaggcgaggataagctaacgatgctgctgtggcctccatgcactcagcaagagtgggatgcctctgctgggccgtgcaccagggatggtgctgagtggggcagaggcctgccttcaaggagttcacagtgaacaagatgagaagggctgggccctgcagggtcaagagccccaattacgtacaagacactttgggaggaaagaagactaccttttcttttccccctgccattggtatagctggtgccccaaaactttcacctccctccctggccacctctaaaatgattggtataggggcttccccaccccttagctcccctatcctgggctagaaggccacagggactgtcctctagaattcttcctcccctcccccacaccattcattcaattcgtgaaacaaatcttcaccgagagcagtttatgtgctaggaacatcattctatccttgcaacctggaacaagaccagctaccaccttagcttcatcccctacttgcaccaaccagtcccgggttagatctcaaatgccggaagtcagggatgcccaactctgggcagccccagtcagaacctctgggatctcagtgaagctggcctggcctctgctcttgctctcaaggggctgcttttcaaccaagagccttgtgagcctggtctgagccttgcacagccactgagtattttttattccttagccagtgtacctcctacctcagagtctatgtgagaggaagagaatgtgtgtccctgtgggtctctgcaagtgacagatgtgttgtttttaacagtattattaggttatgattaaagcctcatgaaatcctctaa

SEQ ID NO: 465365 - DNA, 2926 bp, Homo sapiens
gagcttgtaccgctgcactccagcctgggcaacagagcgagactcagtctcaaaaaaaaaaaaaaaaaaactggagtactagcctggcttacttttgcaggagtgccttctctagaactgctagcatgtcagatcagctcaagcatgaggtcatatgaagacgtgggcagactgaagtccgacaggcttccccactgcttttgccccagggtgcagatattagaacagaggctaccacttgtttctgtagaagaaaaactttgtccttcatttcctgtgcctccaaatgtcacttaacctccagaagagttctgttgactttgtaattttcttctggaaaacccagattatccaaagagagaagacagaatcattataaatcccagtagcagtctgctggccagccaagatgagacaaagttgcctaaaataagacttttttgactattctaaattgactcctcttgaccagcactgcttcatccaagctgctgacctcctcatggccgacttcaaagtgctcagtagtcaggacatcatgtgggccctgcacgagctcaaaggacactatgcaatcacccgaaaggccttttctgatgccattaaaaaatggcaggagctatcaccagaaaccagtggaaaaaggaaaaagagaaaagaaatgaaccagtattcttaaattgatttcaagtttgaacaaggtaatgcaaactatgttggtggcagtgtgtagctgcaacaccgtaccttcttcacagtcagtgaaggaagctgtgctacaggtgtctgctgagcatctggacaggaactattttctcagcacgtcaaaatttttagaaagtggctgcccttgttggcttccttcttcctacttaagataaactgtgagaggaaaattttgtgtggtgttagaaaattcatgtgtgagaagaggccttgggctccaggacccagtcaggcagccctggacttgaccctaaaagggagtaaagacaaatgcgaagttcaatcaggggttcagagctcccaaagctcatagcctggagcttcttaacctttaggcagggtagagacatttaaaacggcccctaaacttggggggcgcgtaggctcatgggaaatagagtagggtgcttgtcctgggaccagctgtgggccccggaggctgacttccggtgcactcctgcgcgtgtgcacctctctctgtgtgcgtgttcgcgcatgcgcgccgccgctgcactgccctcgcttcctgtgcgtcctcaggtcaccgcttgctctagttcccaggctttggcctccagtggacgagaatcgcggagcctgcggggctggaggttgagcgcccgggccagcacctaggcgggcgcgggggtgtgcaggccagggttcgcgcgggccgggtggaggcttgagcggggacccccgagcttgagccccggagccggcggcgctggggccagaggggccggacgggaggtggcggaggtggcggcggaggcgaaggggcggcgggacgcgggcctggcccgtgtgtgtcctggcggcctggcccaggctgccgctgtacggtgagcccgagggaggcggatctgggtcccgggaaggacacccgcctggatttgccccttaggcccggcccgggcccctcgggagcagaacaaccttagtgaggtggacaggaggggacctcgcgagcagacgcgcgccagcgacagcagccccgccccggcctctcgggagccgtggggcagaggctgcggagccccagaagggtaggtcttgggttttcgggcccggagcgagaagggcctgagtgaagtcaccgtgtgttggggaccttagagtgtggggcagggggagggtctcgatcgcttgcaggagagacgtgtgtttgggtttgagggcagggtccggctgcaccgaacaggcgctgcatgggaaatctgggaggacgaggcttatgggggcctggagggtgtcaccagcctcagctgcggacgtcgtctccactccccgctaacccctaacagcccttcctcctcctttccgtgctccagatttcgacctcctctaaacgtccgtcagcgcctctgttctctcatttaagtgtctgctgattccccccttagatctgccctggagactggtctaccagccacagtctctgcacgtttccaagagcagcagaaaatgaacacattgcaggccagtgtcattcaaagatgtggctgtggatttcacccaggaggagtggcagcagctggaccctgatgagaagataacttacagggatgtgatgttggagaactatagccatctagtttctgtgggatatgataccaccaagccaaacgtcatcattaagttggagcagggagaggagccgtggataatgggaggtgaatttccatgtcaacatagtccagaagcctggagagttgatgacctgatagagagaatccaagaaaacgaagacaaacattcaagccgccctgcccgcaggccatgtggcccccgctgttgctgctgctgctgctgctcccggccgccccggtccccaccgccaaagccgctccccacccggatgctaacacccaggaaggccttcagaacctgctccaaggagtcggggctggcggagacggagagctgcgggcagactcacacctggccccgggctctggctgtattgatggggctgtggtggccacgcgaccagaaagccggggaggaagacctgcggttccgtgagaggcgtccagggctgcaggccacggcgacaggctccggggaacatggggctttccctgtccactcccaaggagtgtgggcctcaacgcattggcaggggacggccgtgtgccctctccagaccccacccccagatgcatttattagaaataataaagttctttcttagcta

SEQ ID NO: 465366 - DNA, 489 bp, Homo sapiens
cattcggcacgaccggctcttttaaatgaccccaggcgtgggtacagtgaccgccgccctgcccgcaggccatgtggcccccgctgttgctgctgctgctgctgctcccggccgccccggtccccaccgccaaagccgctccccacccggatgctaacacccaggaaggccttcagaacctgctccaaggagtcggggctggcggagacggagagctgcgggcagactcacacctggccccgggctctggctgtattgatggggctgtggtggccacgcgaccagaaagccggggaggaagacctgcggttccgtgagaggcgtccagggctgcaggccacggcgacaggctccggggaacatggggctttccctgtccactcccaaggagtgtgggcctcaacgcattggcaggggacggccgtgtgccctctccagaccccacccccagatgcatttattagaaataataaagttctttcttagcta

SEQ ID NO: 465367 - DNA, 2424 bp, Homo sapiens
  misc_feature (1)..(3): n is a, c, g, or t
  misc_feature (7)..(7): n is a, c, g, or t
nnncctncgcctcgtgggggagtcaagtctccgtaggcggagagcccggatgcaggcgcggctaggcggccctctctatggtgagccccccggtccctcctccgcagcacccggagtgcctctatggttcttcctgtcgttagtcgggagggggcgctgtacgcgcgctgtacgcttgcgcgaggtgacgccggggcagggccggaaggaatgcagcggctgccacggagctcgtagctgcagctttggaggagtaagcggcgtggtagcgaaggtcgccgaacccgcctggctagccggcgagttgagtggcgactcttttgaaacagatggtcaccatgtttagatattagcagtcccgtatgtgcatgtctgcatttgaaaatggaagagggaaacaacaatgaagaggtaattcacttgaacaactttcactgccatcggggacaagactttgtaattttcttctggaaaacccagattatccaaagagagaagacagaatcattataaatcccagtagcagtctgctggccagccaagatgagacaaagttgcctaaaataagacttttttgactattctaaattgactcctcttgaccagcactgcttcatccaagctgctgacctcctcatggccgacttcaaagtgctcagtagtcaggacatcatgtgggccctgcacgagctcaaaggacactatgcaatcacccgaaagaaggaacctttccctttctcaatttttaggccttttctgatgccattaaaaaatggcaggagctatcaccagaaaccagtggaaaaaggaaaaagagaaaagaaatgaaccagtattcttaaattgatttcaagtttgaacaaggggttggcatctgcacatccttcctgggcatctcgtgggcactgctcgattaccaccaggccttgcacacctgcctcccctccaagcccctcctgggcctgggctcctctgtgatctacgtcctgtggaacctgctgctactgtggccccgagtcctagctgtggccctgttctcagccctcttccccagtatgtagccctgcatttcctgggcctgtggctggtactgctgctctgggtttggcttcaaggcacagacttcatgctggaccccagttccgagtatcctctatttctcctggttcaacgtggctgagggccacacccgaggccgggccaccatccacttggctttcctcctgagtgacagcattctcctggtggccacctgggtgacttacagctcctggctgcccagcaggattccactgcagctgtggctgcctgtaggaggcggatgcttctttctgggcctggctctgtggcttgtgtgctactgctggctgcaccctagctgatgctgggagcccaaccctgaccaggtggacaggacccagagtctactttcctcagaggggtatcagctgcctcagacccagttagcacagaacttttttcccaagggtaaggctgaggctgcttcgccagtgaagggagaggtgaacggcgtcctttgaagcaggatcagacccagccagcagagatggagagtgactgctggcagaaggcaggcgaggataagctaacgatgctgctgtggcctccatgcactcagcaagagtgggatgcctctgctgggccgtgcaccagggatggtgctgagtggggcagaggcctgccttcaaggagttcacagtgaacaagatgagaagggctgggccctgcagggtcaagagccccaattacgtacaagacactttgggaggaaagaagactaccttttcttttccccctgccattggtatagctggtgccccaaaactttcacctccctccctggccacctctaaaatgattggtataggggcttccccaccccttagctcccctatcctgggctagaaggccacagggactgtcctctagaattcttcctcccctcccccacaccattcattcaattcgtgaaacaaatcttcaccgagagcagtttatgtgctaggaacatcattctatccttgcaacctggaacaagaccagctaccaccttagcttcatcccctacttgcaccaaccagtcccgggttagatctcaaatgccggaagtcagggatgcccaactctgggcagccccagtcagaacctctgggatctcagtgaagctggcctggcctctgctcttgctctcaaggggctgcttttcaaccaagagccttgtgagcctggtctgagccttgcacagccactgagtattttttattccttagccagtgtacctcctacctcagagtctatgtgagaggaagagaatgtgtgtccctgtgggtctctgcaagtgacagatgtgttgtttttaacagtattattaggttatgattaaagcctcatgaaatcctctaa

SEQ ID NO: 465368 - DNA, 2451 bp, Homo sapiens
  misc_feature (1)..(3): n is a, c, g, or t
  misc_feature (7)..(7): n is a, c, g, or t
nnncctncgcctcgtgggggagtcaagtctccgtaggcggagagcccggatgcaggcgcggctaggcggccctctctatggtgagccccccggtccctcctccgcagcacccggagtgcctctatggttcttcctgtcgttagtcgggagggggcgctgtacgcgcgctgtacgcttgcgcgaggtgacgccggggcagggccggaaggaatgcagcggctgccacggagctcgtagctgcagctttggaggagtaagcggcgtggtagcgaaggtcgccgaacccgcctggctagccggcgagttgagtggcgactcttttgaaacagatggtcaccatgtttagatattagcagtcccgtatgtgcatgtctgcatttgaaaatggaagagggaaacaacaatgaagaggtaattcacttgaacaactttcactgccatcggggacaagactttgtaattttcttctggaaaacccagattatccaaagagagaagacagaatcattataaatcccagtagcagtctgctggccagccaagatgagacaaagcactgcttcatccaagctgctgacctcctcatggccgacttcaaagtgctcagtagtcaggacatcatgtgggccctgcacgagctcaaaggacactatgcaatcacccgaaaggccttttctgatgccattaaaaaatggcaggagctatcaccagaaaccagtggaaaaaggaaaaagagaaaagaaatgaaccagtattcttaaattgatttcaagtttgaacaaggtactgggctgctgggggatcccaagtgagcagagtctgttttctaccctcgaggagctcagagaaaaggaaatagataattactgtgtgatgagactccagacagaggggttggcatctgcacatccttcctgggcatctcgtgggcactgctcgattaccaccaggccttgcacacctgcctcccctccaagcccctcctgggcctgggctcctctgtgatctacgtcctgtggaacctgctgctactgtggccccgagtcctagctgtggccctgttctcagccctcttccccagtatgtagccctgcatttcctgggcctgtggctggtactgctgctctgggtttggcttcaaggcacagacttcatgctggaccccagttccgagtatcctctatttctcctggttcaacgtggctgagggccacacccgaggccgggccaccatccacttggctttcctcctgagtgacagcattctcctggtggccacctgggtgacttacagctcctggctgcccagcaggattccactgcagctgtggctgcctgtaggaggcggatgcttctttctgggcctggctctgtggcttgtgtgctactgctggctgcaccctagctgatgctgggagcccaaccctgaccaggtggacaggacccagagtctactttcctcagaggggtatcagctgcctcagacccagttagcacagaacttttttcccaagggtaaggctgaggctgcttcgccagtgaagggagaggtgaacggcgtcctttgaagcaggatcagacccagccagcagagatggagagtgactgctggcagaaggcaggcgaggataagctaacgatgctgctgtggcctccatgcactcagcaagagtgggatgcctctgctgggccgtgcaccagggatggtgctgagtggggcagaggcctgccttcaaggagttcacagtgaacaagatgagaagggctgggccctgcagggtcaagagccccaattacgtacaagacactttgggaggaaagaagactaccttttcttttccccctgccattggtatagctggtgccccaaaactttcacctccctccctggccacctctaaaatgattggtataggggcttccccaccccttagctcccctatcctgggctagaaggccacagggactgtcctctagaattcttcctcccctcccccacaccattcattcaattcgtgaaacaaatcttcaccgagagcagtttatgtgctaggaacatcattctatccttgcaacctggaacaagaccagctaccaccttagcttcatcccctacttgcaccaaccagtcccgggttagatctcaaatgccggaagtcagggatgcccaactctgggcagccccagtcagaacctctgggatctcagtgaagctggcctggcctctgctcttgctctcaaggggctgcttttcaaccaagagccttgtgagcctggtctgagccttgcacagccactgagtattttttattccttagccagtgtacctcctacctcagagtctatgtgagaggaagagaatgtgtgtccctgtgggtctctgcaagtgacagatgtgttgtttttaacagtattattaggttatgattaaagcctcatgaaatcctctaa

SEQ ID NO: 465369 - DNA, 1138 bp, Homo sapiens
  misc_feature (1)..(3): n is a, c, g, or t
  misc_feature (7)..(7): n is a, c, g, or t
nnncctncgcctcgtgggggagtcaagtctccgtaggcggagagcccggatgcaggcgcggctaggcggccctctctatggtgagccccccggtccctcctccgcagcacccggagtgcctctatggttcttcctgtcgttagtcgggagggggcgctgtacgcgcgctgtacgcttgcgcgaggtgacgccggggcagggccggaaggaatgcagcggctgccacggagctcgtagctgcagctttggaggagtaagcggcgtggtagcgaaggtcgccgaacccgcctggctagccggcgagttgagtggcgactcttttgaaacagatggtcaccatgtttagatattagcagtcccgtatgtgcatgtctgcatttgaaaatggaagagggaaacaacaatgaagaggtaattcacttgaacaactttcactgccatcggggacaagactttgtaattttcttctggaaaacccagattatccaaagagagaagacagaatcattataaatcccagtagcagtctgctggccagccaagatgagacaaagttgcctaaaataagacttttttgactattctaaattgactcctcttgaccagcactgcttcatccaagctgctgacctcctcatggccgacttcaaagtgctcagtagtcaggacatcatgtgggccctgcacgagctcaaaggacactatgcaatcacccgaaaggccttttctgatgccattaaaaaatggcaggagctatcaccagaaaccagtggaaaaaggaaaaagagaaaagaaatgaaccagtattcttaaattgatttcaagtttgaacaaggtactgggctgctgggggatcccaagtgagcagagtctgttttctaccctcgaggagctcagagaaaaggaaatagataattactgtgtgatgagactccagacagaggggttggcatctgcacatccttcctgggcatctcgtgggcactgctcgattaccaccaggccttgcacacctgcctcccctccaagcccctcctgggcctgggctcctctgtgatctacgtcctgtggaacctgctgctactgtggccccgagtcctagctgtttcctggggacacgagcatgaattgtaataat

SEQ ID NO: 465370 - DNA, 3403 bp, Homo sapiens
ttgtcactgctttaggagttcttcattgatttcgaacagacattttaagatagttttttctagcttgtgttgtgtttttaatgggagagttggtcagcgtctgctggaacagagctacgcctatggaaccgtagacttgttcgtgctttattgcaatactttaaagacacaaagtctcaacaaccatcttccgcttgacgagacagatcattctaatttgagcagaagctactatgtcctgccctttgaacgcggcggcccggacagctgacaaggacacactgtgtatttccattccaattctgggagtgctctgaggcctctgggggagaaggacccatgaaatattcaaaacataagtgaataaaatatctaggtgctagatatgggccaggaagagccctcggccctgcaaagtgtgtgtgatggtgagaagctaccggaagagatggtccctgtgcttggttcattccttggacatttatcaagctgacgaatgtagcagaggtgcttcagtcggctgtaattccacgggtggagtgctggctggagagttacctggggctgtcacactgcatgggctccgggacactgtggctgcccttatgtggtgtccccggagggccctgcaggtgtcacaccgctgctccacactgccacctgctgtcagcatctgtgcaacgtatccaggtctctgggggctagaatgaaaaacatgcatctcgtaaccaatgaaatcgggcttgtcctgaagacctcgtgcattcatccattctcacactgctataaagacatacctaagactgggcacttcatgaagaaaagaggtttaattggctcacggttctgcaggctttacaggaagcatagcagcttccacttctagggaggcctcaggaaacttatagtcatggtggaaggtgaaggcgggacaaggcgtctcacatgggagcagtagagagagaaaaagagggggtgccgcacactttgaaacaaccagatctaacgataactcactatcatgagaacagcaccaagaagctggcgctaacccacttgtgaaggaccaccaccatgatccaatcccttcccaccaggtcccacttccaacgttggggattacacttcacgctggctgcacgctgggcctccgggaagccggcaagcccacctgattctggatcctccctccgagcctgggtgacgctgtcatgaaagaagctgccagaagcccacagcagggcagttaggcagggaatgcgagtccgtgtccagagcaagggtgactccagtccctccaggacggagaagccacttggctgggggatgtggggccactgggctggggtggttgggcagcggcttagcttcaggggtgaaggggagctggggctgctaccccaggaacaagatacactccagcagtagttccagttccaagagggcaccgcgagggccacgggggcaggcacagtgtcgattccttctccggcgggagcacagtggtgtggcctccaggcagctcactccaccctgggcttcgtgcctgtgaggactgcaagggaccccaaggtgcagtcacacgctgcacgggcgtctggctacacaaatgccaccgcgttacagtcgcctgcagtattcagtgcagtcacacgctgcacgggtgtttagatacacaaatgccaccccgttacagataattctgccaaacgaaagatgtcagatgaaaaagtctacacagtataatcccgtgtatccagaatcctacagcaaactcaccaacagtggcaggaagcagacctgcgcttgctgtagatgcaggacaggatcctgtgaagactcaagacttgttgtggacagatgcctccatctcttgggcacacacctagaaggagcattgctgggccatagggtggacatacgtttagctttattagaaattgtcaaaatgattttcaaagtgattgtaccgttcacactcccacagcaacatacagaacttcctactgctccccgtcctcgccggctgacgcttggtattgtcagtctttttaatgttcgtcatcctggtgggggtgtggtggtatctcactgtggtgttaatttgcattcctctgatgaatgctgattctgtgcacgtgttcaatgcttagaactgcccggataccctctcctgtgaagcacctgctcaaggcactgtcaatgtttagggctgcccggataccccctcctgtgaagcacctgctcaaggcactgtcaatgtttagggctgcccggataccccctcctgtgaagcacctgctcaaggcactgtcaatgtttagggctgcccggataccccctcctgtgaagcacctgctcaaggcatgtcaatgtttagggctgcccagataccccctcctgtgaagcacctgttcaaggcactgtcaatgtttagggctgcccggataccccctcctgtgaagcacctgctcaaggcactgtcaatgctttagggctgcccggataccccctcctgtgaagcacctgctcaaggcactgtcaatgctttagggctgcccggataccccctcctgtgaagcacctgctcaaggcactgtcaatgctttagggctgcctggataccccctcctgtgaagcacctgctcaaggcactgtcaatgctttaggactgcccggataccccctcctgtgaagcacctgctcaaggcacagtcaatgcttaggactgcccagataccctctcctgtgaagcacctgctcaaggcactgtcaatgctttagggctgcctggataccctctcctgtgaagcacctgctcaaggcactgtcaatgctttagggctgcccggataccccctcctgtgaagcacctgctcaaggcactgtcagcgatttagggctgcccggataccccctcctgtgaagcacctgctcaaggcactgtcagcgatttaggactgcccggataccccctcctgtgaagcacctgctcaaggcactgtcaatgctttaggactgcccggataccccctcttgtgaagcacctgctcaaggcactgtcaatgcttagggctgcccagataccctctcctgtgaagcacctgctcaaggcactatcaatgcttagggctgcccggataccctctcctgtgaagcacctgctcaaggcactgtcaataccttccttcggttgttgctttcttaattatttgtaattctttatctatctgtacagaaatcctctgccatataaatgtattacaaacatcttcaccagattctggcttgctctttcattgtcttgacggtgtctcttgatgaatttgtagtagatatagtattgtcatagatattcagagtttttatatttgctgtgtcagttttggtaggttgtgttttt

SEQ ID NO: 465371 - DNA, 3372 bp, Homo sapiens
tgattctgaggcctccccagccatgtggaactcttgtgttgtgtttttaatgggagagttggtcagcgtctgctggaacagagctacgcctatggaaccgtagacttgttcgtgctttattgcaatactttaaagacacaaagtctcaacaaccatcttccgcttgacgagacagatcattctaatttgagcagaagctactatgtcctgccctttgaacgcggcggcccggacagctgacaaggacacactgtgtatttccattccaattctgggagtgctctgaggcctctgggggagaaggacccatgaaatattcaaaacataagtgaataaaatatctaggtgctagatatgggccaggaagagccctcggccctgcaaagtgtgtgtgatggtgagaagctaccggaagagatggtccctgtgcttggttcattccttggacatttatcaagctgacgaatgtagcagaggtgcttcagtcggctgtaattccacgggtggagtgctggctggagagttacctggggctgtcacactgcatgggctccgggacactgtggctgcccttatgtggtgtccccggagggccctgcaggtgtcacaccgctgctccacactgccacctgctgtcagcatctgtgcaacgtatccaggtctctgggggctagaatgaaaaacatgcatctcgtaaccaatgaaatcgggcttgtcctgaagacctcgtgcattcatccattctcacactgctataaagacatacctaagactgggcacttcatgaagaaaagaggtttaattggctcacggttctgcaggctttacaggaagcatagcagcttccacttctagggaggcctcaggaaacttatagtcatggtggaaggtgaaggcgggacaaggcgtctcacatgggagcagtagagagagaaaaagagggggtgccgcacactttgaaacaaccagatctaacgataactcactatcatgagaacagcaccaagaagctggcgctaacccacttgtgaaggaccaccaccatgatccaatcccttcccaccaggtcccacttccaacgttggggattacacttcacgctggctgcacgctgggcctccgggaagccggcaagcccacctgattctggatcctccctccgagcctgggtgacgctgtcatgaaagaagctgccagaagcccacagcagggcagttaggcagggaatgcgagtccgtgtccagagcaagggtgactccagtccctccaggacggagaagccacttggctgggggatgtggggccactgggctggggtggttgggcagcggcttagcttcaggggtgaaggggagctggggctgctaccccaggaacaagatacactccagcagtagttccagttccaagagggcaccgcgagggccacgggggcaggcacagtgtcgattccttctccggcgggagcacagtggtgtggcctccaggcagctcactccaccctgggcttcgtgcctgtgaggactgcaagggaccccaaggtgcagtcacacgctgcacgggcgtctggctacacaaatgccaccgcgttacagtcgcctgcagtattcagtgcagtcacacgctgcacgggtgtttagatacacaaatgccaccccgttacagataattctgccaaacgaaagatgtcagatgaaaaagtctacacagtataatcccgtgtatccagaatcctacagcaaactcaccaacagtggcaggaagcagacctgcgcttgctgtagatgcaggacaggatcctgtgaagactcaagacttgttgtggacagatgcctccatctcttgggcacacacctagaaggagcattgctgggccatagggtggacatacgtttagctttattagaaattgtcaaaatgattttcaaagtgattgtaccgttcacactcccacagcaacatacagaacttcctactgctccccgtcctcgccggctgacgcttggtattgtcagtctttttaatgttcgtcatcctggtgggggtgtggtggtatctcactgtggtgttaatttgcattcctctgatgaatgctgattctgtgcacgtgttcaatgcttagaactgcccggataccctctcctgtgaagcacctgctcaaggcactgtcaatgtttagggctgcccggataccccctcctgtgaagcacctgctcaaggcactgtcaatgtttagggctgcccggataccccctcctgtgaagcacctgctcaaggcactgtcaatgtttagggctgcccggataccccctcctgtgaagcacctgctcaaggcatgtcaatgtttagggctgcccagataccccctcctgtgaagcacctgttcaaggcactgtcaatgtttagggctgcccggataccccctcctgtgaagcacctgctcaaggcactgtcaatgctttagggctgcccggataccccctcctgtgaagcacctgctcaaggcactgtcaatgctttagggctgcccggataccccctcctgtgaagcacctgctcaaggcactgtcaatgctttagggctgcctggataccccctcctgtgaagcacctgctcaaggcactgtcaatgctttaggactgcccggataccccctcctgtgaagcacctgctcaaggcacagtcaatgcttaggactgcccagataccctctcctgtgaagcacctgctcaaggcactgtcaatgctttagggctgcctggataccctctcctgtgaagcacctgctcaaggcactgtcaatgctttagggctgcccggataccccctcctgtgaagcacctgctcaaggcactgtcagcgatttagggctgcccggataccccctcctgtgaagcacctgctcaaggcactgtcagcgatttaggactgcccggataccccctcctgtgaagcacctgctcaaggcactgtcaatgctttaggactgcccggataccccctcttgtgaagcacctgctcaaggcactgtcaatgcttagggctgcccagataccctctcctgtgaagcacctgctcaaggcactatcaatgcttagggctgcccggataccctctcctgtgaagcacctgctcaaggcactgtcaataccttccttcggttgttgctttcttaattatttgtaattctttatctatctgtacagaaatcctctgccatataaatgtattacaaacatcttcaccagattctggcttgctctttcattgtcttgacggtgtctcttgatgaatttgtagtagatatagtattgtcatagatattcagagtttttatatttgctgtgtcagttttggtaggttgtgttttt

SEQ ID NO: 465372 - DNA, 5099 bp, Homo sapiens
cacagcagcagggtttctgggtggcagctagtatgtggctgtgtataggattcggtggtggtttagattggtaattccatcatggctggacattagaatcatcttggggagctttaaaagtcatgggcggcaggagagacagctcatgcctgtaattccacactttgggaggccgaggcaggtggatcgcctgaggtcagtagtttgagaccagcctggccaacatggtgaaaccccgtctctactaaaaatacaaaaattagccgggcatggtgatgggtgcttgtaatcccagctactcaggaggctgaggcaggaaaatcgcttgaacctaggaggcggaggttgcagtgagcccagatcacagcacttcactccagcctgggcgaaagagcgaaactcccatctcaaaaaaaaaaaaaaaaaaaaaaaaaaaaaaaaaaagagagagagaaagaaagaaaaagaaaaaaagaacagatctattcaccaaagagctaaagaaaccttcagagagtcttcccctgcccctcttctcaaacccctagggggagcatgcagacaggcaagtctagcgcggccgtgctctcctccgactgccctctgccgaatcccccttggcgtccgtgttattccatcattgatggcctgccagcgtctgtcagtgtgtttttctgccagtgtgttcctctcgatgtccagctgcttgtgtgtgcaggtcatgaaactgttggtcaagagattttctgtgttgctgccttagtagattatgaatacagaattctcccattgaccacaaaggccattgaagaaaaaccctgtggtaaagaatccaagtctgagaattccaactgtgaaaaagcagacttagagctgtaccagcttctgaccctgaactgtgttctcatattcgagaagaaacttggaaaatctccatttaacaggatctattatttgaagatagttgggaaaccatctttaattccttgaacttaccttttgagttttaaatgactctaaatgtgtcattggctgtttcttcctaacgcatggcctgctgaccccaagaggattcctggtgaacatttcatgttctccatctagttacatatgtatttactgatatggaaaagcactgtggggcaatggacacagcactgaccagggagacctgggttctatttctggctcttcctcttagcagctgcatggccctggatagattatttatcttctctggatgtcagtttacaaagcttagactaagagggtgtttctcgaaggaccaacataactctttccactcccacaattcttagttcttcattggttttatgctttgtggtgtggataacactgggttttctactatcctcctttccaaaaaagcaaatgaacccaacactggattcaagcttaaggtgcagactcacagaatattattattttgatgtatatcagctgcatttctttaaggtaaatttaagagctgttttttcttttaaaccctagttggatttttcaggtgtcttgtaaaagcaaaactaccatatttggctttgtagggctctgccaagggtgggctagagggagactgcacggggagaggaggaagtaattactcttttctgtgtgcttcctgtggacttcctgtgtgcttcctgtggacttcctgtgtgcttcttatcctattgacttgctgtggatttcctgtgtgcttcctgtgaacttcctgtctgcctcctgtggacctcctgttggcccatggtggatttcctatcttcttcctgtggattttttgtgtctacttccgatggacctcattgtggcttgttgtggactgcctttctgcttcctgtggagttcctgtgtgcttcttgtggactttctgtctgcttcctgtggatttccagtgtgtgtcttgtggatctcctgttgtcttgctgtggagttcctatggacttcctgtgtacttcttgtggacttcctgtgtgcttcttgtggacctcctgttggcttgctgtggacttcctgtcttcctcttgtggactttctgtgtgcttctcatgtatttcctgtttctttgctgtggactttctgtgtgcttctggtggacttcctgtctgcttcctgtggacgtcctgtctgcttctagtagacctcctgtcatcttgctgtggatttcctgtgtgctttctgtgaacttcctgtgtgcttcttgtgaactttctgtctgcttctgttggacttctgcttcccgttcttgccaagtgccacccaagaagcactgttttactccggcggtggccaatcctttcggtagtagtgactgaattcagtttgtagtttctctggtgtttgcagacaaacttcattatgtcccactctgagacaccagcattgatcattctcctctccttagaggttagagtcccaaccccacagtagctccttttcgaagcttcaaggttttaatgattccagcctcttctctttgttcccccagccttgggagtcctgggagtgtttactgctttgtgtagttgctaccactatggtaacttccagttacttagtcaacaactctatacccagttaataacttctttttattaaattctttctatgcaaataacttttgtgatttccaattccttactggatgtggctgatacaacacttttaacaggttggtttgtaagattctgattttttgtatgcatttagggacacacacataatctgtgtttacttatgactatatgactttatttttacagaagtggcatcatattgtttgcacaatcttctgcaactttctttttatcacctaattttaaatataaataagaaataagaaataataaaaaatgagaacatattcaaaaatgactttccatgtcagtacaaatgaagcttccttatcatttttcatggctgcatagtatttcataatttgtttaatgatgaccactcctagaacttttgattgtttctattttttttgcaattacagaaaaatattttagtgaatatgcttatacacaaatatacacagacaattcttgggtacatgtttgagtatacatctttaagatacatttctattatggaaacagtataaataacatgcgtattaaatatttttgatacatgcagccaatgccccccaaaaatgctttaccatttgacattattatcagctaagtatgattatgcacatctgctctctcttttttatgaattcctaaaagtttctggtctgctgatggtacatttttttatattctagcaatagtattgattttctgttttttcctgggcatgaggagtgaccaaagcaagtgctcagctggcatctcgatccaattttttcagatttcagttttcttcagtggccttggtggattcaataaatcttcaggtagtctactgccaattaccttgttttcatggcagtcttgaaaatgttttggatttttctggctcaggcaaaaggctttaaacatttctttctagaaaggtctgagttataaatctctgaaaactgggtttatgatggaaagtaataatacatttcgagatgcttcctggatcttaaatcattctgataataatgtttaatctatgatttaaataaaatattttcaaaaagaaaaaaagtcactgataattctaccacccttctatggaaagcccgtggcgtaattcagtctaagcctgaagacctgagaatcaggggagctgatgatgttaactcctggtttaaatctgaaggcctgagaactgggggtgccgctgctgtaagtcctagagttcaaaggcccaagaacccagagctctgatgtctgaaagcagaagattgatgtctcagctcaaaaagaaagtgttaatttgccctttctctacctttttgtaccattcaggccctcaatggattagatggtgtccttccacattggtgagggccaatcttctttactcggtctgatactgactcaaatcctaatctcttccagaaacatcttcatagatgaacccggaaataatgttttactagccatctgggcatcccttagcccagtcaagttgacacataaaagtaatcatcacattggtatatgaagaggattaaatcactcaattttgaatagcctctgactcatctctttgccttctgagttctcactcattccctgctctggtccacccagcaggagtccacatggccagcatttctattgagtttacgcagactcacagaaaggaaccactgataggaaggccacgggcactgttttaatggtggaatcattccacatctgtgaataaaatgctacagaacctttagggctagcagccgtctcagaggacttctgatgcaatctttctcctatggactaccggcaaagagaataaccctaaacccagatgtgatgataaaaggcaaaaggtgatgttttacaaggtagaaaaagagatatggaatttagagtaggggaaataggcttgtcttcagaacctaggactgtaaaagccttgttatggaaaatggttctaaaaggatttctttcctatgaaaatgatatgaaaatatatcgttccaagagactggactagaagtcttccaaactgtcttctagtgatcctgaattatcagagtttatgtcttctatgaaaggggactgaacatttcctttctattgatcccaggtctttagacaaactgaacccattgtcatccagaaaatgtttacatttgcctatagcctggaagtccccctccccttcccccctccccctccccttcccccctccccatccccttccccctccccctcttcccttcccctccccctcttcccttcccctccccctcctcccctccccctccccctcctccccctcccccttctcccccttcccccccctttcccctcttcccttcccctcttcccttcccctccccctctcctccccctcccccctcccctcccccactttgagttgtcccacctttttggaccaaactgatgtatttcttaaatgtatttgactgatgtctcatgtctccctaaaatgtgtaaaaccaagctaca

SEQ ID NO: 465373 - DNA, 2167 bp, Homo sapiens
cagagctctgctgaaacccagatccacgaggcgacagctgctcttggccaaccacgccccctccacccccacagccacttccacatctccatcagttcctccttgtgggtccgaggcgctctgccgccggcccctcctcacttcttcctccctggggatggatccaagctattgtcctgcccatggcttcccatctcaggacgctctctggccgctatcatcccagcagtggagttcagcccactactctgaaccagccgcaggtggctgcgatgggacggaagccatgaatggtgccggccctggccccgccgcagccgccccggtcccagtcccggtcccggtcccggactggcggcagttctgcgagctgcatgcgcaggcggccgccgtggactttgcgcacaagttctgccgtttcctgcgggacaacccagcttacgacacgcccgacgccggcgcctccttctcccgccacttcgccgccaacttcctggacgtcttcggcgaggagcgcagaggccatggagccggagctcgcggacacctctgcactcaaggcggcgcctacggccactcgcggagctcggaggacgtgtccacgcacgcggccaccaaggcccgcgttcgcaagggcttctcgctgcgcaacatgagcctgtgcgtggtggacggcgtgcgcgacatgtggcaccggcgcgcctcgcccgagcccgacgcggcagctgccccgcgcaccgccgagccccgcgacaagtggacgcggcgcctgaggctgtcgcggacgctggctgccaaggtggagctggtggacattcaacgcgagggggcgctgcgcttcatggtggccgacgacgcggccgcgggctccgggggctcggctcagtggcagaagtgccgcctgctcctgcgcagggctgtggccgaggaacgcttccgcctggagttcttcgtgccgcccaaagcctccaggcccaaggtcagcatcccactgtcagccatcattgaggtccgcaccaccatgcccctggaaatgccagagaaggataacacattcgtcctcaaggtagagaatggagccgaatacatcttggagaccatcgactctctgcagaagcactcgtgggtagctgacatccagggctgcgtggaccccggccgctgtgaaggtgaacctcacttagtggaattttcgagctggcagggtcccagacacctcatgtcacaaatcgggagagaaaccttcccaccctctgagggtctgcacgggatcccaggaggagcccagcccctcaaggatagtgggcagggatcatgggccctcagtggggactgtccactcagtggggaacagggtgcagagacggatcccgaggctgaacccgagctggagctatccgactacccatggttccacgggacactgtcccgggtcaaggctgctcaactggttctggcaggggggccccggaaccacggcctcttcgtgatccgccaaagtgagactcggcctggggagtacgtgctgaccttcaacttccagggcaaggccaaggcaagtgtgcccagccccggacctgcccctgaccacacccacctgtacccacagcacctgcgcctgtccctgaacggccacggccagtgtcacgtacagcatctgtggttccagtctgtgcttgacatgctccgccacttccacacacaccccatcccactggagtcagggggctcggccgacatcacccttcgcagctatgtgcgggcccaggaccccccaccaggatgtggccagcccaggtccccactcacgccctgccgtcgccttgttgcagagccgggccccacgccccctgccgcgcccgcgtccccggcctgctggagcgactcgcccggccagcactacttctccagcctcgccgcggccgcctgcccgcctgcctcgccctccgacgccgccggcgcctcctcgtcttccgcctcgtcgtcctctgccgcgtcggggcccgcccccccgcgccccgtcgagggccagctcagcgcgcggagccgcagcaacagcgccgagcgcctgctggaggccgtggccgccaccgccgccgaggagcccccggaggccgcgcccggccgcgcgcgcgccgtggagaaccagtactccttctactagccc

SEQ ID NO: 465374 - DNA, 1991 bp, Homo sapiens
cgggcccggggagcccggccgcggtccgggcagcgctcagccggcgccccagcccgctcggccgcagctgcgcgcctgtagccgcaggtggctgcgatgggacggaagccatgaatggtgccggccctggccccgccgcagccgccccggtcccagtcccggtcccggtcccggactggcggcagttctgcgagctgcatgcgcaggcggccgccgtggactttgcgcacaagttctgccgtttcctgcgggacaacccagcttacgacacgcccgacgccggcgcctccttctcccgccacttcgccgccaacttcctggacgtcttcggcgaggagcgcagaggccatggagccggagctcgcggacacctctgcactcaaggcggcgcctacggccactcgcggagctcggaggacgtgtccacgcacgcggccaccaaggcccgcgttcgcaagggcttctcgctgcgcaacatgagcctgtgcgtggtggacggcgtgcgcgacatgtggcaccggcgcgcctcgcccgagcccgacgcggcagctgccccgcgcaccgccgagccccgcgacaagtggacgcggcgcctgaggctgtcgcggacgctggctgccaaggtggagctggtggacattcaacgcgagggggcgctgcgcttcatggtggccgacgacgcggccgcgggctccgggggctcggctcagtggcagaagtgccgcctgctcctgcgcagggctgtggccgaggaacgcttccgcctggagttcttcgtgccgcccaaagcctccaggcccaaggtcagcatcccactgtcagccatcattgaggtccgcaccaccatgcccctggaaatgccagagaaggataacacattcgtcctcaaggtagagaatggagccgaatacatcttggagaccatcgactctctgcagaagcactcgtgggtagctgacatccagggctgcgtggaccccggccgctgtgaaggtgaacctcacttagtggaattttcgagctggcagggtcccagacacctcatgtcacaaatcgggagagaaaccttcccaccctctgagggtctgcacgggatcccaggaggagcccagcccctcaaggatagtgggcagggatcatgggccctcagtggggactgtccactcagtggggaacagggtgcagagacggatcccgaggctgaacccgagctggagctatccgactacccatggttccacgggacactgtcccgggtcaaggctgctcaactggttctggcaggggggccccggaaccacggcctcttcgtgatccgccaaagtgagactcggcctggggagtacgtgctgaccttcaacttccagggcaaggccaaggcaagtgtgcccagccccggacctgcccctgaccacacccacctgtacccacagcacctgcgcctgtccctgaacggccacggccagtgtcacgtacagcatctgtggttccagtctgtgcttgacatgctccgccacttccacacacaccccatcccactggagtcagggggctcggccgacatcacccttcgcagctatgtgcgggcccaggaccccccaccaggatgtggccagcccaggtccccactcacgccctgccgtcgccttgttgcagagccgggccccacgccccctgccgcgcccgcgtccccggcctgctggagcgactcgcccggccagcactacttctccagcctcgccgcggccgcctgcccgcctgcctcgccctccgacgccgccggcgcctcctcgtcttccgcctcgtcgtcctctgccgcgtcggggcccgcccccccgcgccccgtcgagggccagctcagcgcgcggagccgcagcaacagcgccgagcgcctgctggaggccgtggccgccaccgccgccgaggagcccccggaggccgcgcccggccgcgcgcgcgccgtggagaaccagtactccttctactagccc

SEQ ID NO: 465375 - DNA, 1478 bp, Homo sapiens
atatccttccctggtccctggctctctgagtccctttttttttttttttttttttttttaaagaacaggattggaggtgctctctggggtgtcctcctaccaagctgactgttgaagtccttgtggtgctcagggaggatgggtgacactcgctgttgcttcagcttcatcttaagcccacacagcgtctccactacccaggtctcctcaggctcaggggcgagctccttctccggctcctcctcagattcatctgaccactccttcttccttttccagccaagggacctacatggggggctgggatctaccccaggggctgagtaaagaaaccaggccactgtgtaatgcttctgcatctgatcaccttagaccccgacccaaaaccccaaaccactctccatcctccccagcctcgcagactgctggcttctctaagccatctggggtaccccgaggtgctccgctggggactctgctcattctgggggtgcagttgacggctggtcgtgatctttcccgtaatctgtcccctcttacggaacctagtctccgttctgtccatggccttcttctggacactgctaggatccagaagagtatgttatcaattctcaagcctaggagaagtcaggagtggagaacagctctgagaagatactgttgtccaactgatctccaggcaccacggagtccggtccctccaatcaggaaggtcggaatctctgatgtcatcgttcatgccaacctggcaaccagtttgaaaaaaaaacacatgtaactgccaggctgatctcttgtcctggagatcctgggtgaatggtatctcctgccactgtcccaacctcagaccattgtccaaaagcatcttcagggactccacatccctctgttccctgtcccagcagaggctgtgtcctctccactcaaagcctgaagcatgttggggtctcttcgtctctgtacatgcccatttcagagtccaggctggtgggagagggaacagagtgggaaagaaaactagggtaagcagaaacgatgaaaccttataagagtgagattatcatgtacaagaagtgagattatcatgtacaagagatcccaggaatactgacttgatgaaaaagtcacatcagagcactcagtttggcagagcttttctgccgaatgtttactcacattcactgtcccagattctatactgggggtacacacgtcctctgccctaaggcaattttgagtccaagagacattttgaggcctaaaaatcataggaaactgcccctgagctcacacatatttccaatggtgtccccaatttcagggaatccatggattacctaagccagcccctccagttcggctaagaaactctagtctatatatcaagttttgtatcatatgtattgctctgaactcagaaatttcccttccatttatggattctatgaataaaatatcacatgtacaaaaagact

SEQ ID NO: 465376 - DNA, 1269 bp, Homo sapiens
ttattttgctggggtcactcatgcagcaacagtcagctgtcgggtcgctgggagtgacttcactgggacagctggcaggactaggcctccctctccatgtggccttttatcctgggcttcttcacagtacaatggtctcaggattccaagaggacaggccgcagcatacaggggcttatcaaacctctgcttttgtcacacttgctgatgtcctattggccaaagcacacttgctgatgtcccattggccagagtcagtgtgggagggaatgacccaagggcgtggataccggaaggtgtggttcactgggcactgtcaccatagcaacctaccctgttccctggatcccgagaacaaggcccagggggcccaactcacacacacccagagatggcacctgaatcctacacaccacaaggcttcaggaccagtttccaagtgagaagagtgtcgtgtccccagttcctcaggagctggaagtgacagggacagcaaagaaggcagccacgtggagcctctctcactcacagaggtggagccaggcccctgctccagcccccactcagagctgggacactgagcctttggtgcccaagcccatagatacacagtgactccacatcctaccacgaatcctgtacattcactgaggtcctggatggcaagtgaccagcacaaagcttagcacacagcaagtgctcggctaaagtcactccctctccacctttccacctgggatcccctgctccctggcctggtggctgctgcactcccctgctgtccagggctgcaaagcctcagcgtcctggctatgcactttctacacgtgtgaccttcaacaaggtacttagcctttccgtgcctctgtctcctcatctataaaacaggcgtaatccggacggctgtgcctgaccttgaccgcgagagccaggagcgctacgaggtggtgatccaggccacagacatggcgggtcagctgggtggcctctcgggctccactaccgtcaccatcgtagtcaccgacgtcaatgacaacccgccccgtttcccgcagagtgagtgaggccttcccagaggaaggcgcgtctgtgtgtctgtctgttaccccatccaagccacctgctgaccccagcttccctttagacttcccaccaaaagaagggcttccccctctctttctgtctgtctgtctgtcctcccaagccaccagctatcccccagcccccctccaaccatgcttcctaccaaggaagaccccagggctgtcc

SEQ ID NO: 465377 - DNA, 1092 bp, Homo sapiens
ttattttgctggggtcactcatgcagcaacagtcagctgtcgggtcgctgggagtgacttcactgggacagctggcaggactaggcctccctctccatgtggccttttatcctgggcttcttcacagtacaatggtctcaggattccaagaggacaggccgcagcatacaggggcttatcaaacctctgcttttgtcacacttgctgatgtcctattggccaaagcacacttgctgatgtcccattggccagagtcagtgtgggagggaatgacccaagggcgtggataccggaaggtgtggttcactgggcactgtcaccatagcaacctaccctgttccctggatcccgagaacaaggcccagggggcccaactcacacacacccagagatggcacctgaatcctacacaccacaaggcttcaggaccagtttccaagtgagaagagtgtcgtgtccccagttcctcaggagctggaagtgacagggacagcaaagaaggcagccacgtggagcctctctcactcacagaggtggagccaggcccctgctccagcccccactcagagctgggacactgagcctttggtgcccaagcccatagatacacagtgactccacatcctaccacgaatcctgtacattcactgaggtcctggatggcaagtgaccagcacaaagcttagcacacagcaagtgctcggctaaagtcactccctctccacctttccacctgggatcccctgctccctggcctggtggctgctgcactcccctgctgtccagggctgcaaagcctcagcgtcctggctatgcactttctacacgtgtgaccttcaacaaggtacttagcctttccgtgcctctgtctcctcatctataaaacaggcgtaatccggacggctgtgcctgaccttgaccgcgagagccaggagcgctacgaggtggtgatccaggccacagacatggcgggtcagctgggtggcctctcgggctccactaccgtcaccatcgtagtcaccgacgtcaatgacaacccgccccgtttcccgcagaagatgtaccagttcagcatccaggagtcagccccca

SEQ ID NO: 465378 - DNA, 1541 bp, Homo sapiens
  misc_feature (27)..(27): n is a, c, g, or t
cagtgggtgtgacctggaagaaatccncctattccaatctcatgagagaagagcccctagttctcaggactttaaccctcttcctgccagcacccccaggccagtgctgaggctgacaagttgtctaaaagggcaggaggacttactcctgacatgcatctgccacccaaaccatcacaatagccttccgccttctcagtgggagtacgagtgaccctgcagcagaaggcagcaggaggtggtgacaagaatacacgtctggccctaaaacctgggtcagtcacatcctggctgccattcaccagctatatgattttaggaaagtggattcacctctgagctgcagattcctcatcaataaaatgaagacaagaacacccacccttagtatttgggtatttagactgtttccatgttttttttatttcttttatcatattcttggcattacgagtttagcattcaaggttctgaccaataagtgatcccaggggtgttcatgaaaatccccggggaaagcttttacaaaataaagaacggagtctattgagctggaattttctccctccatgattctgaggtctccccagccatgcggaacccactacatttcctcgcctgccttgcatctggggttagctatatgagaagttctcatcaagggaagacccctgatcctggactttcccttcttcaaacaccagcccctactcactgtggacaatacaccctagagcagtggtttccaacccctaggcccatggacctccaccgatcagcggcagtatcagattctcataggagcacgaaccctattgtgaactgctcatgtgagggatctgggttgcactctccttataagaatctaatgcctgatgatcagaggtggaacagttccattcctaaaccatccttctcccgtaccaccggtccgtgggaaaattgtcttccacaaaaccggtccctggtgcctaaaaggatcgacctgagagctgagcattttcactgtgtcttcaagccctgtacagatggcagggtgcatgtccagccatccctggcagccccagaagctgctaatagttctccagggccttctcatttgtcctgattcttttgcatggcctcccttcagatgtagtgcctccttcccccataccacacacatattgcgtggagctgaggacaccactgtccacccctggaaatggaaacataagctactgacccctttgcaagctgaccttgctgcctctttaagtgaagggtttaactgtgtccacagggtttggccagcagaccataggctggatttcaacttcattcacttcctttacacagtacacaacctatacaactgtacatggtcgacttggctttgagctcctaaatctggctcttggggtcctccctctggcttgcccctccagctgtatccaggccctttctgccatgccctggattctccaccaatagacagcttcatggggagccctgtgtatagcaggctacttcaaaccaccctgtctttgctcttactgtgt

SEQ ID NO: 465379 - DNA, 380 bp, Homo sapiens
  misc_feature (27)..(27): n is a, c, g, or t
cagtgggtgtgacctggaagaaatccncctattccaatctcatgagagaagagcccctagttctcaggactttaaccctcttcctgccagcacccccaggccagtgctgaggctgacaagttgtctaaaagggcaggaggacttactcctgacatgcatctgccacccaaaccatcacaatagccttccgccttctcagtgggagtacgagtgaccctgcagcagaaggcagcaggaggtggtgacaagaatacacgtctggccctaaaacctgggtcagtcacatcctggctgccattcaccagctatatgattttaggaaagtggattcacctctgagctgcagattcctcatcaataaaatgaagacaagaacaccc

SEQ ID NO: 465380 - DNA, 2850 bp, Homo sapiens
gaaaacgatcctgtcaccatcggatatgtttttaaatgaggtcttggttgaattctgtctatgtgaggaaattggaatggaatatggagcctgttactgtcgtttcatctcttcttcttctcttgcaggctacgcccaggaggaacagctgaaagaagaggaggaaataaaagaagaggaggaggaggaggacagcggttcagtagctcaactgcagggtggcaatgacacagggacggacgaggagctagaaacgggcccagagcaaaaaggctgcttcagctaccagaactctccaggaagtcatttgtccaatcaggatgccgagaacgagtctctgctgagtgacgccagtgatcaggtgtcggacatcaagagtgtctgcggcagagatgcctcagacaagaaagcacacactcacgtcaggcttccaaacgaagcacacaattgcatggataaaatgaccgctgtctacgccaacatcctgtcggattcctactggtcaggcctgggccttggcttcaagctgtccaatagtgagaggaggaactgtgacacccgaaacggcagcaacaagagtgattttgattggcaccaagacgctctgtccaaaagcctgcagcagaacttgccttctcggtccgtctcgaaacccagcctgttcagctcggtgcagttgtaccgacagagcagcaagatgtgcgggactgtgttcacaggggccagcagattccgatgccgacagtgcagcgcggcctatgacaccctagtcgagctgactgtgcacatgaatgaaacgggccactatcaagatgacaaccgcaaaaaggacaagctcagacccacgagctattcaaagcccaggaaaagggctttccaggatatggacaaagaggatgctcaaaaggttctgaaatgtatgttttgtggcgactccttcgattccctccaagatttgagcgtccacatgattaaaacaaaacattaccaaaaagtgcctttgaaggagccagtcccaaccatttcctcgaaaatggtcaccccggctaagaaacgcgtttttgatgtcaatcggccgtgttcccccgattcaaccacaggatcttttgcagattctttttcttctcagaagaacgccaacttgcagttgtcctccaacaaccgctatggctaccaaaatggagccagctacacctggcagtttgaggcctgcaagtcccagatcttaaagtgcatggagtgtgggagctcccatgacaccttgcagcagctcaccacccacatgatggtcacaggtcactttctcaaggtcaccagctctgcctccaagaaagggaagcagctggtattagacccgttagcagtggagaaaatgcagtcgttgtctgaggccccaaacagtgattctctggctcccaagccatccagtaactcagcatcagattgtacagcctctacaactgagttaaagaaagagagtaaaaaagaaaggccagaggaaaccagcaaggatgagaaagtcgtgaaaagcgaggactatgaagatcctctacaaaaacctttagaccctacaatcaaatatcaatacctaagggaggaagacttggaagatggctcaaagggtggaggggacattttgaaatctttggaaaatactgtcaccacagccatcaacaaagcccaaaacggggcccccagctggagtgcctaccccagcatccacgcagcctaccagctgtctgagggcaccaagccgcctttgcctatgggatcccaggtactgcagatccggcctaatctcaccaacaagctgaggcccattgcaccaaagtggaaagtgatgccactggtttctatgcccacacacctggccccttacactcaagtcaagaaagagtcagaagacaaagatgaagcggtgaaggagtgtgggaaagaaagtccccacgaagaggcctcatctttcagccacagtgagggcgattctttccgcaaaagtgaaacacctccagaagccaaaaagaccgagctgggtcccctgaaggaggaggagaagctgatgaaagagggcagcgagaaggagaaaccccagcccctggagcccacatctgctctgagcaatgggtgcgccctcgccaaccacgccccggccctgccatgcatcaacccactcagcgccctgcagtccgtcctgaacaatcacttgggcaaagccacggagcccttgcgctcaccttcctgctccagcccaagttcaagcacaatttccatgttccacaagtcgaatctcaatgtcatggacaagccggtcttgagtcctgcctccacaaggtcagccagcgtgtccaggcgctacctgtttgagaacagcgatcagcccattgacctgaccaagtccaaaagcaagaaagccgagtcctcgcaagcacaatcttgtatgtccccacctcagaagcacgctctgtctgacatcgccgacatggtcaaagttcctccccaaagccaccaccccaaagccagcctcctcctccagggtcccccccatgaagctggaaatggatgtcaggcgctttgaggatgtctccagtgaagtctcaactttgcataaaagaaaaggccggcagtccaactggaatcctcagcatcttctgattctacaagcccagtttgcctcgagcctcttccagacatcagagggcaaatacctgctgtctgatctggcccacaagagcgtatgcaaatctctaagtttacgggactctcaatgaccactatcagtcactggctggccaacgtcaagtaccagcttaggaaaacgggcgggacaaaatttctgaaaaacatggacaa

SEQ ID NO: 465381 - DNA, 1726 bp, Homo sapiens
ggaatgagcagaggtggcactaggagaaggccagccccagcggcttccccagcctccggaagtgggaccacagcctgcccgcaaggtgacgctgaccagggggggcctccagcagcccccacatctgccagcggggccccacgcacactcgcctgtccctccagggatcaaaagcatccaaggaattcacccggcgaagaaggccatcatgcacggacgaggcagaggagtggccggtcccatgggccgggggcgcctgatgccaaacaagcagaacctgcgggtggtggagtgcaagccccagccctgcgtggtgtctgtggaggggctgtcctcgtccaccacggatgcccagctgaagagcctgctgatgtcagtgggacccattcaggtagccgcctgggggtggcatctgtgccacgggtagttgtgtcccaagacaaaatcatttcttgatttaaaacacagtgccctttgtgttggctacttcatattaaaataatacttgggaagtaagacaaataacctgttgtgcatacttagtatcagaacatttgcctcaaacgtttattttgaaattttcagattcttagttataaattttaagaaataaataccccagctgaacagattatcctttgagatccttttaattgtcatagaaggttcacacttgcacacatacatacaaaattttttgttctatcaaatgacttgttttatttgtaataacattacattttaaagtatttagccttcttttccttgctttccagaaatagcttcatgtgctaaatagctgtgacttggtttagattttacaaatatgacagtatcttggattgaactgaaagaagcaagaaaccgtcatctgtgtttcttgcgggaaagcacattaaagcagcgggaagaaggggagtgggcgcacagcctccctggctgggccctagtgaccgacttctcccgagtcagctttgctcccaaggccaggggggctgccgtcccccagaggctgctgaggagagccctcggagatgcagtgcagaagcctctccctgacgctgctgatttgggggatcctggagcactgagcatgctggtgctgttgccggaagaacggagagaaccccggaggcacggctgcagcagctctaacctagggagctgccggccggcgcagaacccccaggagcacaggtctctccgggccgctgtcctgcgtaactgttctccagagcgccagccagccacgggcctgattccagaggagccgaactgacaggacacagcaggctggagttggtgttagattgcttcacattctcttgtcaccaccaagaactccaagtttttcgttttgttttgttttcaaagtgcttacaatgcatgtagacattgttctttgtggtctgactctatgatcgatcacagtgacttagattcaggaaagaacattaacgtcacaagttctaagtagttttcacagcaaagaatatttgataatggttgcacttatcttcagtgcaggttagaagagtcttctcaaccaagcttaactcgagttgtcttctcagccctcaaaaggctcttgtacaaaatgtagattaaaatttgggtgattgttgattgacctttgcataccctggaaagccagggtgtgagtggggtggttgggagtggtgccagttgaacagcagattctgcttcttgtcactgtttcaaaagc

SEQ ID NO: 465382 - DNA, 374 bp, Homo sapiens
aagctcaggcttgaaactctgaatgtatttcctttgttgtcaccaggccatcatgcacggacgaggcagaggagtggccggtcccatgggccgggggcgcctgatgccaaacaagcagaacctgcgggtggtggagtgcaagccccagccctgcgtggtgtctgtggaggggctgtcctcgtccaccacggatgcccagctgaagagcctgctgatgtcagtgggacccattcaggtagccgcctgggggtggcatctgtgccacgggtagttgtgtcccaagacaaaatcatttcttgatttaaaacacagtgccctttgtgttggctacttcatattaaaataatacttgggaagtaagacaaataacctgt

SEQ ID NO: 465383 - DNA, 2930 bp, Homo sapiens
cctcctctcatgccagagcaccatgtggcaccccgaccgtggttcctggcacaggaacgagcaggagggtaaggacggctaccgtggaaccaacttggaaagggatggaggcctgcacttcctgtgtagtgtaattaatcgctgccccttccctgcctgcagccgtccaggctcagggccggccctgattaaccatttcctgcccaacgttgtgaaggctacgaaagacctgtgtgagctttcgcatccttccttcctacaaatgctggcctcaccccaggggcggggcatcagatgcctcacagtcccagcccgagggggaggccgaaagtcacatgctgcccctgaggtctgggacggcctctccttccccctcagccgaactcagtgccctggggaacccatttttcctgactcagctccagtaccacctcctttgtgaagctgcctagtctttttctgttgctgtaactgcatacctgagactaggtaatttataaagctaaaaaaaaaaattatttctgacagttctggaggctgggaagtccaaggtctaggagcacatttggtgagggccttcttgctgatggggcctctctgcagagtcctgaggcgacccagggcatcacatggagaggggcctcatcagagagagccaatttggccttttgtaacagactggctcttgcgataactgacctactcctgtgatgaccattagtccattcatgagggcagagcgctcaccacccaatcagctctcaaaggccacacctcacagtgctgttatattggggcatgaatttcaacatgagttttgaggagacaaacattggaatggtagcagaagagatgatgcccccaggcagtcacccactctctcctcctttccctcacagcatttttgggtaaaattgccgccgccggacacctcaaccaagcctgaactgcagcttgaagagctggatgcaggtggagatttggggataacaccacacaaagcaatgatgtaggaggtgtatgaagacggagtagttcaggacactcctttttaaaaaattggatatgagttctggcttgcctgcgcgctaggtgtgaatttgaagtctgggtttgcatccccatctgtaaaatagcatgtttcccatctttcaaacgacgatatccacaggcttcttatgtgggtcaaatgagatcaggtaatttgcaaactatgaggtactatacacacgtgggtgcgattgttggggcttatcttttggcccaagctgtgtcctagagcttccttctgactagaggaacagacactgaagcacaaacggatggctgactcttccgagcgggtcatgtgcagtctccgtgtgagctgccagccatcaagttccgatccagcctgatagagtcatcttccaactagattcttcctggatgcctttgcatggctcgtgtccaactggaaagctggcagtggatgctcgctcttccctcttcactgagcccgcttttccatactggaagaagatgaaacacacatttcagaatgtaagtttttcctgccggacactatcccccctggagtgatggagaaaaatattagatgaagtcaggggataactgagtaacatactgatttataaactcatggaatcaaatgaaagtgttttttccactggtggggttatttattatgtcctggctggacagatcccagagaggaagaggctttggtccctgagcaatagaagtagcaggaaccaattttctccattgctctgctttaaaaaaaaaaaaaaatagaactcacctggctttgaaattcatcccactcatcacctttggagtgagtggggactaaggcacaggccccatcatgctgggatgttggcaaagaagagatgaggctgctgctactggtcattgctctgtggagcttttcatgtggcctgtttcttggtggaaataaactacctggaaagtatattatgaaaaactctgatgggattttgattgtaattttactgtttatattaatttgtggaaaagtgtcatctttgtgatataaagtttttccatccatgaacatggtgtatctttccgtttattcgatttcttttttgtgtgtttcaaagaaaccttttaagtttctgtgtaaaggctttgggcatcttatgttcaattaatttctagataaattataagctttttcatgctattgtaatggaatctttaaaaatacattttgttattgttgctgttatgtaggtaaatatttgtgtgtgtgtgtgtgtgtgtgtgtgtgtgtgtgttgatagaaattgactgaagccttatcagttctaatggtttgtttattgttttggattttctgtgtaaacaatgatattgaataatgcacatttcagcttttcctttttaatcctgatatattttgtttctttttgttttgttacactgtcagttagcatcttgaggtcatcctacttgtcctgacttcaagggaaattttttggcataaatgttttatttttaaataattttaaatttattttaagaacttgcaaagatagtacatagagttgccatagacccctcacccagtgtcctccattgttaacaattatagaacatggtacccatgtcaaaactaagaaaccaaaactgatgtatcaatattcactaaactctagagtttattcagatttcactagttcttccgctaatgttccttttctgccccaggatcccatctaggatatcccattctgtttagtcatcatatcttcttagtctcccctggtctatgacagtttttccttctttctttttcatgaccttgacacttttgaggcatattggttaggtattttatggaatgtttctcaattttgagtttgcctgatgtttttctcatgaatagaatgtgtttatgg

SEQ ID NO: 465384 - DNA, 2055 bp, Homo sapiens
  misc_feature (73)..(73): n is a, c, g, or t
ggtactgatatggtttggctctgtgtccccgtccaaatttcatcttggattgtaatccccatgtgtgcaggangtgacctggtgggaggtgattggttcatgggggtggttataacaccacacaaagcaatgatgtaggaggtgtatgaagacggagtagttcaggacactcctttttaaaaaattggatatgagttctggcttgcctgcgcgctaggtgtgaatttgaagtctgggtttgcatccccatctgtaaaatagcatgtttcccatctttcaaacgacgatatccacaggcttcttatgtgggtcaaatgagatcaggtaatttgcaaactatgaggtactatacacacgtgggtgcgattgttggggcttatcttttggcccaagctgtgtcctagagcttccttctgactagaggaacagacactgaagcacaaacggatggctgactcttccgagcgggtcatgtgcagtctccgtgtgagctgccagccatcaagttccgatccagcctgatagagtcatcttccaactagattcttcctggatgcctttgcatggctcgtgtccaactggaaagctggcagtggatgctcgctcttccctcttcactgagcccgcttttccatactggaagaagatgaaacacacatttcagaatgtaagtttttcctgccggacactatcccccctggagtgatggagaaaaatattagatgaagtcaggggataactgagtaacatactgatttataaactcatggaatcaaatgaaagtgttttttccactggtggggttatttattatgtcctggctggacagatcccagagaggaagaggctttggtccctgagcaatagaagtagcaggaaccaattttctccattgctctgctttaaaaaaaaaaaaaaatagaactcacctggctttgaaattcatcccactcatcacctttggagtgagtggggactaaggcacaggccccatcatgctgggatgttggcaaagaagagatgaggctgctgctactggtcattgctctgtggagcttttcatgtggcctgtttcttggtggaaataaactacctggaaagtatattatgaaaaactctgatgggattttgattgtaattttactgtttatattaatttgtggaaaagtgtcatctttgtgatataaagtttttccatccatgaacatggtgtatctttccgtttattcgatttcttttttgtgtgtttcaaagaaaccttttaagtttctgtgtaaaggctttgggcatcttatgttcaattaatttctagataaattataagctttttcatgctattgtaatggaatctttaaaaatacattttgttattgttgctgttatgtaggtaaatatttgtgtgtgtgtgtgtgtgtgtgtgtgtgtgtgtgttgatagaaattgactgaagccttatcagttctaatggtttgtttattgttttggattttctgtgtaaacaatgatattgaataatgcacatttcagcttttcctttttaatcctgatatattttgtttctttttgttttgttacactgtcagttagcatcttgaggtcatcctacttgtcctgacttcaagggaaattttttggcataaatgttttatttttaaataattttaaatttattttaagaacttgcaaagatagtacatagagttgccatagacccctcacccagtgtcctccattgttaacaattatagaacatggtacccatgtcaaaactaagaaaccaaaactgatgtatcaatattcactaaactctagagtttattcagatttcactagttcttccgctaatgttccttttctgccccaggatcccatctaggatatcccattctgtttagtcatcatatcttcttagtctcccctggtctatgacagtttttccttctttctttttcatgaccttgacacttttgaggcatattggttaggtattttatggaatgtttctcaattttgagtttgcctgatgtttttctcatgaatagaatgtgtttatgg

SEQ ID NO: 465385 - DNA, 2736 bp, Homo sapiens
  misc_feature (6)..(8): n is a, c, g, or t
  misc_feature (10)..(10): n is a, c, g, or t
  misc_feature (17)..(17): n is a, c, g, or t
ggccannnantgtccangtgggtgcccatgagagcgctggggtcagccgagtttagggaaaaggtagatgcacagaaggagccagctccagcaccgcccaatgctgagggtgccggccctggtccctgcacatccgcgtccaggcagtgcattcctgggccaggagagggtctgcggagctgatgcaggcgatgggcagtggagtggtgccgcagcacggtgcagggagcaccaaggcttagctaccagccagcagggacatacaaatgccaatgcagtgctgtttagccaagtgaaagtgactccagagacacacatgctacagcagcagcagcaggcccagcagcagcagcagcagcacccggttttacaccttcagccccagcagataatgcagctccagcagcagcagcagcagcagatctctcagcaaccttacccccagcagccgccgcatccattttcacagcaacagcagcagcagcagcaagcccatccgcatcagttttcacagcaacagctacagtttccacagcaacagttgcatcctccacagcagctgcatcgccctcagcagcagctccagccctttcagcagcagcatgccctgcagcagcagttccatcagctgcagcagcaccagctccagcagcagcagctcgcccagctccagcagcagcacagcctgctccagcagcagcagcaacagcagattcagcagcagcagctccagcgcatgcaccagcagcagcagcagcagcagatgcaaagtcagacagcgccacacttgagtcagacgtcacaggcgctgcagcatcaggttccacctcagcagcccccgcagcagcagcagcaacagcagccaccaccatcgcctcagcagcatcagctttttggacatgatccagcagtggagagttagtaatggagattatttttcctctctcctaaaagtcttgtacccacataaatgctttgagagtgtttgagtgtggggaggagcaagcaaacgaaaacactggtagattgaggagagacatgtaccgctgacccctgaacagtgtggggcctaggggtgctcacccccatgcaatcagagatctgtacatcacttttgattcccgaaaacccaaattactaatagcctggtgttaaccagaagccttactgataaacaggcaattaacgcatattttgtatatgtattaccatattcttacaataaattctggtcttgaaagttttaggaatgatattaccaaatgtgttccataatgccaaagaaatagtgaaaaaatatgtatcaactaagaagtagaagaaatagtacttggttttggttttttgcttattttgtgtttaccttattttctctttttttcttagattatttctgtgactggatttgttgatagtgacagagatgacctaaaattaatggcttatttggcaggtgccaaatatacgggttatctatgccgcagcaacacagtcctcatctgtaaagagtaagcaaattttcgaaactgtttttaatcataaatttacacacaatatagtggctatttcaataattgtgccttttttagtatgtcatagttttgtggtagaaatttgtggaaatcaaagtctgttaaagtatgacaatgatatagtaatgttagtagaaatacctagaaaacatttgaattaatgaaattagatgaactaatgaaatttgaatgaacaaaacaggaatagggtagaagtaagactccttagtggttttgtaattctgtgtgagccttgaggtgtatatttcattaccattcagggtcaccctcaactttgctaggatatgcctcccacttctattatgagaaattttttattgccttttgttggaaataaatgtacatttggacagttgacatctctaacatttaataaatatgttttctcctcaaaaaataaaaagaccaactggtttaaagtatgaaaaagccaaagagtggaggataccctgtgtcaacgcccagtggcttggcgacattcttctgggaaactttgaggcactgaggcagattcagtatagtcgctacacggcattcagtctgcaggatccatttgcccctacccagcatttagttttaaatcttttaggccagttaatcttttgtccaaattgctccctaccctacagaacattccctgctttcctagaattgacgtctgtcctctttgtcactattgagctttgactgacttgctgttacatcttggatgccatcatggctcctgtgataaggcaagaagaacacaaactgaactgttgacttttgtaataaaatcctaattatgtgatttttttgaggctgtcatcaaattaccacaaatacattttaaaataaatttttattggactgtctcagaaaataataacctgaaaaaaagacctaaaaaattcatgtaaaaaacaaaaaggtttaatttaaaacgtgtgcttgagcagagccacgtttttataatttgtggttgaagagggctagaatgtgaaagacactggaagctctagcgacactcgtcttggctgacttgtattgatggtgaacgtgcaaacaaggaatggcctgagtcacacaaggttatcttaaaaacttgatagaaaaaaatgaagtgatagagctagcaaaatcagtgatgtttagaagcaactttgatatttgctttcttctgaaagccaattaaaaaaattaa

SEQ ID NO: 465386 - DNA, 1141 bp, Homo sapiens
gtaccaaagaactaagtaaatcaataaagataatcggttctttaaccttcttaaggagtcaacaggaattagaaattatttgcagtttcagacagaatagtattttgtggtatcctcaggagcaatcttgttagataattaaatcttaagcatcaatatcatttcctgctctgagttcaaataatatggagaaaataaagaaaagggatataagccaggcagcatgctatgccagagctgttgctgggcagataagtgtggtgaaatataatgctgatttaaaattgtatagaaattgtgaaaaatatttgtaatattcttgcttattcacaaaacactttgttttagggacttaagttctggttactttaaatcatcttcaggcatacttaacatgtgaaaatgcttacattccaaatttacatagctggattcctcttccacttcagattgagtgctagtaggagaatagtaccttcataatgtcataaaatttgaaattttgtcaaaaatctcagggcagaatctatgagaattatgtactctaaaaattaaagcattttaagaacataatacatatattttcatttaattttaggcaaaatatttttacatcacacctggaatctgcccaagtctttccactatgaaggcaatcgtagagtgtgcaggaggaaaggtgttatccaagcagccatctttccggaagctcatggagcacaagcagaactcggtgggtagagtggagtccgccagcgagtccgtcattgccctgtatcacattcagcgttcggtcactgagaaactcattttcttttccttagagtttgtcggaaataattttaatatcctgtgaaaatgaccttcatttatgccgagaatattttgccagaggcataggtacgtttccccgcttacctgtgtgagtatgtgtgcacgcacagcagtggatctctaactaaagtgtctgtttccaccctgttcagatgttcacaatgcagagttcgttctgactggagtgctcactcaaacgctggactatgaatccttgggggccttttttcatatccatagcttgatgaattttgcccaaagtggacggtttagaattgcagaggtcactacctgctcctgcaggtat

SEQ ID NO: 465387 - DNA, 3303 bp, Homo sapiens
tgccagctaaccctcaataagaaatgcacgcatttgattgttccagagccaaagggggagaaatacgaatgtgctttaaagcgagcaagtattaaaattgtgactcctgactgggttctggattgcgtatcagagaaaaccaaaaaggacgaagcattttatcatcctcgtctgattatttatgaagaggaagaagaggaagaggaagaggaggaggaagtagaaaatgaggaacaagattctcagaatgagggtagtacagatgagaagtcaagccctgccagctctcaagaagggtctccttcaggtgaccagcagttttcacctaaatccaacactgaaaaatctaaaggggaattaatgtttgatgattcttcagattcatcaccggaaaaacaggagagaaatttaaactggaccccggccgaagtcccacagttagctgcagcaaaacgcaggctgcctcagggaaaggagcctgggttgattaacttgtgtgccaatgtcccacccgtcccaggtaacattttgccccctgaggtccggggtaatttaatggctgctggacaaaacctccaaagttctgaaagatcagaaatgatagctacctggagtccagctgtacggacactgaggaatattactaataatgctgacattcagcagatgaaccggccatcaaatgtagcacatatcttacagactctttcagcacctacgaaaaatttagaacagcaggtgaatcacagccagcagggacatacaaatgccaatgcagtgctgtttagccaagtgaaagtgactccagagacacacatgctacagcagcagcagcaggcccagcagcagcagcagcagcacccggttttacaccttcagccccagcagataatgcagctccagcagcagcagcagcagcagatctctcagcaaccttacccccagcagccgccgcatccattttcacagcaacagcagcagcagcagcaagcccatccgcatcagttttcacagcaacagctacagtttccacagcaacagttgcatcctccacagcagctgcatcgccctcagcagcagctccagccctttcagcagcagcatgccctgcagcagcagttccatcagctgcagcagcaccagctccagcagcagcagctcgcccagctccagcagcagcacagcctgctccagcagcagcagcaacagcagattcagcagcagcagctccagcgcatgcaccagcagcagcagcagcagcagatgcaaagtcagacagcgccacacttgagtcagacgtcacaggcgctgcagcatcaggttccacctcagcagcccccgcagcagcagcagcaacagcagccaccaccatcgcctcagcagcatcagctttttggacatgatccagcagtggagattccagaagaaggcttcttattgggatgtgtgtttgcaattgcggattatccagagcagatgtctgataagcaactgctggccacctggaaaaggataatccaggcacatggcggcactgttgaccccaccttcacgagtcgatgcacgcaccttctctgtgagagtcaagtcagcagcgcgtatgcacaggcaataagagaaagaaagagatgtgttactgcacactggttaaacacagtcttaaagaagaagaaaatggtaccgccgcaccgagcccttcacttcccagtggccttcccaccaggaggaaagccatgttcacagcatattatttctgtgactggatttgttgatagtgacagagatgacctaaaattaatggcttatttggcaggtgccaaatatacgggttatctatgccgcagcaacacagtcctcatctgtaaagaaccaactggtttaaagtatgaaaaagccaaagagtggaggataccctgtgtcaacgcccagtggcttggcgacattcttctgggaaactttgaggcactgaggcagattcagtatagtcgctacacggcattcagtctgcaggatccatttgcccctacccagcatttagttttaaatcttttagatgcttggagagttcccttaaaagtgtctgcagagttgttgatgagtataagactacctcccaaactgaaacagaatgaagtagctaatgtccagccttcttccaaaagagccagaattgaagacgtaccacctcccactaaaaagctaactccagaattgaccccttttgtgcttttcactggattcgagcctgtccaggttcaacagtatattaagaagctctacattcttggtggagaggttgcggagtctgcacagaagtgcacacacctcattgccagcaaagtgactcgcaccgtgaagttcctgacggcgatttctgtcgtgaagcacatagtgacgccagagtggctggaagaatgcttcaggtgtcagaagttcattgatgagcagaactacattctccgagatgctgaggcagaagtacttttctctttcagcttggaagaatccttaaaacgggcacacgtttctccactctttaaggcaaaatatttttacatcacacctggaatctgcccaagtctttccactatgaaggcaatcgtagagtgtgcaggaggaaaggtgttatccaagcagccatctttccggaagctcatggagcacaagcagaactcgagtttgtcggaaataattttaatatcctgtgaaaatgaccttcatttatgccgagaatattttgccagaggcatagatgttcacaatgcagagttcgttctgactggagtgctcactcaaacgctggactatgaatcatataagtttaactgatggcgtctaggctgccgtgcatgtcgactcctgcggtgcggggctggctgtctggctggcgaggagctgctgcgcttccttcacatgctcttgttttccagctgctttcctgggggatcagactgtgaagcaggaagacagatataataaatatactgcatctttttaagatgtgcaattttattctgaggaaacataaattatgttttgtattatatgactttaagagcccacattaggttttatgattcatttgccaggtttttaaatgttttcacaaaactgttacgggacttcaactagaaataaaatggtgtaaataaagaccttgctatctctaaattatggatgttaaagatttgaaatgttttgtactttgattatttttatttcttatactctgttttcttttatattgatatcttgcccacattttaaataaatgtacttttgaacttaaaaattgagtaatcc

SEQ ID NO: 465388 - DNA, 3260 bp, Homo sapiens
tgccagctaaccctcaataagaaatgcacgcatttgattgttccagagccaaagggggagaaatacgaatgtgctttaaagcgagcaagtattaaaattgtgactcctgactgggttctggattgcgtatcagagaaaaccaaaaaggacgaagcattttatcatcctcgtctgattatttatgaagaggaagaagaggaagaggaagaggaggaggaagtagaaaatgaggaacaagattctcagaataagggtctccttcaggtgaccagcagttttcacctaaatccaacactgaaaaatctaaaggggaattaatgtttgatgattcttcagattcatcaccggaaaaacaggagagaaatttaaactggaccccggccgaagtcccacagttagctgcagcaaaacgcaggctgcctcagggaaaggagcctgggttgattaacttgtgtgccaatgtcccacccgtcccaggtaacattttgccccctgaggtccggggtaatttaatggctgctggacaaaacctccaaagttctgaaagatcagaaatgatagctacctggagtccagctgtacggacactgaggaatattactaataatgctgacattcagcagatgaaccggccatcaaatgtagcacatatcttacagactctttcagcacctacgaaaaatttagaacagcaggtgaatcacagccagcagggacatacaaatgccaatgcagtgctgtttagccaagtgaaagtgactccagagacacacatgctacagcagcagcagcaggcccagcagcagcagcagcagcacccggttttacaccttcagccccagcagataatgcagctccagcagcagcagcagcagcagatctctcagcaaccttacccccagcagccgccgcatccattttcacagcaacagcagcagcagcagcaagcccatccgcatcagttttcacagcaacagctacagtttccacagcaacagttgcatcctccacagcagctgcatcgccctcagcagcagctccagccctttcagcagcagcatgccctgcagcagcagttccatcagctgcagcagcaccagctccagcagcagcagctcgcccagctccagcagcagcacagcctgctccagcagcagcagcaacagcagattcagcagcagcagctccagcgcatgcaccagcagcagcagcagcagcagatgcaaagtcagacagcgccacacttgagtcagacgtcacaggcgctgcagcatcaggttccacctcagcagcccccgcagcagcagcagcaacagcagccaccaccatcgcctcagcagcatcagctttttggacatgatccagcagtggagattccagaagaaggcttcttattgggatgtgtgtttgcaattgcggattatccagagcagatgtctgataagcaactgctggccacctggaaaaggataatccaggcacatggcggcactgttgaccccaccttcacgagtcgatgcacgcaccttctctgtgagagtcaagtcagcagcgcgtatgcacaggcaataagagaaagaaagagatgtgttactgcacactggttaaacacagtcttaaagaagaagaaaatggtaccgccgcaccgagcccttcacttcccagtggccttcccaccaggaggaaagccatgttcacagcatattatttctgtgactggatttgttgatagtgacagagatgacctaaaattaatggcttatttggcaggtgccaaatatacgggttatctatgccgcagcaacacagtcctcatctgtaaagaaccaactggtttaaagtatgaaaaagccaaagagtggaggataccctgtgtcaacgcccagtggcttggcgacattcttctgggaaactttgaggcactgaggcagattcagtatagtcgctacacggcattcagtctgcaggatccatttgcccctacccagcatttagttttaaatcttttagatgcttggagagttcccttaaaagtgtctgcagagttgttgatgagtataagactacctcccaaactgaaacagaatgaagtagctaatgtccagccttcttccaaaagagccagaattgaagacgtaccacctcccactaaaaagctaactccagaattgaccccttttgtgcttttcactggattcgagcctgtccaggttcaacagtatattaagaagctctacattcttggtggagaggttgcggagtctgcacagaagtgcacacacctcattgccagcaaagtgactcgcaccgtgaagttcctgacggcgatttctgtcgtgaagcacatagtgacgccagagtggctggaagaatgcttcaggtgtcagaagttcattgatgagcagaactacattctccgagatgctgaggcagaagtacttttctctttcagcttggaagaatccttaaaacgggcacacgtttctccactctttaaggcaaaatatttttacatcacacctggaatctgcccaagtctttccactatgaaggcaatcgtagagtgtgcaggaggaaaggtgttatccaagcagccatctttccggaagctcatggagcacaagcagaactcgagtttgtcggaaataattttaatatcctgtgaaaatgaccttcatttatgccgagaatattttgccagaggcatagatgttcacaatgcagagttcgttctgactggagtgctcactcaaacgctggactatgaatcatataagtttaactgatggcgtctaggctgccgtgcatgtcgactcctgcggtgcggggctggctgtctggctggcgaggagctgctgcgcttccttcacatgctcttgttttccagctgctttcctgggggatcagactgtgaagcaggaagacagatataataaatatactgcatctttttaagatgtgcaattttattctgaggaaacataaattatgttttgtattatatgactttaagagcccacattaggttttatgattcatttgccaggtttttaaatgttttcacaaaactgttacgggacttcaactagaaataaaatggtgtaaataaagaccttgctatctctaaattatggatgttaaagatttgaaatgttttgtactttgattatttttatttcttatactctgttttcttttatattgatatcttgcccacattttaaataaatgtacttttgaacttaaaaattgagtaatcc

SEQ ID NO: 465389 - DNA, 3892 bp, Homo sapiens
tgccagctaaccctcaataagaaatgcacgcatttgattgttccagagccaaagggggagaaatacgaatgtgctttaaagcgagcaagtattaaaattgtgactcctgactgggttctggattgcgtatcagagaaaaccaaaaaggacgaagcattttatcatcctcgtctgattatttatgaagaggaagaagaggaagaggaagaggaggaggaagtagaaaatgaggaacaagattctcagaatgagggtagtacagatgagaagtcaagccctgccagctctcaagaagggtctccttcaggtgaccagcagttttcacctaaatccaacactgaaaaatctaaaggggaattaatgtttgatgattcttcagattcatcaccggaaaaacaggagagaaatttaaactggaccccggccgaagtcccacagttagctgcagcaaaacgcaggctgcctcagggaaaggagcctgggttgattaacttgtgtgccaatgtcccacccgtcccaggtaacattttgccccctgaggtccggggtaatttaatggctgctggacaaaacctccaaagttctgaaagatcagaaatgatagctacctggagtccagctgtacggacactgaggaatattactaataatgctgacattcagcagatgaaccggccatcaaatgtagcacatatcttacagactctttcagcacctacgaaaaatttagaacagcaggtgaatcacagccagcagggacatacaaatgccaatgcagtgctgtttagccaagtgaaagtgactccagagacacacatgctacagcagcagcagcaggcccagcagcagcagcagcagcacccggttttacaccttcagccccagcagataatgcagctccagcagcagcagcagcagcagatctctcagcaaccttacccccagcagccgccgcatccattttcacagcaacagcagcagcagcagcaagcccatccgcatcagttttcacagcaacagctacagtttccacagcaacagttgcatcctccacagcagctgcatcgccctcagcagcagctccagccctttcagcagcagcatgccctgcagcagcagttccatcagctgcagcagcaccagctccagcagcagcagctcgcccagctccagcagcagcacagcctgctccagcagcagcagcaacagcagattcagcagcagcagctccagcgcatgcaccagcagcagcagcagcagcagatgcaaagtcagacagcgccacacttgagtcagacgtcacaggcgctgcagcatcaggttccacctcagcagcccccgcagcagcagcagcaacagcagccaccaccatcgcctcagcagcatcagctttttggacatgatccagcagtggagagttagtaatggagattatttttcctctctcctaaaagtcttgtacccacataaatgctttgagagtgtttgagtgtggggaggagcaagcaaacgaaaacactggtagattgaggagagacatgtaccgctgacccctgaacagtgtggggcctaggggtgctcacccccatgcaatcagagatctgtacatcacttttgattcccgaaaacccaaattactaatagcctggtgttaaccagaagccttactgataaacaggcaattaacgcatattttgtatatgtattaccatattcttacaataaattctggtcttgaaagttttaggaatgatattaccaaatgtgttccataatgccaaagaaatagtgaaaaaatatgtatcaactaagaagtagaagaaatagtacttggttttggttttttgcttattttgtgtttaccttattttctctttttttcttagattatttctgtgactggatttgttgatagtgacagagatgacctaaaattaatggcttatttggcaggtgccaaatatacgggttatctatgccgcagcaacacagtcctcatctgtaaagagtaagcaaattttcgaaactgtttttaatcataaatttacacacaatatagtggctatttcaataattgtgccttttttagtatgtcatagttttgtggtagaaatttgtggaaatcaaagtctgttaaagtatgacaatgatatagtaatgttagtagaaatacctagaaaacatttgaattaatgaaattagatgaactaatgaaatttgaatgaacaaaacaggaatagggtagaagtaagactccttagtggttttgtaattctgtgtgagccttgaggtgtatatttcattaccattcagggtcaccctcaactttgctaggatatgcctcccacttctattatgagaaattttttattgccttttgttggaaataaatgtacatttggacagttgacatctctaacatttaataaatatgttttctcctcaaaaaataaaaagaccaactggtttaaagtatgaaaaagccaaagagtggaggataccctgtgtcaacgcccagtggcttggcgacattcttctgggaaactttgaggcactgaggcagattcagtatagtcgctacacggcattcagtctgcaggatccatttgcccctacccagcatttagttttaaatcttttagatgcttggagagttcccttaaaagtgtctgcagagttgttgatgagtataagactacctcccaaactgaaacagaatgaagtagctaatgtccagccttcttccaaaagagccagaattgaagacgtaccacctcccactaaaaagctaactccagaattgaccccttttgtgcttttcactggattcgagcctgtccaggttcaacagtatattaagaagctctacattcttggtggagaggttgcggagtctgcacagaagtgcacacacctcattgccagcaaagtgactcgcaccgtgaagttcctgacggcgatttctgtcgtgaagcacatagtgacgccagagtggctggaagaatgcttcaggtgtcagaagttcattgatgagcagaactacattctccgagatgctgaggcagaagtacttttctctttcagcttggaagaatccttaaaacgggcacacgtttctccactctttaaggcaaaatatttttacatcacacctggaatctgcccaagtctttccactatgaaggcaatcgtagagtgtgcaggaggaaaggtgttatccaagcagccatctttccggaagctcatggagcacaagcagaactcgagtttgtcggaaataattttaatatcctgtgaaaatgaccttcatttatgccgagaatattttgccagaggcatagatgttcacaatgcagagttcgttctgactggagtgctcactcaaacgctggactatgaatcatataagtttaactgatggcgtctaggctgccgtgcatgtcgactcctgcggtgcggggctggctgtctggctggcgaggagctgctgcgcttccttcacatgctcttgttttccagctgctttcctgggggatcagactgtgaagcaggaagacagatataataaatatactgcatctttttaagatgtgcaattttattctgaggaaacataaattatgttttgtattatatgactttaagagcccacattaggttttatgattcatttgccaggtttttaaatgttttcacaaaactgttacgggacttcaactagaaataaaatggtgtaaataaagaccttgctatctctaaattatggatgttaaagatttgaaatgttttgtactttgattatttttatttcttatactctgttttcttttatattgatatcttgcccacattttaaataaatgtacttttgaacttaaaaattgagtaatcc

SEQ ID NO: 465390 - DNA, 3150 bp, Homo sapiens
tgccagctaaccctcaataagaaatgcacgcatttgattgttccagagccaaagggggagaaatacgaatgtgctttaaagcgagcaagtattaaaattgtgactcctgactgggttctggattgcgtatcagagaaaaccaaaaaggacgaagcattttatcatcctcgtctgattatttatgaagaggaagaagaggaagaggaagaggaggaggaagtagaaaatgaggaacaagattctcagaatgagggtagtacagatgagaagtcaagccctgccagctctcaagaagggtctccttcaggtgaccagcagttttcacctaaatccaacactgaaaaatctaaaggggaattaatgtttgatgattcttcagattcatcaccggaaaaacaggagagaaatttaaactggaccccggccgaagtcccacagttagctgcagcaaaacgcaggctgcctcagggaaaggagcctgggttgattaacttgtgtgccaatgtcccacccgtcccaggtaacattttgccccctgaggtccggggtaatttaatggctgctggacaaaacctccaaagttctgaaagatcagaaatgatagctacctggagtccagctgtacggacactgaggaatattactaataatgctgacattcagcagatgaaccggccatcaaatgtagcacatatcttacagactctttcagcacctacgaaaaatttagaacagcaggtgaatcacagccagcagggacatacaaatgccaatgcagtgctgtttagccaagtgaaagtgactccagagacacacatgctacagcagcagcagcaggcccagcagcagcagcagcagcacccggttttacaccttcagccccagcagataatgcagctccagcagcagcagcagcagcagatctctcagcaaccttacccccagcagccgccgcatccattttcacagcaacagcagcagcagcagcaagcccatccgcatcagttttcacagcaacagctacagtttccacagcaacagttgcatcctccacagcagctgcatcgccctcagcagcagctccagccctttcagcagcagcatgccctgcagcagcagttccatcagctgcagcagcaccagctccagcagcagcagctcgcccagctccagcagcagcacagcctgctccagcagcagcagcaacagcagattcagcagcagcagctccagcgcatgcaccagcagcagcagcagcagcagatgcaaagtcagacagcgccacacttgagtcagacgtcacaggcgctgcagcatcaggttccacctcagcagcccccgcagcagcagcagcaacagcagccaccaccatcgcctcagcagcatcagctttttggacatgatccagcagtggagattccagaagaaggcttcttattgggatgtgtgtttgcaattgcggattatccagagcagatgtctgataagcaactgctggccacctggaaaaggataatccaggcacatggcggcactgttgaccccaccttcacgagtcgatgcacgcaccttctctgtgagagtcaagtcagcagcgcgtatgcacaggcaataagagaaagaaagagatgtgttactgcacactggttaaacacagtcttaaagaagaagaaaatggtaccgccgcaccgagcccttcacttcccagtggccttcccaccaggaggaaagccatgttcacagcatattatttctgtgactggatttgttgatagtgacagagatgacctaaaattaatggcttatttggcaggtgccaaatatacgggttatctatgccgcagcaacacagtcctcatctgtaaagaaccaactggtttaaagtatgaaaaagccaaagagtggaggataccctgtgtcaacgcccagtggcttggcgacattcttctgggaaactttgaggcactgaggcagattcagtatagtcgctacacggcattcagtctgcaggatccatttgcccctacccagcatttagttttaaatcttttagatgcttggagagttcccttaaaagtgtctgcagagttgttgatgagtataagactacctcccaaactgaaacagaatgaagtagctaatgtccagccttcttccaaaagagccagaattgaagacgtaccacctcccactaaaaagctaactccagaattgaccccttttgtgcttttcactggattcgagcctgtccaggttcaacagtatattaagaagctctacattcttggtggagaggttgcggagtctgcacagaagtgcacacacctcattgccagcaaagtgactcgcaccgtgaagttcctgacggcgatttctgtcgtgaagcacatagtgacgccagagtggctggaagaatgcttcaggtgtcagaagttcattgatgagcagaactacattctccgagatgctgaggcagaagtacttttctctttcagcttggaagaatccttaaaacgggcacacgtttctccactctttaaggcaaaatatttttacatcacacctggaatctgcccaagtctttccactatgaaggcaatcgtagagtgtgcaggaggaaaggtgttatccaagcagccatctttccggaagctcatggagcacaagcagaactcgagtttgtcggaaataattttaatatcctgtgaaaatgaccttcatttatgccgagaatattttgccagaggcatagatgttcacaatgcagagttcgttctgactggagtgctcactcaaacgctggactatgaatcatataagtttaactgatggcgtctaggctgccgtgcatgtcgactcctgcggtgcggggctggctgtctggctggcgaggagctgctgcgcttccttcacatgctcttgttttccagctgctttcctgggggatcagactgtgaagcaggaagacagatataataaatatactgcatctttttaagatgtgcaattttattctgaggaaacataaattatgttttgtattatatgactttaagagcccacattaggttttatgattcatttgccaggtttttaaatgttttcacaaaactgttacgggacttcaactagaaataaaatggtgtaaat

SEQ ID NO: 465391 - DNA, 1360 bp, Homo sapiens
gtaccaaagaactaagtaaatcaataaagataatcggttctttaaccttcttaaggagtcaacaggaattagaaattatttgcagtttcagacagaatagtattttgtggtatcctcaggagcaatcttgttagataattaaatcttaagcatcaatatcatttcctgctctgagttcaaataatatggagaaaataaagaaaagggatataagccaggcagcatgctatgccagagctgttgctgggcagataagtgtggtgaaatataatgctgatttaaaattgtatagaaattgtgaaaaatatttgtaatattcttgcttattcacaaaacactttgttttagggacttaagttctggttactttaaatcatcttcaggcatacttaacatgtgaaaatgcttacattccaaatttacatagctggattcctcttccacttcagattgagtgctagtaggagaatagtaccttcataatgtcataaaatttgaaattttgtcaaaaatctcagggcagaatctatgagaattatgtactctaaaaattaaagcattttaagaacataatacatatattttcatttaattttaggcaaaatatttttacatcacacctggaatctgcccaagtctttccactatgaaggcaatcgtagagtgtgcaggaggaaaggtgttatccaagcagccatctttccggaagctcatggagcacaagcagaactcgagtttgtcggaaataattttaatatcctgtgaaaatgaccttcatttatgccgagaatattttgccagaggcatagatgttcacaatgcagagttcgttctgactggagtgctcactcaaacgctggactatgaatcatataagtttaactgatggcgtctaggctgccgtgcatgtcgactcctgcggtgcggggctggctgtctggctggcgaggagctgctgcgcttccttcacatgctcttgttttccagctgctttcctgggggatcagactgtgaagcaggaagacagatataataaatatactgcatctttttaagatgtgcaattttattctgaggaaacataaattatgttttgtattatatgactttaagagcccacattaggttttatgattcatttgccaggtttttaaatgttttcacaaaactgttacgggacttcaactagaaataaaatggtgtaaataaagaccttgctatctctaaattatggatgttaaagatttgaaatgttttgtactttgattatttttatttcttatactctgttttcttttatattgatatcttgcccacattttaaataaatgtacttttgaacttaaaaattgagtaatcc

SEQ ID NO: 465392 - DNA, 1451 bp, Homo sapiens
gtaccaaagaactaagtaaatcaataaagataatcggttctttaaccttcttaaggagtcaacaggaattagaaattatttgcagtttcagacagaatagtattttgtggtatcctcaggagcaatcttgttagataattaaatcttaagcatcaatatcatttcctgctctgagttcaaataatatggagaaaataaagaaaagggatataagccaggcagcatgctatgccagagctgttgctgggcagataagtgtggtgaaatataatgctgatttaaaattgtatagaaattgtgaaaaatatttgtaatattcttgcttattcacaaaacactttgttttagggacttaagttctggttactttaaatcatcttcaggcatacttaacatgtgaaaatgcttacattccaaatttacatagctggattcctcttccacttcagattgagtgctagtaggagaatagtaccttcataatgtcataaaatttgaaattttgtcaaaaatctcagggcagaatctatgagaattatgtactctaaaaattaaagcattttaagaacataatacatatattttcatttaattttaggcaaaatatttttacatcacacctggaatctgcccaagtctttccactatgaaggcaatcgtagagtgtgcaggaggaaaggtgttatccaagcagccatctttccggaagctcatggagcacaagcagaactcggtgggtagagtggagtccgccagcgagtccgtcattgccctgtatcacattcagcgttcggtcactgagaaactcattttcttttccttagagtttgtcggaaataattttaatatcctgtgaaaatgaccttcatttatgccgagaatattttgccagaggcatagatgttcacaatgcagagttcgttctgactggagtgctcactcaaacgctggactatgaatcatataagtttaactgatggcgtctaggctgccgtgcatgtcgactcctgcggtgcggggctggctgtctggctggcgaggagctgctgcgcttccttcacatgctcttgttttccagctgctttcctgggggatcagactgtgaagcaggaagacagatataataaatatactgcatctttttaagatgtgcaattttattctgaggaaacataaattatgttttgtattatatgactttaagagcccacattaggttttatgattcatttgccaggtttttaaatgttttcacaaaactgttacgggacttcaactagaaataaaatggtgtaaataaagaccttgctatctctaaattatggatgttaaagatttgaaatgttttgtactttgattatttttatttcttatactctgttttcttttatattgatatcttgcccacattttaaataaatgtacttttgaacttaaaaattgagtaatcc

SEQ ID NO: 465393 - DNA, 1537 bp, Homo sapiens
gtaccaaagaactaagtaaatcaataaagataatcggttctttaaccttcttaaggagtcaacaggaattagaaattatttgcagtttcagacagaatagtattttgtggtatcctcaggagcaatcttgttagataattaaatcttaagcatcaatatcatttcctgctctgagttcaaataatatggagaaaataaagaaaagggatataagccaggcagcatgctatgccagagctgttgctgggcagataagtgtggtgaaatataatgctgatttaaaattgtatagaaattgtgaaaaatatttgtaatattcttgcttattcacaaaacactttgttttagggacttaagttctggttactttaaatcatcttcaggcatacttaacatgtgaaaatgcttacattccaaatttacatagctggattcctcttccacttcagattgagtgctagtaggagaatagtaccttcataatgtcataaaatttgaaattttgtcaaaaatctcagggcagaatctatgagaattatgtactctaaaaattaaagcattttaagaacataatacatatattttcatttaattttaggcaaaatatttttacatcacacctggaatctgcccaagtctttccactatgaaggcaatcgtagagtgtgcaggaggaaaggtgttatccaagcagccatctttccggaagctcatggagcacaagcagaactcggtgggtagagtggagtccgccagcgagtccgtcattgccctgtatcacattcagcgttcggtcactgagaaactcattttcttttccttagagtttgtcggaaataattttaatatcctgtgaaaatgaccttcatttatgccgagaatattttgccagaggcataggtacgtttccccgcttacctgtgtgagtatgtgtgcacgcacagcagtggatctctaactaaagtgtctgtttccaccctgttcagatgttcacaatgcagagttcgttctgactggagtgctcactcaaacgctggactatgaatcatataagtttaactgatggcgtctaggctgccgtgcatgtcgactcctgcggtgcggggctggctgtctggctggcgaggagctgctgcgcttccttcacatgctcttgttttccagctgctttcctgggggatcagactgtgaagcaggaagacagatataataaatatactgcatctttttaagatgtgcaattttattctgaggaaacataaattatgttttgtattatatgactttaagagcccacattaggttttatgattcatttgccaggtttttaaatgttttcacaaaactgttacgggacttcaactagaaataaaatggtgtaaataaagaccttgctatctctaaattatggatgttaaagatttgaaatgttttgtactttgattatttttatttcttatactctgttttcttttatattgatatcttgcccacattttaaataaatgtacttttgaacttaaaaattgagtaatcc

SEQ ID NO: 465394 - DNA, 439 bp, Homo sapiens
gcaataagagaaagaaagagatgtgttactgcacactggttaaacacagtcttaaagaagaagaaaatggtaccgccgcaccgagcccttcacttcccagtggccttcccaccaggaggaaagccatgttcacagcatgtaagacagagtcctcgcgttccatttgttaaatcatccttcgactttggcgaataatcacttgctagtgcttacctgaggctcctgcgttggcttctgagtcagagcttctctatgtacttttgcccagttcataagtgcctgctcataagaaatagtgtgttttcttttagttctgtgtaacagtcacaattttctgcacatagtagatatttaatggattctccagtctttgacactatttaaaatccaaaaataaatcagatgtcttgcaccaaaggcggcccctgttgggttaact

SEQ ID NO: 465395 - DNA, 2931 bp, Homo sapiens
tgccagctaaccctcaataagaaatgcacgcatttgattgttccagagccaaagggggagaaatacgaatgtgctttaaagcgagcaagtattaaaattgtgactcctgactgggttctggattgcgtatcagagaaaaccaaaaaggacgaagcattttatcatcctcgtctgattatttatgaagaggaagaagaggaagaggaagaggaggaggaagtagaaaatgaggaacaagattctcagaatgagggtagtacagatgagaagtcaagccctgccagctctcaagaagggtctccttcaggtgaccagcagttttcacctaaatccaacactgaaaaatctaaaggggaattaatgtttgatgattcttcagattcatcaccggaaaaacaggagagaaatttaaactggaccccggccgaagtcccacagttagctgcagcaaaacgcaggctgcctcagggaaaggagcctgggttgattaacttgtgtgccaatgtcccacccgtcccaggtaacattttgccccctgaggtccggggtaatttaatggctgctggacaaaacctccaaagttctgaaagatcagaaatgatagctacctggagtccagctgtacggacactgaggaatattactaataatgctgacattcagcagatgaaccggccatcaaatgtagcacatatcttacagactctttcagcacctacgaaaaatttagaacagcaggtgaatcacagccagcagggacatacaaatgccaatgcagtgctgtttagccaagtgaaagtgactccagagacacacatgctacagcagcagcagcaggcccagcagcagcagcagcagcacccggttttacaccttcagccccagcagataatgcagctccagcagcagcagcagcagcagatctctcagcaaccttacccccagcagccgccgcatccattttcacagcagcagcagcagcaacagcagccaccaccatcgcctcagcagcatcagctttttggacatgatccagcagtggagattccagaagaaggcttcttattgggatgtgtgtttgcaattgcggattatccagagcagatgtctgataagcaactgctggccacctggaaaaggataatccaggcacatggcggcactgttgaccccaccttcacgagtcgatgcacgcaccttctctgtgagagtcaagtcagcagcgcgtatgcacaggcaataagagaaagaaagagatgtgttactgcacactggttaaacacagtcttaaagaagaagaaaatggtaccgccgcaccgagcccttcacttcccagtggccttcccaccaggaggaaagccatgttcacagcatattatttctgtgactggatttgttgatagtgacagagatgacctaaaattaatggcttatttggcaggtgccaaatatacgggttatctatgccgcagcaacacagtcctcatctgtaaagaaccaactggtttaaagtatgaaaaagccaaagagtggaggataccctgtgtcaacgcccagtggcttggcgacattcttctgggaaactttgaggcactgaggcagattcagtatagtcgctacacggcattcagtctgcaggatccatttgcccctacccagcatttagttttaaatcttttagatgcttggagagttcccttaaaagtgtctgcagagttgttgatgagtataagactacctcccaaactgaaacagaatgaagtagctaatgtccagccttcttccaaaagagccagaattgaagacgtaccacctcccactaaaaagctaactccagaattgaccccttttgtgcttttcactggattcgagcctgtccaggttcaacagtatattaagaagctctacattcttggtggagaggttgcggagtctgcacagaagtgcacacacctcattgccagcaaagtgactcgcaccgtgaagttcctgacggcgatttctgtcgtgaagcacatagtgacgccagagtggctggaagaatgcttcaggtgtcagaagttcattgatgagcagaactacattctccgagatgctgaggcagaagtacttttctctttcagcttggaagaatccttaaaacgggcacacgtttctccactctttaaggcaaaatatttttacatcacacctggaatctgcccaagtctttccactatgaaggcaatcgtagagtgtgcaggaggaaaggtgttatccaagcagccatctttccggaagctcatggagcacaagcagaactcgagtttgtcggaaataattttaatatcctgtgaaaatgaccttcatttatgccgagaatattttgccagaggcatagatgttcacaatgcagagttcgttctgactggagtgctcactcaaacgctggactatgaatcatataagtttaactgatggcgtctaggctgccgtgcatgtcgactcctgcggtgcggggctggctgtctggctggcgaggagctgctgcgcttccttcacatgctcttgttttccagctgctttcctgggggatcagactgtgaagcaggaagacagatataataaatatactgcatctttttaagatgtgcaattttattctgaggaaacataaattatgttttgtattatatgactttaagagcccacattaggttttatgattcatttgccaggtttttaaatgttttcacaaaactgttacgggacttcaactagaaataaaatggtgtaaataaagaccttgctatctctaaattatggatgttaaagatttgaaatgttttgtactttgattatttttatttcttatactctgttttcttttatattgatatcttgcccacattttaaataaatgtacttttgaacttaaaaattgagtaatcc

SEQ ID NO: 465396 - DNA, 2452 bp, Homo sapiens
  misc_feature (8)..(8): n is a, c, g, or t
gcagcagnccagttttgaatgtacggtccccggcaggtgaggcagggcaggaggcaggagtagcaggaggggggggagccaaccttacccccagcagccgccgcatccattttcacagcaacagcagcagcagcagcaagcccatccgcatcagttttcacagcaacagctacagtttccacagcaacagttgcatcctccacagcagctgcatcgccctcagcagcagctccagccctttcagcagcagcatgccctgcagcagcagttccatcagctgcagcagcaccagctccagcagcagcagctcgcccagctccagcagcagcacagcctgctccagcagcagcagcaacagcagattcagcagcagcagctccagcgcatgcaccagcagcagcagcagcagcagatgcaaagtcagacagcgccacacttgagtcagacgtcacaggcgctgcagcatcaggttccacctcagcagcccccgcagcagcagcagcaacagcagccaccaccatcgcctcagcagcatcagctttttggacatgatccagcagtggagattccagaagaaggcttcttattgggatgtgtgtttgcaattgcggattatccagagcagatgtctgataagcaactgctggccacctggaaaaggataatccaggcacatggcggcactgttgaccccaccttcacgagtcgatgcacgcaccttctctgtgagagtcaagtcagcagcgcgtatgcacaggcaataagagaaagaaagagatgtgttactgcacactggttaaacacagtcttaaagaagaagaaaatggtaccgccgcaccgagcccttcacttcccagtggccttcccaccaggaggaaagccatgttcacagcatattatttctgtgactggatttgttgatagtgacagagatgacctaaaattaatggcttatttggcaggtgccaaatatacgggttatctatgccgcagcaacacagtcctcatctgtaaagaaccaactggtttaaagtatgaaaaagccaaagagtggaggataccctgtgtcaacgcccagtggcttggcgacattcttctgggaaactttgaggcactgaggcagattcagtatagtcgctacacggcattcagtctgcaggatccatttgcccctacccagcatttagttttaaatcttttagatgcttggagagttcccttaaaagtgtctgcagagttgttgatgagtataagactacctcccaaactgaaacagaatgaagtagctaatgtccagccttcttccaaaagagccagaattgaagacgtaccacctcccactaaaaagctaactccagaattgaccccttttgtgcttttcactggattcgagcctgtccaggttcaacagtatattaagaagctctacattcttggtggagaggttgcggagtctgcacagaagtgcacacacctcattgccagcaaagtgactcgcaccgtgaagttcctgacggcgatttctgtcgtgaagcacatagtgacgccagagtggctggaagaatgcttcaggtgtcagaagttcattgatgagcagaactacattctccgagatgctgaggcagaagtacttttctctttcagcttggaagaatccttaaaacgggcacacgtttctccactctttaaggcaaaatatttttacatcacacctggaatctgcccaagtctttccactatgaaggcaatcgtagagtgtgcaggaggaaaggtgttatccaagcagccatctttccggaagctcatggagcacaagcagaactcgagtttgtcggaaataattttaatatcctgtgaaaatgaccttcatttatgccgagaatattttgccagaggcatagatgttcacaatgcagagttcgttctgactggagtgctcactcaaacgctggactatgaatcatataagtttaactgatggcgtctaggctgccgtgcatgtcgactcctgcggtgcggggctggctgtctggctggcgaggagctgctgcgcttccttcacatgctcttgttttccagctgctttcctgggggatcagactgtgaagcaggaagacagatataataaatatactgcatctttttaagatgtgcaattttattctgaggaaacataaattatgttttgtattatatgactttaagagcccacattaggttttatgattcatttgccaggtttttaaatgttttcacaaaactgttacgggacttcaactagaaataaaatggtgtaaataaagaccttgctatctctaaattatggatgttaaagatttgaaatgttttgtactttgattatttttatttcttatactctgttttcttttatattgatatcttgcccacattttaaataaatgtacttttgaacttaaaaattgagtaatcc

SEQ ID NO: 465397 - DNA, 3480 bp, Homo sapiens
tgccagctaaccctcaataagaaatgcacgcatttgattgttccagagccaaagggggagaaatacgaatgtgctttaaagcgagcaagtattaaaattgtgactcctgactgggttctggattgcgtatcagagaaaaccaaaaaggacgaagcattttatcatcctcgtctgattatttatgaagaggaagaagaggaagaggaagaggaggaggaagtagaaaatgaggaacaagattctcagaatgagggtagtacagatgagaagtcaagccctgccagctctcaagaagggtctccttcaggtgaccagcagttttcacctaaatccaacactgaaaaatctaaaggggaattaatgtttgatgattcttcagattcatcaccggaaaaacaggagagaaatttaaactggaccccggccgaagtcccacagttagctgcagcaaaacgcaggctgcctcagggaaaggagcctgggttgattaacttgtgtgccaatgtcccacccgtcccaggtaacattttgccccctgaggtccggggtaatttaatggctgctggacaaaacctccaaagttctgaaagatcagaaatgatagctacctggagtccagctgtacggacactgaggaatattactaataatgctgacattcagcagatgaaccggccatcaaatgtagcacatatcttacagactctttcagcacctacgaaaaatttagaacagcaggtgaatcacagccagcagggacatacaaatgccaatgcagtgctgtttagccaagtgaaagtgactccagagacacacatgctacagcagcagcagcaggcccagcagcagcagcagcagcacccggttttacaccttcagccccagcagataatgcagctccagcagcagcagcagcagcagatctctcagcaaccttacccccagcagccgccgcatccattttcacagcaacagcagcagcagcagcaagcccatccgcatcagttttcacagcaacagctacagtttccacagcaacagttgcatcctccacagcagctgcatcgccctcagcagcagctccagccctttcagcagcagcatgccctgcagcagcagttccatcagctgcagcagcaccagctccagcagcagcagctcgcccagctccagcagcagcacagcctgctccagcagcagcagcaacagcagattcagcagcagcagctccagcgcatgcaccagcagcagcagcagcagcagatgcaaagtcagacagcgccacacttgagtcagacgtcacaggcgctgcagcatcaggttccacctcagcagcccccgcagcagcagcagcaacagcagccaccaccatcgcctcagcagcatcagctttttggacatgatccagcagtggagattccagaagaaggcttcttattgggatgtgtgtttgcaattgcggattatccagagcagatgtctgataagcaactgctggccacctggaaaaggataatccaggcacatggcggcactgttgaccccaccttcacgagtcgatgcacgcaccttctctgtgagagtcaagtcagcagcgcgtatgcacaggcaataagagaaagaaagagatgtgttactgcacactggttaaacacagtcttaaagaagaagaaaatggtaccgccgcaccgagcccttcacttcccagtggccttcccaccaggaggaaagccatgttcacagcatattatttctgtgactggatttgttgatagtgacagagatgacctaaaattaatggcttatttggcaggtgccaaatatacgggttatctatgccgcagcaacacagtcctcatctgtaaagaaccaactggtttaaagtatgaaaaagccaaagagtggaggataccctgtgtcaacgcccagtggcttggcgacattcttctgggaaactttgaggcactgaggcagattcagtatagtcgctacacggcattcagtctgcaggatccatttgcccctacccagcatttagttttaaatcttttagatgcttggagagttcccttaaaagtgtctgcagagttgttgatgagtataagactacctcccaaactgaaacagaatgaagtagctaatgtccagccttcttccaaaagagccagaattgaagacgtaccacctcccactaaaaagctaactccagaattgaccccttttgtgcttttcactggattcgagcctgtccaggttcaacagtatattaagaagctctacattcttggtggagaggttgcggagtctgcacagaagtgcacacacctcattgccagcaaagtgactcgcaccgtgaagttcctgacggcgatttctgtcgtgaagcacatagtgacgccagagtggctggaagaatgcttcaggtgtcagaagttcattgatgagcagaactacattctccgagatgctgaggcagaagtacttttctctttcagcttggaagaatccttaaaacgggcacacgtttctccactctttaaggcaaaatatttttacatcacacctggaatctgcccaagtctttccactatgaaggcaatcgtagagtgtgcaggaggaaaggtgttatccaagcagccatctttccggaagctcatggagcacaagcagaactcggtgggtagagtggagtccgccagcgagtccgtcattgccctgtatcacattcagcgttcggtcactgagaaactcattttcttttccttagagtttgtcggaaataattttaatatcctgtgaaaatgaccttcatttatgccgagaatattttgccagaggcataggtacgtttccccgcttacctgtgtgagtatgtgtgcacgcacagcagtggatctctaactaaagtgtctgtttccaccctgttcagatgttcacaatgcagagttcgttctgactggagtgctcactcaaacgctggactatgaatcatataagtttaactgatggcgtctaggctgccgtgcatgtcgactcctgcggtgcggggctggctgtctggctggcgaggagctgctgcgcttccttcacatgctcttgttttccagctgctttcctgggggatcagactgtgaagcaggaagacagatataataaatatactgcatctttttaagatgtgcaattttattctgaggaaacataaattatgttttgtattatatgactttaagagcccacattaggttttatgattcatttgccaggtttttaaatgttttcacaaaactgttacgggacttcaactagaaataaaatggtgtaaataaagaccttgctatctctaaattatggatgttaaagatttgaaatgttttgtactttgattatttttatttcttatactctgttttcttttatattgatatcttgcccacattttaaataaatgtacttttgaacttaaaaattgagtaatcc

SEQ ID NO: 465398 - DNA, 945 bp, Homo sapiens
ggggacacattcaatccatagcaggtgttatccaatcagtacaatgaagtgtgatcaggtgatgacaggggatgggggtacagagacagctgcccagaaaggggggccccaggacccccagagtaaagaagctagattcccacggtacctaccaggattcagcaaggaaagcaggaaaagtatcacagcagatgtaaggggcagggacaaagaaggccatgatgactctgctggagatccccaggatggcatcacagagggagggatgccagaactgagatttggatacacagctcaggaggcaggtcaaggtattccaggcagaggcaccacttgtgcaaaagcagaggggcaagcaagtcttaacccctatcagtatcattcactgctcctcatggatgccatagtcagcctgagtgtcctcgctcgtaaaatgggtctaacaacgaccacctccaagaaagatcacgatgctgaaatgactcagaacagtgcctggagtggaagagctgctgggaaaataataactgctatttctacatcagttatgccagttctttttgacctaagaaactccagcgcttttaatacaatcaaactgggttattggtgacttacagaggagaccctaggcaggtgtgacattcttaaccctgtctttaatacaactgccacatcccagcgttccttgacagactgtggagcacacctaagccaccttgcttgccatagggtttggctccatgaccttgatgtgagttcatagatttgtttgcagttgtgaaaattaaatgagagagcgagatttcattgtgtgtgtggagtgtgtgtgtgtgtgttgggggagggaggagaacaaacgattttaaattcagcctaaaattaaatgcacattggatgcatgccaaacggactccacaaccaccagactttgcaagtttcaac

SEQ ID NO: 465399 - DNA, 917 bp, Homo sapiens
ggtgcggtggcccagcgcggccgcctggccctcgagctcgccgaagatgtccccggcgcagcgcgacagggttgttatgaggctcaaaggaacggctgctgtgaaaaaacatgctttgcaatttatgaagcactggataaacatcaggaacggtataaaagcatgctgcttactcaagaaatactagttgagtgcctgtgtgttgggcactggctagagataagggtctcctatggacagaagtgcgggcaaggagctttgttcctccccgatgtcaccctcccacagcccacttgctagcaggcgagagaggggtggaggccggcagtaaggcatgtactgaactggacctctggtggaatggcgtcacccacgctgggcttggtgggtatttgaaagtgactctttcgtgaacactgttgtgagccctcactgggaatgtctggccatgcttcctgacgctggcaatgaattttctctagctgcttattctaccccaaccttggtcttccttctgtcccctccatgcagactcttaccatcagggtcctgccaacccttcagtgagactttttccgaagaatcccttttaaaatgacctcaagctgaccttcctgatgcagattccacatatggtatctgagactcacacagtgtggttggaagatagcacagtgacctcccaggcacagccctctgccagccctccactggctgccctaggatgctggccttcctccgatgggagtcgggcccagtctgctgtgagccaggagaagccagcaagctccctgcgaggcctggaggagcccttctcactcagcttggtgttcgatgccagtgcccccgcccattgtggggtgagggtgggactctcagcacagccctgtccaaataaatcctctaaagccctcttc

SEQ ID NO: 465400 - DNA, 498 bp, Homo sapiens
cacactgaaagtttctctgctttgggccagcaggaaattccagttgcttcattcaccggagccagttaagctgctgaaatgaaatggatcaccggagagatcactatatcaggacatagacttgactttcagggttggaggaagccggacaaagatgaatgggattcagagcctgaactcaaggtcaacgtcttcctgatgcagattccacatatggtatctgagactcacacagtgtggttggaagatagcacagtgacctcccaggcacagccctctgccagccctccactggctgccctaggatgctggccttcctccgatgggagtcgggcccagtctgctgtgagccaggagaagccagcaagctccctgcgaggcctggaggagcccttctcactcagcttggtgttcgatgccagtgcccccgcccattgtggggtgagggtgggactctcagcacagccctgtccaaataaatcctctaaagccctcttc

SEQ ID NO: 465401 - DNA, 729 bp, Homo sapiens
agcaagggtctgagaaagaggtcttccaggttgttatgaggctcaaaggaacggctgctgtgaaaaaacatgctttgcaatttatgaagcactggataaacatcaggaacggtataaaagcatgctgcttactcaagaaatactagttgagtgcctgtgtgttgggcactggctagagataagggtctcctatggacagaagtgcgggcaaggagctttgttcctccccgatgtcaccctcccacagcccacttgctagcaggcgagagaggggtggaggccggcagtaaggcatgtactgaactggacctctggtggaatggcgtcacccacgctgggcttgactcttaccatcagggtcctgccaacccttcagtgagactttttccgaagaatcccttttaaaatgacctcaagctgaccttcctgatgcagattccacatatggtatctgagactcacacagtgtggttggaagatagcacagtgacctcccaggcacagccctctgccagccctccactggctgccctaggatgctggccttcctccgatgggagtcgggcccagtctgctgtgagccaggagaagccagcaagctccctgcgaggcctggaggagcccttctcactcagcttggtgttcgatgccagtgcccccgcccattgtggggtgagggtgggactctcagcacagccctgtccaaataaatcctctaaagccctcttc

SEQ ID NO: 465402 - DNA, 468 bp, Homo sapiens
cagctcggtaccagatttcacggcagtaaggcatgtactgaactggacctctggtggaatggcgtcacccacgctgggcttgactcttaccatcagggtcctgccaacccttcagtgagactttttccgaagaatcccttttaaaatgacctcaagctgaccttcctgatgcagattccacatatggtatctgagactcacacagtgtggttggaagatagcacagtgacctcccaggcacagccctctgccagccctccactggctgccctaggatgctggccttcctccgatgggagtcgggcccagtctgctgtgagccaggagaagccagcaagctccctgcgaggcctggaggagcccttctcactcagcttggtgttcgatgccagtgcccccgcccattgtggggtgagggtgggactctcagcacagccctgtccaaataaatcctctaaagccctcttc

SEQ ID NO: 465403 - DNA, 1851 bp, Homo sapiens
cacactgaaagtttctctgctttgggccagcaggaaattccagttgcttcattcaccggagccagttaagctgctgaaatgaaatggatcaccggagagatcactatatcaggacatagacttgactttcagggttggaggaagccggacaaagatgaatgggattcagagcctgaactcaaggtcaacgtcttctgaatcacaaagagctggtgggtcagtctgggagaagaaagaaaattctgcgccaaatgggaaaacccttaaagtctgcatagttttgcttgtcggtaagaacacaggtaggcggcgggaagagaggtggcaagcagccccaacgctcgccgagatccccagggttttacaaacggatcgtcctgaagtctccaaaactgtaactactatatgcccaaatttatattctcccctggcttttccaacaggctacctgcctgtgacagttttcccacgaacttggctctcctctgtctacagcgccccggggtctcccaaacagacagacacagacagacagaaggagcagacaaggggactgtccaattcccaccctccacgcccagctaattttgtatttttagtagagatggatttcaccatgttggcccggctggtgttgaactcctgacctcaggtgatccacccacctcagcttctcaaagtgctgggattacaagcgtgagccacagcacccggcccagcattgttctttagtttattccctcttctattcccttgagactttcccattggtttgaaaagaattatgatttagccacataaactaataaaaagagagcaagaatatttttgtaaatttgtaatcctggggcaatatcaatagaattttttttataaaatgaatgatttcactactccagaagtggaatgtaaactctatacataaccagaacatggaattaacaggactcatgggtgtatccataaaagcaactgaatttttagtcttctgctgttaataatctgttccatgaggatagttcttcctcttccacagaatgaaactcaggcagtcctataacttttttattctctcaggtaatagaaaatcctgttactttaagaggaaaaaccctgctcttaattcagtaattcaaatcttgtccccttccccaacagggtctcctatggacagaagtgcgggcaaggagctttgttcctccccgatgtcaccctcccacagcccacttgctagcaggcgagagaggggtggaggccggcagtaaggcatgtactgaactggacctctggtggaatggcgtcacccacgctgggcttggtgggtatttgaaagtgactctttcgtgaacactgttgtgagccctcactgggaatgtctggccatgcttcctgacgctggcaatgaattttctctagctgcttattctaccccaaccttggtcttccttctgtcccctccatgcagactcttaccatcagggtcctgccaacccttcagtgagactttttccgaagaatcccttttaaaatgacctcaagctgaccttcctgatgcagattccacatatggtatctgagactcacacagtgtggttggaagatagcacagtgacctcccaggcacagccctctgccagccctccactggctgccctaggatgctggccttcctccgatgggagtcgggcccagtctgctgtgagccaggagaagccagcaagctccctgcgaggcctggaggagcccttctcactcagcttggtgttcgatgccagtgcccccgcccattgtggggtgagggtgggactctcagcacagccctgtccaaataaatcctctaaagccctcttc

SEQ ID NO: 465404 - DNA, 360 bp, Homo sapiens
cccccgactagcccgacagtccccgactagcccgacagtgacctcaagctgaccttcctgatgcagattccacatatggtatctgagactcacacagtgtggttggaagatagcacagtgacctcccaggcacagccctctgccagccctccactggctgccctaggatgctggccttcctccgatgggagtcgggcccagtctgctgtgagccaggagaagccagcaagctccctgcgaggcctggaggagcccttctcactcagcttggtgttcgatgccagtgcccccgcccattgtggggtgagggtgggactctcagcacagccctgtccaaataaatcctctaaagccctcttc

SEQ ID NO: 465405 - DNA, 1610 bp, Homo sapiens
ctgttgtacagcgcctcattttttacaatgtgggccagtaactatttcgtatcacctactctgaccaccttcagggttgttatgaggctcaaaggaacggctgctgtgaaaaaacatgctttgcaatttatgaagcactggataaacatcaggaacggtataaaagcatgctgcttactcaagaaatactagttgagtgcctgtgtgttgggcactggctagagataagggtctcctatggacagaagtgcgggcaaggagctttgttcctccccgatgtcaccctcccacagcccacttgctagcaggcgagagaggggtggaggccggcagtaaggcatgtactgaactggacctctggtggaatggcgtcacccacgctgggcttggtgggtatttgaaagtgactctttcgtgaacactgttgtgagccctcactgggaatgtctggccatgcttcctgacgctggcaatgaattttctctagctgcttattctaccccaaccttggtcttccttctgtcccctccatgcagactcttaccatcagggtcctgccaacccttcagtgagactttttccgaagaatcccttttaaaatgacctcaagctgaccttcctgatgcagattccacatatggtatctgagactcacacagtgtggttggaagatagcacagtgacctcccaggcacagccctctgccagccctccactggctgccctaggatgctggccttcctccgatgggagtcgggcccagtctgctgtgagccaggagaagccagcaagctccctgcgaggcctggaggagcccttctcactcagcttggtgttcgatgccagtgcccccgcccattgtggggtgagggtgggactctcagcacagccctgtccaaataaatcctctaaagccctcttccatctgcagtcacttgagtcttttgtagcctgtgtgattgagcatctaagcagtcctcagctatttactttgaaatttcctccaaagcactttgcaaagccaaacttgaaccaacaaaaggtcatggtccctgtttggtggtctgctgccggtctgatccactacagctttctgaatcctggcgaaaccattacatctgaaaagtatgctcagcaaatcgatgagatgcacaaaaacctgcagcaccggcagccagcattggtcaacagaaagggcccaattcttctccacaacaacgccccactgcacatcacacaaccaacgcttcaaaacatgccagagtcctccatgcagaatgacggcctacagccttgggatagagttattgagttggttacaaatcagccgcccaaattatattcctctatcttatctataaaagtattgggatttgttgttttcgtatgtatgcttgggtgaactgtttaggaaactgtatctagttatggattactccctgaagagctgctttcacccagtagccttttgaaaactcagctggtctttgtcaactaacaatacaagaaacagtttataaatctattattttgtttgctatgaatatttacttgagaaattccttttaaaagcaataataggaatagcatttcttcctagaagaaataag

SEQ ID NO: 465406 - DNA, 1704 bp, Homo sapiens
cacactgaaagtttctctgctttgggccagcaggaaattccagttgcttcattcaccggagccagttaagctgctgaaatgaaatggatcaccggagagatcactatatcaggacatagacttgactttcagggttggaggaagccggacaaagatgaatgggattcagagcctgaactcaaggtcaacgtcttctgaatcacaaagagctggtgggtcagtctgggagaagaaagaaaattctgcgccaaatgggaaaacccttaaagtctgcatagttttgcttgtcggtaagaacacaggtaggcggcgggaagagaggtggcaagcagccccaacgctcgccgagatccccagggttttacaaacggatcgtcctgaagtctccaaaactgtaactactatatgcccaaatttatattctcccctggcttttccaacaggctacctgcctgtgacagttttcccacgaacttggctctcctctgtctacagcgccccggggtctcccaaacagacagacacagacagacagaaggagcagacaaggggactgtccaattcccaccctccacgcccagctaattttgtatttttagtagagatggatttcaccatgttggcccggctggtgttgaactcctgacctcaggtgatccacccacctcagcttctcaaagtgctgggattacaagcgtgagccacagcacccggcccagcattgttctttagtttattccctcttctattcccttgagactttcccattggtttgaaaagaattatgatttagccacataaactaataaaaagagagcaagaatatttttgtaaatttgtaatcctggggcaatatcaatagaattttttttataaaatgaatgatttcactactccagaagtggaatgtaaactctatacataaccagaacatggaattaacaggactcatgggtgtatccataaaagcaactgaatttttagtcttctgctgttaataatctgttccatgaggatagttcttcctcttccacagaatgaaactcaggcagtcctataacttttttattctctcaggtaatagaaaatcctgttactttaagaggaaaaaccctgctcttaattcagtaattcaaatcttgtccccttccccaacagggtctcctatggacagaagtgcgggcaaggagctttgttcctccccgatgtcaccctcccacagcccacttgctagcaggcgagagaggggtggaggccggcagtaaggcatgtactgaactggacctctggtggaatggcgtcacccacgctgggcttgactcttaccatcagggtcctgccaacccttcagtgagactttttccgaagaatcccttttaaaatgacctcaagctgaccttcctgatgcagattccacatatggtatctgagactcacacagtgtggttggaagatagcacagtgacctcccaggcacagccctctgccagccctccactggctgccctaggatgctggccttcctccgatgggagtcgggcccagtctgctgtgagccaggagaagccagcaagctccctgcgaggcctggaggagcccttctcactcagcttggtgttcgatgccagtgcccccgcccattgtggggtgagggtgggactctcagcacagccctgtccaaataaatcctctaaagccctcttc

SEQ ID NO: 465407 - DNA, 2063 bp, Homo sapiens
accttagagagaaaatccatactggccagagaccaagttaatggaaaatttaattgaagcaaatgaaatgctcagcctcataggtagtatggccctgtgccctttgaaccagaaaggctgggccaggaggccacagagggccctaagggaaaactcccttatctgcaagaacaaggggcgggactgagtttgagaaaagaaaatctgcaaacctccacaggagcctcagtgaaaggctgcatgcaggggaggaaaccttcaggttttggtcaccaggaagtccgttagagattcacagcagaaggcccctctgcatcccacagcaccaagcacgtgctggaaaccggcggtcccccagaggacagtgggagaggctgccgggtggcagagacacaaccaccaagtcaagacagtcaccaccgaagagtacctggtgaaccctgtgggcatgaaccgctacagcgtggacacctccgcctccacctttaaccacaggggctccttgcacccctcctcctcgctgtactgcaagaggcagaactctggagacagccaccttgggggtggtcctgctgccaccgctggtggtccccgcactagccccatgtcttctggtggcccctcggcacctgggctgaggcctccagcctccagccccaagagaaacacgacctctcttgaaggaaacagatgtgcctcaagcccttctcaggatgcgcaggatgccaggcggccacggagcaggaacccctccgcctggactgtggaggacgtggtgtggtttgtgaaggacgccgacccacaggctctggggcctcacgtggagctcttcagaaagcacgagattgatggcaacgctctgctgttgctgaagagtgacatggtcatgaagtacctgggcctgaagctgggacctgcactgaaactctgctaccacattgacaaactgaagcaagccaagttctgacttttttaaaaagacagaagcgaaacccaaaacaacagatcccaagattatcttctgccttaccaatatcccgccaacatcacaaactagactctcctcttaaaattaacagccacagagacgtggtctttttataaaacttgtgaatctttgccttttgaagaatttaacatggaccttttcgagaggctcctctgtgttcataatttgccaaaaaattacaaaagcctgtgatttttaacatccctgttatgctggtttctcttaaagtgggtcctatttgcataacgagagagtggggaactgaatgcttatgcccaaggagagttctggagggttcaaaggatgaaagaaggacctttgtccctgcggtctctgcagggacaaccccctcagcaccatctgcctctaactctgacctggggacctatccatgtgagccttgtttgcctcagctctggaagctgacttctgaagatgactgcctcaccttgcactgtctggaaaacttgaattattttacgccgtgaaagaaaaaggaaaaaaaaaaaaatcttttctgttcctagaaaatctgaagtactgtgtttctccgctagagggcagactgctaatgaaatttcaggaccctcactgactgcagtagcaggattgttcagtactgagtggatgggttagggtgtctgtgaacaagatctagcccacacagaaacaggggatttattccacagttagcaccacagattgcgacttgggaaaaaaccatcagctagaggggtctagttcgtatccaatcattattgactgactgactgatactcaactagcaaaggcaagaatttggaagcacgctctacccagatgggactttggagttccttcccttccagagtccttattgaggtgttgaagtgttggcatgccgaagaatcttagtgacatttagccatgggtgtttctttaaaaaaggaaaagaaaatgtctcaacgaagctttgaaatgggagagtgttgatttctagttacattgctgggttatgtagttgtatctgtggctaatttttctagtcctcaacaaatacacagacatgctatta

SEQ ID NO: 465408 - DNA, 1389 bp, Homo sapiens
ggcttttgtgacgctttccctgggctctgaaggccagggggcttggatgtgagtctagtgctcctggtccccaaagtcacaaccccttctatcccagcatcccagacttctccgggcggggacagagttggacgtgcatggctgtgtcctgcaatcccctcgccacgaccgcccgggacggagtggaagcgggtccgtgcccccgttcctcgcgccagcctcggcggtggcaagcgctgtcccccagcagaggtgtccctggatacaggccctctgcagccccaccacacttggtccccacgctgaccggctaagggtgtgttgagcccgcctgaggcccaagccttccctctgcccagagctggggactcctggccaatgggcactccagctcacagaccctcggtattaggtggctccttcatagaccacggacagagcctgggctgcagaacagaacccacacccgggcgcaaaccacaactcagggctgcttcctgggatagcgaagaaaggctttgggagtgggcggaccgagggcgcagggcgcttctcctccaggtcctcggctcggccaccccggtccggcaaatggcggaacagacccagcctgcccttcactgagcgccactggttgctggtgcccctgcctcggccacagtcgcgatctcggaaaatccagagccagaactgtagttatacagaagactccagtgctccatacccaccctgggtggcaaggcctgcagttccacaccctattttaagtctaacaccttcactttgtacttttgcctttggattctaatgtgaagaaggaaaaggccttcaatgcagaaaatggtgaaaaaaaaaatacctgccaggacattataaggagaaaccaaaaaataaactggccatggttttgcaaggtgggcaaagccaggaagaggagatcgggagagagaggtccgatgtgaagatgtgcacagagatgtctggaaaataagcccagaaaaaatagtcttcataacccatataggggaaagtggaaaaaaacttgggcagagttctaacgtggtgtgtcatcacaagacacatgccagagagaagccctaccagtgtaaagaatgtaggccaggcgcagtggcatcccagcactttgggaggtcaaggcaggtggatcacgaggtcaggagatcgaaaccaccctggctaacacggtgaaacccccgtctctactaaaaatacaaaaaaaatatccgggcatggtggcaggtgcctgtagtcctagctactcgagaggctgaggcaggagaatggcatgaacctgggaggcggagcttgcagtgagccaagatcgcaccactgcactccagcctgggtgacagagcgagactccgtctc

SEQ ID NO: 465409 - DNA, 1258 bp, Homo sapiens
caaggtgaagcctgaagttttccaaacttcaaacttgaagttaaagtgcttctatccacttccaggggttggtgcccctgtgccagacagagcaaacgggaggtagctgctcttcaacccctttctccttttcctaggccctctgcagccccaccacacttggtccccacgctgaccggctaagggtgtgttgagcccgcctgaggcccaagccttccctctgcccagagctggggactcctggccaatgggcactccagctcacagaccctcggtattaggtggctccttcatagaccacggacagagcctgggctgcagaacagaacccacacccgggcgcaaaccacaactcagggctgcttcctgggatagcgaagaaaggctttgggagtgggcggaccgagggcgcagggcgcttctcctccaggtcctcggctcggccaccccggtccggcaaatggcggaacagacccagcctgcccttcactgagcgccactggttgctggtgcccctgcctcggccacagtcgcgatctcggaaaatccagagccagaactgtagttatacagaagactccagtgctccatacccaccctgggtggcaaggcctgcagttccacaccctattttaagtctaacaccttcactttgtacttttgcctttggattctaatgtgaagaaggaaaaggccttcaatgcagaaaatggtgaaaaaaaaaatacctgccaggacattataaggagaaaccaaaaaataaactggccatggttttgcaaggtgggcaaagccaggaagaggagatcgggagagagaggtccgatgtgaagatgtgcacagagatgtctggaaaataagcccagaaaaaatagtcttcataacccatataggggaaagtggaaaaaaacttgggcagagttctaacgtggtgtgtcatcacaagacacatgccagagagaagccctaccagtgtaaagaatgtaggccaggcgcagtggcatcccagcactttgggaggtcaaggcaggtggatcacgaggtcaggagatcgaaaccaccctggctaacacggtgaaacccccgtctctactaaaaatacaaaaaaaatatccgggcatggtggcaggtgcctgtagtcctagctactcgagaggctgaggcaggagaatggcatgaacctgggaggcggagcttgcagtgagccaagatcgcaccactgcactccagcctgggtgacagagcgagactccgtctc

SEQ ID NO: 465410 - DNA, 2597 bp, Homo sapiens
ggcttttgtgacgctttccctgggctctgaaggccagggggcttggatgtgagtctagtgctcctggtccccaaagtcacaaccccttctatcccagcatcccagacttctccgggcggggacagagttggacgtgcatggctgtgtcctgcaatcccctcgccacgaccgcccgggacggagtggaagcgggtccgtgcccccgttcctcgcgccagcctcggcggtggcaagcgctgtcccccagcagaggtgtccctggatacaggatagcaaaacctgatctcataaaacctaggtcacaaaggacagccctgcaaaacagaccctatttggatcaagtgagccagttcctggaacctgaataatgactcctgaatcaagggatactacagatttgtctccagggggtacccaggagatggaaggcatcgtgatagtgaaggtggaggaggaagatgaagaagaccattttcaaaaggaaagaaacaaagtagagtcatcgccacaagttctcagtcgctctacaactatgaatgagagagccttattgtcatcgtatttagttgcatatagagtggcaaaagagaaaatggctcacacagcggctgaaaaaattatccttccagcatgtatggacatggtacggacaatttttgatgacaaatcagctgataaactaagaactatacctcttagtgataatacaatatctcgtcgaatctgtacgattgcaaaacatttggaagcaatgcttattacacggctgcagtccggtatagactttgcaatccaactcgatgagagcactgatattgcaagttgtcccacactcttggtttatgtcagatatgtgtggcaagatgattttgtagaggatctcttatgttgtttaaatttaaattcacatataactggattagatttatttactgaattagaaaactgccttcttggtcagtataaattaaactggaaacattgtaaaggaatttcaagtgatggaacagcaaatatgaccggaaaacacagcagacttactgaaaaattgttagaagcaacccacaacaatgctgtttggaatcactgttttattcatcgagaagctttggtatccaaagaaatttcaccaagtctgatggatgtattgaaaaatgcagtgaaaactgttaattttattaaaggaagctcactgaatagccgacttctcgaaatattttgttcagagattggagtgaaccacacccacttattgtttcatacagaagttcgttggctttctcaaggaaaagtattgagcagagtatatgaactcaggaacgagatttacatttttctcgttgaaaagcaatctcatttggcaaatatttttgaagacgacatttgggtaacaaaattggcatatttaagtgatatttttggcattcttaatgaattaagcctgaaaatgcaggggaaaaacaatgatatatttcagtatcttgaacatattctaggattccaaaagacgttattattgtggcaagcaagacttaaaagtaaccgccctagctactatatgtttccaacattattgcaacacatcgaagagaacattattaatgaagactgcttaaaagaaataaaattagagatattgttgcatctcacttctttgtctcaaacttttaattattactttccggaagagaaatttgaatcattaaaggaaaatatttggatgaaagatccatttgcttttcaaaacccagaatcaataattgagttaaacttggagcctgaagaagagaatgaattattgcagctcagttcatcattcacactaaagaattattataagatattaagtttatcagcattttggattaagattaaagatgactttccactgctaagtaggaagagtatattgctgttactaccattcacaactacatatttgtgtgaactaggattttcaatcttgacacggttaaaaacaaagaagagaaataggctcaatagtgcaccagatatgcgggtagcattatcttcatgtgttcctgactggaaggaacttatgaacagacaagcacacccatcacattaaatacaaactttacaaaattctgtgtatagccaggtgtggtggcttacgcctgtaatcccagcagtgggagaccgaggtgggcagatcacttgagttcaagaccagcctggccaacatggtgaaaccccatctctactaaaaatagaaaccttagccaggcgtggtggcacatgcctgcagtcccagttacttgggtgcctgaggcaggagaatctcttaaaccaggaaggcagagattgcagtgagctgagataatcccactgcattccagcctgggcaacagcgtgagacttcatctcaaaaaaaaaaaattgtatttgtacttttaaagggattttgcagtatgttgtagttaaacgttaataaaattatatttgtaattaggattttatttttctacatagtatgtttcatgaaactcatttcagttacatgaatgtgtgtatgtgtacaaggttattatataaaatatatgtcctgtgaattattgtcaagaattttgaaaact

SEQ ID NO: 465411 - DNA, 2009 bp, Homo sapiens
ccgtgggacttcaggatagaagtttctagaggcagtaacgggctattgaaattgtttatgtgggtgtcacccgtttaaatgtacactttagaaatttcactctggcaacaactgaaatacagttggaagtgggaaaaactggagatgatcacactgacatgttcctcactagacccaaggatggctcaggggaagctgcgtatggaaataggaacaaagctcagatgccttatctggacagtccacaagggtgtgcactgggtaaccttctggtgggtggagaggagccagactgggaatctggaggtcagaaggctttggcttggcctcctcacacatctacactcgggtgtgaactgtgagtttgccctcctagatcactctgcagatagatatattaagaatgcacctcctgtccctcgggcaccaagtgagttgtctttgaagactcgacttaaatgttcacctcagttaaatctccgtagacctccatgaagatatgaaacccttttcccttccatttgacaattcaaagaaaaaagagctaaataaaaagaaaattccgaagttgtgagtatgaattttaatagtacaagtgtatatattttaaatgatcagtataaatttaaaagaaacagcttaatgaaatacaagtcagtttatttgatattcagcctacagctttccaaagcagcagttgaacatgttgttgagtttataccattcattcattcatttattttttctttctttctttcagaaaatactgggtgtttgatatttgtttcactgtgctagtttctgggaatgtgtaaggaagaggctggctgtgtggatgagagcaacttgctttttacaataattatttgttattgtaaattaacaatttgctcttctggtattatatggaagtatttgatcctgttgatggcactgcctttgcttttgcaagattaaaatgaaatgaagtttctgagatgttaactctattcttgacctcaaacatgacaccaagatgactggatacaagaagaaaattaatgtcacctcaggaagtatctcccccatactccatcaagagcacttacgtggccataagcactggccacatccccatgcacctgggaacaatccatttattttctaaaactttaaaactttctacaaacctgatttttcaatttttgatatgtttcttaaagtattttatcaagattttttatttatttccaaatactggcttggatttttttctcatctgaacactgagaaattccaggaaaaaaaactatatttggtacttcgtgtcttcaaattttgatgcaatgactttataaattagcctatactgatagtgtaaaactgagttaaaaaaggaaaaaacttaggcccgtgtggaatatttaccaatgcttactttaaggtataaaaatgattttgttttcattcactctgaactaatgctatgaattagaagtttttctattcatcaaacattattgcaagggtttactgaatttgttcacttatttatattttcaatacatgtttactgaacacaatgtatgtgcaagacttggagatacaccaaaaataagaaacacaaaatccctgcccttgggtagcttatttttagaaagttgttttagtttttatttcttgttgccttattatttatttactttttatattatatattatattatttaatgataatatattatatattatattatttaatgataatatattatatattatattatttaatgataatatattatatattatatataatataattatttatttattcattatatataatataatatataatatattatttatttatttatttatttatttttatttattttttagcctttctatttaagataagaacagtttacaccccatagctacagtattgtagtattctaaatttttctgtgtgcttactattagcagtgaattttgtaccttcagatgatttcttattgctcatt

SEQ ID NO: 465412 - DNA, 1691 bp, Homo sapiens
cattcacctccattggagactgggaataaacttgtaaatagacaattgcattgtgatgtgccaagcccaacattccattttatagtcccatggaccgagaagctgagaaggctgtcgtctcatctatagagagcattactagatccaagttggggaatcatggcagggactggagccctgcgttctacctttgctgttacttagctgtgtgacccttagcaagtcactggccaggtctggatcacagttttctcatctgtacatgaaaaggttttcagcttctcgtgagtgactgggaaccacacttaccctatgtccacacaaccacctggagccgagtagaggtggctcctgctaaaaatgacatctcatgtctgtccaggtcctggtcctccattccactcaggggcagggcctttcttcatgtcctggttgacccagaggccccgagtctgtggtctgggttcccctgtttccttaggctgagccagttgtagccacagaactcaattctcctccacacccgaagctgctcggaaatgtccttccagcattacctgcaccaatggtaataggcagctatgctcactgggaaagaaaatctgaacaagacaaatggaacctctcctgaggcaaatctaccccagtgggttgaagatggaattgtaatttggagacagaagaaaagaaaaaaataataaacagcagcacgattcccattttctctgaattctgacattgttgagtgccaactggacaggcgcctcacgcgcatcccatctatgccacacaatcatcccagtgaggtgggtgtcatggttcctgttttatggatgagaaaagtgaggctcagagaggttgagtaacttgtacaaagtcacatacttaggaagtggcaaaggcaggctaaccccacccttgattgtgaactggattgggtgaaagttcttgcagggtgggccagggtgaaggccgccctggtggaactcctgaggcaatgagcgatcctgctgatgcctgtaaatggtgccagcagcgcaggagattcctgccctgggagaagagggggaatccaagggaagcatgtgggagtgctactggcatctggtgggtagaggccagggacactgctaaacatcctacaacgaacaggacagcccacaacaaacactggggacagtctagggcagtggttctcagcatcgagcagcatcagaacaccccagaaggaagctgtgccaccagagccagcctcacctgcagggtcctgtcctgcatgtcccagcagtctgggctggaagaacttgggaggtccatgcagggcagatgtggaggcctccctccatgtgcaaaaggtgaatcagagaggcgggatgtgctctacatcaccctcatggtagtagacggacccgaaccacgagttccagggcagagaccttttcacgcacactgatctctagatacattgaatttggctgtaaatcctaagggacactgtgctaaatattagggggtataatattagctcagagcaggcatcgctcatccagatacagaagactgggcatgatgtctggttgaaactttgtggcctatttttccacactcggcaaagacctgtgtgttgcctttggactcctctcctcctctgcctttttgattcatatttcctttaaagttgggagtgtttc

SEQ ID NO: 465413 - DNA, 1766 bp, Homo sapiens
cccaacaggttcccagggaaagaaagctccggagaggaaggtgacccttcagccacctccaggactgccctctgtgggtccttggggactgtccatatccctacctgtttcaaggacctgccagtctgagaagcttcttgtcataaggccatccaggggccacgcacccctaccttgccagcctccagcatgcaggataccgtaacgacatcagcattgttggaccccagccactcctcagtctccacccaggacaattcctccactggaggacacacttcaagcacaagcccacagctctcaaagccttcaatcacaccagtccctgcaaagtccaggaacccacatcccagggccaatatccgtcggatgcgccggatcattgctgaggatcctgagtggtcactggccatcgtgcccctcctcacagagctctgcattcagcacattatcaggaacttccagaaaaaccctatcctgaagcagatgctcccggaacaccagcagaaggtcctgaaccacctgtcccctgacctaccactggctgtgaccgccaacctgatagacagtgagaactactggctccgctgctgcatgcatcgctggcccgtgtgccacgtggcccaccatggcggcagctggaaacgcatgttcttcgagcggcacctggagaacctgctaaagcactttatcccaggcaccacagaccctgcggtgatcctcgacctgctgccgctctgccggaattacgtgcgcagggtccacgtcgatcagttccttccgccggtgcagctcccggcccagctccggccgggcgaccagtccgactcaggcagcgagggagagatggaggagcccaccgttgaccactaccaactgggcgatctggtagctggcctgagccacctggaggagctggacctggtgtacgatgtcaaggactgcggcatgaatttcgagtggaatctcttcctcttcacctaccgtgactgcctctccttggcagccgccatcaaggcatgccacaccctcaagatcttcaagctgacccgaagcaaggtggatgatgacaaggcacgcatcataattcgaagccttctggaccacccagtcctcgaggagctggacttgtcacaaaacctcattggagaccgtggtgcacgaggtgctgccaagctgctgagccacagccgcctgcgtgtgctcaacctggctaacaaccaggtgcgtgcacccggtgcccagtccctggctcacgctctggcacacaacaccaacctcatttccctcaacctacgtctcaactgcatcgaggatgagggtggccaggctcttgcccatgccttgcagaccaacaagtgcctcaccacgctgcacctcggtggcaatgagctgtctgagcccaccgccacactcctgtcacaggtgctcgccatcaacaccacactcaccagcatcaacctgtcctgcaaccacatcgggctggacggtgggaagcagctcctggaaggcatgtcagacaacaagaccctcctggaatttgacttgcgcctgtcagatgtggcccaggaaagcgagtacctcattggccaggccctctacgcaaaccgagaagcagcccgccagcgggccctgaatcccagccacttcatgtcaaccatcactgccaatggccctgagaactctgtgggataaaatgacctgacttggatcatggccccagccccatccctcatttcatacccctgccatgcctgctgcagagt

SEQ ID NO: 465414 - DNA, 1703 bp, Homo sapiens
tgcgtgaggcgagcgccggggctcccggagcggatccctacctgtttcaaggacctgccagtctgagaagcttcttgtcataaggccatccaggggccacgcacccctaccttgccagcctccagcatgcaggataccgtaacgacatcagcattgttggaccccagccactcctcagtctccacccaggacaattcctccactggaggacacacttcaagcacaagcccacagctctcaaagccttcaatcacaccagtccctgcaaagtccaggaacccacatcccagggccaatatccgtcggatgcgccggatcattgctgaggatcctgagtggtcactggccatcgtgcccctcctcacagagctctgcattcagcacattatcaggaacttccagaaaaaccctatcctgaagcagatgctcccggaacaccagcagaaggtcctgaaccacctgtcccctgacctaccactggctgtgaccgccaacctgatagacagtgagaactactggctccgctgctgcatgcatcgctggcccgtgtgccacgtggcccaccatggcggcagctggaaacgcatgttcttcgagcggcacctggagaacctgctaaagcactttatcccaggcaccacagaccctgcggtgatcctcgacctgctgccgctctgccggaattacgtgcgcagggtccacgtcgatcagttccttccgccggtgcagctcccggcccagctccggccgggcgaccagtccgactcaggcagcgagggagagatggaggagcccaccgttgaccactaccaactgggcgatctggtagctggcctgagccacctggaggagctggacctggtgtacgatgtcaaggactgcggcatgaatttcgagtggaatctcttcctcttcacctaccgtgactgcctctccttggcagccgccatcaaggcatgccacaccctcaagatcttcaagctgacccgaagcaaggtggatgatgacaaggcacgcatcataattcgaagccttctggaccacccagtcctcgaggagctggacttgtcacaaaacctcattggagaccgtggtgcacgaggtgctgccaagctgctgagccacagccgcctgcgtgtgctcaacctggctaacaaccaggtgcgtgcacccggtgcccagtccctggctcacgctctggcacacaacaccaacctcatttccctcaacctacgtctcaactgcatcgaggatgagggtggccaggctcttgcccatgccttgcagaccaacaagtgcctcaccacgctgcacctcggtggcaatgagctgtctgagcccaccgccacactcctgtcacaggtgctcgccatcaacaccacactcaccagcatcaacctgtcctgcaaccacatcgggctggacggtgggaagcagctcctggaaggcatgtcagacaacaagaccctcctggaatttgacttgcgcctgtcagatgtggcccaggaaagcgagtacctcattggccaggccctctacgcaaaccgagaagcagcccgccagcgggccctgaatcccagccacttcatgtcaaccatcactgccaatggccctgagaactctgtgggataaaatgacctgacttggatcatggccccagccccatccctcatttcatacccctgccatgcctgctgcagagt

SEQ ID NO: 465415 - DNA, 1253 bp, Homo sapiens
tgcgtgaggcgagcgccggggctcccggagcggatccctacctgtttcaaggacctgccagtctgagaagcttcttgtcataaggccatccaggggccacgcacccctaccttgccagcctccagcatgcaggataccgtaacgacatcagcattgttggaccccagccactcctcagtctccacccaggacaattcctccactggaggacacacttcaagcacaagcccacagctctcaaagccttcaatcacaccagtccctgcaaagtccaggaacccacatcccagggccaatatccgtcggatgcgccggatcattgctgaggatcctgagtggtcactggccatcgtgcccctcctcacagagctctgcattcagcacattatcaggaacttccagaaaaaccctatcctgaagcagatgctcccggaacaccagcagaaggtcctgaaccacctgtcccctgacctaccactggctgtgaccgccaacctgatagacagtgagaactactggctccgctgctgcatgcatcgctggcccgtgtgccacgtggcccaccatggcggcagctggaaacgcatgttcttcgagcggcacctggagaacctgctaaagcactttatcccaggcaccacagaccctgcggtgatcctcgacctgctgccgctctgccggaattacgtgcgcagggtccacgtcgatcagttccttccgccggtgcagctcccggcccagctccggccgggcgaccagtccgactcaggcagcgagggagagatggaggagcccaccgttgaccactaccaactgggcgatctggtagctggcctgagccacctggaggagctggacctggtgtacgatgtcaaggactgcggcatgaatttcgagtggaatctcttcctcttcacctaccgtgactgcctctccttggcagccgccatcaaggcatgccacaccctcaaggacggtgggaagcagctcctggaaggcatgtcagacaacaagaccctcctggaatttgacttgcgcctgtcagatgtggcccaggaaagcgagtacctcattggccaggccctctacgcaaaccgagaagcagcccgccagcgggccctgaatcccagccacttcatgtcaaccatcactgccaatggccctgagaactctgtgggataaaatgacctgacttggatcatggccccagccccatccctcatttcatacccctgccatgcctgctgcagagt

SEQ ID NO: 465416 - DNA, 1247 bp, Homo sapiens
gggagcagaacagctttggtgaggtggacaggaggtgacctcgcgagcagacgcgcgcgccagcgacagcagcccgccccggcctctcgggagccgtggggcagaggctgcggagccccaggagggccggagccctcatgacttcagtgacctgcttctgcccctctaggtctatcagccacagtctctgcaagtttccaagagcagcagaaaatgaacacattgcaggggccagtgtcattcaaagatgtggctgtggatttcacccaggaggagtggcagcaactggaccctgatgagaagatagcatacggggatgtgatgttggagaactacagccatctagtttctgtggggtatgattatcaccaagccaaacatcatcatggagtggaggtgaaggaagtggagcagggagaggagccgtggataatggaaggtgaatttccatgtcaacatagtccagaatgtctgatgataaactgtgcacattccaaaatcatgaattctgtctaccttcctcacctcccagtatttgattgtctaataaagagtcagtattcctgtgagaaagtaccgttctctttaaatataaccaccctaattccctccatataaaaggctaatgaattagtttctctgtctctcactgcatcccatctccatgagaaaaacatattcagaatttaagaaaaaatgagcttattgttagtaggaagttgggacaaagtcttttttttttttttgagacagagtttcactcctgtcacccaggctggagtgcaatggtgtgatcacggctcactgcaacctccacctcccaggttcaagtgatccacctgccttggcctcccaaagtgttgggattacaggcgtaagccaccacacccggccaggacaaagtcttaaaggaaaactttcacatgaaagcagtggagacgaagaatgaggaaatgaggcacgggaaggacaacccttcctagtattctctccgaagaagagaatcaaatgctactcacttagcgggtagagagatcactgctctttgtagagaaaaacaatcatggcccaggaagtcatccatcactcatccataaatgggagagtaatatggacctagagttaaatttcacccatgaaacatcaaccacatgtcatatcaattcaagtgtgtaacattgatataatcgggtacaccacagcagcactgacagaaacagaaatgattcagagaaagccaattaaaa

SEQ ID NO: 465417 - DNA, 1117 bp, Homo sapiens
gactgatggagtgagggcggttgctatgggagcgcatacaagaggcactgcacgccgtgcttctgagaaggcggtaattacggtgcgctgaagagcaggctgcccaccccctcacttcaccaaagcttccctcgacaatgtcacacgcaacttccagatccaacccgatggccgactctcaatgttcctcttccaacagcacaactggtcactctctccttcctggagcctgtctcttcccctggcatccaggacttctgtgttctgtctccagccagcacctcctctcctggatccaaccgcctactcagtgtttccacctgggggtgcaatgggcatctccaactttccaggtccagaccaagctcccctggcccttcatcggtgcctccacagccctctttatctcaggaaatggcaacaccatccttccagtcactcagaccagaagctgggagccattcttgaccccttcctcaaactccccatcaacaacagatttatcgctgccttcagaatggatcttagcacatcccacaccacccccgagggcccatgcgccatctcgtccctcacctgggcttccaccagatccttggagaccctttgccttgtcctcacagctggcaggctgctgtcttccttgcagctgctcgtcacagctgatggcaccaggcacacagtgctgctggatgaggaaagacaggccatggcgaaatcccgccggctggagcgcagcaccaacagcttcagttactcatcataccacaccctggaggagagagtcatattcaaagagatctggaagccagaattcagatagaggggacagtagttcaactgtacagccctagacaggtacagagcagagtaatgggtctactaggcagaacactaacgcagggacccattatgggccagaatagagcaggtagaagctaccttcatcttgacagagcaggagcgtcgccatcttgaacaaacaccaccattctaagttcccctggattaaaaaactgcctaaatccagtccttatagttataaaaaggacaaaaatcagccagaagcccctcctgggtttatttctctaaaataaacttgtccttgactgtgaag

SEQ ID NO: 465418 - DNA, 2434 bp, Homo sapiens
  misc_feature (3)..(4): n is a, c, g, or t
  misc_feature (6)..(6): n is a, c, g, or t
ttnncngtttttcaggttttggatatgatgaataaggtactatcaacatatgtttttgtgtggaaatacgttctctttgggcagagatatctactgatgacacgaaaaattcttcagttgggtatggaaaatgcaatgataatgatgatgatgatgatgataatgatagtatcgaatcttgatagtatttcctgtgatcttcacgctgagaacctggtgggcccctggagcactcacggaagcctggttaacgttcctaaaacccgccggactttctgtaagaagtgtggcaagcaccaaccccataaagtgacacagtacaagaagggcaaggattatctgtatgcccatggaaagcggcgttatgacaggaagcagagtggctatggtgggcaaaccaagctgattttccagaaaaaggctaaagctacaaagaagattgtcctaaggcttgaaaagagaaacaatagtttcaaaggcaaagattcattaaagagaatcaatgcctttaacacagctgctggccaatgaataattacgtgatgatggtgtctatacgtaatggacttatttaacatgtgaaaagttgacttcagccactacagatttttttctaatatataggacgtcttttaaatatttagaaataacaaagtcattttcctgataataaagtgtacacattcactataaacaattataaaactattttgaaactgttagaaacaatacaaatatccactaatctcaccaactagagatagtattaataagctcaaattgttgtcattttgagtgtgtctttgaaatcaaatatatatataataaatacaacaaaacatgtatggtgtgagtgtgtttgaatcagatggttgtaacctgctttctttctcagcattatatcatgattgatttttcatattctctattattttagaaaatgatttttaataggctgtacttatcatgatttaccataatttatttaatccatttttattgtttgacatatttcaatataataagtatcacttcagagatacaattgtatgtttgtgaacttttctaaattcaattcatataaaaggatagccttgctttttaagacatgggagaaataaacggtgtagttcccttaaattgtggatagaaatgtaatggttatgagttggatgctatagaaaatataacataatatagagcatttcattatagaattctcttgaattagtttgcctgtacctctccctgttatggaaaggatataattttcaatgacaaaattttgaaaaggcctacatttatcaataaaaataacatacaacgtgaatgcaaatgaaaatgtagaaattaattattgtctattagcattattatgagttaactatcaaataattatggatttaaaacaggtgaacaaaaggaagtccagatggaagtgtttgaaatttgagaggcaatctatgtcttcccaatcataagacgcctcacaaaataaaaaaagaaaaagaaagacaagagatcattagaattttattaagtgtgaatacatattatgaaagaatgcatatattttgaatttttaattcaatcttttagatttaattttattagtcataatctatattgcatgctggctttctaaagatcatccgttaaatagttctaattttgatatattttgtttcctctcttattgctttaggcagagttatatttagcgttgagaacaatttcattgattatactataccggaattgaatggaagaaaaacactaattcctgaaagaaataaatttaaatgcaggaagacctagaaactagaaaaacaaagtacgttggattgttttacagtttagaagtttctggccccacagttctagaggctgactgactggggcaggttgtagagaaacttctggacaggttgttaacatctgacacagtgagtgagaaaaaatccagcacagtcactgggcaggtttaagaagaagtggcagcctcgggagatgaaaggtttgtgtgtgcttgttgctggttacctgcaacacactggttaaattcaaatccattcatttagtaattgcttagcttcctctaaaccaatgtaatgcaaaccaaaaggaccgttgtggatgttttgtactgatgtctgcagatcatgagtaattttagtctgtcttgtctgacattttccacaatgcttttagttgacagcattatattatgtaaatatttctggttaggtttattgaggtggttgcctaaatctcactttaaataaagcctttaatgctttcacccagaatccatagagaagctacatgagttggggaagtttagtgttgctctttgtactttaacttttaatatcagagcacatattgaaaccataaacacaatgaaaatacaaaaaaatattccgacgatatt

SEQ ID NO: 465419 - DNA, 1317 bp, Homo sapiens
ttcaatccaaagcagggaccttgcctcttggcgaacatgcacatgctgctgttggcggcggcggctgcggctgctgctgtggcaggattttcaatgtggtgtgttttcaagcctcactcactcatcctctcattcccaaacattcagcatccatgcacactcctcacttccaggtttttcaaaagattggagatttccagtgggggtcctcagagtgactggcaaacttggtacaagcagcccatgggtgttgcggaccctccacagtatttctggacaaattcactacttacccaaagtccttgtgagcttcgtggactttattggagactgtctatgggagagaagatggatgagtgcgtgccaccacctgatggaagattcgtggacatggggatgaggcccctgaggccccagaactatcttttcagttgtgaactaaaggccaacaaagattatcactttaaggtagataataatgaaaatgagcaccagttacctttaacaacaatcaatttaggggctggtgcaatggatgaattggacattgttgaagcagaggcaatgaattacgaaggcagtccaattaaagtaatactggcaactttgaaaatgtctgtacagccaacggtttcccttgggggctttgaaataacaccaccagtggtcttacagttgaagtgtggttcagggccagtgcatactagtggacagcatttagtagctgtggaggaagaagcagagtcagaagatgaagacaaggaggttgtgaaactcttaagtatatctggaaagcagtctgcccctggcggtggtagcaagcttccacagaaaaaagtaaaacttgctgctgatgaagatgatgatggtgatgattttgatgataaggaaactgaagaaaaacaccagtgaagaaatctatatgagatactccaagccaaaaatgcacaaaagtcaaatcagaatggaaaagactcaaaaccaccatcaacatcaagatcaaatggacaagaatccttcaaaaaacagcaaaaaactcctgaaacaccagaaggacctagttctgtagaagacattaaagcaaaaatgcaagcaagtatagaaaaaggtggttctattcccacagtggaagccaagttcatcagttatgtgaagaattgcttccagatgactgaccaggaggctattcaagatctctggcagtagaggaagtctctttaagaaaatagtttaaacaatttattaaaaaattttcatctcatttctgtaacagttgatatctggctgtcttttttataatgcagagtgagaaatttc

SEQ ID NO: 465420 - DNA, 4093 bp, Homo sapiens
  misc_feature (212)..(212): n is a, c, g, or t
  misc_feature (219)..(221): n is a, c, g, or t
ttgggagtctcttctacttcctgccctccttcccagtggcagctcctgagctgccgccatggatcagggtttgaaaaccactgggggagatgctacttccgaagaaggccagggacagtctgagagaatgacatttgaactgagatctgagcagagctggaagaaggcccttctgggcatgggaacagccagtgcaaacaaaggccctgagntagggcnnngaaccttctgcatcatttcactgtgcacctgtgtggccgggatcaactttgagctgtcacgctacccacgctacctgtacggactccctgatgacatcagccatggctatggctggtccatgttctgtgcatgggggggcctgggcctcacactcatctcgggattcttctgtaccttagccccttctgttcaacctgtcccgaggaccaactaccctaaatccagacccgagaatgggacagtgtgctaaaaaacaaacccatacatacatatatatatataaatatatatatataatatacatatataaaacaaaacaaaactaaatcaagacgatgccagtgccaagttgctgaagccagtagcttcgtcaaaaacatatgaattcatataaggaagccctttagatggtacattcactaagacgtgtctgggtgtgatcctgtttgggaaaaacagaatcctaggttctaaacaagaaaagaacgcccttcccaaagggtccgcacactttctgctttgcagcggatcaagtgtccttgtgaggaaccccattcctcccactggctgagcttttcctttcctttccgggtcacccatagaccctctccgtctgtaccagtgcgtctgtgttgtgagcgtgacgaagcctttcctgtgaagagctttcatgaactcattctcatactccttccccatttccacccatggtgtgactgttttgctattcaagactatctgtaaaaatgtacaaataaaagtgaaaactgaaaataaaggggagggagattgagattaaacaaatgcaatgatgtagcccttagttttctgaggacttctgtggacggccctaaaatcctgagttagggtgggatatgaagggagggataccattgacacaggaggtttttttctggttgtttctctcacagtcatcagtgtctgcttagaactctctgttctaaaggtttttccctgtaaagtagaatgcacttcccccaaaataaaagtaaatcagcaatgtttgaagggtcatggcaagggtcatgacaaagacctgactctggggtggcatgagtggccctgtcaccggctcactcagggccttgggggagtctcattacctcaccttgtctccacgtcttctcagccaaatggggatcaggggcttccagggctctgggggtgcgcagtccccttgtgtattttgctgctatttctagagagactttgagcccttgctagtgcgtgcttactgcatggaggtaaattaggagatgttttctctctgctactcctggcctctgctttcgcccctcagaaagtgaccttgagctagcagccagtttgcactcagagtccagagccttctatctaccgtttcattctcagattccttttcccacccactttgacgatctcattttactatcagtctctactgactgagctttgctgcactgggctggggtaggagaaagagcatccaaggagatgatgtgtgaattgctttgtaatttatgactcaccatataaatgtggcttgcagtgtcagaagcagggagtctggccaagggttgctaccaaataagactgaagatggtggaggcagtggtggcgtggaggcagtaggcagaagatgtgggttgggagcagaggtaagatgaacggagctttgggaaggacagatggcagaagcaccagaaaatcctcagcaaggcagcagagaaggatcctcaaagcagtaaccctgaagtaataggaagtaggaaagaggagcagggattaggtaaatctgcagcataaacagctgtctccctgcaggactgagaagaccagctgccccagagaggggaggcacgtcgagcttggccagtgacccaacccatgattagaggcaccttcaatcccaactttcctctcctctgctgggtcacagtgatggaaccagcttcaggaaggtagtatagaccagcgtcatccaatggaaccatgatccaagccacatatgcaatttaaaatattctagtagccacattttttaaagtccaaagaaacagctaaaatcagtgaaattaatttttagactacattttaacctaacatgtcaaaaatagtatcacttcagcatggaatcaatataaaaattactgggatattttacattcttttttccaaatgaagtcttcaaaatccaatgtgattttcctcttagaaaacatctcagtctggcccagccctatttccagtgttcaatagccacacctgactactggttgctgtataggacagcacggacttaggttcttcattaggagactgatggggggggtccttcctggtgggtcactcactgccatagctcttgtcatagctgatgaaggcaggagtgagtcttattatgttggcctagagtagaaagcacagagctatgtcgaggctgctgtctcagcctctggaagttctgcttcacctgcttagtaagaggagatgaccactcctgtggactgcatgtcccatctgcccccagagggtgtcggcgctgccccagtcatgtcccttatgacctgtccaagtcctagaggccaaagcaggtcatattcttcagctgcaggaatgtcagctactgcctcccaccccttaacctgatccccttatcatatagtggggaaggggcaggcaggccttctctctgtcaagaacaaagatctctacaacatttcgtcacctgggccagtcacctgctaatatcatctcaccaatatttggagctgttttctgaatcccttaattttcttaaatatttatcttaaagtcaaatgctataaaggagataccctgggaagggcagtggccacaggcagactgggtctcctaggaggtggtggtgttggtgacaagttctacttggactgggactcaacccaccattgcctacctctcttccctgcctggagaccttccttaggattgaagaaacctcttttgtttgtgaaaaagataggtatcgagatcttaatggagagaacagaataaaatgcaaggagccaacccctgggtattctcaaagcatttcaacggtcagtataacaaggtttgattgatttaaaatataacattctgagccctgtgttactgagcaaaaatgagctgatttggtgagtatgttttatatatggtcattagacagggaccataactgacaaaactctcaaacgcctggagtgtttatggcccaccagattattgctcagtcaatataaatttatttacctttattttaatttgcatagtgctttctgattggtcagacaaggagtggtgtgtactgcaggattctaacaatgcctctgcccttggaggcagcaattcctgtggttattggtgctaaaataagataaaatattatgttaatttgttctgatatgatgtgaataaatgtgttgtttaatcttaacaagaatgctacatcttatcagatctattgtactgtctgttccttctcataattaattaattacaggaaaggcgattcaaaccagatcttgaaactattgtgatgttctgagaggtaaatttaacagggaagtgggaggggggatgaaaagggaaattgccaggttcctgtgactttgaaaggactgaggaagcagagagcatttggggacttcactgaaactgactgcatcttgcaattttctttttcgaattggcagaaatattgtatttccatcgattgaagaaaaacaagtgtctggtaattaattaaatgacttgttcatggaaaaaataaataatctgtcagttgtggaatgtaaactgattaaacaattaaataaagaagattatgttgtgtgttttaaaaaaaaat

SEQ ID NO: 465421 - DNA, 1586 bp, Homo sapiens
gctaaattaatgattagacatgaacatgaggaggctatctttctggcacatggacccagttttaaagagaagactgaagttgaaccatttgaaaatattgaagtctataacctaatgtgtgagtactcagctggaacaagtgaatcagatgctaaatctcacccaagaagaaagactctccaaaataagctgacagaggttcctgaacataaagattttattgccaatatacaaaagggtactgcagaagaacgtggaccactgtctcctttaccacagggaatatgtcagtggatttggaaaagctatgaggatgcccatgtggagttcatacacagtcccccagttgataaaggttgttataggtgctacacgggtgcaaaagaggaacacattgtgttttacctggagaaaatggaaaatgtttacaggccaattggccaattgggagacacatcgcctctgcctcccactgtcccagactgtctgcgggctgatgtcagggttcctccttctgagagccaaaaatgttccttctatttagcagacaagaatatcacccacggcttcctctatcctcctgccagcaatagaacatcagatagccaatatgatgctttaattactagcaatttggtacctatgtatgaagaattcagaaaaatgtgggactacttccacagtgttcttcttataaaacatgccacagaaagaaatggagtaaatgtggttagtggaccaatatttgattataattatgatggccattttgatgctccagatgaaattaccaaacatttagccaacactgatgttcccatcccaacacactactttgtggtgctgaccagttgtaaaaacaagagccacacaccggaaaactgccctgggtggctggatgtcctaccctttatcatccctcaccgacctaccaacgtggagagctgtcctgaaggtaaaccagaagctctttgggttgaagaaagatttacagctcacattgcccgggtccgtgatgtagaacttctcactgggcttgacttctatcaggataaagtgcagcctgtctctgaaattttgcaactaaagacatatttaccaacatttgaaaccactatttaacttaataatgtctacttaatatataatttactgtataaagtaattttggcaaaatataagtgatttttttctggagaattgtaaaataaagttttctatttttccttaagtcccctaaaagccataatttttattattcctttttctcttttttcaattctatgaatatgtattattttaaagttatatttttcacacagagatgatgctatattacaccttcccttttttgttggtttcttaaactctaatctcatgacagattataccttccttattacttgttttatcttactcagaatctttgaatatatttttctgcccagaattatctaaacaaaagggagaacaaaagaagtatgtctcacttgggaactgaatcaactctaaatcagttttgtcacaaaactttttgtatttgactggcaatgctgattaaaattaaaaatgcacagaacttttgc

SEQ ID NO: 465422 - DNA, 1230 bp, Homo sapiens
gctaaattaatgattagacatgaacatgaggaggctatctttctggcacatggacccagttttaaagagaagactgaagttgaaccatttgaaaatattgaagtctataacctaatgtgtgagtactcagctggaacaagtgaatcagatgctaaatctcacccaagaagaaagactctccaaaataagctgacagaggttcctgaacataaagattttattgccaatatacaaaagggtactgcagaagaacgtggaccactgtctcctttaccacagggaatatgtcagtggatttggaaaagctatgaggatgcccatgtggagttcatacacagtcccccagttgataaaggttgttataggtgctacacgggtgcaaaagaggaacacattgtgttttacctggagaaaatggaaaatgtttacaggccaattggccaattgggagacacatcgcctctgcctcccactgtcccagactgtctgcgggctgatgtcagggttcctccttctgagagccaaaaatgttccttctatttagcagacaagaatatcacccacggcttcctctatcctcctgccagcaatagaacatcagatagccaatatgatgctttaattactagcaatttggtacctatgtatgaagaattcagaaaaatgtgggactacttccacagtgttcttcttataaaacatgccacagaaagaaatggagtaaatgtggttagtggaccaatatttgattataattatgatggccattttgatgctccagatgaaattaccaaacatttagccaacactgatgttcccatcccaacacactactttgtggtgctgaccagttgtaaaaacaagagccacacaccggaaaactgccctgggtggctggatgtcctaccctttatcatccctcaccgacctaccaacgtggagagctgtcctgaaggtaaaccagaagctctttgggttgaagaaagatttacagctcacattgcccgggtccgtgatgtagaacttctcactgggcttgacttctatcaggataaagtgcagcctgtctctgaaattttgcaactaaagacatatttaccaacatttgaaaccactatttaacttaataatgtctacttaatatataatttactgtataaagtaattttggcaaaatataagtgatttttttctggagaattgtaaaataaagttttctatttttcctta

SEQ ID NO: 465423 - DNA, 7893 bp, Homo sapiens
catatgccaagtactgccaaagaggttcttgcatttgaaggcaggggacctaaagaaaaagaaggggctacctgtgtggatgtctacgggaggagcatttcaggccatgggaacagcaagtgcaaaggccctgaggcgcgagtgtgcatggaaggtacaaggagacctaaaacaccagcctcaagtgacttctccgaccttaatactcagacgaactggaccaagtcgcttccactgccaacaccagaagagaagatgcgacagcaagcccaaacagtccaggctgacgtggtgcctattaacataactggggagaatttcgatcgccaggccagccttcggcggtctctaatttacacagacactctggtaagacgaccgaagaaagtcaaaaggagaaagactattacaggagtccctgacaacatacagaaggagctaggcagccacagtgacccagatggtatacaggtgtttgccctgttctatcatggattggtttattacaaacaaaggcaagactgcagcagctcccgtgggattgtgaagtctgtctttggtaacaagcctctttctgctttatctccagcatcaggcactggccaagatgatgctgatggccactcagtgtacacccctgatcactactctacactaggaaggttcaatagctgtcggtctgctgggcagcgctcagaaaccagggactccagctgtcagacggaggatgtgaaggtcgtaccaccttccatgaggagaatcagggcacagaaggggcaaggcattgctgcccagatgggccacttctcaggttcctctggcaacatgtctgtgctgagcgattctgcagggatcgtattcccttcccgccttgacagtgatgctggcttccatagtcttccgcgttctggagcaagggcaaacattcagtcccttgagccgaggctgggtgccctcggccctgcaggagacatgaatggcactttcctctaccagagaggtcacccacaagcagatgaaaacttaggccatttaggaggtgcctcagggactggaacacttttgagacccaaatcccaggagttgagacacttcgagagtgaaaatataatgagcccagcgtgtgtggtttctcctcatgcaacctactccaccagcatcatcccaaatgccacactgtcttcctcttccgaggtcatcgctattcccactgctcagagtgcgggacagcgggaaagtaaaagttctggctcatcacatgcaaggataaaatccagagaccacctcatctccaggcatgctgtgaaaggtgatcctcagtctcccggtcgccactggaatgagggccatgccaccattctttcacaggacttagaccctcattcccctggtgaacccgcactgttgtccctctgtgactcagccgtccctctaaatgctccagcaaatagggagaatgggtcccaagctatgccgtataattgtagaaacaacctggccttcccagcccacccccaagatgtggatggcaagagtgaatctagttattcagggggcggagggcacagcagctcggagccctgggaatacaaatcctcaggtaatggaagggcatcccccctgaagccgcatttagcaactcctggctattccactcccacaagtaacatgagcagctgcagtttggaccaaacgtccaacaaagaggatgctgggtcgctgtattctgaggaccacgatggctactgtgcatctgtgcacactgactctggacatggatctgggaatctgtgcaatagcagtgatggctttgggaaccccaggcacagcgtgatcaatgtttttgttggaagagctcagaaaaaccaaggggaccggtccaattaccaggataaatccctatcaagaaacatctctttgaagaaagcaaagaagcctcccctgccaccctcccggacagactccctccgcaggattcccaagaagagcagccagtgcaacgggcaggtgctcaacgagagcctgatcgccacactccagcactcgctgcagctgagcctcccaggcaagagtggcagctcgccctcccagagcccctgcagtgacttggaagagccctggctgccccgctcccggagccagagcacagttagtgctggcagcagcatgacttccgccaccacccccaatgtctactccctgtgcggggccacgccatcgcagagtgacacaagcagcgtcaagtcagagtacacggacccctggggttattacattgactacacgggcatgcaggaagatccggggaacccggcagggggctgttcaaccagcagtggggtgcccactgggaacgggccagtccgccatgtccaagaagggtccagagccacaatgccccaagtgcccggtggttcagtcaaaccaaagatcatgtcaccagagaagtcacacagagtcatttctccatccagtgggtattccagccagtcgaatacacccacagcactcacccctgtgcctgtgtttttaaaatcagtgtcaccagcaaacgggaaggggaagcccaagcccaaggtaccagaaaggaagtcctctctgatatcttcagtatccatttcctcatcgtccacttctctttcttctagtacttctactgaaggaagtggcactatgaagaagctggatccagccgtgggctctcccccggctcctcctcctcctcctgttccctctcctccattcccttgtcctgcagacaggtctcctttccttcctcccccacctcctgtcacagattgctcccagggctctcctctgcctcactctcctgtgttcccccctccgccgccagaagctctcattcctttctgctccccacctgattggtgcctttctcctccccgccctgcactgagccccattcttccagattcacctgtgtccttgccattgcccccacctctcttaccttcctcggaacccccacctgccccacctcttgaccccaaattcatgaaagacaccaggccgcctttcacaaattctggccagccagaatcctcccggggatccttgaggccgccttctaccaaggaggagaccagcaggccccccatgcccctgataaccacggaagcattgcagatggtgcagttgaggcccgtgagaaagaactcaggcgctgaggcggcacagttgtctgaacgaacagctcaggaacaacgaactccagttgctccacagtaccacttaaagccatctgctttcctgaaatcccgaaatagcacaaatgaaatggagagtgaaagccagcctgcctctgtgacaagctcgcttccgacgcctgccaagagctcgagtcagggtgaccatggcagtgcggctgagcgtggtggccctgtgagccgcagccctggagctccaagcgctggggaggcagaggctcggcccagccccagcaccaccccactcccagactcttcacccagcaggaagccaccccccatttccaagaagcccaaactgttcctggtggtaccacctccgcagaaagattttgcagtggagcccgcagagaacgtgagcgaagccctccgagctgtgcccagccccacgacgggagaggagggctctgtgcacagcagggaggcaaaagagagttctgcagcccaagctggctctcatgccacgcaccctggcacctcggttcttgagggaggagctgcaggatccatgtctcccagcagagtggaagccaatgtccccatggttcagcctgatgtctcaccagcccccaagcaggaggagccagccgagaacagtgcggatactgggggcgatggggagagctgcctatctcaacaggacggagcagctggggtgccggagaccaacgcagccggttcatcctcagaggcctgtgacttcctcaaggaagacgggaatgatgaggtaatgacccccagtcgacccaggaccacagaagacctttttgcagctattcacagatccaaaaggaaagtcctcggccgtagagattcagatgatgaccactcccgaaaccattctccctccccgcccgtgacacccaccggcgctgccccaagcctggcctctccaaagcaagtggggtcgattcagagaagcatccgaaagagcagcaccagcagtgacaacttcaaagctctgctgctgaaaaagggcagtcgttcagacaccagcgcccgcatgtctgcagcagagatgctcaagaacacagaccctagattccagaggtcgaggtcagagccttccccagatgcccccgagagcccgtcaagctgctccccaagcaagaacagaagggcgcaggaggagtgggccaagaacgaaggcttgatgcctcggagtctgtccttttccggccccaggtacggccgcagccgaacgccgccttctgccgccagcagcaggtacagcatgcggaaccggatccagagcagccccatgaccgtcatctcggagggagaaggggaagccgtggagcctgtggacagcatagcccgcggggctctgggcgctgcggagggatgttccctggacggactggcgagggaggagatggacgagggcggcctgctctgtggggaggggcctgccgcctccctgcagccccaggcccccggccctgtggatgggacagccagtgcagagggcagagagccctccccacagtgtggcggttctctgagcgaggagagttagggccaagaacgtaactctcccaggtgacacggggggagacgagcaatgcagcactctaggaagcctgctaggcgcccttccctggctcacccggggagcccactctgcttctgtgctgtgggccccggggttgccagccctgcagtgtgagtgaacggttatttaggactcacctggcacttgccctgtggcttaagaacaagtagaagcttaaacttctgaaagtgcttcccggggaagattttttttttttttttttttttttgctaaatgctgggtgtgtatgtgtgcattttccacactttttaatttttaaaaaatacacatatacacaaacaacatgtacagaaatagaagaaagcaagccagacttaagcttggtagagtaacggagtcctctggtctaggcggtaattgctttcagagaattacgtttatagaaatcagcgagttttgtaagaaaggagaagatgttacttcaagaaagaggcagtagagttgctggttcttaatgcacagaacacacagatatatgcacacgtgtgctgctgaggtgaggcaggtctggtgagcacggagaggctgggaaggggctaagtgactaattggttcaggtacttttttctgggggaggtagactttgcttcttttttgtaaaaatgacaaacgtagaagtggcaatgctgtaacctggtgcctgctgctgtgcagccacatacacacaattgtagcctgatttttagaagtgtgggtaattttttaatgaatttcctccttgagtagcagctgaggtcattgacaactgaagtgatggtgtggacatagagagaggggaagggttggaaaggagtaagtgatacactgctggaatttgtttcctgcctatgaaataaaattatttttcagaattaaatttgaaaacttgcactacagaactatgggtggagcttttccttttacaacagtttttttttttttttttttttaaccagagtttaaacttccattaggcaatttcctgtcacttgaaatgtcaacatttgctaacttttggatatccttttggttacaccaaagaaaaagttatggctatttttttttccttgaactgcctacagtatcatgtcctaattcagaaagatttatcaaaatctattatatattatcttactttgaagaaaatgctgaatagctcttgttagtcaaataaactgataaaaattggtagggcctggctatcaattagccctgggaaatgaatttttagattaaaaaggtttttttgcatcatttggtttgtgcatttttatatttgtttataaataattgagttgctaattacttctaatcttctccaatcagattttcaacaattttagacatgggacacacgtgtgtgaagtctttattttaatgtaataatctcattacccccacccttactcccttaacttccatgtacttagactcctttatttgttaaataaactagagtattgtcttcttcattagaaggacctaggatgacaatgcggagagtcttggtctgaatctagtgcgactaccacctgccagcttttggggggtatggaaatactatctaaaagttggactgcatgggtcaaatcattatgagacttataaactaaaactttagatacccatatagaaatgtctttgaggcaaaaacaaacctaaagaatgaaggctctttcccttctctgaaaaaaacaaaacactgctcttcacacaaccggaagtcaagaccagagatttggagcaattgtctactaatttggcacaaagatcgtttctttagaaaagtggcattggcttttgaatatgaaatcttctcatagctgcctaaaaaagactagaatgtatatggatatcagaaacctttaataatacataatttatgcaaagataagataaagcaacataacactaattataaaactatttttaaatccccatttttaatgaaaaatatacatttgtatttaatttcctttgaataaaacaattgtaaagtaaatatttgaaatatttctttttgtttatacatgcattttttttgaataatgagataggtgttcttatacagaattgttgagtgttttgctggatacaaacagaaaagcagtgagaccagaaggtctctgggggaggtgacaacccaacagaggaggtggaacatcacagacactggatggcaccatctacaagggcacgtggaaaaacaagtccacatcgtgtcctatggactttggaataaaatacgaataacctatcgcctggcggttcagatgacgtggcatgtggagagacgtgagaacttcttacaggcatggatgaaatacagggagagaagaatcgagactcatccctgaaacatggcaccttccatgtggctactctactccttggggcccgcttctgttatggaccgcatcttaaaaagctccacaggggtagatctgatggctctcataccctcatactttaagttccagataatcacagaagccccagccctaaattatttccactttatttttactatcagtggggagagaaacaaattactgcttggtctgtcagttggaaacaacctcaatgcgatctgctttctgccatcctactatttctgaagaatcttgattgaactcttgcttttcctgtgggggtgactgtatattccttaggagaatcacagtgaaaaggagacgtttctgtgtctccgtctttctccccacccaccactggcaccctgctctgtggtggcatcttaggaggagaggggaaagagtggctttcttggttctgccgtagtaggggttcagcctgcatgcgatgctgattccatcatcaaatgagcacagcagcataatttgctttggcagatgtgaggatgttgttgggggaatggagggtcatttgaatgaaacatggacctgattgttgcgccactttccttaataagccactcggtaactgtaatacagtttctctcagttgcctgctctgacctaccttccacagcggccagcctttattcacagaacaagaggtagagcaatctgtagtcatttgttcagcaatgggggaaaaaaagtcctaataaatgcttctcatgtgctaggt

SEQ ID NO: 465424 - DNA, 925 bp, Homo sapiens
tctcctcttctctcctcttctctttctttcacaggggtgttggatggccacccatagggattctgaggccactcaggataacaacaggagcttgaaaatgaccaaagatcggaaggagagacatgatactgccaaatgtcaggaacatcaggaggaggaatttgatggggtcctgagagaggaggctgtggccaaagcactccatcacttggggcgctcaggctctgggactgagcaagtctacctcaatctaactttatcaggttgtaatttaattgatgttagcattctctgtggatatgttcatctacagaagttggatctttcagcgaataaaattgaagaacttaatgcttctcaaaataatttgactacgttcttcaatttcaagccacccaaaaacctcaagaaggcggatttttcccacaaccaaatttctgaaatttgtgatttgtcagcgtatcatgctctcactaaactaattttggatggcaatgagatagaagaaatcagtggactagagatgtgcaacaacctaattcaccttagtttggccaacaataagatcacgacaattaatggcttaaacaagttaccaatcaaaatactttgtctgagcaataaccagattgagatgatcacaggtttggaggatctgaaagccctgcagaacctggatctgtcccacaatcagataagcagcctccaaggcttagagaatcatgacctcctggaagtgatcaacctggaggataataagaagcaagatatcagtctgggagtgacttcgaaaaacgctgtcttacttctctaagtctcagtgtcgttatgtcacactgttggttcccaattacttttctgaatttttgtgaggattcacaaggtaatactcataaagcaatggcagcatggagagaacttgaat

SEQ ID NO: 465425 - DNA, 841 bp, Homo sapiens
caagacgcaacacacaaaacaaacaacaaaccacacaacaacaaactctcgagtctcgtcggacgcgtggatgtatacgagcacgaggggtcaggtctcagagtctgcatggcagtcaccattgtcttgacttgggaaagaatctgacccccgcagatccttcaatcaggggctgctgctgagcttatgatgatttttcttctaaaggtcagcaactcattggggctgatggcgtccctgccctgggcagacaggcaggacttgctcatgagtctctgtatcactcagctccaggagactcagaatctcaccaggacacgtccatcactctctcatagctggtacttggaaatgaaagagactcgcagtgcagtcccaatcaatgtccgtcggccgtctctgtcgataactgccgggctgtccaatctttcccctgatagaaaggcgcctgggggtcagcctgaagaagctctggagggaagaggcggctgtttgattcagagcctcctcgctgggctggaattaacctggctctttctctaatgaaactgactccaagggtccctgtgtgctagagattcaatggcccttaggagaagcaatgatgagaggtaatattaaagcagtgtacacatgcagcctcgaattcctaaccacgctgatgatgttttcaaggtgctttgagccctgtaggaagcagcacctgtctggcatgatgctgaatgcacagtagaaacagtgaatgcagggagagtagaccctgggctgcctttcctatctactgatgaagagatcaggccttaagaagcttagtgacttaaccacgatgtcagagcacctt

SEQ ID NO: 465426 - DNA, 1744 bp, Homo sapiens
tccattgacaccaactaggtgggtgatgtgtttatgtgagatgctagaaatggtacacttgcccaacacttgcacaagaactcacagtaatgcccaatttgatgcaaaggttacagtgaactgcaatgtggtttgggcaaagtcggtttttacacttcagctggggatgaatgagttccctctaaagcgacggggaggaagtaagaatgccaccaacggaagtccttgccgagtactggatgctcagggctcaaagaagcctcaggctcgaggttcacagtgctacgatcaggcaagggagaaaatgcatgggattgggaatttctggcaagactgggaaatgtctccggatttctccccgctgtactccgcttggtcactgcagctccactgagctgtcccttccctcctccctctctttctgcttgggtcttcagtaggtttgaactctccctcctcccacccaagacagctgagtttgaattttggctgcaagattatatttaatgatcatggaccaggaagggagacctagagggcaagcctcattaaatatttatatgaagtaataatctggtttgcaaaactgcctgggtgcttgcagagctggggccactctttatccaaggctgttgatacaagggacacggttaattatctcttgccaaacataataaacctgtgcgaagtcattctctgagcattgcctgggtcagggtctcagagtctgcatggcagtcaccattgtcttgacttgggaaagaatctgacccccgcaggtaaggggaagagccagggtctacgctcatcttccgaaggtgtttttcacctctccaagtcccggtcacttcatctcttagatgggagttaatttagtcaacaaatattgattgccatgttcctatgtgttggacactggggtttagtggtgagctagatggacatggtccctgttctcacaatgctctcttttaaataagagaggtgaacaagaagtgaataaatgaatctacgcacagtgcgatggctgtcaggcagagaaaggtgctataaagaaagatccttcaatcaggggctgctgctgagcttatgatgatttttcttctaaaggtcagcaactcattggggctgatggcgtccctgccctgggcagacaggcaggacttgctcatgagtctctgtatcactcagctccaggagactcagaatctcaccaggacacgtccatcactctctcatagctggtacttggaaatgaaagagactcgcagtgcagtcccaatcaatgtccgtcggccgtctctgtcgataactgccgggctgtccaatctttcccctgatagaaaggcgcctgggggtcagcctgaagaagctctggagggaagaggcggctgtttgattcagagcctcctcgctgggctggaattaacctggctctttctctaatgaaactgactccaagggtccctgtgtgctagagattcaatggcccttaggagaagcaatgatgagaggtaatattaaagcagtgtacacatgcagcctcgaattcctaaccacgctgatgatgttttcaaggtgctttgagccctgtaggaagcagcacctgtctggcatgatgctgaatgcacagtagaaacagtgaatgcagggagagtagaccctgggctgcctttcctatctactgatgaagagatcaggccttaagaagcttagtgacttaaccacgatgtcagagcacctt

SEQ ID NO: 465427 - DNA, 1712 bp, Homo sapiens
gagctcctggtgtatcacttctggaccttctgagtcccaggatgcaatcagccctgcaaatacccgaccttttctctaactacctgttcattgtctcaaaaagcgctgtgactgccgatgcaacgtttgtgaggagtcctacagagtgcgctgccccctgcaacctcaattactgcaacagtcccttccacctcaagctccacagtctgactttcaaggccagctttgactcctccctccttctccaacctacttctgacaccgcaaatattcctaaacaccctacaacttacaaagctctagatgcctgtaggatgcacttttatgtaacagtaaccatcgcaatgataacatttgttcatccaacacatattgagtgcttgctgtgtgtcaggcccccttcaagcctccaaggagactccagagaacaaagtctctgctcttgtgggttgacactggggaggaggcttctctagtctgtttttttttttcatagatcccttattggtcacactcatttccacctctacaaatgttccctccttccttctcagcctctttcctcccctccacttatccaaatcctccattttccatagaagccagccaggctgaaaatagcatgttatgttcctacatgtgatcactggtatatctaaacataaacactaccttatcacctctactccctcccacagggatacacacctacctaccgagagacctccaaacagagacatcaacacagaaacctccgcagagataaccagatctccatatgcaaacccatgtaaaaagaaacctagagaaacagatgcccagatgaagaggggtttccagacagattcttggctgacgtttctgtcagtggtgtgaaaggacatttacccagattctatagatattttggttatgcactcaacaaacctacaatgaaactaccagaatacaaaagcaattgtgaactccagagagtgctagaaaacattatggaagagggtatagtttatgttaattatagaggactaaagagatgtagaataggagagctgaaaaagcctccacttccagtggctcttagagtgtaattagtccaagggacagcaagctgccttctagcagaatcgttgtgatcccaaagcccacatgactggggcctctctctggtcctttatacagtaattaatatttaaaagatctcgctaaagccctgtcaagtcctgaagcaagattttgaaaaataaaaaaactcataaaacacaaaatagaacaaaacaatgagctctgagtttgctttgttgaaagcaatgggttgaattgtgtctccccataatatgtattttgaagtcctaacctctagtaccttagggtgtgaccttatttggagatgcagacattacagaagtaatcaagttaaagtgaggtcattgggatgggccctaatctgatacaactggtaatttggacacagacacattcaggcagaacaccatgtgaacataaagatggtcaggtacaagccaaaggggagaggcctggaacagatccttccttcacaggcctcagaaggaaccaaccctgccaacatcttgatcttggacttctggcctccagacctgtgagacaacaaatttgtgatcttttgttatgacaatcctagcaaaatacactgtgacacccagtttctaatctgatgacaaacggaggcatct

SEQ ID NO: 465428 - DNA, 1442 bp, Homo sapiens
gccgtgcccctcatccccacagatatgtggcatcccactggtctcctaaccacccaacgccgttgctcctgaccattggaaacgctggtggggctggagcacctggacagtccagtctcgttctagtggctggactggagtggggttgccttgaacccgtcttaggctggaaatgcccccagcagcagtgccaggggaactctcactggggcctgccctgggagccccggggaacacttgtcagttcagctctgaccttaagccacccgtgggcttctggtcatattgtgatgaccctcgaaagtgacggatgccgtgaggccgtgggaacaggagctaggaggctgcaggccggccgccttcagtccacagaagccagatttgaggaggtgacggtggacaggcctgtgaacattccgctcttgctggagccaggcgaggctgccggaggggtgctgggctgcagcatccctggggcaggtgcctgtctccctgcctgttggagggagaatgatttccttgctgccaccatcaccactgccatgaccattactatcaccatcaccaccactgccaccattgccatcaccatcaccaccactgccaccaccatcactatcaccaccaccaccactgccgtgaccatcactatcaccatcaccaccactgccaccactgccatcaccatcaccaccactgtcaccaccatcactatcaccatcactatcaccaccactgccatgaccatcactatcaccaccaccaccactgccatgaccatcactatcactatcaccaccaccactgccatgaccatcactatcaccatcaccaccactgccatgaccatcactatcactatcaccaccactgccatgaccatcactatcaccatcaccaccactgccatgaccatcactatcaccatcaccaccactgccatgaccatcactatcaccatcaccaccactgccatgaccatcactatcactatcaccaccactgccatcaccatcgctatcaccatcaccaccactgccaccattgccatcaccaccaccatcactgatcaccatcaccatcaccatcaccaccattgccatcaccatcactatcaccaccaccaccactgccatcaccatcactatcaccaccaccaccactgccatcaccatcactatcactatcactgccatcaccatcactattaccatcaccaccactgccaccactgccatcaccatcactatcaccatcaccaccactgccatgaccatcactatcaccaccactgccaccactgccatcaccatcactatcaccatcaccaccactaccatgaccatcattatcaccaccaccaccactgccaccactgccatcaccatcaccaccatcactgatcaccatcaccatcaccttcattgccatcaccattacta

SEQ ID NO: 465429 - DNA, 832 bp, Homo sapiens
gcagcgccgtcagggcatgaggatggccgtgggctccgtcaagatgcagccgccgtgcgagagcccggccctggccgccgcggcggcggtggtggcggcagacggccccctgcgccgcagccccagcgcccgggagcccgagcgcgagcagccgccggcgtcgctgcggccgcggctgagggacctgcccgcgctgctgcggagcgggctcacgctgcggaggaagcggagcgccgctgggggccggactctatcaagaagaatatctaatccgtaccttgaacatacgccttcccagatttatggagagaattcttcttgtgcaggaagagcattgaggaatattattatcgttcaagcagctgacctgataaaggacagagtgaacctcaaggggttttacaggaggagctgcgttgggtcagagctggtagactggcttctagaacactgtcctttcgtccagtgcagatctatggccataggagtctggcaactcctactggacatgggaattatgttatcagtggaccagcatctatactttcaagatacttatgttttctaccagttttcctctgatgaatgtagctacttgtactgtgaatttgaaagagaagaagaatggcaaaatggtgtcaagcttttactgcaacttgtgcctctcattcctgccagaggtggcatctgtgaactgtctcatcagaaaattgaagactccgaagaaagcagtgatgaaattcttgtgcgtctaacatctgcggtgcagagagagctagcagctgttattgctttgaaagcaaggaagtctgcaattgaacaagatgaagaa

SEQ ID NO: 465430 - DNA, 1075 bp, Homo sapiens
  misc_feature (1063)..(1064): n is a, c, g, or t
  misc_feature (1066)..(1068): n is a, c, g, or t
  misc_feature (1070)..(1070): n is a, c, g, or t
  misc_feature (1072)..(1072): n is a, c, g, or t
gcagcgccgtcagggcatgaggatggccgtgggctccgtcaagatgcagccgccgtgcgagagcccggccctggccgccgcggcggcggtggtggcggcagacggccccctgcgccgcagccccagcgcccgggagcccgagcgcgagcagccgccggcgtcgctgcggccgcggctgagggacctgcccgcgctgctgcggagcgggctcacgctgcggaggaagcggagcgccgctgggggccgggctgcacctgacttaaccccagggcccccagattcaggctgcgggaccgggcatcggctgaagacgagctgtttgcctcttctcggaggggaagctgcaggtgtccagcgtccaacagccagccagccctgtcccaaccgcaagcttcaggccccacgagcggcatccctgtttgcaggacgcatgcgacgtgtgtgcttgttttggaggtgctgttgcaagctctgggcatcgagactggttttggtggtctccaccgccgaggggcagacccaggagtcggaagctcttgggtgagcttccagttcctgggttccggtgtctccagcacttaatactcctggacaccctcttgagcaggagggtgcacgcccccaagaaccttcaatattgacttcctgatggtgtgttcagatacgatttcctggtgaaggagtgtccctcattgagttctaagtgcatctaatgacctgagcaggtcaggcatgttttgtatttttaagagaagcaggaaggtctgctgattgtctcctgggatctttaagaagccacctaggaggccccgccagggcctcaggacacagagctgacttactcagatttccctgctcaccagggtttggcggcacctttggtgggttctactcatcttttaaaaatttattattaagtggtctttaatgagaagctgcatcaatgtggtttttctttcccgtttggctgtaatttttaaaatgcagtcttgtctgacttaaaacaagaccttgctgggagacttctagctctttcagagatgggtttgtgtaaacttgagannannntnancac

SEQ ID NO: 465431 - DNA, 931 bp, Homo sapiens
gcagcgccgtcagggcatgaggatggccgtgggctccgtcaagatgcagccgccgtgcgagagcccggccctggccgccgcggcggcggtggtggcggcagacggccccctgcgccgcagccccagcgcccgggagcccgagcgcgagcagccgccggcgtcgctgcggccgcggctgagggacctgcccgcgctgctgcggagcgggctcacgctgcggaggaagcggagcgccgctgggggccggactctatcaagaagaatatctaatccgtaccttgaacatacgccttcccagatttatggagagaattcttcttgtgcaggaagagcattgaggaatattattatcgctcaagcaatcctcctgcctcagcctcccaaagcgctgggattataggcatcagccaccatggttggcctagataaattgttattatattttgcctttcaagagaaaaactaaaagaaatagaaacagattttttttgtgtttgcctgagtttatttcacaggtggaaatcaaagatggtcttaatgtatttttgcaggatggggagacattgactaaattatattttaaaatattagcaaagcctgaaataaagtttattccaattttgcaattgtatatcagtgttaaagaatatataatgctgtccaacaaccctcaagtgtttgatgtcatagcattccctattcctagtcatctttttaatgtgtccaagacactcagcttatcattttggagacaacaagaatagattggtttagaatatgccaagctgctgttgcattcctagtcatttaaacactttgcctttgaggttgttatttttatgtaattttaacagcatagtttacatatggtcatcgtgtataaattaggaaatgctaataagtacaataaaaataaatcgagatgctctaa

SEQ ID NO: 465432 - DNA, 1344 bp, Homo sapiens
aggtcccatggggcagccctgccagcccagcccaggctggcccagcttagccacacatgcgccatgaagtaccctttgatgccgctggtgaacgacctcacattttctttcctggttttctggttctgcctccctgtgggtttgctgttgttattgatcatctggctacgcttcttacttagccaagattcagaggaaaatgactccagtgtgtgcttggattgggagccctggagcaaaggcccagctgagttttgctggaaggggacactccacggccaagagaaggagaggccctgctggtgagcctgctgtgccaggtgaggcccttccaggggccagggggagcctcaaggcccacccaaagccttgggcagctgctatgtgggcaagaggctgcctccaccatattagagtttggttttcctggagtcagcagggcagtggcaatggcagaagtggatgggagagacttgccagggaggcaagaggactttggcaactgtggtgcctccctggaacccccaactcatctcctcttcagaccgacatgtgaaagcctccagaggtcccagcccttctccagcatcacagatgacctccagccctgcagggagccgctcaagtctgggagggcatgggagcagtgagcaggcccatggggagaaattggccaatttaattcagaggggtcttaaagcagggctgggccggagggtgtgggtccatattaaagaagcaagggtcttcccatacccgggggacccctgacaaacctaccaggcctgaccaagtcattcattcaaccagcgtaggtgcagaaagccaccttttgggatttgagccccactgaatttgctggatgaggtttctattcttacccacaggctacaatgaacactcttgaacctaaatccttgcccacaagtgtgcttctatccagagaacacattctgaaaggagaaattgttgaatataagacatgcatttacattttgcagaaactaagttgctcgaccaaaaagtggccccaagggtacattagaagtacctgtttccccagtcctttgccccgctgtgcaatcccaacatgctctcttacatacagacacacacacgcattatcacacactcacacacaccctcatacacacactctcatagacacacacagacacacaccctcatacagacacacatacacacacacaccctcatacagacacacatatgcacacagacacacaccctcatacagacacacatacacacactgtcacacagacacaccctcatagacacacactgtcacacagacacacatacacagacacacaccctcat

SEQ ID NO: 465433 - DNA, 452 bp, Homo sapiens
aggtcccatggggcagccctgccagcccagcccaggctggcccagcttagccacacatgcgccatgaagtaccctttgatgccgctggtgaacgacctcacattttctttcctggttttctggttctgcctccctgtgggtttgctgttgttattgatcatctggctacgcttcttacttagccaagatattctgcaagtcagaagatacagatatgatgcaaacattttaacagcttcatgacaagccatcagacggagggtccgggtctccatgtggtgtgactctcccacagcttagtcacccagatctctcgtgatctgtggacgtggacacagtttccaggtgttttattgttcgtgtgtgcgtgtttcatcacaaaacagggctacagtggagatcattgtgcctttgtactcagatgtttgttaatgaatgaactagtggaaaag

SEQ ID NO: 465434 - DNA, 1230 bp, Homo sapiens
aggtcccatggggcagccctgccagcccagcccaggctggcccagcttagccacacatgcgccatgaagtaccctttgatgccgctggtgaacgacctcacattttctttcctggttttctggttctgcctccctgtgggtttgctgttgttattgatcatctggctacgcttcttacttagccaagattcagaggaaaatgactccagtgtgtgcttggattgggagccctggagcaaaggcccagctgagttttgctggaaggggacactccacggccaagagaaggagaggccctgctgtttggttttcctggagtcagcagggcagtggcaatggcagaagtggatgggagagacttgccagggaggcaagaggactttggcaactgtggtgcctccctggaacccccaactcatctcctcttcagaccgacatgtgaaagcctccagaggtcccagcccttctccagcatcacagatgacctccagccctgcagggagccgctcaagtctgggagggcatgggagcagtgagcaggcccatggggagaaattggccaatttaattcagaggggtcttaaagcagggctgggccggagggtgtgggtccatattaaagaagcaagggtcttcccatacccgggggacccctgacaaacctaccaggcctgaccaagtcattcattcaaccagcgtaggtgcagaaagccaccttttgggatttgagccccactgaatttgctggatgaggtttctattcttacccacaggctacaatgaacactcttgaacctaaatccttgcccacaagtgtgcttctatccagagaacacattctgaaaggagaaattgttgaatataagacatgcatttacattttgcagaaactaagttgctcgaccaaaaagtggccccaagggtacattagaagtacctgtttccccagtcctttgccccgctgtgcaatcccaacatgctctcttacatacagacacacacacgcattatcacacactcacacacaccctcatacacacactctcatagacacacacagacacacaccctcatacagacacacatacacacacacaccctcatacagacacacatatgcacacagacacacaccctcatacagacacacatacacacactgtcacacagacacaccctcatagacacacactgtcacacagacacacatacacagacacacaccctcat

SEQ ID NO: 465435 - DNA, 3485 bp, Homo sapiens
  misc_feature (1)..(1): n is a, c, g, or t
  misc_feature (4)..(4): n is a, c, g, or t
  misc_feature (6)..(8): n is a, c, g, or t
  misc_feature (470)..(470): n is a, c, g, or t
  misc_feature (475)..(475): n is a, c, g, or t
  misc_feature (479)..(480): n is a, c, g, or t
  misc_feature (482)..(483): n is a, c, g, or t
  misc_feature (485)..(485): n is a, c, g, or t
naantnnnaggatttggatcttgtttttttgggttccaatcccttgctccagttaaaaaactaccacataaaatggtgagaaaggacctgaaaaacgtgttcccacccgaggtcgctgtgtttgagccatcagaagcagagatctcccacacccaaaaggccacactggtatgcctggccacaggcttctaccccgaccacgtggagctgagctggtgggtgaatgggaaggaggtgcacagtggggtcagcacagacccgcagcccctcaaggagcagcccgccctcaatgactccagatactgcctgagcagccgcctgagggtctcggccaccttctggcagaacccccgcaaccacttccgctgtcaagtccagttctacgggctctcggagaatgacgagtggacccaggatagggccaaacccgtcacccagatcgtcagcgccgaggcctggggtagagcagnctgtncttnncnncngagtcttaccagcaaggggtcctgtctgccaccatcctctatgagatcttgctagggaaggccaccttgtatgccgtgctggtcagtgccctcgtgctgatggccatgggaaagcagcattcccttggacatctgaagtgacagccctctttctctccacccaatgctgctttctcctgttcatcctgatggaagtcctcaaacaccatttccatacccaggcattctgggtccccactggagggttagtctgaagggcaatggctgggctttggaaaaccagcaagatgaggacagagaggaaggcacacagcaaaccataagcccttacccagtgcaggacagaggatgcgggcagacctatgggttacaatgtctggtcatttcccaattccagattaaactgtcacctgttttacctttagttttattagtttgtagtcttaacacctccagcttctcttgtttcaggatttgggcttaaaattgagtgctactctgcatgtctagtttgaaatactagagaaggcagagttgagacaactgatatgtaaagcctggggaagagtgatttctcaggagcgagacacactaagtcaggagcaatgggatatagggcccagtgggggctgaagtgctatgttcagagtagcccttccaatgggcttcttcgtttgatggatggaaaccaaaccactccaaacacaaggtgttaactgctcctacttgggcaaagacagttatcctgtcaaggcatggtcttaggatttagggcccaccctaaatccagaacaattttattgagagatcttaacaaattatacctgccaagtccctatttccaaataagtcctgagtggggatggggtggagagaaagtggacagtgggtggtgggagatacagggagaaagaatgagaattgctcttgttctcaagggtaccgcatcacgttttcctctggctggcagtctttaacaccagcgtatcctatgagacctgacttcactcatcagctgcatcagctcagtgtcattaccacatgtagacagcaatgtaatcctccttcttagagatgctgcagcagattggagggtgaagagatgtatcagtcagatcagagtaaccagctggctcctggctcctgatcattgtcacagctcagtagctggaagctccttccatatggctgatgcctttaaaaaaatctcctcaatctccatccccatctgcaatactgtttagttattcaatcatttaagtcattcatgtattgaaaagaggatggggatatgatccctctgctctgtggcagtagatctactaatgggagagtcctggccgcacatctggcctgggtctggaggtgcctacggaattgaaagctggctggaactgtcatcttaacatgtcctggtcatcttaacgtgtccacctctctggcaagcctcttttcaagtctttttgttaccatcttcagctttttccctccatactagattcttaatgaattgctgccaacaagagaaagctttatacatgaagagaatggcaataagaactaactcgtctttttaattttaaaactggtatatattcctatataataggaatggaagatacttgcaaagcctatttgttcctctacagaagagttaaaaattacctgggctaatggaaagaagggagagtcagccaattagatgctcctgaatgccctgaattgtgacttacctcttcttatccacatcctgatcaaggaaagggatgagagagaggtggagagagaagaaatggaaattcaaaagttttgacggcagaggaaaattgtgcttatttccagaatgagacgaacaaggtcctgggtccctacatgtcatactggctagagactgggaaacagattaactgagagaagccatcaagcctgaagagacatcgtgtttgaaatgtgtaaggcacagtgtacccgccgtggatcaaaacaacctgaaggacagacagacagacacaccgaggatcagcagatatcagtggggacaggtgctgatgatggtgcaaatgagagtcatgaaggaaagttaaatgatgaccaaagaccaagtaccttccccacaatgctttgacaagcgcttttataagcaccctggaatttagacactacccggggagaaaaggaaagggagacaagcatgaattgtctgagaaacccctgaattaatcatgtgtaccccaatgcaacaaggatctagatatagaataattttaattatagaaaacaaaattatattttacccacccatatttgatgcccatgaatttcacatctaccttacgtgcacataaaattcaagcttagatagacggaaaacaaaaaatcaagaagcaatatttgccttctaataacttatctattggaggaggtaaaagatagaaaagtagttcagatgacaaatactaaaagagttaggaacttctgcttccacttacgatgaaggaacttgtactcaatccatccactttgtaattctccttgagctgctgtaataaagtaccacaaactgggtgacttaaaacaacagaatttattgtctcatggttctggagcctagaagtctaaaatcaaggtatcaacagagctatgcttcctctgaaacctggaaggaaattcttccttgcctattcctagcttctgttgatttgctggcaaattttgacattccttaacttgcagctacataactttaaactctgcctttggcattacatggcattttccctgtgtgtttctgtcttcccacggctgtcttcttacaagtacatcagtcatattaggagtccacagtgctccagtatgacctcatcttaactagtcacacttgcaatgaccctattttcaaacagagtcacattctgaggtactgagggttgggatgtcaacatatctttttctggggggatggtgggtataattcaatccattataccctccaataataaa

SEQ ID NO: 465436 - DNA, 2913 bp, Homo sapiens
ctagctccaaaaccatcccagggaaagcagcattcccttggacatctgaagtgacagccctctttctctccacccaatgctgctttctcctgttcatcctgatggaagtcctcaaacaccatttccatacccaggcattctgggtccccactggagggttagtctgaagggcaatggctgggctttggaaaaccagcaagatgaggacagagaggaaggcacacagcaaaccataagcccttacccagtgcaggacagaggatgcgggcagacctatgggttacaatgtctggtcatttcccaattccagattaaactgtcacctgttttacctttagttttattagtttgtagtcttaacacctccagcttctcttgtttcaggatttgggcttaaaattgagtgctactctgcatgtctagtttgaaatactagagaaggcagagttgagacaactgatatgtaaagcctggggaagagtgatttctcaggagcgagacacactaagtcaggagcaatgggatatagggcccagtgggggctgaagtgctatgttcagagtagcccttccaatgggcttcttcgtttgatggatggaaaccaaaccactccaaacacaaggtgttaactgctcctacttgggcaaagacagttatcctgtcaaggcatggtcttaggatttagggcccaccctaaatccagaacaattttattgagagatcttaacaaattatacctgccaagtccctatttccaaataagtcctgagtggggatggggtggagagaaagtggacagtgggtggtgggagatacagggagaaagaatgagaattgctcttgttctcaagggtaccgcatcacgttttcctctggctggcagtctttaacaccagcgtatcctatgagacctgacttcactcatcagctgcatcagctcagtgtcattaccacatgtagacagcaatgtaatcctccttcttagagatgctgcagcagattggagggtgaagagatgtatcagtcagatcagagtaaccagctggctcctggctcctgatcattgtcacagctcagtagctggaagctccttccatatggctgatgcctttaaaaaaatctcctcaatctccatccccatctgcaatactgtttagttattcaatcatttaagtcattcatgtattgaaaagaggatggggatatgatccctctgctctgtggcagtagatctactaatgggagagtcctggccgcacatctggcctgggtctggaggtgcctacggaattgaaagctggctggaactgtcatcttaacatgtcctggtcatcttaacgtgtccacctctctggcaagcctcttttcaagtctttttgttaccatcttcagctttttccctccatactagattcttaatgaattgctgccaacaagagaaagctttatacatgaagagaatggcaataagaactaactcgtctttttaattttaaaactggtatatattcctatataataggaatggaagatacttgcaaagcctatttgttcctctacagaagagttaaaaattacctgggctaatggaaagaagggagagtcagccaattagatgctcctgaatgccctgaattgtgacttacctcttcttatccacatcctgatcaaggaaagggatgagagagaggtggagagagaagaaatggaaattcaaaagttttgacggcagaggaaaattgtgcttatttccagaatgagacgaacaaggtcctgggtccctacatgtcatactggctagagactgggaaacagattaactgagagaagccatcaagcctgaagagacatcgtgtttgaaatgtgtaaggcacagtgtacccgccgtggatcaaaacaacctgaaggacagacagacagacacaccgaggatcagcagatatcagtggggacaggtgctgatgatggtgcaaatgagagtcatgaaggaaagttaaatgatgaccaaagaccaagtaccttccccacaatgctttgacaagcgcttttataagcaccctggaatttagacactacccggggagaaaaggaaagggagacaagcatgaattgtctgagaaacccctgaattaatcatgtgtaccccaatgcaacaaggatctagatatagaataattttaattatagaaaacaaaattatattttacccacccatatttgatgcccatgaatttcacatctaccttacgtgcacataaaattcaagcttagatagacggaaaacaaaaaatcaagaagcaatatttgccttctaataacttatctattggaggaggtaaaagatagaaaagtagttcagatgacaaatactaaaagagttaggaacttctgcttccacttacgatgaaggaacttgtactcaatccatccactttgtaattctccttgagctgctgtaataaagtaccacaaactgggtgacttaaaacaacagaatttattgtctcatggttctggagcctagaagtctaaaatcaaggtatcaacagagctatgcttcctctgaaacctggaaggaaattcttccttgcctattcctagcttctgttgatttgctggcaaattttgacattccttaacttgcagctacataactttaaactctgcctttggcattacatggcattttccctgtgtgtttctgtcttcccacggctgtcttcttacaagtacatcagtcatattaggagtccacagtgctccagtatgacctcatcttaactagtcacacttgcaatgaccctattttcaaacagagtcacattctgaggtactgagggttgggatgtcaacatatctttttctggggggatggtgggtataattcaatccattataccctccaataataaa

SEQ ID NO: 465437 - DNA, 2934 bp, Homo sapiens
tgaagggcaatggctgggctttggaaaaccagcaagatgaggacagagaggaaggcacacagcaaaccataagcccttacccagtgcaggacagaggatgctgctttctcctgttcatcctgatggaagtcctcaaacaccatttccatacccaggcattctgggtccccactggagggttagtctgaagggcaatggctgggctttggaaaaccagcaagatgaggacagagaggaaggcacacagcaaaccataagcccttacccagtgcaggacagaggatgcgggcagacctatgggttacaatgtctggtcatttcccaattccagattaaactgtcacctgttttacctttagttttattagtttgtagtcttaacacctccagcttctcttgtttcaggatttgggcttaaaattgagtgctactctgcatgtctagtttgaaatactagagaaggcagagttgagacaactgatatgtaaagcctggggaagagtgatttctcaggagcgagacacactaagtcaggagcaatgggatatagggcccagtgggggctgaagtgctatgttcagagtagcccttccaatgggcttcttcgtttgatggatggaaaccaaaccactccaaacacaaggtgttaactgctcctacttgggcaaagacagttatcctgtcaaggcatggtcttaggatttagggcccaccctaaatccagaacaattttattgagagatcttaacaaattatacctgccaagtccctatttccaaataagtcctgagtggggatggggtggagagaaagtggacagtgggtggtgggagatacagggagaaagaatgagaattgctcttgttctcaagggtaccgcatcacgttttcctctggctggcagtctttaacaccagcgtatcctatgagacctgacttcactcatcagctgcatcagctcagtgtcattaccacatgtagacagcaatgtaatcctccttcttagagatgctgcagcagattggagggtgaagagatgtatcagtcagatcagagtaaccagctggctcctggctcctgatcattgtcacagctcagtagctggaagctccttccatatggctgatgcctttaaaaaaatctcctcaatctccatccccatctgcaatactgtttagttattcaatcatttaagtcattcatgtattgaaaagaggatggggatatgatccctctgctctgtggcagtagatctactaatgggagagtcctggccgcacatctggcctgggtctggaggtgcctacggaattgaaagctggctggaactgtcatcttaacatgtcctggtcatcttaacgtgtccacctctctggcaagcctcttttcaagtctttttgttaccatcttcagctttttccctccatactagattcttaatgaattgctgccaacaagagaaagctttatacatgaagagaatggcaataagaactaactcgtctttttaattttaaaactggtatatattcctatataataggaatggaagatacttgcaaagcctatttgttcctctacagaagagttaaaaattacctgggctaatggaaagaagggagagtcagccaattagatgctcctgaatgccctgaattgtgacttacctcttcttatccacatcctgatcaaggaaagggatgagagagaggtggagagagaagaaatggaaattcaaaagttttgacggcagaggaaaattgtgcttatttccagaatgagacgaacaaggtcctgggtccctacatgtcatactggctagagactgggaaacagattaactgagagaagccatcaagcctgaagagacatcgtgtttgaaatgtgtaaggcacagtgtacccgccgtggatcaaaacaacctgaaggacagacagacagacacaccgaggatcagcagatatcagtggggacaggtgctgatgatggtgcaaatgagagtcatgaaggaaagttaaatgatgaccaaagaccaagtaccttccccacaatgctttgacaagcgcttttataagcaccctggaatttagacactacccggggagaaaaggaaagggagacaagcatgaattgtctgagaaacccctgaattaatcatgtgtaccccaatgcaacaaggatctagatatagaataattttaattatagaaaacaaaattatattttacccacccatatttgatgcccatgaatttcacatctaccttacgtgcacataaaattcaagcttagatagacggaaaacaaaaaatcaagaagcaatatttgccttctaataacttatctattggaggaggtaaaagatagaaaagtagttcagatgacaaatactaaaagagttaggaacttctgcttccacttacgatgaaggaacttgtactcaatccatccactttgtaattctccttgagctgctgtaataaagtaccacaaactgggtgacttaaaacaacagaatttattgtctcatggttctggagcctagaagtctaaaatcaaggtatcaacagagctatgcttcctctgaaacctggaaggaaattcttccttgcctattcctagcttctgttgatttgctggcaaattttgacattccttaacttgcagctacataactttaaactctgcctttggcattacatggcattttccctgtgtgtttctgtcttcccacggctgtcttcttacaagtacatcagtcatattaggagtccacagtgctccagtatgacctcatcttaactagtcacacttgcaatgaccctattttcaaacagagtcacattctgaggtactgagggttgggatgtcaacatatctttttctggggggatggtgggtataattcaatccattataccctccaataataaa

SEQ ID NO: 465438 - DNA, 5065 bp, Homo sapiens
tgggaggcggggccgaccaagagcaggagctggagtctgagccggtggttgcagcggaggcggtgatgtcggtgcaggttgtgtcagccgcggctgccgccaaggtgcctgaggtggagctgaaggacctgagcccctccgaggcggagtcgcaactaggactgagcacggccgccgtgggcgccatggcccccccggcgggcggtggagaccctgaggctccagctcccgccgcggagcggcccccggtccccggcccgggctcggggcccgccgccgctctcagccccgccgccgggaaggtgcctcaggcgtcggccatgaagcggagcgacccacatcaccagcaccagcggcaccgcgacggcggcgaggccctggtcagccccgacggcaccgtcaccgaggcgccgcgcacagtcaagaagagatccagtttgctgaccagaagcaagaattcaacaaacgtcccaccaaaattggacgtcgctctttgtctcgttccatttctcagtcatctactgacagctacagctcagcggcttcatatacagatagctctgatgatgagacatcgcccagggacaagcagcaaaagaactctaagggaagcagtgacttctgtgttaagaacatcaaacaggcagagtttggacgaagagaaattgaaattgctgaacaagaaatgcctgcattgatggctttgaggaagagagctcaaggagaaaagcctttggctggagccaaaatcgtgggttgcacacacatcactgctcagactgctgtgcttatggaaactctgggtgctctgggggcccagtgccgatgggctgcctgcaacatctattccactctcaatgaagtggctgctgctctagcagaaagtggatttcctgtttttgcctggaagggagagtcagaagatgacttttggtggtgtatcgatagatgtgtgaatgtggagggctggcagccaaacatgatcttggatgatggaggggatcttacccactggatttataaaaagtatcccaacatgtttaagaaaatcaagggcatagtagaggagagtgttactggagttcacaggctgtaccaactgtccaaagctgggaagctgtgtgttccagccatgaatgtcaatgactcagtcaccaaacagaaatttgacaacctctactgttgccgtgaatcaattcttgatggacttaaaaggacaacagacatgatgtttggtggaaagcaagtggtagtctgtggctatggagaggtggggaaagggtgctgtgctgccctgaaagccatgggctccattgtgtatgtaactgaaattgaccccatctgtgccctgcaagcctgtatggatggatttcgactggtgaaattaaatgaggtcatccgacaagtggacattgttattacctgtacaggtaacaagaatgtggtaaccagagagcacttggaccgtatgaagaatagctgcatcgtttgtaacatgggacattccaacacagagattgacgtggcgagtctgcggacaccagaactgacctgggagcgagtgagatctcaagttgaccatgtgatatggcctgatggcaagaggatagtactgctggcagagggccgcctgctgaaccttagctgctccacagtgcctacatttgtgctctcaatcactgctactactcaggctcttgccttgatagagctttacaatgctcctgagggtcgctataagcaggatgtctacctgttgcccaagaagatggatgagtatgtggccagcctacacctgcctacctttgatgcccacttgacagagctgacagatgaacaggccaagtatctgggactcaacaagaatgggcccttcaagcctaattactacaggtattaagttcctgtaactcaaaccagaatttttaaggaatagaactccaagccttttctccactactatacaagaaagaattcagcaagctgcttctccaatcaaagctgcctgccgtgctcaccctgtgtgttaggttatttatttattaaaatcaagaatcctgtgcctgtagtgttggcccagagtgtggttactgccctgagggccatgaaagccacagaggatgggctgaggaaggaaagaaatggggttactgctcccagtgcatcatttgcatcattccccattgactgaatcctcagcagtggccgtttttcctcttgtccaggctcacgagttagtccagggattccatactccctattccctggagttttctggaataaattttcagcacctgcttttctcagcttggcccttccccgggtgaggccgtttggaattaacatggccagtgtttcacacaagattgggttcccaatcttgaccatcactatcactgccttctttatataaaggctaataaggaaggagtgttatttatggctttgccaagctacatcaagaactcagctgtgctgtgcctaccaggggtctcctttcttacccaggactcctttcttctccttgaatatttatgtccattttaacacttcctggttgcaagagggatgtgcctccattatttcctccacagttttggtatttgtcagacatttgttctgctgtctttctaatccagccaacgtctgctcaggaagtggggccagctccactgggacccatagttttacttccttgtcatttgattggatagtttccaaggaagcccctccagattggcactatctcagaaaaggagagcttgttgtgaaacactgcttcctgaaacttcctgctattgcctaaagctacgtctgaaactgagtagggaaaggcatacttttccagggacttagggggataggctttggaaatgggacaggtctttcagactcacagcttgataccctaacaaagcagagtatatttatttgtttcccaggaaggccattgcagtttgactggctgagggatacagagatgaaattgtaaactgtatccagattatcaaagctaatttgactagtttgaacctcgtcagacattcattcctttggccattgccatggatgaaaccgagatctgcagtctgatctgtggacttctctgctggcatatcttttatgatttaacctcttccatttgatgattctgtatttcagagtcagtttcttgagtaactccagtgctacaaaaagaattagtaatgtggtgtgggcagcgtgacattttatgtcccacccaaaaattggattccttttggagactgatctgttggtctcaggcatttcattaggaccagattggttctaagagttagtctggactggccctaggaaacttgaattaaataagcctcttccccttaccgatcctttttaacactctcaggtttgtttgtttcccacttttttcctatgctggtctgcctcaaagtctcaagaccaaggtgactcaagataacaccagaccacgcatgatcaccaaaaccttcccatcctgattctcttcttctacctctaccctctccaacttctcctggtcttcacatatactctcaaagctagtctgaaagtgaccttactttcggaagtagggaagtggaactttggtaaatgactgtttgcctcatttaatagtatacaggctcagcccatagactacagttcttcagaggccatatgtctcagcaagtactggttatattctttttttgtaaggaagatcataaatgctaaaaattccactaagccattcagttcttccttttgcctacctagtcctgatttttgtattaattggttccctttagcaagggattcagatctttgtaccttatcttatatccagagcagattccatttggcagatagatggtctctagcctattgtattcttagaccaaaaatcataacctgctgtttctcagcaaagccttgctctctggagcttactatgtgctggtacttaaagagtacattctgccttgctatagtgaagagacccactccaaataaaaaaggggccacacggggcttctaagttaggttgccagtgttgctgcccatgatgagttatttgcctctgagtttcagatgacctctctgtagggacactgtgttatcaaccattaagaagaaagaaccacaagcctcccaagtatttgggttctatcttagggttgaaatctggtcattattccctctacccttggaatcagagcaatgtgtcttctttcctccaacctcttaccttagatgcatcctggttatctggaagcatgggaaagaaggctacttatctctttgtatgtggctccagtctgtgaggatacataacattttctctacaatgaatctgtgctaatattttgccttctttctttcttttcttttcacccttagagacagggtttcactatgttgcccaggctggtctcaaactcctgggctcaagcaatcctcctgcctcagcttcctgagtagctggaaccacaggtgtgtgctaccgtgcctggcacttttttgccttcttaatggagatattcagttttctttttttcatttaaacaaagaaaaaaaatgtatctactctaccttccctctgctctcctccctccctatcctacttgcccatatgagcacggctccccatggccacatactcctgcaaagcttttatgctgcttcgcttttctctaaacagatctgatattgctgctcctgtggttttctcaaaattaactttgccgtggtttttaaaaaggaatcaaaatgcattgttgcattaagctttttcaataaaggaaaattacggaaggaaaataggcaacaccagcaaattatatgtggacaggttctaaactctatatatacatatatatatatatatctatatatctatatacgtaatcatctagttctgtcatcttactgaaaggaataacacttctaaagatcaccatttctgagaagttcttggaaatctttatgtctaagtgattgtattagatcagcaataatgactatgtaatctcaaaaaacaaataaaatattcttaacatgg

SEQ ID NO: 465439 - DNA, 2068 bp, Homo sapiens
tgggaggcggggccgaccaagagcaggagctggagtctgagccggtggttgcagcggaggcggtgatgtcggtgcaggttgtgtcagccgcggctgccgccaaggtgcctgaggtggagctgaaggacctgagcccctccgaggcggagtcgcaactaggactgagcacggccgccgtgggcgccatggcccccccggcgggcggtggagaccctgaggctccagctcccgccgcggagcggcccccggtccccggcccgggctcggggcccgccgccgctctcagccccgccgccgggaaggtgcctcaggcgtcggccatgaagcggagcgacccacatcaccagcaccagcggcaccgcgacggcggcgaggccctggtcagccccgacggcaccgtcaccgaggcgccgcgcacagtcaagaagagatccagtttgctgaccagaagcaagaattcaacaaacgtcccaccaaaattggacgtcgctctttgtctcgttccatttctcagtcatctactgacagctacagctcagcggcttcatatacagatagctctgatgatgagacatcgcccagggacaagcagcaaaagaactctaagggaagcagtgacttctgtgttaagaacatcaaacaggcagagtttggacgaagagaaattgaaattgctgaacaagaaatgcctgcattgatggctttgaggaagagagctcaaggagaaaagcctttggctggagccaaaatcgtgggttgcacacacatcactgctcagactgctgtgcttatggaaactctgggtgctctgggggcccagtgccgatgggctgcctgcaacatctattccactctcaatgaagtggctgctgctctagcagaaagtggatttcctgtttttgcctggaagggagagtcagaagatgacttttggtggtgtatcgatagatgtgtgaatgtggagggctggcagccaaacatgatcttggatgatggaggggatcttacccactggatttataaaaagtatcccaacatgtttaagaaaatcaagggcatagtagaggagagtgttactggagttcacaggctgtaccaactgtccaaagctgggaagctgtgtgttccagccatgaatgtcaatgactcagtcaccaaacagaaatttgacaacctctactgttgccgtgaatcaattcttgatggacttaaaaggacaacagacatgatgtttggtggaaagcaagtggtagtctgtggctatggagaggtggggaaagggtgctgtgctgccctgaaagccatgggctccattgtgtatgtaactgaaattgaccccatctgtgccctgcaagcctgtatggatggatttcgactggtgaaattaaatgaggtcatccgacaagtggacattgttattacctgtacaggtaacaagaatgtggtaaccagagagcacttggaccgtatgaagaatagctgcatcgtttgtaacatgggacattccaacacagagattgacgtggcgagtctgcggacaccagaactgacctgggagcgagtgagatctcaagttgaccatgtgatatggcctgatggcaagaggatagtactgctggcagagggccgcctgctgaaccttagctgctccacagtgcctacatttgtgctctcaatcactgctactactcaggctcttgccttgatagagctttacaatgctcctgagggtcgctataagcaggatgtctacctgttgcccaagaagatggatgagtatgtggccagcctacacctgcctacctttgatgcccacttgacagagctgacagatgaacaggccaagtatctgggactcaacaagaatgggcccttcaagcctaattactacaggtattaagttcctgtaactcaaaccagaatttttaaggaatagaactccaagccttttctccactactatacaagaaagaattcagcaagctgcttctccaatcaaagctgcctgccgtgctcaccctgtgtgttaggttatttatttattaaaatcaagaatcctgtgcctgta

SEQ ID NO: 465440 - DNA, 5171 bp, Homo sapiens
tgggagtgccttcctgacctcagtctttattgatcttggtatccgcacctccagtgacgtgtcctgaagggtgggagagaattcacaagtgcctcacacacagggaaagaaggaagtccaactattgctgcagaaagtccccactggggaggtgcgggtagagtgtttgggtagcattaaaacagtgagtgccctgtgagaagcacagtgcctgggtgcagcactttgcatcagctctgattttgaaatcagacacagaaggctttgaagccggccagtaaggggttgtcaggcagttgactaatgctcttgatttgaatcggaggctgctgtgaaaagggatgcagcttctgctagccactgtgaacttctgaatctcactagggttgggtctgctttggggcactcagataaccccagtatttccaaaccagctttcccttttgcttcaggacatatcttacccaagcctgcactatggagaagtgggacggtaatgagggcacctcagcttttcacatgcctgagtggatgagatccagtttgctgaccagaagcaagaattcaacaaacgtcccaccaaaattggacgtcgctctttgtctcgttccatttctcagtcatctactgacagctacagctcagcggcttcatatacagatagctctgatgatgagacatcgcccagggacaagcagcaaaagaactctaagggaagcagtgacttctgtgttaagaacatcaaacaggcagagtttggacgaagagaaattgaaattgctgaacaagaaatgcctgcattgatggctttgaggaagagagctcaaggagaaaagcctttggctggagccaaaatcgtgggttgcacacacatcactgctcagactgctgtgcttatggaaactctgggtgctctgggggcccagtgccgatgggctgcctgcaacatctattccactctcaatgaagtggctgctgctctagcagaaagtggatttcctgtttttgcctggaagggagagtcagaagatgacttttggtggtgtatcgatagatgtgtgaatgtggagggctggcagccaaacatgatcttggatgatggaggggatcttacccactggatttataaaaagtatcccaacatgtttaagaaaatcaagggcatagtagaggagagtgttactggagttcacaggctgtaccaactgtccaaagctgggaagctgtgtgttccagccatgaatgtcaatgactcagtcaccaaacagaaatttgacaacctctactgttgccgtgaatcaattcttgatggacttaaaaggacaacagacatgatgtttggtggaaagcaagtggtagtctgtggctatggagaggtggggaaagggtgctgtgctgccctgaaagccatgggctccattgtgtatgtaactgaaattgaccccatctgtgccctgcaagcctgtatggatggatttcgactggtgaaattaaatgaggtcatccgacaagtggacattgttattacctgtacaggtaacaagaatgtggtaaccagagagcacttggaccgtatgaagaatagctgcatcgtttgtaacatgggacattccaacacagagattgacgtggcgagtctgcggacaccagaactgacctgggagcgagtgagatctcaagttgaccatgtgatatggcctgatggcaagaggatagtactgctggcagagggccgcctgctgaaccttagctgctccacagtgcctacatttgtgctctcaatcactgctactactcaggctcttgccttgatagagctttacaatgctcctgagggtcgctataagcaggatgtctacctgttgcccaagaagatggatgagtatgtggccagcctacacctgcctacctttgatgcccacttgacagagctgacagatgaacaggccaagtatctgggactcaacaagaatgggcccttcaagcctaattactacaggtattaagttcctgtaactcaaaccagaatttttaaggaatagaactccaagccttttctccactactatacaagaaagaattcagcaagctgcttctccaatcaaagctgcctgccgtgctcaccctgtgtgttaggttatttatttattaaaatcaagaatcctgtgcctgtagtgttggcccagagtgtggttactgccctgagggccatgaaagccacagaggatgggctgaggaaggaaagaaatggggttactgctcccagtgcatcatttgcatcattccccattgactgaatcctcagcagtggccgtttttcctcttgtccaggctcacgagttagtccagggattccatactccctattccctggagttttctggaataaattttcagcacctgcttttctcagcttggcccttccccgggtgaggccgtttggaattaacatggccagtgtttcacacaagattgggttcccaatcttgaccatcactatcactgccttctttatataaaggctaataaggaaggagtgttatttatggctttgccaagctacatcaagaactcagctgtgctgtgcctaccaggggtctcctttcttacccaggactcctttcttctccttgaatatttatgtccattttaacacttcctggttgcaagagggatgtgcctccattatttcctccacagttttggtatttgtcagacatttgttctgctgtctttctaatccagccaacgtctgctcaggaagtggggccagctccactgggacccatagttttacttccttgtcatttgattggatagtttccaaggaagcccctccagattggcactatctcagaaaaggagagcttgttgtgaaacactgcttcctgaaacttcctgctattgcctaaagctacgtctgaaactgagtagggaaaggcatacttttccagggacttagggggataggctttggaaatgggacaggtctttcagactcacagcttgataccctaacaaagcagagtatatttatttgtttcccaggaaggccattgcagtttgactggctgagggatacagagatgaaattgtaaactgtatccagattatcaaagctaatttgactagtttgaacctcgtcagacattcattcctttggccattgccatggatgaaaccgagatctgcagtctgatctgtggacttctctgctggcatatcttttatgatttaacctcttccatttgatgattctgtatttcagagtcagtttcttgagtaactccagtgctacaaaaagaattagtaatgtggtgtgggcagcgtgacattttatgtcccacccaaaaattggattccttttggagactgatctgttggtctcaggcatttcattaggaccagattggttctaagagttagtctggactggccctaggaaacttgaattaaataagcctcttccccttaccgatcctttttaacactctcaggtttgtttgtttcccacttttttcctatgctggtctgcctcaaagtctcaagaccaaggtgactcaagataacaccagaccacgcatgatcaccaaaaccttcccatcctgattctcttcttctacctctaccctctccaacttctcctggtcttcacatatactctcaaagctagtctgaaagtgaccttactttcggaagtagggaagtggaactttggtaaatgactgtttgcctcatttaatagtatacaggctcagcccatagactacagttcttcagaggccatatgtctcagcaagtactggttatattctttttttgtaaggaagatcataaatgctaaaaattccactaagccattcagttcttccttttgcctacctagtcctgatttttgtattaattggttccctttagcaagggattcagatctttgtaccttatcttatatccagagcagattccatttggcagatagatggtctctagcctattgtattcttagaccaaaaatcataacctgctgtttctcagcaaagccttgctctctggagcttactatgtgctggtacttaaagagtacattctgccttgctatagtgaagagacccactccaaataaaaaaggggccacacggggcttctaagttaggttgccagtgttgctgcccatgatgagttatttgcctctgagtttcagatgacctctctgtagggacactgtgttatcaaccattaagaagaaagaaccacaagcctcccaagtatttgggttctatcttagggttgaaatctggtcattattccctctacccttggaatcagagcaatgtgtcttctttcctccaacctcttaccttagatgcatcctggttatctggaagcatgggaaagaaggctacttatctctttgtatgtggctccagtctgtgaggatacataacattttctctacaatgaatctgtgctaatattttgccttctttctttcttttcttttcacccttagagacagggtttcactatgttgcccaggctggtctcaaactcctgggctcaagcaatcctcctgcctcagcttcctgagtagctggaaccacaggtgtgtgctaccgtgcctggcacttttttgccttcttaatggagatattcagttttctttttttcatttaaacaaagaaaaaaaatgtatctactctaccttccctctgctctcctccctccctatcctacttgcccatatgagcacggctccccatggccacatactcctgcaaagcttttatgctgcttcgcttttctctaaacagatctgatattgctgctcctgtggttttctcaaaattaactttgccgtggtttttaaaaaggaatcaaaatgcattgttgcattaagctttttcaataaaggaaaattacggaaggaaaataggcaacaccagcaaattatatgtggacaggttctaaactctatatatacatatatatatatatatctatatatctatatacgtaatcatctagttctgtcatcttactgaaaggaataacacttctaaagatcaccatttctgagaagttcttggaaatctttatgtctaagtgattgtattagatcagcaataatgactatgtaatctcaaaaaacaaataaaatattcttaacatgg

SEQ ID NO: 465441 - DNA, 4931 bp, Homo sapiens
acccttaaaagtgatggcagtacttattccattgagagatacaaagcgttttctagagagtgtttcttaaccccccaaaaaacttgggggttaagaactatcttcagaagctcaaacacaaatcagggaaggacactgcttcaaataatctagcaaatggacctctgcgtgttctgaagataaagttagccctacatttcaagttaaggctatccaggaagaatgtctttggcaatctctttcagcttccctcttctggcatgtgtatagcctgcaggtacttaacagaggtaaaaaaatttatatggtgctaggtggctagagaagcttcagtttgctccatggtttggaattttagaggaagcatttttttttttccgagtgttttttattctgtcattccagcggcttcatatacagatagctctgatgatgagacatcgcccagggacaagcagcaaaagaactctaagggaagcagtgacttctgtgttaagaacatcaaacaggcagagtttggacgaagagaaattgaaattgctgaacaagaaatgcctgcattgatggctttgaggaagagagctcaaggagaaaagcctttggctggagccaaaatcgtgggttgcacacacatcactgctcagactgctgtgcttatggaaactctgggtgctctgggggcccagtgccgatgggctgcctgcaacatctattccactctcaatgaagtggctgctgctctagcagaaagtggatttcctgtttttgcctggaagggagagtcagaagatgacttttggtggtgtatcgatagatgtgtgaatgtggagggctggcagccaaacatgatcttggatgatggaggggatcttacccactggatttataaaaagtatcccaacatgtttaagaaaatcaagggcatagtagaggagagtgttactggagttcacaggctgtaccaactgtccaaagctgggaagctgtgtgttccagccatgaatgtcaatgactcagtcaccaaacagaaatttgacaacctctactgttgccgtgaatcaattcttgatggacttaaaaggacaacagacatgatgtttggtggaaagcaagtggtagtctgtggctatggagaggtggggaaagggtgctgtgctgccctgaaagccatgggctccattgtgtatgtaactgaaattgaccccatctgtgccctgcaagcctgtatggatggatttcgactggtgaaattaaatgaggtcatccgacaagtggacattgttattacctgtacaggtaacaagaatgtggtaaccagagagcacttggaccgtatgaagaatagctgcatcgtttgtaacatgggacattccaacacagagattgacgtggcgagtctgcggacaccagaactgacctgggagcgagtgagatctcaagttgaccatgtgatatggcctgatggcaagaggatagtactgctggcagagggccgcctgctgaaccttagctgctccacagtgcctacatttgtgctctcaatcactgctactactcaggctcttgccttgatagagctttacaatgctcctgagggtcgctataagcaggatgtctacctgttgcccaagaagatggatgagtatgtggccagcctacacctgcctacctttgatgcccacttgacagagctgacagatgaacaggccaagtatctgggactcaacaagaatgggcccttcaagcctaattactacaggtattaagttcctgtaactcaaaccagaatttttaaggaatagaactccaagccttttctccactactatacaagaaagaattcagcaagctgcttctccaatcaaagctgcctgccgtgctcaccctgtgtgttaggttatttatttattaaaatcaagaatcctgtgcctgtagtgttggcccagagtgtggttactgccctgagggccatgaaagccacagaggatgggctgaggaaggaaagaaatggggttactgctcccagtgcatcatttgcatcattccccattgactgaatcctcagcagtggccgtttttcctcttgtccaggctcacgagttagtccagggattccatactccctattccctggagttttctggaataaattttcagcacctgcttttctcagcttggcccttccccgggtgaggccgtttggaattaacatggccagtgtttcacacaagattgggttcccaatcttgaccatcactatcactgccttctttatataaaggctaataaggaaggagtgttatttatggctttgccaagctacatcaagaactcagctgtgctgtgcctaccaggggtctcctttcttacccaggactcctttcttctccttgaatatttatgtccattttaacacttcctggttgcaagagggatgtgcctccattatttcctccacagttttggtatttgtcagacatttgttctgctgtctttctaatccagccaacgtctgctcaggaagtggggccagctccactgggacccatagttttacttccttgtcatttgattggatagtttccaaggaagcccctccagattggcactatctcagaaaaggagagcttgttgtgaaacactgcttcctgaaacttcctgctattgcctaaagctacgtctgaaactgagtagggaaaggcatacttttccagggacttagggggataggctttggaaatgggacaggtctttcagactcacagcttgataccctaacaaagcagagtatatttatttgtttcccaggaaggccattgcagtttgactggctgagggatacagagatgaaattgtaaactgtatccagattatcaaagctaatttgactagtttgaacctcgtcagacattcattcctttggccattgccatggatgaaaccgagatctgcagtctgatctgtggacttctctgctggcatatcttttatgatttaacctcttccatttgatgattctgtatttcagagtcagtttcttgagtaactccagtgctacaaaaagaattagtaatgtggtgtgggcagcgtgacattttatgtcccacccaaaaattggattccttttggagactgatctgttggtctcaggcatttcattaggaccagattggttctaagagttagtctggactggccctaggaaacttgaattaaataagcctcttccccttaccgatcctttttaacactctcaggtttgtttgtttcccacttttttcctatgctggtctgcctcaaagtctcaagaccaaggtgactcaagataacaccagaccacgcatgatcaccaaaaccttcccatcctgattctcttcttctacctctaccctctccaacttctcctggtcttcacatatactctcaaagctagtctgaaagtgaccttactttcggaagtagggaagtggaactttggtaaatgactgtttgcctcatttaatagtatacaggctcagcccatagactacagttcttcagaggccatatgtctcagcaagtactggttatattctttttttgtaaggaagatcataaatgctaaaaattccactaagccattcagttcttccttttgcctacctagtcctgatttttgtattaattggttccctttagcaagggattcagatctttgtaccttatcttatatccagagcagattccatttggcagatagatggtctctagcctattgtattcttagaccaaaaatcataacctgctgtttctcagcaaagccttgctctctggagcttactatgtgctggtacttaaagagtacattctgccttgctatagtgaagagacccactccaaataaaaaaggggccacacggggcttctaagttaggttgccagtgttgctgcccatgatgagttatttgcctctgagtttcagatgacctctctgtagggacactgtgttatcaaccattaagaagaaagaaccacaagcctcccaagtatttgggttctatcttagggttgaaatctggtcattattccctctacccttggaatcagagcaatgtgtcttctttcctccaacctcttaccttagatgcatcctggttatctggaagcatgggaaagaaggctacttatctctttgtatgtggctccagtctgtgaggatacataacattttctctacaatgaatctgtgctaatattttgccttctttctttcttttcttttcacccttagagacagggtttcactatgttgcccaggctggtctcaaactcctgggctcaagcaatcctcctgcctcagcttcctgagtagctggaaccacaggtgtgtgctaccgtgcctggcacttttttgccttcttaatggagatattcagttttctttttttcatttaaacaaagaaaaaaaatgtatctactctaccttccctctgctctcctccctccctatcctacttgcccatatgagcacggctccccatggccacatactcctgcaaagcttttatgctgcttcgcttttctctaaacagatctgatattgctgctcctgtggttttctcaaaattaactttgccgtggtttttaaaaaggaatcaaaatgcattgttgcattaagctttttcaataaaggaaaattacggaaggaaaataggcaacaccagcaaattatatgtggacaggttctaaactctatatatacatatatatatatatatctatatatctatatacgtaatcatctagttctgtcatcttactgaaaggaataacacttctaaagatcaccatttctgagaagttcttggaaatctttatgtctaagtgattgtattagatcagcaataatgactatgtaatctcaaaaaacaaataaaatattcttaacatgg

SEQ ID NO: 465442 - DNA, 4212 bp, Homo sapiens
cccgggatgtgggtgagcccccgaatgacttttgaataaaatctttattgtgaagctatatatgcaggctctagaaagatattctttatttctcagtggccacctaacaggatgaaactagtcatgtctcatggtctcatgcctacccaatcaacgtatttctggggcctcctatgaaagcaatggtagattgtaatgtcctggtgttttttgttcttggcttccctcatcctcaggctgtaccaactgtccaaagctgggaagctgtgtgttccagccatgaatgtcaatgactcagtcaccaaacagaaatttgacaacctctactgttgccgtgaatcaattcttgatggacttaaaaggacaacagacatgatgtttggtggaaagcaagtggtagtctgtggctatggagaggtggggaaagggtgctgtgctgccctgaaagccatgggctccattgtgtatgtaactgaaattgaccccatctgtgccctgcaagcctgtatggatggatttcgactggtgaaattaaatgaggtcatccgacaagtggacattgttattacctgtacaggtaacaagaatgtggtaaccagagagcacttggaccgtatgaagaatagctgcatcgtttgtaacatgggacattccaacacagagattgacgtggcgagtctgcggacaccagaactgacctgggagcgagtgagatctcaagttgaccatgtgatatggcctgatggcaagaggatagtactgctggcagagggccgcctgctgaaccttagctgctccacagtgcctacatttgtgctctcaatcactgctactactcaggctcttgccttgatagagctttacaatgctcctgagggtcgctataagcaggatgtctacctgttgcccaagaagatggatgagtatgtggccagcctacacctgcctacctttgatgcccacttgacagagctgacagatgaacaggccaagtatctgggactcaacaagaatgggcccttcaagcctaattactacaggtattaagttcctgtaactcaaaccagaatttttaaggaatagaactccaagccttttctccactactatacaagaaagaattcagcaagctgcttctccaatcaaagctgcctgccgtgctcaccctgtgtgttaggttatttatttattaaaatcaagaatcctgtgcctgtagtgttggcccagagtgtggttactgccctgagggccatgaaagccacagaggatgggctgaggaaggaaagaaatggggttactgctcccagtgcatcatttgcatcattccccattgactgaatcctcagcagtggccgtttttcctcttgtccaggctcacgagttagtccagggattccatactccctattccctggagttttctggaataaattttcagcacctgcttttctcagcttggcccttccccgggtgaggccgtttggaattaacatggccagtgtttcacacaagattgggttcccaatcttgaccatcactatcactgccttctttatataaaggctaataaggaaggagtgttatttatggctttgccaagctacatcaagaactcagctgtgctgtgcctaccaggggtctcctttcttacccaggactcctttcttctccttgaatatttatgtccattttaacacttcctggttgcaagagggatgtgcctccattatttcctccacagttttggtatttgtcagacatttgttctgctgtctttctaatccagccaacgtctgctcaggaagtggggccagctccactgggacccatagttttacttccttgtcatttgattggatagtttccaaggaagcccctccagattggcactatctcagaaaaggagagcttgttgtgaaacactgcttcctgaaacttcctgctattgcctaaagctacgtctgaaactgagtagggaaaggcatacttttccagggacttagggggataggctttggaaatgggacaggtctttcagactcacagcttgataccctaacaaagcagagtatatttatttgtttcccaggaaggccattgcagtttgactggctgagggatacagagatgaaattgtaaactgtatccagattatcaaagctaatttgactagtttgaacctcgtcagacattcattcctttggccattgccatggatgaaaccgagatctgcagtctgatctgtggacttctctgctggcatatcttttatgatttaacctcttccatttgatgattctgtatttcagagtcagtttcttgagtaactccagtgctacaaaaagaattagtaatgtggtgtgggcagcgtgacattttatgtcccacccaaaaattggattccttttggagactgatctgttggtctcaggcatttcattaggaccagattggttctaagagttagtctggactggccctaggaaacttgaattaaataagcctcttccccttaccgatcctttttaacactctcaggtttgtttgtttcccacttttttcctatgctggtctgcctcaaagtctcaagaccaaggtgactcaagataacaccagaccacgcatgatcaccaaaaccttcccatcctgattctcttcttctacctctaccctctccaacttctcctggtcttcacatatactctcaaagctagtctgaaagtgaccttactttcggaagtagggaagtggaactttggtaaatgactgtttgcctcatttaatagtatacaggctcagcccatagactacagttcttcagaggccatatgtctcagcaagtactggttatattctttttttgtaaggaagatcataaatgctaaaaattccactaagccattcagttcttccttttgcctacctagtcctgatttttgtattaattggttccctttagcaagggattcagatctttgtaccttatcttatatccagagcagattccatttggcagatagatggtctctagcctattgtattcttagaccaaaaatcataacctgctgtttctcagcaaagccttgctctctggagcttactatgtgctggtacttaaagagtacattctgccttgctatagtgaagagacccactccaaataaaaaaggggccacacggggcttctaagttaggttgccagtgttgctgcccatgatgagttatttgcctctgagtttcagatgacctctctgtagggacactgtgttatcaaccattaagaagaaagaaccacaagcctcccaagtatttgggttctatcttagggttgaaatctggtcattattccctctacccttggaatcagagcaatgtgtcttctttcctccaacctcttaccttagatgcatcctggttatctggaagcatgggaaagaaggctacttatctctttgtatgtggctccagtctgtgaggatacataacattttctctacaatgaatctgtgctaatattttgccttctttctttcttttcttttcacccttagagacagggtttcactatgttgcccaggctggtctcaaactcctgggctcaagcaatcctcctgcctcagcttcctgagtagctggaaccacaggtgtgtgctaccgtgcctggcacttttttgccttcttaatggagatattcagttttctttttttcatttaaacaaagaaaaaaaatgtatctactctaccttccctctgctctcctccctccctatcctacttgcccatatgagcacggctccccatggccacatactcctgcaaagcttttatgctgcttcgcttttctctaaacagatctgatattgctgctcctgtggttttctcaaaattaactttgccgtggtttttaaaaaggaatcaaaatgcattgttgcattaagctttttcaataaaggaaaattacggaaggaaaataggcaacaccagcaaattatatgtggacaggttctaaactctatatatacatatatatatatatatctatatatctatatacgtaatcatctagttctgtcatcttactgaaaggaataacacttctaaagatcaccatttctgagaagttcttggaaatctttatgtctaagtgattgtattagatcagcaataatgactatgtaatctcaaaaaacaaataaaatattcttaacatgg

SEQ ID NO: 465443 - DNA, 4642 bp, Homo sapiens
tgggaggcggggccgaccaagagcaggagctggagtctgagccggtggttgcagcggaggcggtgatgtcggtgcaggttgtgtcagccgcggctgccgccaaggtgcctgaggtggagctgaaggacctgagcccctccgaggcggagtcgcaactaggactgagcacggccgccgtgggcgccatggcccccccggcgggcggtggagaccctgaggctccagctcccgccgcggagcggcccccggtccccggcccgggctcggggcccgccgccgctctcagccccgccgccgggaaggtgcctcaggcgtcggccatgaagcggagcgacccacatcaccagcaccagcggcaccgcgacggcggcgaggccctggtcagccccgacggcaccgtcaccgaggcgccgcgcacagtcaagaagagatccagtttgctgaccagaagcaagaattcaacaaacgtcccaccaaaattggacgtcgctctttgtctcgttccatttctcagtcatctactgacagctacagctcagcggcttcatatacagatagctctgatgatgagacatcgcccagggacaagcagcaaaagaactctaagggaagcagtgacttctgtgttaagaacatcaaacaggcagagtttggacgaagagaaattgaaattgctgaacaagaaatgcctgcattgatggctttgaggaagagagctcaaggagaaaagcctttggctggagccaaaatcgtgggttgcacacacatcactgctcagactgctgtgcttatggaaactctgggtgctctgggggcccagtgccgatgggctgcctgcaacatctattccactctcaatgaagtggctgctgctctagcagaaagtggatttcctgtttttgcctggaagggagagtcagaagatgacttttggtggtgtatcgatagatgtgtgaatgtggagggctggcagccaaacatgatcttggatgatggaggggatcttacccactggatttataaaaagtatcccaacatgtttaagaaaatcaagggcatagtagaggagagtgttactggagttcacaggctgtaccaactgtccaaagctgggaagctgtgtgttccagccatgaatgtcaatgactcagtcaccaaacagaaatttgacaacctctactgttgccgtgaatcaattcttgatggacttaaaaggacaacagacatgatgtttggtggaaagcaagtggtagtctgtggctatggagaggtggggaaagggtgctgtgctgccctgaaagccatgggctccattgtgtatgtaactgaaattgaccccatctgtgccctgcaagcctgtatggatggatttcgactggtgaaattaaatgaggtcatccgacaagtggacattgttattacctgtacaggtaacaagaatgtggtaaccagagagcacttggaccgtatgaagaatagctgcatcgtttgtaacatgggacattccaacacagagattgacgtggcgagtctgcggacaccagaactgacctgggagcgagtgagatctcaagttgaccatgtgatatggcctgatggcaagaggatagtactgctggcagagggccgcctgctgaaccttagctgctccacagtgcctacatttgtgctctcaatcactgctactactcaggctcttgccttgatagagctttacaatgctcctgagggtcgctataagcaggatgtctacctgttgcccaagaagatggatgagtatgtggccagcctacacctgcctacctttgatgcccacttgacagagctgacagatgaacaggccaagtatctgggactcaacaagaatgggcccttcaagcctaattactacaggtattaagttcctgtaactcaaaccagaatttttaaggaatagaactccaagccttttctccactactatacaagaaagaattcagcaagctgcttctccaatcaaagctgcctgccgtgctcaccctgtgtgttaggttatttatttattaaaatcaagaatcctgtgcctgtagtgttggcccagagtgtggttactgccctgagggccatgaaagccacagaggatgggctgaggaaggaaagaaatggggttactgctcccagtgcatcatttgcatcattccccattgactgaatcctcagcagtggccgtttttcctcttgtccaggctcacgagttagtccagggattccatactccctattccctggagttttctggaataaattttcagcacctgcttttctcagcttggcccttccccgggtgaggccgtttggaattaacatggccagtgtttcacacaagattgggttcccaatcttgaccatcactatcactgccttctttatataaaggctaataaggaaggagtgttatttatggctttgccaagctacatcaagaactcagctgtgctgtgcctaccaggggtctcctttcttacccaggactcctttcttctccttgaatatttatgtccattttaacacttcctggttgcaagagggatgtgcctccattatttcctccacagttttggtatttgtcagacatttgttctgctgtctttctaatccagccaacgtctgctcaggaagtggggccagctccactgggacccatagttttacttccttgtcatttgattggatagtttccaaggaagcccctccagattggcactatctcagaaaaggagagcttgttgtgaaacactgcttcctgaaacttcctgctattgcctaaagctacgtctgaaactgagtagggaaaggcatacttttccagggacttagggggataggctttggaaatgggacaggtctttcagactcacagcttgataccctaacaaagcagagtatatttatttgtttcccaggaaggccattgcagtttgactggctgagggatacagagatgaaattgtaaactgtatccagattatcaaagctaatttgactagtttgaacctcgtcagacattcattcctttggccattgccatggatgaaaccgagatctgcagtctgatctgtggacttctctgctggcatatcttttatgatttaacctcttccatttgatgattctgtatttcagagtcagtttcttgagtaactccagtgctacaaaaagaattagtaatgtggtgtgggcagcgtgacattttatgtcccacccaaaaattggattccttttggagactgatctgttggtctcaggcatttcattaggaccagattggttctaagagttagtctggactggccctaggaaacttgaattaaataagcctcttccccttaccgatcctttttaacactctcaggtttgtttgtttcccacttttttcctatgctggtctgcctcaaagtctcaagaccaaggtgactcaagataacaccagaccacgcatgatcaccaaaaccttcccatcctgattctcttcttctacctctaccctctccaacttctcctggtcttcacatatactctcaaagctagtctgaaagtgaccttactttcggaagtagggaagtggaactttggtaaatgactgtttgcctcatttaatagtatacaggctcagcccatagactacagttcttcagaggccatatgtctcagcaagtactggttatattctttttttgtaaggaagatcataaatgctaaaaattccactaagccattcagttcttccttttgcctacctagtcctgatttttgtattaattggttccctttagcaagggattcagatctttgtaccttatcttatatccagagcagattccatttggcagatagatggtctctagcctattgtattcttagaccaaaaatcataacctgctgtttctcagcaaagccttgctctctggagcttactatgtgctggtacttaaagagtacattctgccttgctatagtgaagagacccactccaaataaaaaaggggccacacggggcttctaagttaggttgccagtgttgctgcccatgatgagttatttgcctctgagtttcagatgacctctctgtagggacactgtgttatcaaccattaagaagaaagaaccacaagcctcccaagtatttgggttctatcttagggttgaaatctggtcattattccctctacccttggaatcagagcaatgtgtcttctttcctccaacctcttaccttagatgcatcctggttatctggaagcatgggaaagaaggctacttatctctttgtatgtggctccagtctgtgaggatacataacattttctctacaatgaatctgtgctaatattttgccttctttctttcttttcttttcacccttagagacagggtttcactatgttgcccaggctggtctcaaactcctgggctcaagcaatcctcctgcctcagcttcctgagtagctggaaccacaggtgtgtgctaccgtgcctggcacttttttgccttcttaatggagatattcagttttctttttttcatttaaacaaagaaaaaaaatgtatctactctaccttccctctgctctcctcacagggtcgtggtgagggcaaatagtat

SEQ ID NO: 465444 - DNA, 2608 bp, Homo sapiens
tgggaggcggggccgaccaagagcaggagctggagtctgagccggtggttgcagcggaggcggtgatgtcggtgcaggttgtgtcagccgcggctgccgccaaggtgcctgaggtggagctgaaggacctgagcccctccgaggcggagtcgcaactaggactgagcacggccgccgtgggcgccatggcccccccggcgggcggtggagaccctgaggctccagctcccgccgcggagcggcccccggtccccggcccgggctcggggcccgccgccgctctcagccccgccgccgggaaggtgcctcaggcgtcggccatgaagcggagcgacccacatcaccagcaccagcggcaccgcgacggcggcgaggccctggtcagccccgacggcaccgtcaccgaggcgccgcgcacagtcaagaagagatccagtttgctgaccagaagcaagaattcaacaaacgtcccaccaaaattggacgtcgctctttgtctcgttccatttctcagtcatctactgacagctacagctcagcggcttcatatacagatagctctgatgatgagacatcgcccagggacaagcagcaaaagaactctaagggaagcagtgacttctgtgttaagaacatcaaacaggcagagtttggacgaagagaaattgaaattgctgaacaagaaatgcctgcattgatggctttgaggaagagagctcaaggagaaaagcctttggctggagccaaaatcgtgggttgcacacacatcactgctcagactgctgtgcttatggaaactctgggtgctctgggggcccagtgccgatgggctgcctgcaacatctattccactctcaatgaagtggctgctgctctagcagaaagtggatttcctgtttttgcctggaagggagagtcagaagatgacttttggtggtgtatcgatagatgtgtgaatgtggagggctggcagccaaacatgatcttggatgatggaggggatcttacccactggatttataaaaagtatcccaacatgtttaagaaaatcaagggcatagtagaggagagtgttactggagttcacaggctgtaccaactgtccaaagctgggaagctgtgtgttccagccatgaatgtcaatgactcagtcaccaaacagaaatttgacaacctctactgttgccgtgaatcaattcttgatggacttaaaaggacaacagacatgatgtttggtggaaagcaagtggtagtctgtggctatggagaggtggggaaagggtgctgtgctgccctgaaagccatgggctccattgtgtatgtaactgaaattgaccccatctgtgccctgcaagcctgtatggatggatttcgactggtgaaattaaatgaggtcatccgacaagtggacattgttattacctgtacaggtaacaagaatgtggtaaccagagagcacttggaccgtatgaagaatagctgcatcgtttgtaacatgggacattccaacacagagattgacgtggcgagtctgcggacaccagaactgacctgggagcgagtgagatctcaagttgaccatgtgatatggcctgatggcaagaggatagtactgctggcagagggccgcctgctgaaccttagctgctccacagtgcctacatttgtgctctcaatcactgctactactcaggctcttgccttgatagagctttacaatgctcctgagggtcgctataagcaggatgtctacctgttgcccaagaagatggatgagtatgtggccagcctacacctgcctacctttgatgcccacttgacagagctgacagatgaacaggccaagtatctgggactcaacaagaatgggcccttcaagcctaattactacaggtattaagttcctgtaactcaaaccagaatttttaaggaatagaactccaagccttttctccactactatacaagaaagaattcagcaagctgcttctccaatcaaagctgcctgccgtgctcaccctgtgtgttaggttatttatttattaaaatcaagaatcctgtgcctgtagtgttggcccagagtgtggttactgccctgagggccatgaaagccacagaggatgggctgaggaaggaaagaaatggggttactgctcccagtgcatcatttgcatcattccccattgactgaatcctcagcagtggccgtttttcctcttgtccaggctcacgagttagtccagggattccatactccctattccctggagttttctggaataaattttcagcacctgcttttctcagcttggcccttccccgggtgaggccgttttctagagatgagagcaactccaaggtgaacattgaaggggacagacaagttattttccctttcgaaagtttttttctcttagtttcagttgtttgaatatttaaatgcacttgaaataggtgctgagttgtagtttgtgaagaccacagtggggaagagtggtgtcctcttttttcttggtggtcaggtggtgtgtgcagtgtgcaatttccatacttccccaacctgcctggcgcccctcattacagtcagggtaatttacagaagttgaaa

SEQ ID NO: 465445 - DNA, 1501 bp, Homo sapiens
tgggaggcggggccgaccaagagcaggagctggagtctgagccggtggttgcagcggaggcggtgatgtcggtgcaggttgtgtcagccgcggctgccgccaaggtgcctgaggtggagctgaaggacctgagcccctccgaggcggagtcgcaactaggactgagcacggccgccgtgggcgccatggcccccccggcgggcggtggagaccctgaggctccagctcccgccgcggagcggcccccggtccccggcccgggctcggggcccgccgccgctctcagccccgccgccgggaaggtgcctcaggcgtcggccatgaagcggagcgacccacatcaccagcaccagcggcaccgcgacggcggcgaggccctggtcagccccgacggcaccgtcaccgaggcgccgcgcacagtcaagaagagatccagtttgctgaccagaagcaagaattcaacaaacgtcccaccaaaattggacgtcgctctttgtctcgttccatttctcagtcatctactgacagctacagctcagcggcttcatatacagatagctctgatgatgagacatcgcccagggacaagcagcaaaagaactctaagggaagcagtgacttctgtgttaagaacatcaaacaggcagagtttggacgaagagaaattgaaattgctgaacaagaaatgcctgcattgatggctttgaggaagagagctcaaggagaaaagcctttggctggagccaaaatcgtgggttgcacacacatcactgctcagactgctgtgcttatggaaactctgggtgctctgggggcccagtgccgatgggctgcctgcaacatctattccactctcaatgaagtggctgctgctctagcagaaagtggatttcctgtttttgcctggaagggagagtcagaagatgacttttggtggtgtatcgatagatgtgtgaatgtggagggctggcagccaaacatgatcttggatgatggaggggatcttacccactggatttataaaaagtatcccaacatgtttaagaaaatcaagggcatagtagaggagagtgttactggagttcacaggctgtaccaactgtccaaagctgggaagctgtgtgttccagccatgaatgtcaatgactcagtcaccaaacagaaatttgacaacctctactgttgccgtgaatcaattcttgatgggtaatgtttattatctttgagatgaagttgtgatgtccagttgagattctaagttttttggctttggttatttctggaaaggattcatgtagcacctctggataatgtctccataaagccagagctttgtcacctcataaattaaaattacattatttttattttctcctttgtatcttttctatttctaaatattatattttcaaaatattatctaataaatgtatgttgcttttatgtttaaaagttactgtgttatctacatcttcttcctttctgcaccacttgcaagaaa

SEQ ID NO: 465446 - DNA, 546 bp, Homo sapiens
ccatggcttgaaccacgacataatagcaacactttgggaggttggggcaggaagactgcttaggcccaggagtttgagaccaacctgggcaacatatggaaggcaccatctcatcaaaaaaaaagcgtgcttcacgaccacatactcctgcaaagcttttatgctgcttcgcttttctctaaacagatctgatattgctgctcctgtggttttctcaaaattaactttgccgtggtttttaaaaaggaatcaaaatgcattgttgcattaagctttttcaataaaggaaaattacggaaggaaaataggcaacaccagcaaattatatgtggacaggttctaaactctatatatacatatatatatatatatctatatatctatatacgtaatcatctagttctgtcatcttactgaaaggaataacacttctaaagatcaccatttctgagaagttcttggaaatctttatgtctaagtgattgtattagatcagcaataatgactatgtaatctcaaaaaacaaataaaatattcttaacatgg

SEQ ID NO: 465447 - DNA, 435 bp, Homo sapiens
acatagagtcagctggagcctccctcttcccatggcttcccccaatacttgccttcttagaatactgaagaggttctgtagagcccaatttgaaaatcactggcttaagtcattcccgttgtattttctgattgtaaaatatataaactttatctccttgactagttgtttggcccaggcttgctcataccctgctttgtctttaatacaggtgcttatggaaactctgggtgctctgggggcccagtgccgatgggctgcctgcaacatctattccactctcaatgaagtggctgctgctctagcagaaagtgaagtggtaagagcttattctctgtgcctttggctaaagtaagtctatttggagacttactttatgtttcagcataaatctttaaagaaggttgacaataaaagaactatcttggaagaaat

SEQ ID NO: 465448 - DNA, 444 bp, Homo sapiens
gtaaaaaaatttatatggtgctaggtggctagagaagcttcagtttgctccatggtttggaattttagaggaagcatttttttttttccgagtgttttttattctgtcattccagcggcttcatatacagatagctctgatgatgagacatcgcccagggacaagcagcaaaagaactctaagggaagcagtgacttctgtgttaagaacatcaaacaggcagagtttggacgaagagaaattgaaattgctgaacaaggtaaagaaaacaagcaccttttccttcttaacctacctgtgtctttttgtccatattaatccctttttatgtctggggtctggtagcttgtgaaatttctatgtgataagaatacttataacaaaagaaatgtgagttcaagaaacactggggaaatctggcaagtctagaaggaaccctgtatt

SEQ ID NO: 465449 - DNA, 4557 bp, Homo sapiens
agaccccatagattttgagcactcccacaaaaatcgcttgaaccctggaggcagaggttgcagtaagctgagatcacaccattgctctccagcggggacaacaagagtgagactccatctcaaaacaaacaaacaaacaataaaagcacaaacagccaggcgtagtctcatgcacttgtagttctggcaggcagggagaccagtgcagatttagtgaacattgtacctagtaggtaatttttcaaccttcaacccgctcccactctcccactttttatagtctccagtgaaggccttaaaatttagaggtgggtcaaggatttcccccacatgacttttgaataaaatctttattgtgaagctatatatgcaggctctagaaagatattctttatttctcagtggccacctaacaggatgaaactagtcatgtctcatggtctcatgcctacccaatcaacgtatttctggggcctcctatgaaagcaatggtagattgtaatgtcctggtgttttttgttcttggcttccctcatcctcaggctgtaccaactgtccaaagctgggaagctgtgtgttccagccatgaatgtcaatgactcagtcaccaaacagaaatttgacaacctctactgttgccgtgaatcaattcttgatggacttaaaaggacaacagacatgatgtttggtggaaagcaagtggtagtctgtggctatggagaggtggggaaagggtgctgtgctgccctgaaagccatgggctccattgtgtatgtaactgaaattgaccccatctgtgccctgcaagcctgtatggatggatttcgactggtgaaattaaatgaggtcatccgacaagtggacattgttattacctgtacaggtaacaagaatgtggtaaccagagagcacttggaccgtatgaagaatagctgcatcgtttgtaacatgggacattccaacacagagattgacgtggcgagtctgcggacaccagaactgacctgggagcgagtgagatctcaagttgaccatgtgatatggcctgatggcaagaggatagtactgctggcagagggccgcctgctgaaccttagctgctccacagtgcctacatttgtgctctcaatcactgctactactcaggctcttgccttgatagagctttacaatgctcctgagggtcgctataagcaggatgtctacctgttgcccaagaagatggatgagtatgtggccagcctacacctgcctacctttgatgcccacttgacagagctgacagatgaacaggccaagtatctgggactcaacaagaatgggcccttcaagcctaattactacaggtattaagttcctgtaactcaaaccagaatttttaaggaatagaactccaagccttttctccactactatacaagaaagaattcagcaagctgcttctccaatcaaagctgcctgccgtgctcaccctgtgtgttaggttatttatttattaaaatcaagaatcctgtgcctgtagtgttggcccagagtgtggttactgccctgagggccatgaaagccacagaggatgggctgaggaaggaaagaaatggggttactgctcccagtgcatcatttgcatcattccccattgactgaatcctcagcagtggccgtttttcctcttgtccaggctcacgagttagtccagggattccatactccctattccctggagttttctggaataaattttcagcacctgcttttctcagcttggcccttccccgggtgaggccgtttggaattaacatggccagtgtttcacacaagattgggttcccaatcttgaccatcactatcactgccttctttatataaaggctaataaggaaggagtgttatttatggctttgccaagctacatcaagaactcagctgtgctgtgcctaccaggggtctcctttcttacccaggactcctttcttctccttgaatatttatgtccattttaacacttcctggttgcaagagggatgtgcctccattatttcctccacagttttggtatttgtcagacatttgttctgctgtctttctaatccagccaacgtctgctcaggaagtggggccagctccactgggacccatagttttacttccttgtcatttgattggatagtttccaaggaagcccctccagattggcactatctcagaaaaggagagcttgttgtgaaacactgcttcctgaaacttcctgctattgcctaaagctacgtctgaaactgagtagggaaaggcatacttttccagggacttagggggataggctttggaaatgggacaggtctttcagactcacagcttgataccctaacaaagcagagtatatttatttgtttcccaggaaggccattgcagtttgactggctgagggatacagagatgaaattgtaaactgtatccagattatcaaagctaatttgactagtttgaacctcgtcagacattcattcctttggccattgccatggatgaaaccgagatctgcagtctgatctgtggacttctctgctggcatatcttttatgatttaacctcttccatttgatgattctgtatttcagagtcagtttcttgagtaactccagtgctacaaaaagaattagtaatgtggtgtgggcagcgtgacattttatgtcccacccaaaaattggattccttttggagactgatctgttggtctcaggcatttcattaggaccagattggttctaagagttagtctggactggccctaggaaacttgaattaaataagcctcttccccttaccgatcctttttaacactctcaggtttgtttgtttcccacttttttcctatgctggtctgcctcaaagtctcaagaccaaggtgactcaagataacaccagaccacgcatgatcaccaaaaccttcccatcctgattctcttcttctacctctaccctctccaacttctcctggtcttcacatatactctcaaagctagtctgaaagtgaccttactttcggaagtagggaagtggaactttggtaaatgactgtttgcctcatttaatagtatacaggctcagcccatagactacagttcttcagaggccatatgtctcagcaagtactggttatattctttttttgtaaggaagatcataaatgctaaaaattccactaagccattcagttcttccttttgcctacctagtcctgatttttgtattaattggttccctttagcaagggattcagatctttgtaccttatcttatatccagagcagattccatttggcagatagatggtctctagcctattgtattcttagaccaaaaatcataacctgctgtttctcagcaaagccttgctctctggagcttactatgtgctggtacttaaagagtacattctgccttgctatagtgaagagacccactccaaataaaaaaggggccacacggggcttctaagttaggttgccagtgttgctgcccatgatgagttatttgcctctgagtttcagatgacctctctgtagggacactgtgttatcaaccattaagaagaaagaaccacaagcctcccaagtatttgggttctatcttagggttgaaatctggtcattattccctctacccttggaatcagagcaatgtgtcttctttcctccaacctcttaccttagatgcatcctggttatctggaagcatgggaaagaaggctacttatctctttgtatgtggctccagtctgtgaggatacataacattttctctacaatgaatctgtgctaatattttgccttctttctttcttttcttttcacccttagagacagggtttcactatgttgcccaggctggtctcaaactcctgggctcaagcaatcctcctgcctcagcttcctgagtagctggaaccacaggtgtgtgctaccgtgcctggcacttttttgccttcttaatggagatattcagttttctttttttcatttaaacaaagaaaaaaaatgtatctactctaccttccctctgctctcctccctccctatcctacttgcccatatgagcacggctccccatggccacatactcctgcaaagcttttatgctgcttcgcttttctctaaacagatctgatattgctgctcctgtggttttctcaaaattaactttgccgtggtttttaaaaaggaatcaaaatgcattgttgcattaagctttttcaataaaggaaaattacggaaggaaaataggcaacaccagcaaattatatgtggacaggttctaaactctatatatacatatatatatatatatctatatatctatatacgtaatcatctagttctgtcatcttactgaaaggaataacacttctaaagatcaccatttctgagaagttcttggaaatctttatgtctaagtgattgtattagatcagcaataatgactatgtaatctcaaaaaacaaataaaatattcttaacatggactcttaagggtatttcttgtttctgtgaactagaaatt

SEQ ID NO: 465450 - DNA, 2174 bp, Homo sapiens
tgggagtgccttcctgacctcagtctttattgatcttggtatccgcacctccagtgacgtgtcctgaagggtgggagagaattcacaagtgcctcacacacagggaaagaaggaagtccaactattgctgcagaaagtccccactggggaggtgcgggtagagtgtttgggtagcattaaaacagtgagtgccctgtgagaagcacagtgcctgggtgcagcactttgcatcagctctgattttgaaatcagacacagaaggctttgaagccggccagtaaggggttgtcaggcagttgactaatgctcttgatttgaatcggaggctgctgtgaaaagggatgcagcttctgctagccactgtgaacttctgaatctcactagggttgggtctgctttggggcactcagataaccccagtatttccaaaccagctttcccttttgcttcaggacatatcttacccaagcctgcactatggagaagtgggacggtaatgagggcacctcagcttttcacatgcctgagtggatgagatccagtttgctgaccagaagcaagaattcaacaaacgtcccaccaaaattggacgtcgctctttgtctcgttccatttctcagtcatctactgacagctacagctcagcggcttcatatacagatagctctgatgatgagacatcgcccagggacaagcagcaaaagaactctaagggaagcagtgacttctgtgttaagaacatcaaacaggcagagtttggacgaagagaaattgaaattgctgaacaagaaatgcctgcattgatggctttgaggaagagagctcaaggagaaaagcctttggctggagccaaaatcgtgggttgcacacacatcactgctcagactgctgtgcttatggaaactctgggtgctctgggggcccagtgccgatgggctgcctgcaacatctattccactctcaatgaagtggctgctgctctagcagaaagtggatttcctgtttttgcctggaagggagagtcagaagatgacttttggtggtgtatcgatagatgtgtgaatgtggagggctggcagccaaacatgatcttggatgatggaggggatcttacccactggatttataaaaagtatcccaacatgtttaagaaaatcaagggcatagtagaggagagtgttactggagttcacaggctgtaccaactgtccaaagctgggaagctgtgtgttccagccatgaatgtcaatgactcagtcaccaaacagaaatttgacaacctctactgttgccgtgaatcaattcttgatggacttaaaaggacaacagacatgatgtttggtggaaagcaagtggtagtctgtggctatggagaggtggggaaagggtgctgtgctgccctgaaagccatgggctccattgtgtatgtaactgaaattgaccccatctgtgccctgcaagcctgtatggatggatttcgactggtgaaattaaatgaggtcatccgacaagtggacattgttattacctgtacaggtaacaagaatgtggtaaccagagagcacttggaccgtatgaagaatagctgcatcgtttgtaacatgggacattccaacacagagattgacgtggcgagtctgcggacaccagaactgacctgggagcgagtgagatctcaagttgaccatgtgatatggcctgatggcaagaggatagtactgctggcagagggccgcctgctgaaccttagctgctccacagtgcctacatttgtgctctcaatcactgctactactcaggctcttgccttgatagagctttacaatgctcctgagggtcgctataagcaggatgtctacctgttgcccaagaagatggatgagtatgtggccagcctacacctgcctacctttgatgcccacttgacagagctgacagatgaacaggccaagtatctgggactcaacaagaatgggcccttcaagcctaattactacaggtattaagttcctgtaactcaaaccagaatttttaaggaatagaactccaagccttttctccactactatacaagaaagaattcagcaagctgcttctccaatcaaagctgcctgccgtgctcaccctgtgtgttaggttatttatttattaaaatcaagaatcctgtgcctgta

SEQ ID NO: 465451 - DNA, 4816 bp, Homo sapiens
acccttaaaagtgatggcagtacttattccattgagagatacaaagcgttttctagagagtgtttcttaaccccccaaaaaacttgggggttaagaactatcttcagaagctcaaacacaaatcagggaaggacactgcttcaaataatctagcaaatggacctctgcgtgttctgaagataaagttagccctacatttcaagttaaggctatccaggaagaatgtctttggcaatctctttcagcttccctcttctggcatgtgtatagcctgcaggtacttaacagagcggcttcatatacagatagctctgatgatgagacatcgcccagggacaagcagcaaaagaactctaagggaagcagtgacttctgtgttaagaacatcaaacaggcagagtttggacgaagagaaattgaaattgctgaacaagaaatgcctgcattgatggctttgaggaagagagctcaaggagaaaagcctttggctggagccaaaatcgtgggttgcacacacatcactgctcagactgctgtgcttatggaaactctgggtgctctgggggcccagtgccgatgggctgcctgcaacatctattccactctcaatgaagtggctgctgctctagcagaaagtggatttcctgtttttgcctggaagggagagtcagaagatgacttttggtggtgtatcgatagatgtgtgaatgtggagggctggcagccaaacatgatcttggatgatggaggggatcttacccactggatttataaaaagtatcccaacatgtttaagaaaatcaagggcatagtagaggagagtgttactggagttcacaggctgtaccaactgtccaaagctgggaagctgtgtgttccagccatgaatgtcaatgactcagtcaccaaacagaaatttgacaacctctactgttgccgtgaatcaattcttgatggacttaaaaggacaacagacatgatgtttggtggaaagcaagtggtagtctgtggctatggagaggtggggaaagggtgctgtgctgccctgaaagccatgggctccattgtgtatgtaactgaaattgaccccatctgtgccctgcaagcctgtatggatggatttcgactggtgaaattaaatgaggtcatccgacaagtggacattgttattacctgtacaggtaacaagaatgtggtaaccagagagcacttggaccgtatgaagaatagctgcatcgtttgtaacatgggacattccaacacagagattgacgtggcgagtctgcggacaccagaactgacctgggagcgagtgagatctcaagttgaccatgtgatatggcctgatggcaagaggatagtactgctggcagagggccgcctgctgaaccttagctgctccacagtgcctacatttgtgctctcaatcactgctactactcaggctcttgccttgatagagctttacaatgctcctgagggtcgctataagcaggatgtctacctgttgcccaagaagatggatgagtatgtggccagcctacacctgcctacctttgatgcccacttgacagagctgacagatgaacaggccaagtatctgggactcaacaagaatgggcccttcaagcctaattactacaggtattaagttcctgtaactcaaaccagaatttttaaggaatagaactccaagccttttctccactactatacaagaaagaattcagcaagctgcttctccaatcaaagctgcctgccgtgctcaccctgtgtgttaggttatttatttattaaaatcaagaatcctgtgcctgtagtgttggcccagagtgtggttactgccctgagggccatgaaagccacagaggatgggctgaggaaggaaagaaatggggttactgctcccagtgcatcatttgcatcattccccattgactgaatcctcagcagtggccgtttttcctcttgtccaggctcacgagttagtccagggattccatactccctattccctggagttttctggaataaattttcagcacctgcttttctcagcttggcccttccccgggtgaggccgtttggaattaacatggccagtgtttcacacaagattgggttcccaatcttgaccatcactatcactgccttctttatataaaggctaataaggaaggagtgttatttatggctttgccaagctacatcaagaactcagctgtgctgtgcctaccaggggtctcctttcttacccaggactcctttcttctccttgaatatttatgtccattttaacacttcctggttgcaagagggatgtgcctccattatttcctccacagttttggtatttgtcagacatttgttctgctgtctttctaatccagccaacgtctgctcaggaagtggggccagctccactgggacccatagttttacttccttgtcatttgattggatagtttccaaggaagcccctccagattggcactatctcagaaaaggagagcttgttgtgaaacactgcttcctgaaacttcctgctattgcctaaagctacgtctgaaactgagtagggaaaggcatacttttccagggacttagggggataggctttggaaatgggacaggtctttcagactcacagcttgataccctaacaaagcagagtatatttatttgtttcccaggaaggccattgcagtttgactggctgagggatacagagatgaaattgtaaactgtatccagattatcaaagctaatttgactagtttgaacctcgtcagacattcattcctttggccattgccatggatgaaaccgagatctgcagtctgatctgtggacttctctgctggcatatcttttatgatttaacctcttccatttgatgattctgtatttcagagtcagtttcttgagtaactccagtgctacaaaaagaattagtaatgtggtgtgggcagcgtgacattttatgtcccacccaaaaattggattccttttggagactgatctgttggtctcaggcatttcattaggaccagattggttctaagagttagtctggactggccctaggaaacttgaattaaataagcctcttccccttaccgatcctttttaacactctcaggtttgtttgtttcccacttttttcctatgctggtctgcctcaaagtctcaagaccaaggtgactcaagataacaccagaccacgcatgatcaccaaaaccttcccatcctgattctcttcttctacctctaccctctccaacttctcctggtcttcacatatactctcaaagctagtctgaaagtgaccttactttcggaagtagggaagtggaactttggtaaatgactgtttgcctcatttaatagtatacaggctcagcccatagactacagttcttcagaggccatatgtctcagcaagtactggttatattctttttttgtaaggaagatcataaatgctaaaaattccactaagccattcagttcttccttttgcctacctagtcctgatttttgtattaattggttccctttagcaagggattcagatctttgtaccttatcttatatccagagcagattccatttggcagatagatggtctctagcctattgtattcttagaccaaaaatcataacctgctgtttctcagcaaagccttgctctctggagcttactatgtgctggtacttaaagagtacattctgccttgctatagtgaagagacccactccaaataaaaaaggggccacacggggcttctaagttaggttgccagtgttgctgcccatgatgagttatttgcctctgagtttcagatgacctctctgtagggacactgtgttatcaaccattaagaagaaagaaccacaagcctcccaagtatttgggttctatcttagggttgaaatctggtcattattccctctacccttggaatcagagcaatgtgtcttctttcctccaacctcttaccttagatgcatcctggttatctggaagcatgggaaagaaggctacttatctctttgtatgtggctccagtctgtgaggatacataacattttctctacaatgaatctgtgctaatattttgccttctttctttcttttcttttcacccttagagacagggtttcactatgttgcccaggctggtctcaaactcctgggctcaagcaatcctcctgcctcagcttcctgagtagctggaaccacaggtgtgtgctaccgtgcctggcacttttttgccttcttaatggagatattcagttttctttttttcatttaaacaaagaaaaaaaatgtatctactctaccttccctctgctctcctccctccctatcctacttgcccatatgagcacggctccccatggccacatactcctgcaaagcttttatgctgcttcgcttttctctaaacagatctgatattgctgctcctgtggttttctcaaaattaactttgccgtggtttttaaaaaggaatcaaaatgcattgttgcattaagctttttcaataaaggaaaattacggaaggaaaataggcaacaccagcaaattatatgtggacaggttctaaactctatatatacatatatatatatatatctatatatctatatacgtaatcatctagttctgtcatcttactgaaaggaataacacttctaaagatcaccatttctgagaagttcttggaaatctttatgtctaagtgattgtattagatcagcaataatgactatgtaatctcaaaaaacaaataaaatattcttaacatgg

SEQ ID NO: 465452 - DNA, 5071 bp, Homo sapiens
  misc_feature (4309)..(4309): n is a, c, g, or t
  misc_feature (4318)..(4319): n is a, c, g, or t
tgggaggcggggccgaccaagagcaggagctggagtctgagccggtggttgcagcggaggcggtgatgtcggtgcaggttgtgtcagccgcggctgccgccaaggtgcctgaggtggagctgaaggacctgagcccctccgaggcggagtcgcaactaggactgagcacggccgccgtgggcgccatggcccccccggcgggcggtggagaccctgaggctccagctcccgccgcggagcggcccccggtccccggcccgggctcggggcccgccgccgctctcagccccgccgccgggaaggtgcctcaggcgtcggccatgaagcggagcgacccacatcaccagcaccagcggcaccgcgacggcggcgaggccctggtcagccccgacggcaccgtcaccgaggcgccgcgcacagtcaagaagagatccagtttgctgaccagaagcaagaattcaacaaacgtcccaccaaaattggacgtcgctctttgtctcgttccatttctcagtcatctactgacagctacagctcagcggcttcatatacagatagctctgatgatgagacatcgcccagggacaagcagcaaaagaactctaagggaagcagtgacttctgtgttaagaacatcaaacaggcagagtttggacgaagagaaattgaaattgctgaacaagaaatgcctgcattgatggctttgaggaagagagctcaaggagaaaagcctttggctggagccaaaatcgtgggttgcacacacatcactgctcagactgctgtgcttatggaaactctgggtgctctgggggcccagtgccgatgggctgcctgcaacatctattccactctcaatgaagtggctgctgctctagcagaaagtggatttcctgtttttgcctggaagggagagtcagaagatgacttttggtggtgtatcgatagatgtgtgaatgtggagggctggcagccaaacatgatcttggatgatggaggggatcttacccactggatttataaaaagtatcccaacatgtttaagaaaatcaagggcatagtagaggagagtgttactggagttcacaggctgtaccaactgtccaaagctgggaagctgtgtgttccagccatgaatgtcaatgactcagtcaccaaacagaaatttgacaacctctactgttgccgtgaatcaattcttgatggacttaaaaggacaacagacatgatgtttggtggaaagcaagtggtagtctgtggctatggagaggtggggaaagggtgctgtgctgccctgaaagccatgggctccattgtgtatgtaactgaaattgaccccatctgtgccctgcaagcctgtatggatggatttcgactggtgaaattaaatgaggtcatccgacaagtggacattgttattacctgtacaggtaacaagaatgtggtaaccagagagcacttggaccgtatgaagaatagctgcatcgtttgtaacatgggacattccaacacagagattgacgtggcgagtctgcggacaccagaactgacctgggagcgagtgagatctcaagttgaccatgtgatatggcctgatggcaagaggatagtactgctggcagagggccgcctgctgaaccttagctgctccacagtgcctacatttgtgctctcaatcactgctactactcaggctcttgccttgatagagctttacaatgctcctgagggtcgctataagcaggatgtctacctgttgcccaagaagatggatgagtatgtggccagcctacacctgcctacctttgatgcccacttgacagagctgacagatgaacaggccaagtatctgggactcaacaagaatgggcccttcaagcctaattactacaggtattaagttcctgtaactcaaaccagaatttttaaggaatagaactccaagccttttctccactactatacaagaaagaattcagcaagctgcttctccaatcaaagctgcctgccgtgctcaccctgtgtgttaggttatttatttattaaaatcaagaatcctgtgcctgtagtgttggcccagagtgtggttactgccctgagggccatgaaagccacagaggatgggctgaggaaggaaagaaatggggttactgctcccagtgcatcatttgcatcattccccattgactgaatcctcagcagtggccgtttttcctcttgtccaggctcacgagttagtccagggattccatactccctattccctggagttttctggaataaattttcagcacctgcttttctcagcttggcccttccccgggtgaggccgtttggaattaacatggccagtgtttcacacaagattgggttcccaatcttgaccatcactatcactgccttctttatataaaggctaataaggaaggagtgttatttatggctttgccaagctacatcaagaactcagctgtgctgtgcctaccaggggtctcctttcttacccaggactcctttcttctccttgaatatttatgtccattttaacacttcctggttgcaagagggatgtgcctccattatttcctccacagttttggtatttgtcagacatttgttctgctgtctttctaatccagccaacgtctgctcaggaagtggggccagctccactgggacccatagttttacttccttgtcatttgattggatagtttccaaggaagcccctccagattggcactatctcagaaaaggagagcttgttgtgaaacactgcttcctgaaacttcctgctattgcctaaagctacgtctgaaactgagtagggaaaggcatacttttccagggacttagggggataggctttggaaatgggacaggtctttcagactcacagcttgataccctaacaaagcagagtatatttatttgtttcccaggaaggccattgcagtttgactggctgagggatacagagatgaaattgtaaactgtatccagattatcaaagctaatttgactagtttgaacctcgtcagacattcattcctttggccattgccatggatgaaaccgagatctgcagtctgatctgtggacttctctgctggcatatcttttatgatttaacctcttccatttgatgattctgtatttcagagtcagtttcttgagtaactccagtgctacaaaaagaattagtaatgtggtgtgggcagcgtgacattttatgtcccacccaaaaattggattccttttggagactgatctgttggtctcaggcatttcattaggaccagattggttctaagagttagtctggactggccctaggaaacttgaattaaataagcctcttccccttaccgatcctttttaacactctcaggtttgtttgtttcccacttttttcctatgctggtctgcctcaaagtctcaagaccaaggtgactcaagataacaccagaccacgcatgatcaccaaaaccttcccatcctgattctcttcttctacctctaccctctccaacttctcctggtcttcacatatactctcaaagctagtctgaaagtgaccttactttcggaagtagggaagtggaactttggtaaatgactgtttgcctcatttaatagtatacaggctcagcccatagactacagttcttcagaggccatatgtctcagcaagtactggttatattctttttttgtaaggaagatcataaatgctaaaaattccactaagccattcagttcttccttttgcctacctagtcctgatttttgtattaattggttccctttagcaagggattcagatctttgtaccttatcttatatccagagcagattccatttggcagatagatggtctctagcctattgtattcttagaccaaaaatcataacctgctgtttctcagcaaagccttgctctctggagcttactatgtgctggtacttaaagagtacattctgccttgctatagtgaagagacccactccaaataaaaaaggggccacacggggcttctaagttaggttgccagtgttgctgcccatgatgagttatttgcctctgagtttcagatgacctctctgtagggacactgtgttatcaaccattaagaagaaagaaccacaagcctcccaagtatttgggttctatcttagggttgaaatctggtcattattccctctacccttggaatcagaccttttcttccttcccccccgcccctctgcccctccttccctcccccctccccccccgcgccccgccagcctttctttttcctccccncccctgccnnccccccagtctgtgaggatacataacattttctctacaatgaatctgtgctaatattttgccttctttctttcttttcttttcacccttagagacagggtttcactatgttgcccaggctggtctcaaactcctgggctcaagcaatcctcctgcctcagcttcctgagtagctggaaccacaggtgtgtgctaccgtgcctggcacttttttgccttcttaatggagatattcagttttctttttttcatttaaacaaagaaaaaaaatgtatctactctaccttccctctgctctcctccctccctatcctacttgcccatatgagcacggctccccatggccacatactcctgcaaagcttttatgctgcttcgcttttctctaaacagatctgatattgctgctcctgtggttttctcaaaattaactttgccgtggtttttaaaaaggaatcaaaatgcattgttgcattaagctttttcaataaaggaaaattacggaaggaaaataggcaacaccagcaaattatatgtggacaggttctaaactctatatatacatatatatatatatatctatatatctatatacgtaatcatctagttctgtcatcttactgaaaggaataacacttctaaagatcaccatttctgagaagttcttggaaatctttatgtctaagtgattgtattagatcagcaataatgactatgtaatctcaaaaaacaaataaaatattcttaacatgg

SEQ ID NO: 465453 - DNA, 3833 bp, Homo sapiens
tgggaggcggggccgaccaagagcaggagctggagtctgagccggtggttgcagcggaggcggtgatgtcggtgcaggttgtgtcagccgcggctgccgccaaggtgcctgaggtggagctgaaggacctgagcccctccgaggcggagtcgcaactaggactgagcacggccgccgtgggcgccatggcccccccggcgggcggtggagaccctgaggctccagctcccgccgcggagcggcccccggtccccggcccgggctcggggcccgccgccgctctcagccccgccgccgggaaggtgcctcaggcgtcggccatgaagcggagcgacccacatcaccagcaccagcggcaccgcgacggcggcgaggccctggtcagccccgacggcaccgtcaccgaggcgccgcgcacagtcaagaagagatccagtttgctgaccagaagcaagaattcaacaaacgtcccaccaaaattggacgtcgctctttgtctcgttccatttctcagtcatctactgacagctacagctcagcggcttcatatacagatagctctgatgatgagacatcgcccagggacaagcagcaaaagaactctaagggaagcagtgacttctgtgttaagaacatcaaacaggcagagtttggacgaagagaaattgaaattgctgaacaagaaatgcctgcattgatggctttgaggaagagagctcaaggagaaaagcctttggctggagccaaaatcgtgggttgcacacacatcactgctcagactgctgtgcttatggaaactctgggtgctctgggggcccagtgccgatgggctgcctgcaacatctattccactctcaatgaagtggctgctgctctagcagaaagtggatttcctgtttttgcctggaagggagagtcagaagatgacttttggtggtgtatcgatagatgtgtgaatgtggagggctggcagccaaacatgatcttggatgatggaggggatcttacccactggatttataaaaagtatcccaacatgtttaagaaaatcaagggcatagtagaggagagtgttactggagttcacaggctgtaccaactgtccaaagctgggaagctgtgtgttccagccatgaatgtcaatgactcagtcaccaaacagaaatttgacaacctctactgttgccgtgaatcaattcttgatggacttaaaaggacaacagacatgatgtttggtggaaagcaagtggtagtctgtggctatggagaggtggggaaagggtgctgtgctgccctgaaagccatgggctccattgtgtatgtaactgaaattgaccccatctgtgccctgcaagcctgtatggatggatttcgactggtgaaattaaatgaggtcatccgacaagtggacattgttattacctgtacaggtaacaagaatgtggtaaccagagagcacttggaccgtatgaagaatagctgcatcgtttgtaacatgggacattccaacacagagattgacgtggcgagtctgcggacaccagaactgacctgggagcgagtgagatctcaagttgaccatgtgatatggcctgatggcaagaggatagtactgctggcagagggccgcctgctgaaccttagctgctccacagtgcctacatttgtgctctcaatcactgctactactcaggctcttgccttgatagagctttacaatgctcctgagggtcgctataagcaggatgtctacctgttgcccaagaagatggatgagtatgtggccagcctacacctgcctacctttgatgcccacttgacagagctgacagatgaacaggccaagtatctgggactcaacaagaatgggcccttcaagcctaattactacaggtattaagttcctgtaactcaaaccagaatttttaaggaatagaactccaagccttttctccactactatacaagaaagaattcagcaagctgcttctccaatcaaagctgcctgccgtgctcaccctgtgtgttaggttatttatttattaaaatcaagaatcctgtgcctgtagtgttggcccagagtgtggttactgccctgagggccatgaaagccacagaggatgggctgaggaaggaaagaaatggggttactgctcccagtgcatcatttgcatcattccccattgactgaatcctcagcagtggccgtttttcctcttgtccaggctcacgagttagtccagggattccatactccctattccctggagttttctggaataaattttcagcacctgcttttctcagcttggcccttccccgggtgaggccgtttggaattaacatggccagtgtttcacacaagattgggttcccaatcttgaccatcactatcactgccttctttatataaaggctaataaggaaggagtgttatttatggctttgccaagctacatcaagaactcagctgtgctgtgcctaccaggggtctcctttcttacccaggactcctttcttctccttgaatatttatgtccattttaacacttcctggttgcaagagggatgtgcctccattatttcctccacagttttggtatttgtcagacatttgttctgctgtctttctaatccagccaacgtctgctcaggaagtggggccagctccactgggacccatagttttacttccttgtcatttgattggatagtttccaaggaagcccctccagattggcactatctcagaaaaggagagcttgttgtgaaacactgcttcctgaaacttcctgctattgcctaaagctacgtctgaaactgagtagggaaaggcatacttttccagggacttagggggataggctttggaaatgggacaggtctttcagactcacagcttgataccctaacaaagcagagtatatttatttgtttcccaggaaggccattgcagtttgactggctgagggatacagagatgaaattgtaaactgtatccagattatcaaagctaatttgactagtttgaacctcgtcagacattcattcctttggccattgccatggatgaaaccgagatctgcagtctgatctgtggacttctctgctggcatatcttttatgatttaacctcttccatttgatgattctgtatttcagagtcagtttcttgagtaactccagtgctacaaaaagaattagtaatgtggtgtgggcagcgtgacattttatgtcccacccaaaaattggattccttttggagactgatctgttggtctcaggcatttcattaggaccagattggttctaagagttagtctggactggccctaggaaacttgaattaaataagcctcttccccttaccgatcctttttaacactctcaggtttgtttgtttcccacttttttcctatgctggtctgcctcaaagtctcaagaccaaggtgactcaagataacaccagaccacgcatgatcaccaaaaccttcccatcctgattctcttcttctacctctaccctctccaacttctcctggtcttcacatatactctcaaagctagtctgaaagtgaccttactttcggaagtagggaagtggaactttggtaaatgactgtttgcctcatttaatagtatacaggctcagcccatagactacagttcttcagaggccatatgtctcagcaagtactggttatattctttttttgtaaggaagatcataaatgctaaaaattccactaagccattcagttcttccttttgcctacctagtcctgatttttgccttgacattctcaatggtgtcactcggctccacttcgaga

SEQ ID NO: 465454 - DNA, 3742 bp, Homo sapiens
  misc_feature (2)..(2): n is a, c, g, or t
  misc_feature (5)..(5): n is a, c, g, or t
  misc_feature (8)..(10): n is a, c, g, or t
  misc_feature (12)..(12): n is a, c, g, or t
  misc_feature (14)..(16): n is a, c, g, or t
tnccnggnnncntnnncagagagcccttcgccaaccctgggaaagccccaaacgacagctcccgagcgccacccggaccagactccaggaccgccctgtcccgccaccctttttcccgcccagactccacgtcttctgaaagagggcgtggcccgcaggaagttctcgcgttacggaaagtgaagtgtttccggctccggtgtcatggccggctcctaccctgaaggtgcacctgcaatcctcgccgataagaggcagcagttcggaagccggttcctgagcgatccggcgcgcgtcttccaccacaatgcctggtaatcaccctgccccctcgcccggcctgtcgctggccgtctgtcccgccgcctcggagcattccgaaaagcccctgaccgccggccacgagtcaagctgccctacccgaggcactctccaaggggagagaaactcctaggccagcgactcaccctgctcgcagccaggacgtgaagcccctaagctgcccgtttgattttctcagggacaatgtggagtggtcggaagagcaagccgcgcggcggagagaaaagtccaggagaacagtatccagcgggtgtgccaggagaaacaaggtgcgcttaaatgggctctcgttggtatcaacagccagcgtactgccgaacgcgccctcccggagaggccagggaaccgcggccgcccacatcctttattcctggcctgatgcggatctcaggaagccttgaacataaaacacagacacctcctgtggaggagaatgtaactcagaaaattagtgacctggaaatttgtgctgatgagtttcctggatcctcagccacctaccgaatactggagacaaattcagaatatgatccttctcggtgttttgcctttgttcacgacctgtgtgatgaagagaagagttacccagtgcccaagggcagtcttgatattatcattctcatatttgttctttcagcaattgttccagacaagatgcagaaggctatcaacaggctgagcaggcttctgaaacctggggggatggtacttctgcgagattacggccgctatgacatggctcagcttcggtttaaaaaaggtcagtgtctatctggaaatttctatgtgagaggtgatggaaccagagtttacttcttcacacaagaggaactggacacgcttttcaccactgctggactggaaaaagttcagaacctggtggaccgccgactgcaggtgaaccgagggaagcaactgacaatgtaccgggtttggattcagtgcaaatactgcaagccccttctgtccagcaccagctaagaggcacctgctgccaacacgatgcaagcccgttgtgtttccgagcttttttaaaaaaaaatttgtagcaccgggcatggtgcatgcctgtaatcccagccactcaggaggctgaggcagggaggatccattgagcccaggagtccagcctgggcaaaatagcgagagaccctgaatctgaaagtaatgataaaataaaaagaatataaatgaggtctcgttgatgctggacaattcaagaattcagacttgaaccttaaacctaggaaaagttactttgtatcaggattctaacaattatgcttcatatttgtgaagtcctttaaaacataattttctcaagttctttctttgagacctcaatctgtcttagcattttgtaactaataactgaaattttattcaaaggaattgtaaaccttaaaccaccaatttatttccatgtgaaaaagtgttatatatgacaagtgttttttgattgtaattgcgttaaatcttttgagagtgtaaatgccgggctaggcaattgcagttaatacatacaggggttagtgaagggcttattaagttgtaggggaagcaagctgggaagaatcagatcagatattttcctgacaaaaaaaaaatgaccctgtagacagcatcaaaatgtggtgttcttgttaagtaattgatcgtggtctttgctttaatcttagttccgccaggcacggtggctcacacctgtaatcccagcactttgggaggccgaggcgggcagatcacctgaggtcaggagttcgagaccagcgtggccaacatggtgaaaccccgtctctactaaagataaaaaaattagctgggtgtgttggtgggtgcctgtaatccagctactcgggaggctgaggcaggagaatcacttgaacccaggaggcagaggttgcagtgagctgagattgcgccactgtactccagcctgggcaacaaagcaagactctgtctcaaaaaaataaaaataaaaaaaatcttagttccatggaattttaagcactgttccccctctaacctatgtctaaagaattaaaagaatttggctgggtgcggtagctcatgcctgtaatcccaacactttgggaggctgaggcaggtggatcacgaggtcaggagatcgagaccatcctggctaacacggtgaaacctcgtctccactaaaaataccaaaaaaaatagctgggcatggtggcatgcgcctgtagtcccctgtagtcccagctactcgggaggctaaggcaggagaatcgtttgaacctgggaggcagaggttgcagtgagccgagatcatgtcactgcattccagcctgggcaacagaggaagactctgtctcaaaaaaataaaagaaaagaattttcactttttgcaaaattatctttttttactgcacccttaagtgtttgacacaaaaggaattgagagaacttcttaattttaaccacatcatcacttcactctgaatgtgatcactgtcagtgttagatgctttttttttttttttttaggagacagggctctcactttgttgcccaggctggagttcagtggtgcaatgatagctcattatcacctcgaacttctggcttgagccatcgctccacctcagcctcctgagtagctaggactgcaggtgggcaccatcatgcctagctaattgttagatcctttttttttatgttctgcattttttcaattatttttacatatttctgtcttgatccatgcagttataggatatatccttaattttagaaagtaaggacttttcgaccaggcatggcggctcacgcctataatcccagcactttgggaggctgaggtgggcagatcacttgaggtcaggagttccagtccagcccggctaacatagtgaaaccccgtctccactaaaaaataaaaaatcagcccggcatggttgtgggcgcctgtaatcccagctactcaggaggctgaggtaggagaattgcttgaacctgggaggcggaggttgcagtgagctgagatggtgccattgcactccagcctgggcgacaagagcgaaactgcatctcaaaaacaaagatgcctagctttcaccttgttgatgtttttctaaattttggaataataaatttatataggaatactgcaagaatagtccatttttttctgatgtcccaacatcagcaaatatattaccaaatatatccatcacaagtaggaatacatggaaacattaatgccagccactaaccattcatgtttacccagtagtcccaatatagctctgtcacacagatacatgattaagttggctgagcacagtggctcctgtaatcttagaattttgggagcccaaggcaggaagattacttgaggccaggagtttaagaccaggctgggtaatgt

SEQ ID NO: 465455 - DNA, 432 bp, Homo sapiens
caataagagctactccagcctgggcaataagagctactccagcctgggcaataagagctactccagcctgggcgacaagagcgaaactgcatctcaaaaacaaagatgcctagctttcaccttgttgatgtttttctaaattttggaataataaatttatataggaatactgcaagaatagtccatttttttctgatgtcccaacatcagcaaatatattaccaaatatatccatcacaagtaggaatacatggaaacattaatgccagccactaaccattcatgtttacccagtagtcccaatatagctctgtcacacagatacatgattaagttggctgagcacagtggctcctgtaatcttagaattttgggagcccaaggcaggaagattacttgaggccaggagtttaagaccaggctgggtaatgt

SEQ ID NO: 465456 - DNA, 1577 bp, Homo sapiens
ccacagctatagaactggtccagacaaattcagaatatgatccttctcggtgttttgcctttgttcacgacctgtgtgatgaagagaagagttacccagtgcccaagggcagtcttgatattatcattctcatatttgttctttcagcaattgttccagacaagatgcagaaggctatcaacaggctgagcaggcttctgaaacctggggggatggtacttctgcgagattacggccgctatgacatggctcagcttcggtttaaaaaaggtcagtgtctatctggaaatttctatgtgagaggtgatggaaccagagtttacttcttcacacaagaggaactggacacgcttttcaccactgctggactggaaaaagttcagaacctggtggaccgccgactgcaggtgaaccgagggaagcaactgacaatgtaccgggtttggattcagtgcaaatactgcaagccccttctgtccagcaccagctaagaggcacctgctgccaacacgatgcaagcccgttgtgtttccgagcttttttaaaaaaaaatttgtagcaccgggcatggtgcatgcctgtaatcccagccactcaggaggctgaggcagggaggatccattgagcccaggagtccagcctgggcaaaatagcgagagaccctgaatctgaaagtaatgataaaataaaaagaatataaatgaggtctcgttgatgctggacaattcaagaattcagacttgaaccttaaacctaggaaaagttactttgtatcaggattctaacaattatgcttcatatttgtgaagtcctttaaaacataattttctcaagttctttctttgagacctcaatctgtcttagcattttgtaactaataactgaaattttattcaaaggaattgtaaaccttaaaccaccaatttatttccatgtgaaaaagtgttatatatgacaagtgttttttgattgtaattgcgttaaatcttttgagagtgtaaatgccgggctaggcaattgcagttaatacatacaggggttagtgaagggcttattaagttgtaggggaagcaagctgggaagaatcagatcagatattttcctgacaaaaaaaaaatgaccctgtagacagcatcaaaatgtggtgttcttgttaagtaattgatcgtggtctttgctttaatcttagttccgccaggcacggtggctcacacctgtaatcccagcactttgggaggccgaggcgggcagatcacctgaggtcaggagttcgagaccagcgtggccaacatggtgaaaccccgtctctactaaagataaaaaaattagctgggtgtgttggtgggtgcctgtaatccagctactcgggaggctgaggcaggagaatcacttgaacccaggaggcagaggttgcagtgagccgagatcatgtcactgcattccagcctgggcaacagaggaagactctgtctcaaaaaaataaaagaaaagaattttcactttttgcaaaattatctttttttactgcacccttaagtgtttgacacttgcatccgaggggatcctctgacgccacg

SEQ ID NO: 465457 - DNA, 321 bp, Homo sapiens
ggagcagagaactttcttatggcagaagcaggctgtccttgggcctcttcgggctgaaggcagtggattgaggccacagctgtgagcaggcagctaacgtccttcagttctaactgaagagtagaggagcttagatctcagacttggtgtgtcagttgaggaagtccactggctttttgggatatgctacagggaaagagaaccctgtctttaaggagacctgattaactataattccctgtgtctccacaggatgcagaaggctatcaacaggctgagcaggcttctgaaacctggggggatggtacttctgcgagatta

SEQ ID NO: 465458 - DNA, 432 bp, Homo sapiens
caggcttctgaaacctggggggatggtacttctgcgagattacggccgctatgacatggctcagcttcggtttaaaaaaggtattttgagagtgctgaatcctaaccactagagatcatgtcctttgcagggacatggatgaagctggaaatcatcattctcagcaaactaacacaagaacagaaaaccaaacaccatattttctcactcataagtgggagttgaacaatgagaacacatggacgcggggtggggggcatcacacactggggcctgtctggaggtgggggggctgggagagggagagcattagcagaaatacctaatgtagatgacgggtagataggtgcagcaaacctccatggcacgtgtatacatatgtatcaaacctgtatgttctgcacatgtaccccagaacttaaagtataattt

SEQ ID NO: 465459 - DNA, 3221 bp, Homo sapiens
ccacagctatagaactggtccagacaaattcagaatatgatccttctcggtgttttgcctttgttcacgacctgtgtgatgaagagaagagttacccagtgcccaagggcagtcttgatattatcattctcatatttgttctttcagcaattgttccagacaagatgcagaaggctatcaacaggctgagcaggcttctgaaacctggggggatggtacttctgcgagattacggccgctatgacatggctcagcttcggtttaaaaaaggtcagtgtctatctggaaatttctatgtgagaggtgatggaaccagagtttacttcttcacacaagaggaactggacacgcttttcaccactgctggactggaaaaagttcagaacctggtggaccgccgactgcaggtgaaccgagggaagcaactgacaatgtaccgggtttggattcagtgcaaatactgcaagccccttctgtccagcaccagctaagaggcacctgctgccaacacgatgcaagcccgttgtgtttccgagcttttttaaaaaaaaatttgtagcaccgggcatggtgcatgcctgtaatcccagccactcaggaggctgaggcagggaggatccattgagcccaggagtccagcctgggcaaaatagcgagagaccctgaatctgaaagtaatgataaaataaaaagaatataaatgaggtctcgttgatgctggacaattcaagaattcagacttgaaccttaaacctaggaaaagttactttgtatcaggattctaacaattatgcttcatatttgtgaagtcctttaaaacataattttctcaagttctttctttgagacctcaatctgtcttagcattttgtaactaataactgaaattttattcaaaggaattgtaaaccttaaaccaccaatttatttccatgtgaaaaagtgttatatatgacaagtgttttttgattgtaattgcgttaaatcttttgagagtgtaaatgccgggctaggcaattgcagttaatacatacaggggttagtgaagggcttattaagttgtaggggaagcaagctgggaagaatcagatcagatattttcctgacaaaaaaaaaatgaccctgtagacagcatcaaaatgtggtgttcttgttaagtaattgatcgtggtctttgctttaatcttagttccgccaggcacggtggctcacacctgtaatcccagcactttgggaggccgaggcgggcagatcacctgaggtcaggagttcgagaccagcgtggccaacatggtgaaaccccgtctctactaaagataaaaaaattagctgggtgtgttggtgggtgcctgtaatccagctactcgggaggctgaggcaggagaatcacttgaacccaggaggcagaggttgcagtgagctgagattgcgccactgtactccagcctgggcaacaaagcaagactctgtctcaaaaaaataaaaataaaaaaaatcttagttccatggaattttaagcactgttccccctctaacctatgtctaaagaattaaaagaatttggctgggtgcggtagctcatgcctgtaatcccaacactttgggaggctgaggcaggtggatcacgaggtcaggagatcgagaccatcctggctaacacggtgaaacctcgtctccactaaaaataccaaaaaaaatagctgggcatggtggcatgcgcctgtagtcccctgtagtcccagctactcgggaggctaaggcaggagaatcgtttgaacctgggaggcagaggttgcagtgagccgagatcatgtcactgcattccagcctgggcaacagaggaagactctgtctcaaaaaaataaaagaaaagaattttcactttttgcaaaattatctttttttactgcacccttaagtgtttgacacaaaaggaattgagagaacttcttaattttaaccacatcatcacttcactctgaatgtgatcactgtcagtgttagatgctttttttttttttttttaggagacagggctctcactttgttgcccaggctggagttcagtggtgcaatgatagctcattatcacctcgaacttctggcttgagccatcgctccacctcagcctcctgagtagctaggactgcaggtgggcaccatcatgcctagctaattgttagatcctttttttttatgttctgcattttttcaattatttttacatatttctgtcttgatccatgcagttataggatatatccttaattttagaaagtaaggacttttcgaccaggcatggcggctcacgcctataatcccagcactttgggaggctgaggtgggcagatcacttgaggtcaggagttccagtccagcccggctaacatagtgaaaccccgtctccactaaaaaataaaaaatcagcccggcatggttgtgggcgcctgtaatcccagctactcaggaggctgaggtaggagaattgcttgaacctgggaggcggaggttgcagtgagctgagatggtgccattgcactccagcctgggcgacaagagcgaaactgcatctcaaaaacaaagatgcctagctttcaccttgttgatgtttttctaaattttggaataataaatttatataggaatactgcaagaatagtccatttttttctgatgtcccaacatcagcaaatatattaccaaatatatccatcacaagtaggaatacatggaaacattaatgccagcctgaccaacgtggagaagccccgtctctactaaaaatgcaagatagccaggtgtgatggcgcatgcctgtgaccccatctacttggaaggctgaggcaggagaatcacttgaatctgggaggcagaggttgcagtgagccgagatggcgccattgcgctccagcctgggcaacaagagtgaagctccgtctcaaaaaaaaaaaaaaaaaaaaatttacggggcttgggggggggcccctgtattcccagttatctggggaggctggagtctagagaatcttttggaacctgggggaggcgggaggttgcagtgagccgaggatcggccaattggcactcaagcctggggcaacagtcgagactcggtctcaaatataaaaaaccaacaaaaattggtccacaaataattatttggttttggattcttcaacaaaaaaaaacaaaatacaatataaaacaaaaacacaagcctt

SEQ ID NO: 465460 - DNA, 1141 bp, Homo sapiens
ccacagctatagaactggtccagacaaattcagaatatgatccttctcggtgttttgcctttgttcacgacctgtgtgatgaagagaagagttacccagtgcccaagggcagtcttgatattatcattctcatatttgttctttcagcaattgttccagacaagatgcagaaggctatcaacaggctgagcaggcttctgaaacctggggggatggtacttctgcgagattacggccgctatgacatggctcagcttcggtttaaaaaaggtcagtgtctatctggaaatttctatgtgagaggtgatggaaccagagtttacttcttcacacaagaggaactggacacgcttttcaccactgctggactggaaaaagttcagaacctggtggaccgccgactgcaggtgaaccgagggaagcaactgacaatgtaccgggtttggattcagtgcaaatactgcaagccccttctgtccagcaccagctaagaggcacctgctgccaacacgatgcaagcccgttgtgtttccgagcttttttaaaaaaaaatttgtagcaccgggcatggtgcatgcctgtaatcccagccactcaggaggctgaggcagggaggatccattgagcccaggagtccagcctgggcaaaatagcgagagaccctgaatctgaaagtaatgataaaataaaaagaatataaatgaggtctcgttgatgctggacaattcaagaattcagacttgaaccttaaacctaggaaaagttactttgtatcaggattctaacaattatgcttcatatttgtgaagtcctttaaaacataattttctcaagttctttctttgagacctcaatctgtcttagcattttgtaactaataactgaaattttattcaaaggaattgtaaaccttaaaccaccaatttatttccatgtgaaaaagtgttatatatgacaagtgttttttgattgtaattgcgttaaatcttttgagagtgtaaatgccgggctagtttcgctcttgttgcccaggctggagtacaatggcacgatctcggctcactgcaatctccacctcccaagtttaagtgattctcctgcctcagcctcccaagtagctggaattacaggcatgcagcac

SEQ ID NO: 465461 - DNA, 1339 bp, Homo sapiens
ggtgcccaagacctaacactggagatgtcagctgtggagagtgagaagacaagcccctcagtgggacatctcacagcgctccttaagagcagcgtggccctggtccccatgatccatggaacagaggcggccccagctgtctccgcaggattatgcaccgcgcgtcatgagccgagggggacaggacccgtggagcaccactctcgaaagccctttccctggggccagatggccagcaccatggacagcagctcgccagccttcgctgagcctccaccagagaggcaaggggaggacactagggaggccaggagaggctacgggaggacgctcgggaggccacgagaggctacaggaggatgcttgggaggccatgagaggctatgggaggacgctcaggacaaggaatcacgcaagtgggaaaccgtccttgcgagcgcctcacgtgagccacagtcaccgcacaaagtctccatcgcgttggacgctggagtgacaggaaacacgttcgctcccattggaaacagcacgtgctccagcagagctcagagccccggcagcccctccatccaccgagacatacacggctggaaggacgtggtgctgcggaccatgggtggttcttctgccacatttgctgggacttgtcctaaggacattttcaatttctgaaatcagtcgccattgacggccagggttctcattcctgaatttttgtctttgcttctggttaccagagatccaaagctgcagtcgtttagctggtttctgtttccaggggtattgtgaatggaaataaaccatgaaaatgaccgaagacgtcacaaggaaagcaaataggatttaaaacagcaaagcggtgcctttgccaattccagggagtgtttctgctacataaccctgtctgtgctgggcagtgccgctcccgtgcacccaggactggaaaagcatagcttaggggttcaggggagaaacagtgacctctgcatcagaaaagtcctagataagttgccaggaaaggcaacagcacctggaatgagagacaagctcaggactcgtgccccaggctgcagggacacccacagagctgacttctcctcggtcaaccagcccccagtgctcggaagcatctggcccaggcacaagcatgctcctgctgctacggcagctgaattgggaagtatggcgggggcacagatgccccaggtggacggccaggcctctggtccacacacaggcattcactccccatgtggccatgagcccccgattctccaagtcctgtgttctcacctgtaaaatacggaagctatgctagacaactgctgacttccctcac

SEQ ID NO: 465462 - DNA, 1450 bp, Homo sapiens
gcaaaaaaaaaaaattctagatagaaacagcctcctggatccctctctcactgcggaagaaagccgccaaggagagtcacctgttcatgttggactttgtgtgcatgaaaaacaaactttcattgtgttaaaccactgagattgggatggatatttgttactgctgcatcctctaatctaatatgtcagaggactgcagccgcaccataccctgcagttctgaagccctgcagggagccccctcggcttgtcctgtggtccctttaggaaggtgggcctggctcagaagttgcatccagaggaaactgagctcctgcacctgctccacttgatgaatgacaaacagcaacagatgcgcagagcggggggaggttgaaggctttgtctgcctttgcggcccacgcacagaaagcggttcccctgccaacgaccaggtggctttgcccaaatatggagaaacactttaggccattagttctggtttgagctaagcagaataaactaatcttcccctggccaaatgggaattggctgcctgcatctctgacgttcacagtcaaggtcctctgagtccgcctgtttcacaagtacctgctaatggattcattagctatttatttttccttctctaaaaatgtaatttgtagcaaggggaaatctctggaaggacatggtaaattattaaaagcagtgatctttgagtggtgggattatgggagctttttgccccctctgggcttttttccataattgttttgtacactgtgtgtatatggatattttttttcctgtggtttggcacatgtgtacactcaacacacacacacacaacctctcccgtacccacagccagtctgagtgggagaacctgccatgggccaacacctcttctccaaccctgccccaggacagcaggttgccatacctccaaaacccgacttccagttcctgttgagatccacgccgatgcagaagattccaggtctgatggacttgttcttccgccataagcggttccctcaccatgctgtgggtaaaagcaaacccatcagggtttgtgacgagctctatgaagatgtccatggcattcagtatgtctgtcaggacacggtctttgccataatcactgacaatctgcaagaaagagtgaggagggatgggaggccctactgggtctcctgggaggtggcacaggacattttcacagccagtggctgcaggaagggatggcatgaaacccctgagggcgggatggagacagcaccctgagtgtaactgttgaactgaaggtgcccttaaatagtaagttcctgcccccagttgcagcccccatcgtgggtgcaccttggctacaggtccatgctgaccttattggcagtccagatgccggtggcatgggtgatccactcccgggagtgaattccagtgtcaatccagatggctgggtgcc

SEQ ID NO: 465463 - DNA, 725 bp, Homo sapiens
tttccaggtctttcagtcaccatgctgcttccttcagcttccttctgcataaacactcacatcatgcaggtgttgggtccagtaccagcacctctcaccagtggtctacactattatacaactttagaagaactctggaaaagttttgatctttgtgaagactattttaaacctccatttggaccatatcctgaaaagagtgggaaggattccttggtttccatgaaatgttcattgtttcggttctgtccgtggtcaaaagaattgcctttccagcctccggaggggagcatttcttcacacctaggatcaggagccagtgacagtgagaccgaagagacccggaaagcactacctatacaatcattttcacatgaaaaagagtctcaccaacacagacaacactcggtcccagtcatcagtcgcccaggttccaacgtcaaacccaccctccctccaatccctcagggccgcaggtagactagcacttgatgtctgatcctaacatggaaaacctgctctgctgatgtcgaattccttgccttacctggccatgggtccagctgtttctcactcaacccattacccacggaagaatgttctacctgccttaattctatcagccagtttctcttgtgattctttggctggtgtcttttagttttttaattaaaaaattgtttcttaaatgatttttaaagatgtgagtttttttaatgtgagtt

SEQ ID NO: 465464 - DNA, 1251 bp, Homo sapiens
ggcgccatgagtttatccagcccccccgggagtatgggcctgatggaggacaagtagggcctcgaggacaggtgcgtgacagaagcacaggaaaaaaaagaaaaatgaagaaataaaaacacgagttcatcagtaaagaggtaccctggcagcataaatattatgataagctaaaagctggaatcatctggaaaaataaataagactcctcatgtccttttcggtccataaccagaagggcagcaaaaggcctttgccactggaacctcttctttttctccaagtcccacgtagcaattacctgcactttcaagaagagaaacaacgactacacctaaagaaattccttcttgataggatgtttctagtggccaagatacaagcaaatgtagaaagaaaagatgttgctgactactatgaacaaatgtttcagtcagttttgaaacatcacctaggagaagcagtgacaggattgctgctcatctatcccacttccattctgcatatcctcgagtcctccagcgacactctctacaaagttcttttagattatattggccatgtcaaagatgaaacagtattttttattcaacaaatgaaaattatagtcatttctcataacattccaatgaggctttttatgcaatggcatgtttcagtgataaaagttccagttatgtatctcgacgatgtgacacagtcacagtccctaaaggaggtcatcacagattttctcacacaaactcataaactgtcactctacctttgccagactatgaaagtaggcactaaaggaccaggcgataacttacaccaagttgcacctgacctactcctcccagaacaaatcataaagtacttgtgcaaatccgaagaattcatggacccggcaacatttataaacatgtataatagacccatacacatcactctggattctgaggtggtatggcctgctccttcacgtttctaggattgagagggataatgtgcccatgtctcttaaggagtttgtgctacttaaataaaaaaaacatttttaaagttactggtgtcttttaaaagaaacagaacattgcaatatacacagaggtaatatattaatctttatagagtatgttgagctaaactttaaaatgtatctatttgttgtggtattaagttcaatacattattttactaggtagatgggtttaataagtttatcataagctctcaaatattaacatcattttcatgaattgacacttt

SEQ ID NO: 465465 - DNA, 928 bp, Homo sapiens
gttgtcattagcaaactggcttatttttcaaggttgaagtttcttgacaattcattcaatggtgatttaggccagtagaaataactgctctgtttctaaaaacgggcagaaaggctattgtatttggtcccgttgccgtggtagaagaccccttacctttacagtatgcactttccaggattcagcaatattatggacataactgaggagttgggtttagatatcaagtcatcagggtctggctgtgtagaagttcaaagtattgagggtgataattgcaaaattgaaacagagcatgggactagcatcttgcagtctgttaagggtcaaaaattgcatgttcaaacaaaaggaggcaaagtgatctgtctgggaacagtttatggaaatatagatattcatgcatcagataaaagtgctgtgaccatagataaactgcagggaagttctgttactgtatctaccgaagatgggttgctgaaagccaagtatctttatacagaatcatcatttctgtcttctgctgctggggatattacattaggaagtgttcatggtaagctgacaaaggcgtaatacatctgagactttccacgtagcataaattttaagagatgactctgtagttgaaaaaaggatcaggaaactggccttttaaataatgaaatgcagactaaccatctttttaaaaaaaaaaccataaaaataaaatgactcataaagctaattttattttatttgtgcaagagattaaagattatgctgttatatatggaactaataaattagtcttttttcctatatacatttttacctgttttatacctctgagttcttgatcagagcctttgatcatactgatcatactgtttatattctgcctgaaatgcttttcctagctttttaaaaatcttggtgacttttttaa

SEQ ID NO: 465466 - DNA, 591 bp, Homo sapiens
gttgtcattagcaaactggcttatttttcaaggttgaagtttcttgacaattcattcaatggtgatttaggccagtagaaataactgctctgtttctaaaaacgggcagaaaggctattgtatttggtcccgttgccgtggtagaagaccccttacctttacagtatgcactttccaggattcagcaatattatggacataactgaggagttgggtttagatatcaagtcatcagggtctggctgtgtagaagttcaaagtattgagggtgataattgcaaaattgaaacagagcatgggactagcatcttgcagtctgttaagggtcaaaaattgcatgttcaaacaaaaggaggcaaagtgatctgtctgggaacagtttatggaaatatagatattcatgcatcagataaaagtgctgtgaccatagataaactgcagggaagttctgttactgtatctaccgaagatgggttgctgaaagccaagtatctttatacagaatcatcatttctgtcttctgctgctggggatattacattaggaagtgttcatggttgaatttcccgtcgacgcggccgccaatttaat

SEQ ID NO: 465467 - DNA, 3259 bp, Homo sapiens
ttctacaacttcctcttcccttttgtttctctggccctggggatagtaactgcatcctgcagcaaatacctaaagatgatgaggaagacatcacacatatcaggggaaagagtgtttttggcagagaagacagcaagtataaaggccctaaggcaagaacatgcctgctgtgttcaagaaatgaaagaatgccaggacccagacttgcttcacaattggccggatgctttcacccttcgtggtaataatgcttccaaagttgcaaatccattctggaatcaactgtctgcttctaacccatttttggatgacataactcaactaagaaataacaggaagagaaataatatttccatcttaaaggaagatccttttcttttctgtagagaaatagaaaatggaaattcttttgattcctccggtgatgaacttgatgtgcatcagttacttaggcagacttcctcaagaaattctggaagatctaaaagtgtttcagaacttctggacattttagacgacacagcacatgcccatcagagtatacataactctgaccagatcctactacacgacttagagtggcttaaaaatgatcgggaggcttataaaatggcttggttaagtcaacgccagctggcccgctcctgccttgatttgaatacaattagtcagagccctggatgggcccagacacaacttgcggaggtcaccatagcttgcaaagtaaaccatcaaggagggtcagtacaattacctgaatcagacatcactgttcatgtgccccaaggtcatgtggctgtgggagaattccaagaggtgtctctaagggctttccttgatccgccacacatgcttaaccatgatctttcgtgcactgtgagcccgttgttggaaatcatgttaggcaacctcaatacaatggaagcccttttgctggagatgaaaattggggctgaagtaagaaaggatcctttcagccaagtcatgacagaaatggtgtgtttacacagcttgggtaaagaaggcccttttaaagttttaagcaactgctacatttataaagacaccatccaagtcaagctaatcgacttgagtcaggtaatgtatctagtggttgctgcacaagctaaagctcttccgtcaccagctgccaccatttgggattatatccacaaaaccacctcaattggaatttatggacccaaatatatccatcccagttttactgttgttttaacagtttgtggacacaattatatgccaggacagcttacaatttctgatattaagaagggtggaaaaaacatatctccagttgtgtttcagctctgggggaagcagtcatttttacttgacaagccacaagatttaagtatttctattttttcctgtgatcctgattttgaagtaaagacagaaggagaaaggaaagaaattaaacaaaagcagttggaagcaggtgaagtagttcatcaacaatttttattttctttagttgagcacagagagatgcacttgtttgatttttgtgttcaagtggagcctcccaatggtgaaccagttgcacagttctctatcactactcctgatccaaccccaaacctaaaaagactctcgaatctgccaggctatttgcagaagaaggaggaaatcaagtctgctcctttatcaccaaaaattcttgttaaatatcctacatttcaagataaaacattgaactttagcaactatggggtaaccctgaaggcagtgctaagacaaagcaagattgattacttccttgaatatttcaaaggggacacaatagctctcctcggggaaggtaaggtaaaagctattggtcagtccaaagtgaaagaatggtatgtaggagtcctcagaggtaagattggacttgtacactgcaaaaatgtcaaggtgatttcaaaggagcaagtaatgtttatgtcagatagtgtctttacaaccagaaatcttcttgaacagattgtcctgcctttaaaaaaattgacttatatctactcagttgtattaaccttggtgtcagaaaaagtttatgattggaaagttttagctgatgtcctgggttactcacatctgtccctggaagattttgatcaaattcaagcagacaaagaatcagagaaagtttcttatgttataaagaagttaaaggaagattgccacacagagagaaatacaaggaagtttctgtatgaacttattgtggctcttctgaaaatggattgccaagagttagtcgcacgtctcatccaagaagctgctgttctgacttcagctgtcaagcttggaaaaggctggagggaactagctgaaaagttagtacgactcacaaagcaacaaatggaggcatatgaaattcctcatcgaggaaacactggagatgttgctgttgagatgatgtggaaacctgcctatgattttctgtatacctggagtgctcactatggaaataactacagagatgtgttacaagaccttcagtcagctttggacagaatgaaaaaccctgtgactaaacactggagagaattaactggagttttaatactagtaaattctttggaggttttgagagtaactgcattctccacttctgaggaagtatagaaacaaagcgtgtgtttttgatgggagggaaaatgaggtaatggtgtgtgtgtgtgtgtgtctgtgtgtgtctgtgtgtgtctctgtgtgtctgtgtgtgtgtgtctgtgtgtgtgtgtctgtgtgtgtgtgtgtgtgtgtgtaggaaagaaagaatctcagaaaagcattatattaattttcttcatgctcaaaaccagtttttttttcctgatgaaagcacagcctaactgataaccaagatgggttttatcctcaaatatgtatttttgtgagcccatgatcattttttccttaatatatagttcctgtttaatgtttgttcaactatattcataatttgctgtacatagagaaatgctctttgggatgaaattggatattaggtttttcaaggttgaatggaacggtgtgggttgtggcaaaataagagattagtgatcaaggttatttaaaagaggaagataagtaagtacttgatattacattcctaaatctattttcaagtgatttcactgatagtttagaagaaaaaggaaaatcaaatatcctttcacgctgttagaaaagctctatatttctttctattttgattgctgagaagttactgtatgcttaggaataagag

SEQ ID NO: 465468 - DNA, 2060 bp, Homo sapiens
ttctacaacttcctcttcccttttgtttctctggccctggggatagtaactgcatcctgcagcaaatacctaaagatgatgaggaagacatcacacatatcaggggaaagagtgtttttggcagagaagacagcaagtataaaggccctaaggcaagaacatgcctgctgtgttcaagaaatgaaagaatgccaggacccagacttgcttcacaattggccggatgctttcacccttcgtggtaataatgcttccaaagttgcaaatccattctggaatcaactgtctgcttctaacccatttttggatgacataactcaactaagaaataacaggaagagaaataatatttccatcttaaaggaagatccttttcttttctgtagagaaatagaaaatggaaattcttttgattcctccggtgatgaacttgatgtgcatcagttacttaggcagacttcctcaagaaattctggaagatctaaaagtgtttcagaacttctggacattttagacgacacagcacatgcccatcagagtatacataactctgaccagatcctactacacgacttagagtggcttaaaaatgatcgggaggcttataaaatggcttggttaagtcaacgccagctggcccgctcctgccttgatttgaatacaattagtcagagccctggatgggcccagacacaacttgcggaggtcaccatagcttgcaaagtaaaccatcaaggagggtcagtacaattacctgaatcagacatcactgttcatgtgccccaaggtcatgtggctgtgggagaattccaagaggtgtctctaagggctttccttgatccgccacacatgcttaaccatgatctttcgtgcactgtgagcccgttgttggaaatcatgttaggcaacctcaatacaatggaagcccttttgctggagatgaaaattggggctgaagtaagaaaggatcctttcagccaagtcatgacagaaatggtgtgtttacacagcttgggtaaagaaggcccttttaaagttttaagcaactgctacatttataaagacaccatccaagtcaagctaatcgacttgagtcaggtaatgtatctagtggttgctgcacaagctaaagctcttccgtcaccagctgccaccatttgggattatatccacaaaaccacctcaattggaatttatggacccaaatatatccatcccagttttactgttgttttaacagtttgtggacacaattatatgccaggacagcttacaatttctgatattaagaagggtggaaaaaacatatctccagttgtgtttcagctctgggggaagcagtcatttttacttgacaagccacaagatttaagtatttctattttttcctgtgatcctgattttgaagtaaagacagaaggagaaaggaaagaaattaaacaaaagcagttggaagcaggtgaagtagttcatcaacaatttttattttctttagttgagcacagagagatgcacttgtttgatttttgtgttcaagtggagcctcccaatggtgaaccagttgcacagttctctatcactactcctgatccaaccccaaacctaaaaagactctcgaatctgccaggctatttgcagaagaaggaggaaatcaagtctgctcctttatcaccaaaaattcttgttaaatatcctacatttcaagataaaacattgaactttagcaactatggggtaaccctgaaggcagtgctaagacaaagcaagattgattacttccttgaatatttcaaaggggacacaatagctctcctcggggaaggtaaggtaaaagctattggtcagtccaaagtgaaagaatggtatgtaggagtcctcagaggtaagattggacttgtacactgcaaaaatgtcaaggtgatttcaaaggagcaagtaatgtttatgtcagatagtgtctttacaaccagaaatcttcttgaacagattgtcctgcctttaaaaaaattgacttatatctatcaggaggctgaggcaggagaatggcgtgaacccgggag

SEQ ID NO: 465469 - DNA, 486 bp, Homo sapiens
tcaaattcaagcagacaaagaatcagagaaagtttcttatgttataaagaagttaaaggaagattgccacacagagagaaatacaaggaagtttctgtatgaacttattgtggtgagtattgcttgatcatggtaatgaattgccatcgagaattgtattaacttgacaatatttataactgaacatgtgagaggagaaatgtttaaaaattcaacagtcttaaatacattaaagacactttatagcaaatatagtttttcctacatgatcataaaactggtttcttaaacttgagattcaactgtgatttccccaaaaaccaggatcatcttttaaaagaaaataaaaagttctgtttgtgctgggcttaacagttcagatacaacttctcttcctgtctcaaatatttagacaactcttaagataccagagaggctccataacatgaaagcaaactaaagagaactaacttggccattgttagg

SEQ ID NO: 465470 - DNA, 468 bp, Homo sapiens
tgtttaggttacgagtcgtatgattcagaccgggttcgggatcggtatcgggatgggtatcgggatggcccacgccgggatatggatcgatatggtggccgggatcgctatgatgaccgaggcagcagagactatgatagaggctatgattcccggataggcagtggcagaagagcatttggcagtgggtatcgcagggatgatgactacagagaaggcagggactgctatgaagaccaatatgacagacgggatgatcgacccaaactgaatctaaagcctcggagtactcctaaggaagatgattcctctgctagtaactcccagtccactcgagctgcttctatctttggaggggcaaagcctgttgacacagctgctagagaaagagaagtagaagaacggctacgaaggaacaagagaagttgcagcgtcagctggatgggccaaaactagaacgacggcctc

SEQ ID NO: 465471 - DNA, 1287 bp, Homo sapiens
tccttgctcaagttgcccttggcttgctgtgatggtttggcatctgccatgtggaagatggctagttctgcacctgtctgtgcccccacagactggttccttgaacacaagcaccgagctatcatgacagtcgatctaataactgagatacctacaaaatggcttagagcaggtagcatctacggcatggatcagctggacaaagggatgattcccaatccagactttctggctgaggatgggggtactggtggaggaagcacctatgtttccaaaccagtcagctgggctgatgaaacggatgacctggaaggagatgtttctacaacttggcacagtaacgatgacgatgtgtacagggcgcctccaattgaccgttccatccttcccactgctccacgggctgctcgggaacccaatatcgaccggagccgtcttcccaaatcgccaccctacactgcttttctaggaaacctaccctatgatgttacagaagagtcaattaaggaattctttcgaggattaaatatcagtgcagtgcgtttaccacgtgaacccagcaatccagagaggctgaaaggttttggttatgctgaatttgaggacctggattccctgctcagtgccctgagtctcaatgaagagtctctaagtaacaggagaattcgagtggacgttgctgatcaagcactggataaagacagggatgatcctccttttggccgtgatagaaatcgggattctgacaaaacagatacagactggagggctcgtcctgctacagacacctttgatgactacccacctagaagaggtgatgatagctttggagacaagtatcgagatcgttatgattcagaccggtatcgggatgggtatcgggatggcccacgccgggatatggatcgatatggtggccgggatcgctatgatgaccgaggcagcagagactatgatagaggctatgattcccggataggcagtggcagaagagcatttggcagtgggtatcgcagggatgatgactacagagaaggcagggactgctatgaagaccaatatgacagacgggatgatcgacccaaactgaatctaaagcctcggagtactcctaaggaagatgattcctctgctagtaactcccagtccactcgagctgcttctatctttggaggggcaaagcctgttgacacagctgctagagaaagagaagtagaagaacggctacgaaggaacaagagaagttgcagcgtcagctggatgggccaaaactagaacgacggcctc

SEQ ID NO: 465472 - DNA, 504 bp, Homo sapiens
agggcctccctgcagcacagaatgggcctcaacgcgtggtgtcagctgaaaattcactgatccctgagccctctgcctccctccccctttgaaagagcagcggcctgccccgcttctaaaagccctggggctcctccaagccaacactgctttccaggacatgtgcaaacaaagacagaggcgattccgaggtgaggccaatgcgatcaagcgtggcactggcgtatcccagagcagatggtgtgaatgtgtgtcaccggaggcatatggggcgatggcaaaaccaacaatggtgtccaggcatgtgtctggtggaagggcagatcaagtgacctttccatcaatgctaaggaaaatcaaagaacatctgggaaccaggagggggcctgtgcctgagtccaagccacattttgaaatgcctgccggaggactaaagaggtttctgcaaaattcaccccacccccaaccctccacggccaaggtagccctgacccaaccttccct

SEQ ID NO: 465473 - DNA, 1190 bp, Homo sapiens
agggcctccctgcagcacagaatgggcctcaacgcgtggtgtcagctgaaaattcactgatccctgagccctctgcctccctccccctttgaaagagcagcggcctgccccgcttctaaaagccctggggctcctccaagccaacactgctttccaggacatgtgcaaacaaagacagaggcgattccgaggttggaaactctctttttgtacaattgatgaggagatatctcaaagcccattgattcaggcttatagtgaaaaatctaaaatcctaaaaaaaactataaagaagctatctctgaaaatgctttaagatgtgtgatttcatctcatagagttaaatctttctctttattcagcaggattgtgggaatatcccatagagccctcagagtagacaggtgagagttcaatgctgacacacatccacagaggactccttctccgccaagatgaagggacttgtcaccagacaatggtggcttcactgtgacaaaaaggctgcctgcagcaacccactgcagcatgctaatagtctcgaacatagagccttcatgagccatctccgtggtagggtctcacaggagaaggaggagtttcaagactgtgaggtgggctctggagactgctcttctgactccattcccaaaagaggctgtgtgcatgaattgggtctcctggggatgggaataaagtctgaatcgtcctccacgaactgggaaacttttagtgtggaagactttgagccagacccagaaaaaccccaggttcatgaggaacatggaagtcagactgagccagacctaggaaactctaggcccacaaggaacatggaagtcaggaaaagaggaggccagtgtggaggccacatccaacccagcatcaatccatctcactcccatgtggctccaggaatgaaagctcaattctggagctggccagaagggctccagtttgcaatccaacttttccctgcacgattgagtcatcccacctgggcaccaggccatgctgttgactgtgcaatgaagggaattaggggatgcagttggaagcaacttctgtgtcatctatctgcaccttttttgcaggtgaaggtgcgagatcccatccacacctcaacagattctatcctcacccctatctgaccttattgttgctcacactctgtgtcccagaataaaatt

SEQ ID NO: 465474 - DNA, 1863 bp, Homo sapiens
aattcatggttgagaatgagaatgaaccacatcaaatcgataagcccagaatctgggggtagggtagggcctacggaaagccataatgatgtaggaggacaacgcagcctgataaacaagtggacgacttttcttaaggccagactgatttgctcaattcctggaagtgatggggcagatacttactttgatgagcttcaagatatttatttactccccacaagagatgaaagaaatcctgtagtatatggagtctttactacaaccagctccatcttcaaaggctctgctgtttgtgtgtatagcatggctgacatcagagcagtttttaatggtccatatgctcataaggaaagtgcagaccatcgttgggtgcagtatgatgggagaattccttatccacggcctggtacatgtccaagcaaaacctatgacccactgattaagtccacccgagattttccagatgatgtcatcagtttcataaagcggcactctgtgatgtataagtccgtatacccagttgcaggaggaccaacgttcaagagaatcaatgtggattacagactgacacagatagtggtggatcatgtcattgcagaagatggccagtacgatgtaatgtttcttggaacagacattggaactgtcctcaaagttgtcagcatttcaaaggaaaagtggaatatggaagaggtagtgctggaggagttgcagatattcaagcaacaattgtacattggttcccgagatggattggttcagctctccttgcacagatgcgacacttatgggaaagcttgcgcagactgttgtcttgccagagacccctactgtgcctgggatggaaatgcatgctctcgatatgctcctacttctaaaaggagagctagacgccaagatgtaaaatatggcgacccaatcacccagtgctgggacatcgaagacagcattagtcatgaaactgctgatgaaaaggtgatttttggcattgaatttaactcaacctttctggaatgtatacctaaatcccaacaagcaactattaaatggtatatccagaggtcaggggatgagcatcgagaggagttgaagcccgatgaaagaatcatcaaaacggaatatgggctactgattcgaagtttgcagaagaaggattctgggatgtattactgcaaagcccaggagcacactttcatccacaccatagtgaagctgactttgaatgtcattgagaatgaacagatggaaaatacccagagggcagagcatgaggaggggaaggtcaaggatctattggctgagtcacggttgagatacaaagactacatccaaatccttagcagcccaaacttcagcctcgaccagtactgcgaacagatgtggcacagggagaagcggagacagagaaacaaggggggcccaaagtggaagcacatgcaggaaatgaagaagaaacgaaatcgaagacatcacagagacctggatgagctccctagagctgtagccacgtagttttctacttaatttaaagaaaagaattccttacctataaaaacattgccttctgttttgtatatcccttatagtaattcataaatgcttcccatggagttttgctaaggcacaagacaataatctgaataagacaatatgtgatgaatataagaaagggcaaaaaattcatttgaaccagttttccaagaacaaatcttgcacaagcaaagtataagaattatcctaaaaatagggggtttacagttgtaaatgttttatgttttgagttttggaatttattgtcatgtaaatagttgagctaagcaagccccgaatttgatagtgtataaggtgctttattccctc

SEQ ID NO: 465475 - DNA, 3330 bp, Homo sapiens
cccagccaggggacagcctctggggacacgatgagagttcattgctcgggggacaagccaggcactggggctgggagaaaggcaggctgctgaggaccggacaggcacagaagcccgcccagcacctgggccagtggcaaggctgtccttcggctgagaagatgggcttgcttccccttcaccctttgccaggattgtaagtttcctgaggcttctgtacagcctgcagaactatgagcatgcagaggtcaggacaagagcagctggtccagccacactgtgtgcacagggacaggcctgtcttcacctgtgctcaccggggcctcttccagaggtctctgcagcagaaagcatgtgctccacgtaccggcccccagcgtcccaccagaccagcgccgatccctgtgggagctgaagaggaactgtgctgaatgagaacatttaaagtgaatcatgtgtggactccctatgctccctgactccttgtttatttctaccttttctggcggatgctattaataaaatgctaggaaaatctttaaacatgacatgagtcaagggtacagagctctcagttcaggccctcagtgcctaagaagcaaattttatttgttttttagaatgccacgtagttttctatttcaagctccccttctctcaaggcagataaaactctgcttccaatcatgaagatgccctcctttgccccctggtgtattgacgagattcgagggcagggctctggatccctccaggacaacgctcttgaaactcaaaacccagaaacggtggcccacacacttctttaaatatttttttcttggtgtaataaccctgaggcagaaaatgccaaatgacccgatagggcttgaacaacagcgagaagacagacagacagcagtgcagagcaagaggcacagtgcagcgtgccacaccagccgagaaagacagacagacagcagcacagagcaggggctcagtgtgtgccacagcagctgagacagactaacagaagcacagagcagacgctcagcttgtgccacaccagccaagacagacagcagcacaaagcaggagctcagcgtgtgctacaccagccaagaaagacagacagacagacagacagcagcacagagcaggggctcagcgcatgccacaccagccgagaaagacagacagacagacagcagcacagagcaggggctcagcgcgtgtcacaccagctgagaaagacatgtggagacttagcaggctgatctcggactgtgaaaaacctcagaaaggactttggggatcacctaatcaaggccagcagagtagtgccagaagcgcccgcagcccctcctgcagcctggcagacactgctaagatatcaccgcgttctttcccatggggcttgaacctggcctcagatgccttctcagtggtcctctgcatggcataatcatccctgccagctagcccccaagagggcccctgagctggccccaccaggccacacagcagctggccccaaggggcaggtctgtaggtctccgccctgctcttctcaccaacactgggggctgtcctccgtcccacgtgagcagaggccaggagcagaggaggctagtgaggaggtgatgcaagcaggtcctggaagaattccccagagcccgcatggcagaagacatcaggtctgtgtccagtggaagagccactgcaatggcccatccagatatgcctttgcctggtcccgtgggtcccagagccgtgctgacccacagcaggccaggaaagccccagagaatcacaaggctctgagtggctcctcctactctgagaccacccccccgcaaacccgtcccctacaccccacacatccctccatactggcccatcaagggttggtgccctggtgactgcaggagccctctgtggccagctcccctgctgccccaatcacggggtctggcccctgtcccttacctccaccagcaggaagcagctgagactcccaggcactggccgttagcatcccatggcaggcatctttgacagcagatatgcacgcatatacagcgatgtcgtatacacacgcaaaacacggcaggctgtccctgacaagggcgggcagctggggtgtgaggaagaatttgagaagaaccttaaaaagggggtgggtggagaccagggaagctgtcggcagcccctggccggatcaacatggcagccctctggtgcttctgcagggctcaaacatctgagcaagaagagagcagcttgtggaccaccatatgctagtcttgaaccacgtctaggatgggaggtccgagggacgagggccatggctgatgagggatgcttcccacagtgctgtgcagatccctgtcggcaaagttctcaggtatgcaccatgcagacatggtgttctgtgagtccacagccaagacgctgagtcacagaagactcgagagttccgcccagatcatgtgggtggcttgctttggagggagcagccaccatgccaggaggatgctcaagcagccccaaggagaaggccatgcagagaggacggaagcagccagtgacaacttgccagacacaggttgcgcccctttggaaatggattctccagcccctattgggcctttggatgatgtagcctcagctgatatctgactggaactgtatgaaaggcttcacatgacaacggtccggtcaggtccttctgaaatgcctgacccacagagacactgtgagatgaaagagtccaagacacacttatccatcacagcgatcatgcctgtaagaaaactcttcttactgcactcctacctggaactgaaagatgatgtgttcggcttcaatagatcctgctcgtcacatcagggacagtagtcaatacttttgtatttggacactgggaatcaaggcagaagatctaacagaagatacaaaataattataatacattaattacaatagcaccatgaacacagtgttgcgctttctctgttctctctggctgcagccaggaaaggactcagaccaagaagaactgctggtgtgaggacgtggccgtgctggcctcatgcagtccttcctgcattcattagttgagcaatgcagaatctgtattgacgtgaagttcaagacaaaataaataaagatacatttgtaaattcaaatataattcttcattcactttactaaaaccaagacagaaagtctgttttttacacaaagaattcatcttagcaataacacgctatgtgaacaacaacaatgaaaattctttctggcagcattggtagaaaaaaattaataaagtatagaatcttggtaatc

SEQ ID NO: 465476 - DNA, 695 bp, Homo sapiens
tgatcgagccggtaccctcgcgacgtgttatccctcgcgaacgtgttatcctgagagactttctccaagataaatctctcaaggataacctattttccatcattataattagtaaaaattagaaattttagaaagtcaattggaagccctgtcctgccagtttcttaaatcacaatgtggcctttgtacgattttacttggattttctttttggaatctgttgactgcttggatataaaatgtggggttttgacaaatttttgcaagttttcagctattagttgttacttttgcaccccatttaatttttctgtcccttcactctttctaggacacaatctgcccacagattgtaagactctgttcattttcttcaaactttttttactctttttttcagattgaataatttcaattgttctgtctttttctaatctatgaatcaacctaaaagtactatttaaaatttcattatctttctatttggttctttttaataatgtgcatttctctgctgagattccacatgtattcattcattatgagaattttttttcttcaccccatgactatagttttaatagctgctctcaaatacttgactgctgataacaacatcttggacattttggggatagcttttaatgcctattttatcttgtgtatggatacacttcgcgaggtaccttctcatg

SEQ ID NO: 465477 - DNA, 1889 bp, Homo sapiens
gcacagcttcaattctgtgcagggaggatgcagcaggagagaatatcctgggcacatctttctggagaatcacttttactacaagatttgtaagaaacaaatttatttccaagcccctgggaaacactctcctacttggtgttttctatgactttaactactcttaagtaccacatatgagaagaatcatatagtaaagaaatcatgaggaagaatgataaaaaatgtatcacatgcttattaattttcaataaaaacaccaacagagatcagtagtacctgttgattataaataaacagataaatgagaaaaaggaattggcagtgtgcattgtatttatgacaatggggcctcaagtaccatagcagtgagtcctctgccccaggcacagggctggtcagtggtggagctggaagcccagtgtagctgtctgacacccggatcccatgcctaacccaaatgtcactgagccctaaggcacttcgctcctgctggtccaggcagtgtcccctaagattcatcatggcatgttctccatggccttaaggagttgctggcctactgggataagcgatccagctggcaggacaggttgtagctacaagtcatagaggcagatgtgaggtctctatgtaggagtcacacccctagtctccttcccagtgcctgcccagctggagtgctgggcccccggggtcaccatgcagcagggcctgacactgaccagggagccatggccacaggctcttggcagctggcccaaaataaatattctccataacctctgccgatctgctggaccctcacctctcagtctcactgagccactccgttaactggaggcagacccaaaattgctccacaggctgaaggtgataattgtctacagccagctgaagcagctgcatctcctggagaactttgatctcctgcagctaaagggggggacaagtggaagatgcggataggagggtccaggagacaggggattatgagatttcaggggacaggcctcgaagggacacccaaaatgatgaagctgcagagctgtctgcttgcaaagcccagtgaggttttgcctgagctggactcagactctccctcagatggtgccaatggaaggatagtaaacttaggcctctccaagggcaggcagctcccaatcagtggcgccagcgtgaaactgtccaatcaagtgcgcagctacagaggaagaggcggcctcttcaatatggcggggcctttgtctcctagcttccgggctctgatcctagactacactaagtcagacccaaagccagcacaggactggctctcacataaggcccacagtgaccactacctagctactactgatgttcactcaagacccaagttctcttcagagtctctccacatggctgcagcagcttggattgcactgtactgggtctcacccgccgaagggctgcagcaagttactgcttactggttactgctgatgtttattcaaggcccaagggctctttactcagcaggtgatgaatgctgccagaactggtaccttcccttcaaggcagtgtgttctcttctggcccaggccatgttgtttgaattaagtgccacatatgaggctaaggtgagcccggggtcaatcacgagcgctttcagatacattcacgagaggcatattctcaagaaacaggtgtaatttgtgcagataatcacacctgggaagggatcacagagaaggagaaaaagaaagaaatggcttattctgaggtgaatgtgtctcaggtcagagactgtccaactttttcttctgaaatatcatgtgtgtagaacttgcaaatgtttacttctctactgtcggggaacctgcccccagtctttctattttccataagtg

SEQ ID NO: 465478 - DNA, 636 bp, Homo sapiens
gatagatttggcagtagtctgttaaggatgtcgtgttgggatattataattagtaaaaattagaaattttagaaagtcaattggaagccctgtcctgccagtttcttaaatcacaatgtggcctttgtacgattttacttggattttctttttggaatctgttgactgcttggatataaaatgtggggttttgacaaatttttgcaagttttcagctattagttgttacttttgcaccccatttaatttttctgtcccttcactctttctaggacacaatctgcccacagattgtaagactctgttcattttcttcaaactttttttactctttttttcagattgaataatttcaattgttctgtctttttctaatctatgaatcaacctaaaagtactatttaaaatttcattatctttctatttggttctttttaataatgtgcatttctctgctgagattccacatgtattcattcattatgagaattttttttcttcaccccatgactatagttttaatagctgctctcaaatacttgactgctgataacaacatcttggacattttggggatagcttttaatgcctattttatcttgtgtatggatacacttcgcgaggtaccttctcatg

SEQ ID NO: 465479 - DNA, 253 bp, Homo sapiens
atctttctggagaatcacttttactacaagatttgtaagaaacaaatttatttccaaggtaagaaattaaaactctaaaacaaggctagaaagtcatctgcctttaataacccttagtcatctgtgcctgatatgtgagactttctccaagataaatctctcaaggataacctattttccatcattataattagtaaaaattagaaattttagaaagtcaattggaagccctgtcctgccagtttcttaaatc

SEQ ID NO: 465480 - DNA, 3486 bp, Homo sapiens
ctaattaaatccaatgctacagatcctgggccacatcctttctacacagacactgactctctcagatctgaagcccagccgggggcccatgtccggagggacccaagtgaccatcacaggcaccaacctgaatgccggaagcaacgtggtggtgatgtttggaaagcagccctgtctcttccacaggcgatctccatcctacattgtctgcaacaccacatcctcagatgaggtgctagagatgaaggtgtcggtgcaggtggacagggccaagatccaccaggacctggtctttcagtatgtggaagaccccaccatcgtgcggattgagccagaatggagcattgtcagcccccctggaggacacagtccactacagtactgcccacccctttatgcccacttctcagctgccctaaggataggcactggcatccaggtttcttttgaaaggttacacaagatgaagctcctaggccctccctgtcagcagtcctgtgccctccctctcagcagtcctgtgtcctccctgtcagtggtccttggaaacacacccatcgccgtatgggggacccacctggacctcatacagaacccccagatccgtgccaagcatggagggaaggagcacatcaatatctgtgaggttctgaacgctactgagatgacctgtcaggcgcccgccctcgctctgggtcctgaccaccagtcagacctgaccgagaggcccgaggagtttggcttcatcctggacaacgtccagtccctgctcatcctcaacaagaccaacttcacctactatcccaacccggtgtttgaggcctttggtccctcaggaatcctggagctcaagcctggcacgcccatcatcctaaagggcaagaacctgatcccgcctgtggctgggggcaacgtgaagctgaactacactgtgctggttggggagaagccgtgcaccgtgaccgtgtcagatgtccagctgctctgcgagtcccccaacctcatcggcaggcacaaagtgatggcccgtgtcggtggcatggagtactccccggggatggtgtacattgccccggacagcccgctcagcctgcccgccatcgtcagcatcgcagtggctggcggcctcctcatcattttcatcgtggccgtgctcattgcctataaacgcaagtcccgcgaaagtgacctcacgctgaagcggctgcagatgcagatggacaacctggagtcccgtgtggccctggagtgcaaggaagaacggaatatggtgacagctttggtgctatgtaacagcctgaggctctactgcatgctcactttcctgggggttcttgccactctgttcatctggaggcctgagctgccgccacacacagcagtgcccacatgcaggcttctcttcgtgccagcctttgccgagctgcagacggacatccatgagctgaccagtgacctggatggagccgggattccgttcctggactatagaacttacaccatgcgggtgctgttcccaggaattgaagaccaccctgtcctccgggaccttgaggtcccgggctaccggcaggagcgtgtggagaaaggcctgaagctcttcgcccagctcatcaacaacaaggtgttcctgctgtccttcatccgcacgcttgagtcccagcgtagcttctccatgcgcgaccgtggcaacgtggcctcactcatcatgaccgtgctgcagagcaagctggagtacgccactgatgtgctgaagcagctgctggccgacctcattgacaagaacctggagagcaagaaccaccctaagctgctgctcaggagcccacgggctctgaccagctgcttctttctttgtcttgttccgttggttccctcggtgactgctgacaggactgagtcagtggctgagaagatgctgaccaattggtttactttcctcctctacaagttcctcaaggagtgtgctggggagcccctcttctccctgttctgtgccatcaagcagcagatggagaagggccccattgacgccatcacgggcgaggcccgctactccttgagcgaggacaagctcatccgccagcagattgactacaaaaccctggtcctgagctgtgtcagcccagacaatgccaacagccccgaggtcccagtaaagatcctcaactgtgacaccatcactcaggtcaaggagaagattctggatgccatcttcaagaatgtgccttgctcccaccggcccaaagctgcagatatggatctggagtggcgacaaggaagtggggcaaggatgatcttgcaggatgaagacatcaccaccaagattgagaatgattggaagcgactgaacacactggcccactaccaggtgccagatggttccgtggtggcattagtgtccaagcaggtgacagcctataacgcagtgaacaactccaccgtctccaggacctcagcaagtaaatatgaaaacatgatccggtacacgggcagccccgacagcctccgctcacggacacctatgatcactcctgacctggagagtggagtcaagatgtggcacctagtgaagaaccacgagcacggagaccagaaggagggggaccgggggagcaagatggtgtctgaaatctacctgacccgactcctggccactaagaactacgtgagtcgagctgtgtctggacgtatcctgcctctccagggcacactgcagaagtttgtggatgacctctttgagaccatcttcagcacggcacaccgtggctctgccctgcccctggccatcaagtacatgtttgacttcctggatgagcaggctgataaacatggcattcatgacccgcacgtccgccatacctggaagagcaattgcctgcccctgaggttttgggtcaacatgatcaagaacccgcagtttgtgtttgacatccataagaacagcatcacagacgcctgcctctctgtggtggctcagaccttcatggactcttgctccacgtcagagcaccggctgggcaaggactcgccctccaacaagctgctgtatgccaaggacatccccagctacaagaattgggtggagaggtattactcagacatagggaagatgccagccatcagcgaccaagacatgaacgcatacctggctgagcagtcccggatgcacatgaatgagttcaacaccatgagtgcactctcagagatcttctcctatgtgggcaaatacagcgaggagatccttggacctctggaccacgatgaccagtgtgggaagcagaaactggcctacaaactagaacaagtcataaccctcatgagcttagacagctgagaaccgtccttccagggccgccctggagggggacacaccaagccgtgcctcagtctagattatcatctttaccaagtgcaagttccgactggcatcagcagcatcccctgagcagcgctgtttctctctctttctctctgcctctttcc

SEQ ID NO: 465481 - DNA, 3806 bp, Homo sapiens
  misc_feature (1)..(1): n is a, c, g, or t
  misc_feature (11)..(11): n is a, c, g, or t
  misc_feature (19)..(20): n is a, c, g, or t
ntgtaaaagtnattttganngagaaaaataagcctgtcctcattagtttattatgctaatcaaaatgaacatgaatgtaacaataactacaaatttaaccaacaattttccttacttacatttgcaaaaatcatcaatacaattttagccatttggctatttattttggccacctggccatcactggtatggttaaataatgacagagcatggtaaagtggagtttattgcaataataaaaggataattccatactagaaaacctatcattttcacaaagtaattttaaagattaaaaaaatcacattaatagacctttgaaaaaacattttcatataatttaaatctttaaaaataatataaaatctttaaaaatcataccaaattgtggggactaattcttcttaatcaataaaatctcaacaatatattcagcagttaacaaaagaaccatttccactaaaggatcgggcaggtcccctaccccagtctcggactcagggtcctgtctgaggcggccaccccgaagcgtggggtttgcggagacgtagggcctggcggagggaaggatggggaagcatctcagggaggactggcgtctgccgaatcccagggctgccctgaggggccaagaggggcgagggtggggacgatggaagacaagccacatgccgaatcgggacctgaggccgcgcgcgataggatgggcggacggcttcggagcatttccgggcgtcgcgggactccccgccgacaggagggcggttgccgagcctgtgacatccgcggagaccagcagaccccgggtgtggaggacgccgcaggaagggaactgcgtggctgggtttggccacaaaaagcggagggcactcacccgagcggacctcggctccggagaatccgtttccgggtcaacaaaaaacgtcgcgcgaggggcggggcccgtacgtgcagggaggggaggcagagaaaaaggcggggccgggccggggcggggtctcgggcaggggcggggagcttaccgacctcccgcccccgctgcgcgcgtttctggccctgccagtgtctccgccggttgaaagcgcgtgtctgcgtcgggttctgttggagtgcgttcggtgtgccgtgggtccgcgctgcttccacccaacttcctgttaggacccacccgaggacgggtcaccatggctttggagcacctggtagtgtggcatgtccacagtgaagaccagagtttcgttgtccttaagactgacctggggagacgtggctgcaggccattgaggaagacggcaccgaaagcgaaggaagctcctgctcctcctaaagccgaagccaaagtgaaggctttaaaggccaagaaggcagtgttgaaaggtgtccgcagccacacgcaaaaaagaagatccgcatgtcactcaccttcaggcggcccaagacactgcgactccggaggcagcccagatatcctcggaagagcacccccaggagaaacaagcttggccactatgctatcaatgggccggaagaagatagaagaaaacaacatgcttgtgttcttcgtggatgttaaagccaacaagcaccagatcaaacaggctgtgaagaagctctatgacagtgatgtggccaaggtcaccaccctgatttttcctgataaagagaacaaggcatatgttcgactggctcctgattatgaagctttggatgttgcaacaaaattgggatcgtctaaactgagtccagctggctgactctaaatacatgtgtatcttttcaccataaaagaataatgtttttcataagagtgacaacttaattagaatcaaatctataagctttaagattttacatttctctgcaggacaagttcgagcatcttaaaatgattcaacaggaggagataaggaagctcgaggaagagaaaaaacaactggaaggagaaatcatagatttttataaaatgaaagctgcctctgaagcactgcagactcagctgagcaccgatacaaagaaagacaaacatcgtaagaagcaatagtttctcttactattctgagagccttatcattctacatcccgtcttcctgtgagtttgtctttgtagcatttaactctaattgcagttctcattttaaaaactggcttgcttattgtatattttccccaactaaagcgtgaactcctagcagggcgtggtggctcatgcctgtaatctcagcactgtgggaggccgaggtgggtcgactacctgaggttaggagttcgagaccagcctgaccaacatgatgaaacgctgtctctactaaaaatacaaaaattagctaggcgtggtggctgggacctgtaatcccagctacttgggaggctgaggcaggagaatcacttgaaccctggaggtggaggttgcagtgagcagagatctcaccattacactccagcctgggtgacaagagcaaaactgcatctcaaaaaaaaaaaaaaaagggggtgaacttgaaggcaggtcctgtgtccatcttttcagattctgtatcccagcacttaggacacagacaaacacgaagatgacaatcaatatttgccaaaatgaaaaaacaaaagaaacatgtaacatcatgtaaaagaagctggttaggtggagaaatttatttaccatagtcttgcttgtggatccagtagtgacttttacagtttatatctaaatagaagctggaggctttgttggggactcataggcataaaatattatttattatagagttaaatgctacaaagacaaatctaattaataggcctattttcctttttaaattctactcataatttcttcatagtttttatgataaaagctggcaatgtcacatttctctgaccattctttcattgtcacatctctctctggactcagctaagaaaggttctccatttttaagaactcatgtgattagactgggcccatctgggtaacccaggaagatctctccatctcagtttgcatccttaatcacatctgataagcctttattgcattcggtgtaacatattcacaggttccagggttaggcatgggcatctttgagggccattattctccctaccacattatttgcctagcatctttcattacattgtccatctatttacttactgatttctaatgacatccaaatcagttacaacattttatgtaagcattgtttttatttttatgttattccactagtctatttttctactcatcagttatggtacatgagtttatttttgcaactttaagctcaataacatgttttaagatttcctcaactttctttttgcgcttcttcagaagttgactcttttggccctttggtcttctatacacattttagaaatgctttgttgaggactaagaggaatgctaagattttgataggaatttcattgaattttgagtatattggcatgctacaatggttagtgctttatacatgaaaataatatatcccttcctcttttcctagtatcatgagatgtttgttaggcagacatgaatattgagttgtatcaaatgtggttttctgcattattgtggtggtgatgtgatttagctcctttaattagttaatgtaatgaattacatttgtagattgctctaactattgaaacaagcttgaatttctggaataagcccaatgtgatatttattcaacaaatattcattgagtatacctagtatgtaacatgctttaagaatacaccagtgaaccaaacagaaatatctgacattacagaacttaacattccagtatttggagacagac

SEQ ID NO: 465482 - DNA, 3910 bp, Homo sapiens
  misc_feature (1)..(1): n is a, c, g, or t
  misc_feature (11)..(11): n is a, c, g, or t
  misc_feature (19)..(20): n is a, c, g, or t
ntgtaaaagtnattttganngagaaaaataagcctgtcctcattagtttattatgctaatcaaaatgaacatgaatgtaacaataactacaaatttaaccaacaattttccttacttacatttgcaaaaatcatcaatacaattttagccatttggctatttattttggccacctggccatcactggtatggttaaataatgacagagcatggtaaagtggagtttattgcaataataaaaggataattccatactagaaaacctatcattttcacaaagtaattttaaagattaaaaaaatcacattaatagacctttgaaaaaacattttcatataatttaaatctttaaaaataatataaaatctttaaaaatcataccaaattgtggggactaattcttcttaatcaataaaatctcaacaatatattcagcagttaacaaaagaaccatttccactaaaggatcgggcaggtcccctaccccagtctcggactcagggtcctgtctgaggcggccaccccgaagcgtggggtttgcggagacgtagggcctggcggagggaaggatggggaagcatctcagggaggactggcgtctgccgaatcccagggctgccctgaggggccaagaggggcgagggtggggacgatggaagacaagccacatgccgaatcgggacctgaggccgcgcgcgataggatgggcggacggcttcggagcatttccgggcgtcgcgggactccccgccgacaggagggcggttgccgagcctgtgacatccgcggagaccagcagaccccgggtgtggaggacgccgcaggaagggaactgcgtggctgggtttggccacaaaaagcggagggcactcacccgagcggacctcggctccggagaatccgtttccgggtcaacaaaaaacgtcgcgcgaggggcggggcccgtacgtgcagggaggggaggcagagaaaaaggcggggccgggccggggcggggtctcgggcaggggcggggagcttaccgacctcccgcccccgctgcgcgcgtttctggccctgccagtgtctccgccggttgaaagcgcgtgtctgcgtcgggttctgttggagtgcgttcggtgtgccgtgggtccgcgctgcttccacccaacttcctgttagagtttctctcctgtcacaatggcatggtctcgcctcactgcgacctctgcttcctgggttcaaggattctcctgcctcagtctcccaagtagctgggattacaggacccacccgaggacgggtcaccatggctttggagcacctggtagtgtggcatgtccacagtgaagaccagagtttcgttgtccttaagactgacctggggagacgtggctgcaggccattgaggaagacggcaccgaaagcgaaggaagctcctgctcctcctaaagccgaagccaaagtgaaggctttaaaggccaagaaggcagtgttgaaaggtgtccgcagccacacgcaaaaaagaagatccgcatgtcactcaccttcaggcggcccaagacactgcgactccggaggcagcccagatatcctcggaagagcacccccaggagaaacaagcttggccactatgctatcaatgggccggaagaagatagaagaaaacaacatgcttgtgttcttcgtggatgttaaagccaacaagcaccagatcaaacaggctgtgaagaagctctatgacagtgatgtggccaaggtcaccaccctgatttttcctgataaagagaacaaggcatatgttcgactggctcctgattatgaagctttggatgttgcaacaaaattgggatcgtctaaactgagtccagctggctgactctaaatacatgtgtatcttttcaccataaaagaataatgtttttcataagagtgacaacttaattagaatcaaatctataagctttaagattttacatttctctgcaggacaagttcgagcatcttaaaatgattcaacaggaggagataaggaagctcgaggaagagaaaaaacaactggaaggagaaatcatagatttttataaaatgaaagctgcctctgaagcactgcagactcagctgagcaccgatacaaagaaagacaaacatcgtaagaagcaatagtttctcttactattctgagagccttatcattctacatcccgtcttcctgtgagtttgtctttgtagcatttaactctaattgcagttctcattttaaaaactggcttgcttattgtatattttccccaactaaagcgtgaactcctagcagggcgtggtggctcatgcctgtaatctcagcactgtgggaggccgaggtgggtcgactacctgaggttaggagttcgagaccagcctgaccaacatgatgaaacgctgtctctactaaaaatacaaaaattagctaggcgtggtggctgggacctgtaatcccagctacttgggaggctgaggcaggagaatcacttgaaccctggaggtggaggttgcagtgagcagagatctcaccattacactccagcctgggtgacaagagcaaaactgcatctcaaaaaaaaaaaaaaaagggggtgaacttgaaggcaggtcctgtgtccatcttttcagattctgtatcccagcacttaggacacagacaaacacgaagatgacaatcaatatttgccaaaatgaaaaaacaaaagaaacatgtaacatcatgtaaaagaagctggttaggtggagaaatttatttaccatagtcttgcttgtggatccagtagtgacttttacagtttatatctaaatagaagctggaggctttgttggggactcataggcataaaatattatttattatagagttaaatgctacaaagacaaatctaattaataggcctattttcctttttaaattctactcataatttcttcatagtttttatgataaaagctggcaatgtcacatttctctgaccattctttcattgtcacatctctctctggactcagctaagaaaggttctccatttttaagaactcatgtgattagactgggcccatctgggtaacccaggaagatctctccatctcagtttgcatccttaatcacatctgataagcctttattgcattcggtgtaacatattcacaggttccagggttaggcatgggcatctttgagggccattattctccctaccacattatttgcctagcatctttcattacattgtccatctatttacttactgatttctaatgacatccaaatcagttacaacattttatgtaagcattgtttttatttttatgttattccactagtctatttttctactcatcagttatggtacatgagtttatttttgcaactttaagctcaataacatgttttaagatttcctcaactttctttttgcgcttcttcagaagttgactcttttggccctttggtcttctatacacattttagaaatgctttgttgaggactaagaggaatgctaagattttgataggaatttcattgaattttgagtatattggcatgctacaatggttagtgctttatacatgaaaataatatatcccttcctcttttcctagtatcatgagatgtttgttaggcagacatgaatattgagttgtatcaaatgtggttttctgcattattgtggtggtgatgtgatttagctcctttaattagttaatgtaatgaattacatttgtagattgctctaactattgaaacaagcttgaatttctggaataagcccaatgtgatatttattcaacaaatattcattgagtatacctagtatgtaacatgctttaagaatacaccagtgaaccaaacagaaatatctgacattacagaacttaacattccagtatttggagacagac

SEQ ID NO: 465483 - DNA, 5428 bp, Homo sapiens
ggaggcacctctgacctccagccccgggagtcaaaacgccatctgttgatggggccccgccaaagctgacatagacaggtccagcctccaggtgcccccacaccgttttcttgcattatgaagctgagcggcttctttctactctctgtgaacatcctcctttgcctctgaatgacccagcctggagtcttgaggagtgcagctgcacggaaaccgggatattgcccagagtttgatcttgactgccctttcactctcttacctatgcgctggcgtgataagagttgcagggggtcaagaagtgttgctactacaactgtcggcatcagtgtatggagccctggtggactttggattgagagaggagctaccctctctgcaagagcttcgaagagagaagctaccctttctgcgagagcttcaaagaccagcagacatccgaacaccctgcctgcagagaggagccaccctctccagggccccctctctgttgagagctgaatactcaagggatgatctgcctacagagagtaacaacccactacaggtctcctctgagctcttctaacactaaataaagctcttcttcatcgtcttcacccttcacttgtctgcccaggatgtggtcacacagctgcttggctgacccgggtgtatgtcggctgggggcaacctgaaagactgcttctctgtcctggaatgcaagcacaaggctgtccagctggacttgggggtctgtctgctggaggtggccccagagggctgcttcttagcccacctgaaggcttcccctggtgaggaagcctgtggtgttgtttctcagtcccagggcatggctgcacagctgctcatgcagcctagggcatgtctgccaggggcagcccacagcttttcttgtaagagagggttccccatccgccccccacccccactcagcccacatagcaggaggagcaggaaccttattgtgaactgtgcatgcaagggatctaggttgcatgctccctatggcccccactgccccgccccaccaccccctccctccccacccctatccatggaaaaattgtcttccacgaaatcagtccctggtgccaaaaggtttaggatcactgttgtaagatatgcctgttagtgatgaagttcttcagcttttgattgtctaggaaagtatttctccttcatttctgaaagacaacttttctgggtacagtatccacggataacagttttttttttcttcatcactttgaatatctcatgccactctccttctggcctttaaggttcctgttgagaagtttgtatgtaggagaaaacatccaatattttaccattagagatgatgtttatcagcggcataccaaggattgtggcagtgggagtggttcatctgaggaggagggagtgtttatctctgactctgtttaaaattgccagcacatagtgataatatacagtacagctttttaagccacttttattattattcttaaattctctacaattgggggacctatttattgcttacaactggggtgaactccttccaataacctccttccacttcagtacaccactaagatatgctttaagttgaatatagtgccctttatcatattgagagggagagcttctcttccttgcaggtggagaagttttataataaatgggttttggatttgtcaaatactttctctgttgagatgatcatatagtgaattacactgactaattttaatacaaaacatatcctgaatgtgtgtctcatttgaccttaatgtataatctatttaacatatttttggactgagtttatgactacttggttagagatttttatgcctatgtctatgaaggatgttagactgtaagtaaacttttttataatgttcttcccaggttttagtatcacagttatcttaggctcataaaagaagttgggaagtgttttctctgcttctcttgtcttaaaacatttttgtagaatgtataatttgtagatgtttaatagcatttacctgtgaagccacctggaccagcagtgtactttttggaaaggtttttcattaaaaatttgattgctttaacataggagtcaacaaacttcagcaaagagccaggaaatgaatattgtaagttttatatgccttaagatctttattgcaactccttgtctgtaccactataggacaaaggcagtcaaagatcattcttaccaatggatgtggttgtatgccaacaaacttcacttacagaatcagaagtggtaatctagtctcccagtccaggaatcaaagcaagtgtgtttaacttatatttgtttagttattcagttaattatttgtgctactttcttattgagatacaatttacaaaccatgacatgcaccttttaaggtgtacaatatagtggttttcagtattttgataagcttgtgcaaccctcaccacttgttaattccggaacaacttcattactcccatgaagaacccctatacctgatggcactcaatccttcctcctacctttacttctcccttggcaaccactaacctgctttttatgaattgacttattctggacactttatattaattaaagtatataatatgtggctcattgcatctgacttctttcatgcagaattatgttttcaaagctcatccatgttgtagggtgggatcttttttttttttttactttttatgtatgaataatatttcactgaatggatacatcacattttgtttatccatttatccattggtgaacatttggatgtttctagtttgtatgtactattattaatcctactatgaacatttatgtgcaaattttgtgttaaaatgttttcaattaccttgagtataattcttaaagtggaactgatgagtcacatgataactctatgtttaactcttcaaggaactgccagactgttttccacagaggatgtaccattttatgttcccaccagcaatgtatgaatgttccagattctccacatcctcactaacacttgttattttaggttttttttttttaagattatagctatcatagtacatgtgaagtggcttctcgttgtggttctgatttgcattttcctgaggtctaatgatatcacccatcattttacatgcttattggccatttgtacattttcttttggagaaatgtctgttaaaatctgatgcccagtttttaatcatggtttttgtcttttatggttgattttaggagttctttttgtattttgaatactaggcccttatcagatataaaatttgcaaatattttctcccatgtctgtgggttatcttttcatttcttattagtgccctttgactcaccaaagtttttaactttaatctatttttggatctattattccttttgttgcttgtgcttttggtagcatatctaagaaattgatgctgattaccagatcatgaagatatacatttatgttttcctcaaagagttttgtaattttagttcatatatttaggtcttgttttatttggagcccatttttgtacttgatatgatgtaacagtccatgtatatttttttgcaggtgcatatccagtttttccccattatttgttgaaaagactactctatccccactggatagtttttgtacctttgttgaaaataagacaatttaaaatgtaatggcttatttatggattctcaattctattcctttgatatattgtgtttatccttatgctagtaacacaacatcttgaaattgtagatttgtagtacacgttgaaataaaaaaatgtgagtcctccaattctgccctttttttttaagactgttttggctattctgggtcccttgcatttgtatacaaattttgggattcactgatctatttcaacaaaaattcacctgaagttttctagggattgcattgaatttatagatcaatttgtgaagaattaccagcttggcaacatcgagttttccaatccatgaacacagtatagctttctattttgggggtcttcttttatttccttgaaaaataattttccattttcagtataaaagtttctccattttttggttaaatgaatccctaattatcctattctttttatgctattgtaaatgaaattttattcttaaaaccatagagtgttgtattttgacattatgtcctgaaccttgctgaggtcatttattagctctaataatattttgagggattcttaaggattttctgtgtatgtatgtgtgtatatatatatatatacatgtacatatatgcgtgtatatatatacatatatatgcgtgtatatatatatatacatatatatgcgtgtatatatatatacatatatatgcgtgtatatatatatacatatatatgcgtgtatatatatatatcatcatgtcagtatttcttgcagtcaggttgatggtgatgaactcttcagtttttgtatatccaggaatgccttaatttttccctgacttctgaagaatagacataccaagatatagaatccttggttgataggtttttcttctgccgtttttaatgtgttctctcactaccttctggctttcatgattttaatgaaaaattactgtttagtttattaactgctcatgataagtggcttgtcccttgctttcaaaattttctccttgcctttgtcactaatatttcgatctaggtgtggatctcttagagattttcctacttagtgttctttgagcttcttagatgtagagattaatgtttttaatcaaaataaaaattttcgtcgtcattctatcttcatatattctttctgcgcctttctctttcttctctctcctgagattcccattatgcatatgtttttacactagattgtgttcttcaggtctctgaggctctgttcatttttcttaattattttctttattgttccttagagtgtataatctcaaatgacctgtaattaagttagccgatcctttcttctgtttctgtcttctggtgaacccctgttttgaatttctatttcattggttgtactttacaacttcattacttatctttaattctttctatgttgtaagacattattctcatacattcctttagtcttttgtccagagtttcctttagttatttcagtgtatttataatagctgatgtctttgtctactaatccatcatctgagctcctaaaggatcatctctgttcattgtttcccttcccttctctgtatgggcaatattttttgtttctttgcatgtctcgtaattctttaatgaaattggactttttacataatataatgtggccagtttggaaatcagattctctccccagggtttgtttgcacagtctttgctgttgattacttccttagtaactttcctggactaatttgctaaagtctgtatc

SEQ ID NO: 465484 - DNA, 2027 bp, Homo sapiens
gcagcttgtcacagtcatgggggagttcggggagcattggattcctggatccccagcaggttgataagactgtgagcccagggtctttttttggacgcctagtagcctcagctggccactgacccagatgcctcgagtccttggttttcttctccagggagcgccccacccaccctgcagtcctctcaagcctgcttcctccgaggggaaccctgagataccccagatcagctacgcctccacagcgccagacctgagtgacaacagccgctacgacttcttctcccgcgtggtgccctcggacacgtaccaggcccaggccatggtggacatcgtccgtgccctcaagtggaactatgtgtccacagtggcctcggagggcagctatggtgagagcggtgtggaggccttcatccagaagtcccgtgaggacggtgtccccagtgataagtggctgagcgataacaagggttatccccttggcagctcctcaaatgttccaggcaccagctcgcctcagggcctttgcacgggctggtcctcctgtgggaaagcttctcctgcatgtccacacggcctgcattcttggtgtcttcagctttatcgacagcatgcagccaacacatcaggggacctctgagtcccccacaacacaggtcttcacatccctcactgacttctcgtggctttcctgtctcactttgccacatggagggtcaagcaccacagttggtctctggcttcctgtgtgtcttgttcttgggcccagtggggagcccacagagtagctacttccacagcggtctgccccctaacttctctggcctctgtttatttatttatttatttattttgatatatttgacaaatctctaaactggaatcccatttcttcaagctcattttcttctgttgtttctttctcctccttactgagcctcttcactcagagcacacagggatctgtcccccaggctcccactggacagggatctgtcccgcaggctcccactggacagggatctgtcccgcaggctcccactggacagggatctgtcccgcaggctcccattggacagggatctgtcccgcaggctcccattggacagggatccttccagtttcttcccttggctaaagggcaagtggtgaagcctgcggccctgctcaccccagctcgggtttgggccttgaccttcaggaaagcgtcttcacctgtttgctgaccctggacttctgcctgctttcctggctggggtggggttcctggcactccaagtcccccactctgagctccttggggatgtggctgagataagccccagctgcctttttctctgcatccctggagggacgctgtgaacccaccgtttccttccttgtctcacattcaccacccagcgcttcccacctcaggcctacatgggcccaccaagtgccctggggcggggatgtccagcagcctgcgtcccactctcagccccaccctctaccactgtatggccgtacatgattcacttctccctgagcctccggtttttcatttctaagaccaaaaagggactgtgtgccttcctcagtgagctcatgtatttgggcacgaatggtgcatgcggacatttctgccttgatattccatgttccccaacctggtccctcttccttcttcccagagcccttgagcctgaagagactcggcctcccatgccagccacacagccagcctggcctggcctgtgtacagacccctgagactccttgtgtgtaatacacacattttgaggccatgttcatgaactgtcatgacagatgctgctccccggccccagcctcagcccctgcacagaagtcctgagcattgtccccactttagaggaggggtatggctggtgaggaggggcgtggccatttttttccttctgccctccagcctttgcatccctttcctccacagtaatttattcatctgcagaatgaatatttattgagcactgactatgtgccaggcattggaccaggacactggg

SEQ ID NO: 465485 - DNA, 2513 bp, Homo sapiens
ggagggatggggaatgggagggagacctctgcagcccccatgtctgcagcaacagctgggctggtcttgggagctgaagtcttgggagctctctgcgagctcctggctgtggggatgggtgtggctggacctaccttaccattgggtcaagccagtgcccactagtgcccactactgtgcctggcccagagacagacagacagacagacagacagacagacagacagacaaaccggggaagccgccagcccagggccttggtgtggaactgaggaacaggatggtgcccgcagcaggggtggaccccccttagtctgcaggcacggaacaggcagccatgggtccctgtctctccttctggactcagcaatacgagcatacggctttgtctgcttttgctcactgtggcctcctggggctagagggagtggaagcttaccatgagtacctgtatgtgggccccttcctgcagacaccaccagagatcaggtcagagcaaggggccgccagtgttcaaggacagccgtgggaggcagccaggaatcaggcaaagatcccctgggccctccttggaaaagggggcatggctgtgccccttggggctccttgctgggcctctgccctgcctgcctgggctcctcccggcctcccccacagatcactgttgacaaggttactgagtcagcatgtaaaacctgcaaaaataccccagatcagctacgcctccacagcgccagacctgagtgacaacagccgctacgacttcttctcccgcgtggtgccctcggacacgtaccaggcccaggccatggtggacatcgtccgtgccctcaagtggaactatgtgtccacagtggcctcggagggcagctatggtgagagcggtgtggaggccttcatccagaagtcccgtgaggacggtgtccccagtgataagtggctgagcgataacaagggttatccccttggcagctcctcaaatgttccaggcaccagctcgcctcagggcctttgcacgggctggtcctcctgtgggaaagcttctcctgcatgtccacacggcctgcattcttggtgtcttcagctttatcgacagcatgcagccaacacatcaggggacctctgagtcccccacaacacaggtcttcacatccctcactgacttctcgtggctttcctgtctcactttgccacatggagggtcaagcaccacagttggtctctggcttcctgtgtgtcttgttcttgggcccagtggggagcccacagagtagctacttccacagcggtctgccccctaacttctctggcctctgtttatttatttatttatttattttgatatatttgacaaatctctaaactggaatcccatttcttcaagctcattttcttctgttgtttctttctcctccttactgagcctcttcactcagagcacacagggatctgtcccccaggctcccactggacagggatctgtcccgcaggctcccactggacagggatctgtcccgcaggctcccactggacagggatctgtcccgcaggctcccattggacagggatctgtcccgcaggctcccattggacagggatccttccagtttcttcccttggctaaagggcaagtggtgaagcctgcggccctgctcaccccagctcgggtttgggccttgaccttcaggaaagcgtcttcacctgtttgctgaccctggacttctgcctgctttcctggctggggtggggttcctggcactccaagtcccccactctgagctccttggggatgtggctgagataagccccagctgcctttttctctgcatccctggagggacgctgtgaacccaccgtttccttccttgtctcacattcaccacccagcgcttcccacctcaggcctacatgggcccaccaagtgccctggggcggggatgtccagcagcctgcgtcccactctcagccccaccctctaccactgtatggccgtacatgattcacttctccctgagcctccggtttttcatttctaagaccaaaaagggactgtgtgccttcctcagtgagctcatgtatttgggcacgaatggtgcatgcggacatttctgccttgatattccatgttccccaacctggtccctcttccttcttcccagagcccttgagcctgaagagactcggcctcccatgccagccacacagccagcctggcctggcctgtgtacagacccctgagactccttgtgtgtaatacacacattttgaggccatgttcatgaactgtcatgacagatgctgctccccggccccagcctcagcccctgcacagaagtcctgagcattgtccccactttagaggaggggtatggctggtgaggaggggcgtggccatttttttccttctgccctccagcctttgcatccctttcctccacagtaatttattcatctgcagaatgaatatttattgagcactgactatgtgccaggcattggaccaggacactggg

SEQ ID NO: 465486 - DNA, 3183 bp, Homo sapiens
cgcgtccatgtgaagagaccaccaaacaggctttgtaactaaggcgggccgggctcagaccagcgctgcctcaggatgtgaagtgtaacaagagggccaggggaggtggtgggggacaacatgggcctgtgaggcctgtgggtgcccgcgttccccagctccccccgcagcccgctccacagtggtccgctccggttggttgtcacgtgcgcattcgggttccagacccaaggctgcgtgttctccaccgcttgttgtggccagtgttactgcggtgaccgccagagcagcctcgacgctatggaggagcccggtgctacccctcagccctacctggggctggtcctggaggagctacgcagagttgtggcagcactacctgagagtatgagaccagatgagaatccttatggttttccatcggaactggtggtatgtgcagctgttattggattttttgttgttctcctttttttgtggagaagttttagatcggttaggagtcggctttacgtgggaagagagcaaaaacttggtgcaacgctttctggactaattgaagaaaaatgtaaactacttgaaaagtttagccttattcaaaaagagtatgaaggctatgaagtagagtcatctttagaggatgccagctttgagaaggcggcagcagaagaagcacgaagtttggaggcaacctgtgaaaagctgaacaggtccaattctgaacttgaggatgaaatcctctgtctagaaaaagacttaaaagaagagaaatctaaacattctcaacaagatgaattgatggcggatatttcaaaaagtatacagtctctagaagatgagtcaaaatccctcaaatcacaaatagctgaagccaaaatcatctgcaagacatttaaaatgagtgaagaacgacgggctatagcaataaaagatgctttgaatgacaattctcaacttcagacaagccataaacagctttttcagcaagaagctgaagtatggaaaggacaagtgagtgaacttaataaacagaaaataacatttgaagactccaaagtacacgcagaacaagttctgaatgataaagaaaatcacatcaagaccctgactggacacttgccaatgatgaaagatcaggctgctgtgcttgaagaagacacaacggatgatgataacctggaattagaagtgaacagtcaatgggaaaatggtgctaacttagatgatcctctgaaaggagctttgaagaaactgattcatgctgctaagttaaatgtttctttaaaaagcttagaaggagaaagaaaccacattattattcagttatctgaagtggacaaaacaaaggaagagcttacagagcatattaaaaatcttcagactcaacaagcatctttgcaatcagaaaacatatattttgaaagtgagaatcagaagcttcaacagaaacttaaaataatgactgaattctatcaagaaaatgaaatgaaactctacaggaaattaacagtggaggaaaattaccgaatagaggaagaagagaagctttctagagtggaagaaaagctcagccgtgccactgaacagctggagacctatagaaagctagccaaagatcttgaagaagaattggagagaactgttcatttttatcaaaagcaggttatttcctacgagaaaagaggacatgataattggttggcagctcggactgctgaaagaaacctcagtgatttaaggaaagaaaatgctcacaacaaacaaaaattaactgaaacagagttgaaatttgaacttttagaaaaagatcctaatgcacttgatgtttcaaatacagcatttggcagagagcatgccccgaatggtcccgcaccattgggtcagcgttcatctgaaacgagagcttttctctctcctcaaactttgttggaggatccactgggactctcacctgtgcttccggagggaggaggaagaggcccaagaggcccagggaatcccctggaccatcagattaccaatgaaagaggagaaccaagctgtgacaggttaaccgatcctcacagggctccttctgacactgggtccctgtcatctccggtggaacaggactgtaagatgatgtttcctccaccaggacaatcatatcctgattcagctcttcctcctcaaagggaagacagattttattctaattctgaaagactgtctggatcagcagaacccagaagttttaaaatgacttctttggataaaatggatgggtcaatgccttcagaaatggaatccagtagaaatgatgccaaagatgatcttggtaatttaaatgtgcctgattcatctctccctgctgaaaatgaagcaactggccctggctttattcctccacctcttgctccagtcagaggaccattgtttccagtggatacaaggggcccgttcatgagaagaggacctcctttccccccacctcctccaggaaccatgtttggagcttctcgaggttattttccaccaagggatttcccaggtccaccacatgctccatttgcaatgagaaacatctacccaccgaggggtttacctccttactttcacccgagacctggattttaccccaaccccgcattctgaaggtagaagcgagttcccttcaggattgattccgcctttaatgctactgaacatccaggaccacaaaagaaacctgacaatattgttgctttcttcaaaagtaattttgactgatctcattttcagtttaagtaactgctattacttaagtgattgcacttttgctcaaattgaagtttaatggaattataattctcaggatagtattttgtaaataaagatgttttaaataggaatcttatgagtaaatcattccattttattattctagatcatataactattttaatttggtgaattaatccactgttatagaaacaataatgggagttttatatatgtaatcttgcaggtggggaggctttaaattctaaaggttgtggtgtcttcatgccaagaactgtattcactgtggttgtagataaatgtgaaagtaactttatgcttaatttaataaactttagttgattttttttttaaaaagaaaactgccagaactgaaagtaggtatagatgaatccacaattatagttggaaattttctcttgc

SEQ ID NO: 465487 - DNA, 869 bp, Homo sapiens
tttatgaatatgtctacaaaaaagaaaactaaaaaatgtttgaaaatgtatgaaattattgtagttgctgatgacaaagtggaatattgccttatttgttatttctccaggatgatagcttgtattccaggaactggatggtacccactatttcctgaatgtccatgtgatatcagaataatctggatctacaactgcataatttctgtccagttgcatgcattgaatagataccttttacattatgcatccataccaggtgaaggaggcgagggtgtaataagtaactctgctggaggctgtgtagctgctgtttccccgccgagcccacagtggaacaccaagaagcatcctgaccccgcctggatcgaggcgagggcagctgaggcaagaggctatgacaagtcacgctggaaggaaactgtaatttaaacctctcattttacaagtgaggatgcagatgctaaagagattaagtagtttacccaaagtcaacactagattgatggtaagaggaattgccaaccaagaagagctgactggtatctctagatgaagcatctgactctagcctctctccaaaaggacaaatgaactctcagcttctcgctgggtttatccagtgcgtcatgtgcaagtagaaagaatgaggtgatatgcagctgctgaaggagtagtcaacagactgaaccaattttatgtgactgagaatcatgttggctgtaaaaagggattaagctccagttatggcaccctgtaaactcagatggcaacagataacagaagacaggaaagttgtaaaaataattactggaaataaatgataaagttatatttgaaagtttgaacagtaagcttccatatgacac

SEQ ID NO: 465488 - DNA, 1261 bp, Homo sapiens
ttatacccctattatagataaggaaactgaggctcagagacaaagtaactttgtcactgtcacaaagctattctacacatgactctcttccttgtttttatactttttggtggggtgtgggtagtgaccattagacattccaaagcactgtcacttggtgtagctcagtgctcttggttactgaagcaacaagtgatctctgatgacaaaacaaagtataagcagcagagcagcccatgctgctgctctgcttatggagtagccattctttatttctttactttcttaataacttacttgctttcactttactctatggacttgccccaaattctttcttgtgggagatccaagaacactctcttggggtctggatcaggacccctttcttataacaccaccacctgctttcttgggtctccagcttgcagatggcagattgtgggacttacttcttagccttcataactgcatgactaatttatcatattaaatcttattttctttatatatatctccatcctactggtttctctggagaaccctaatacatttcccatctctctgcagctagaatcagccagaaacatataaggagactccaccaggagtggggagttcttgggaaagcttttgcttctgaaaaaagataaaagtacacaggagagctgtctggtgccattccttgagcatgtgagagactgtgtcaccgggagcagcagttatctgtggccataagttgagatgactggatgaaatgctaacatgttgagaagacaatgcataggagtgaatgagacagaaagcaagaccatgaggatgactaagaagagcaagtacaacatggctgagactaagtgtccagggagttgagaataagtggcctattgtcatgtcctatataagtagagtatatggatgggaggccaagaatacaccaacaaataaaatattgaatatatcggtcaagggcatatcgagatgatcaggatgctgcctattggaatgtttatcctcccaccctaccccagaagaggagcttctcgtcttgttcaccgctgtttcccagctcctggaagagcctggcacataaaaggtgcacaatgaacattcattaaaatcaatgattaattgaactggctagtattccatctcactttcattactggagaactgaagagccagctagcctacaaaaactcattctggatgtagaagcaataagaaaacatgcattcaaataaaagcagagaatccttct

SEQ ID NO: 465489 - DNA, 708 bp, Homo sapiens
tgctgctctgcttatggagtagccattctttatttctttactttcttaataacttacttgctttcactttactctatggacttgccccaaattctttcttgtgggagatccaagaacactctcttggggtctggatcaggacccctttcttataacaccaccacctgctttcttgggtctccagcttgcagatggcagattgtgggacttacttcttagccttcataactgcatgactaatttatcatattaaatcttattttctttatatatatctccatcctactggtttctctggagaaccctaatacatttcccatctctctgcagctagaatcagccagaaacatataaggagactccaccaggagtggggagttcttgggaaagcttttgcttctgaaaaaagataaaagtacacaggagagctgtctggtgccattccttgagcatgtgagagactgtgtcaccgggagcagcagttatctgtggccataagttgagatgactggatgaaatgctaacatgttgagaaggtaggacaaaaagaaagaaccagggacactgatgacattgttgaggtgcatcaaccctagaaccattattaagagatttattatgtgaaatattattatttactgttttactacttgtagctgaaagcatttctaactgtgtacaggactacttttaaacgcaagaaagaat

SEQ ID NO: 465490 - DNA, 960 bp, Homo sapiens
cagtaaaatggttcaatgtaaggaacggatatggtttcatcaacaggaatgacaccaaggaagatgtatttgtacaccagactgccataaagaagaataaccccaggaagtaccttcgcagtgtaggagatgaagagactgtggagtttgatgttgttgaaggagaagagggtgcggaggcagcaaatgttacagatcctggtggtgttcgagttcaaggcgcaaaattaccagaacagtgagagtggggaaaagaccgagggatcggagaatgctcccgaaggccaggcccaacaatgccggccctaccgcaggcaaaggttcccaccttactacatgcggagaccctatgggtgtcgaccacagtattccagccctcctgtgcagggagaagtgatggagggtgctgacaaccagggtgcaggagaacaaggtagaccagtgaggcagaatatgtatcggggatatagaccacgattccgcaggggccctccttgccaaagacagcctagagagtacggcaatgaagaagataaaatcaaggagatgagacccagggtcagcagccacctcaacgcgtgtcacgtgaccgcgccgggtagagggagacagagtcgcacggctgagacgccaggcagtcgcctagcaacagcgggacgcggagcgatggagaccagcagcagggagctccaagccgcggagtatttggaaaagcatcagatcaaggaggtggttagctacctcaccagcgccctccttttctttcggccggttttctattctatcatctgagatagggcatttgtatatgtaattatttaagtgttcaatgtcttaccttcttgctggactgtttatgaaaactaaggcctgtgtccccagcgcctagtacagtgcctttgctatagctgtttaataattgttaaatgactacttctatttgcgacatattttaatttc

SEQ ID NO: 465491 - DNA, 2345 bp, Homo sapiens
ggagccgagagcatcaggtgggcttaaggtttcttctgactcaaagcctgtaatttacaactgcccacaccaggcacaacagaaacttctggtcaacccaggagaagccagtgcaatgctggcgtgtatggtactccccagcatgtgtgggaaacgtagcgaggatgaattaaaccctttcctctgtggccgactccaccaggctcctccgcaggagacagtgccttgtgctgcagcacaacccattccagggggaggggcccaaagctccatgcccacagggcccaacgtcagcccaagcagaagtttgctgggagagcccctcctgctcctgcaatagccatgtggctgcctcaagggttccgttcgagcgctgtgtttgcagaagggttccgttcgagcgctgtgtttgcagaagggttccgttcgagccctgtgtttgcagaagggttccgttcgagccctgtgtttgcagaagggttccattcgagcgctgtgtttgcagaagggttccgttggagcgctgtgtttgcagaagggttccgttggagccctgtgtttgcagaagggttccgttcgagccctgtgtttgcagaagggttccgttcgagccctgtgtttgcagaagggttccgttcgagcgctgtgtttgcagaagggtcctgttcaagtgctgggagcacagtgctttcttccagggccaccctgtgccaggggccctgggctcgtcacctccctgggatgctccttcagcagcaagagcactggctgggcccctctgaacgctcctgtgaggacgttccttggggaatcacttggaagtgctttcagctcagcctccatagccctgcggacctcagtgaagcgcaggcataagtggattttgaatctgtctgtgtcaataacatgctcactctcaatgagaagctggactcattttttgtgtgtggtgtcttaaaaagttcttttattttgtcagcccaatgccaaataattggatgactgaagttttcactttttagatttttttttaatgtgtcatgttttcttaacctttttattttgtaatcagctttctcaggttgaaatgtttttcttttctctgaagatccctgacaaacacaattgctgtcacgtgtcatgagcactttgggttccaaaaaagactcaagtaatgcccggaacagcaccctgttaactgaacaagggaaaagccgagcaacgtgctttgccatcactaaatgcacagaatgtctgaagaattaggccccctcatagcaccagtcatctgtgtgtggtgctatggtgctaccagctcactcctggggcctctgagaaactttgctcagtcactcatttgaaggtgtcacagtagcatgagggacctgtggccagtctagaccctcattcccaatgttctgtcaataattctgtccctaggtgctaagtggccaaggttattttgagaaatatcttgtgcatcaagagagaagttggtgcatgtgtgcgtgtgtatgtgtatgtgtgcgtgtatattatgtgcatgtgtgtatgtgtgcatatatatgtacatgtgcacatatgtgtattatgtacatgcatgtatgaatgtgtaaatgtgtatgtgcatgtatgtgtgcatgtatgtgtatatgtgcacacgtgttgtgtgtgcgtttattcacttgtgtgcatgtaggtgtattatgtgcatgcatgtatgcacctgtgtgtatatgtacatctgcatgtatgtgtattgtgtgtgtatgcacacgtgcatgtatgtgtattatatacgtgcatgtatgcatgtgtgtatgcatatatatgcatgtatattatgtgtgtgcatgtatgcatgtttgcatgtgtgtatgcccgtgtatgtgtgtgcatacacatgtgactcttcctgtttttttctgaagcctgttgtcccctaggggcagagttggactcttaatgggctcaaacttgctgaccactaaatttctgttagtttttatgaacaagatactgtcttacatattctggcccttttagcagattttccttccagacagtgtgggtgggaggtgacctcctaggacaggactcaactacctttctcatgtgtgaactctcacagcgtttcctttgtgtggatttgcacatgcagacatttatgtgtgcgtgtgcatgtcttactcaagactggctgctggaaatgtccagagttttaagttcattatgatgcatctgacaagttttcctccttgcagggtggaggggcatgtcatacagccccagggctttttacaagccaccccaagccccaccatttttctttctttctgatgttt

SEQ ID NO: 465492 - DNA, 849 bp, Homo sapiens
tctacggtatgtctttatcagcagcgtgaaaacggactaatacagggggcaaggtttgaaaaacttcctattgggtaccatgttcactatttgggtgacgggttcactagaagcccaaacctcagcatcatgcaatatgccagtgctcggtcacggaaggaccgatggtggtgtcattcacagaaagtcagccaggactgcagagagatcatcgccagtggatgctttctctgacctttccttcctgcatgctgttgggaagactggccccaaatccaacgggaaggatatcagagaccaccggcatcgcaagtcaaggaatgggcatggacgcagcagcagagacaaggcgaccccacagaccacagagggcacaagccacaccgtctccttgaaagagttggtggtggttgtgaggaaaaacagagaatgtagctttcaggattcacagcagaaatactgtaaatgtgagtgtgttccatttgcatgtgtttaagcaatgttgaaggaagacgtcacagacagatgaagctcagctaaatctctttatgccactcaagttgttttaaaccagtaacgaacacctgagacctcgttgcttgtctggcagtcggacaaggataatctaggtactcgaggtttggaaggcggaagtgaagcagaaggcagaagtgaagcagaaggcatcagattgttcctctggcaagtgggcttttgcagatgtgccattttacagtggcttccacttgttttccttgacaacttccttgaatgactgacccagccccaatgtgcctatctcctgtgaaaaataaaccatcagattgggactggtttgagtttccatta

SEQ ID NO: 465493 - DNA, 4597 bp, Homo sapiens
gtgaaaagatcacctaacaccagctggctgaagtttttaaaaagtgtgcagcccgccgcccgaatgcaaagtgtggcggtcgggcatgagtgaaacgtgatggcgctgccccaaggcatccctgaagcctttttcagccctgggttggggtcagggtcagcacagagtgacttcatctcacaggagacacagtgtcagggcgtcaaccagggcccaacttctccagtggggtttgctcggggtgaggaaaggcaaggatattctgatactggctcaagcctggcagccgctgtgatcacctcctacagctggagactggaaggagagagtgcccgctgctgggggaccctgcaagcttccagagcccccttcctccaccttcaaagccagcactgcacctctcagtgctgttcccacagttccatccccctggccccctctgaccctgcctctcttctgccttctgcctatgagaaccatggagatcacggtggacccacctgggtaaccgagtataacctcaatttccaggatgggatcctgtccacccaggtctggagcccacacaccacatctccagagcctgagttggccacaggtacaatggagaagcttcgggtgaagctgatgttgaaaaagctgagaaccgggagccggaggaaatcatagcgaaatctcaacctgatgtagccccatcagcatcacacacacactcagagcaaaatggcctgctcttcaatgtagcttagtttagttcaattgtcctgcccaccccctcctgaccctcctgccgctgaggggtggtatttgaaagaacagcttctttcctctcttctccttgggacagcaacagcacagagagtgggccgccatctcttactgcccactcaaccgttgctggggactgattctttcagctctacatagaattcaagaactatatttggatctgcttcagagcagtaatccccacagccttaaaacatgcaaaataaaaataaattaatcatccatcagcattttatggtacatttataattttatttaaatgtttaatatcataaaacaagcttggctcatggagaaaactgttgatttcatgagaagaaattgctctcttttaaacgaaagtaaatactctttagggcatccccagataggaaatgaagatgaaggaagctgttcccaagttggccaaatctggcaattattctctcaaagacagcaatgtgtcacagcaaaatgcgacaattccctcaagtgaccagtgggactgatttatgagcaaaagcaaagacattgttcccccaaacgacttttgagttactaactccctgagagggaagatcatggaaggagggggacccaggaggctcaggggtccagaccagctctgagaaggacctgtctttcacctttcctcaaggttctgttattttgaatggcagatcaccatcactttcaaggcctggccttgttctctgattggtcattcttagagagagataggttgcccattaagacccattgttctgactctgaaatgaaagaaaatgaagcaattaacatcttggcagtgggcagaattaatcatgcttgaccatttttatttaagttctcccccaaaatgcagcaccgaagggcacttattagttcacacaaagaggcatctctgaacagcaaacactcaattatttcgatgtttactgttgagaaaactgcaaaagaaaatatgcattcaacagacacattctgaaaggtctttaaaaatgaggctattttcacagtttctaaggcatatcctataattttgttttttaatcattgcaacctactggattcaatattagattcttatttctacctctccaaaccctcatcatagtcttctggccattcagcaaaatacattactttgcaaagctgaatgtaagcatagacatcttacattcagctttgcaatgtcttacctccactgtcacaaaattaggtagcacctcagatcaggtgaaggaaaaatgacacatcggatttgtagactgtcttcctctctcccatgaccacagtggtcaagtggttgcattgattacctgattaatggcctccttgtattcctgtcccactggactcttggctcgctcagccagggggctttctttggccaatggatgttagcaaatgtgacccaagccaagttctgaaaagatattcactctctttgacctctgccaccaccgagagaacatactcagggttgcttgacagaaaaataatctaaaagatatctagaggagaacggactggcctccagagccaccctggaccagcagcccccaaccagcatgcagctgattgcagcacagcgagccaccccagtagaggcagctgagcctggctcagatcagcagaactgcccagccaatccaaaactcaaagaaaaatagtgaatggtagttctttcaagccattcagtgttggggtaatttgttatgtggcactatagaggcaataggtagctgatacaaacctaaccccagctgccattcattaagcacatgttatgtgtcagggatggcgccttgtaaagttgacactttacagactcaactctgatctgcccagtgatgccaccagtcaggtgtcattattctcatttatatagataaggacacatgccttacacagtagagtttagtaagcatgtgagaagctatgtttggacccacagcagtcccctcttccctcaagttacctgcctccaccatgacagtttgccctgaatccctggctctggtgccccaccctgagcataaacaggtcatcatgtgaataccaacaaactcatgttgaccaggaaggactaagccatgcctctgaactgctgacacgtcatgtgacctgttctggaaatgctatatgggcatgagcaaagcccaccttgaatgtctaaaaataaacatgagccaggagttcctatctgcagccactcatcagcattttatcctcccagctcacccactcatcacactgtaaaatgggattgctccgaacaaacccatacaaggcagatgtccagcccaccactcatgcccaatgatgggggaagcgacggtcactctcccacagcaggcctctccctgagatcaccctgttctggcataaatagagtgtacctgtgatggaccaaattcatccagctctcgttctggatgtcctcctagcagaagctggctactcttagctgaattctgctttgttccctaataggcactggcctggatgccatgaaagggccaggagcttgccagtcctcctcactgtatctgcagctttaagcatgataagaaatacaacaagtgtttgtagacaatgaatggtctaaatgtacatatggggagttctacgagcaatgcatcacaattccagcacacacttatttgcatctattaatgtttcttgactttggttgcacactagaatcatctgagctgttctgaaaagcacaaacacacagcccccatcctggagcaacaaaacatcctgggctatttgaaggattcctgagtagagctattgcttgaattctctctgggtcaatctgatgtgcagcgagggttgacggctacccttctctcctatttcaatttaaacacagaattttagccaactcctttctaaccctcatgatgtgatgtcatctctccagggagatcttgcatagtgttcccaggagaaggcccagcaaaacttgcggcaagaggaagtaaaaatcctgcccccaccccttctatacatgcctgcaggtggcttcacaaacttgttttccctgcagctgcttgcacatgtaacagcttccaggataaccaatgagctggaaccagtaagatgtggctggggaagggggcttctcatctgtcagctggggagcctcatggggccttacatggactcagcttcttaccagttccagaagagcacccaaacggccctgggattttcaactctgaagcataaggtgggaacccggcagcaggctggaccctctggcccccctccctgttgtcctccatgagctcccagtcccgttcatatcagagcaaaaccacagctggtgggacttagcggattttgacagcatgttgattatgaatattgtccctttcaggcaagttaatgaagcacccaattcacaccagcttttatctgtcagagaaacaccagcaagcaaggtagagacaacaagccaaaccctgatgtgcaagtatgaacttcatgttaattaggaatcggaagaatgtgtgggtttctctaatgcactcatcatacgaagccagctgattcaaatgctctcaacctgagcttcgggtcatttgtgttagctgtaaggccatctgaggcagatgcattgaacctgaccttgagagtatccttgaccactggaccaagaggccagagactctacaagtgtgctcaggccagatggctaactcaactagtgcctggcaggaagactcaagatgccagcttctcccctaaaccatgtgaacattcaaccattttaaactataaaaacagcaatttcaaccaaaacactgga

SEQ ID NO: 465494 - DNA, 1366 bp, Homo sapiens
aaattcacagagaaacatgaatggatggcaacagaaaatgatattggaacactgggagtcagcagttttgcacaggaaacgttgggagatattgtttactgtagtctgcctgaagttgggacaaaagaacaaacaagatgagtttggtgctttggaaagtgtgaaagctgctagtgaactctattctcctttatcaggagaagtgcagtcctacccaggaggcctgcaggctctcctgcagctcaggcctcactctctgacgcggcactggagtgatgttgtggcaattggtgtccatgtaatatgtgagctgtatgctgtgggctgtgcctcagtagcagatggtaggggtcaaaagatgacaccagccaccagtagaaggcaagtagaagacattataacatactgctgggcccagaaccaaggtgatgttaagtcttctgactaaaacctacccacagaagacattgtgacatatctctgggcccatcaactatttgatgtgactctactcttatctgagtttttttaataaaagagattttgacatatctttgggcccagcacctaggtgatttgactctcttctgctgtgtgagccatgaccagagatggagagtgacttatcgcctgaaccagcacacaaattgagcagtgactctcataacaagagccaggaaaggtgtgagattggtagtctcatccctggacctcctgcaggtgtgattttgacatacacctctcctcagcacctgagtgatttgactctcctgcctgagtccagcttacaaatgagattgtgacatatcactggacccagcaccttggtgctcaggttctgaatgtgctcaggttctgaatatcacatctgaaggtggtggaaagttggaaaattgactcccctacataaattccattcacagaatgatgggtgactcaggaccaagatttagcacatttgtgaggctgtgactctgctacaggagcatcttgacagatcgctgggccttgcacccaagtgatgtgagtctcctctgctgcctttgtgctttccacagggaacattgtgacacatcgctgggcagcacacccgggttatgtgactctcctgcctgtgccctgcccaaagtctcactcactgtaacacacaggctagactgcagtggtgcaatctcagctcctgcaacctccactttctgggttcaagcaattctcgtgcctcaacctcctgcgtagctggaattacaggaaatgtgtctctcctcttctgcctgcaccttgccaacagagaaaattgtgacatattactgagcctagcaaccaggtgatgtgtctctcctgcctgggcctggctgacagaaagcag

SEQ ID NO: 465495 - DNA, 3084 bp, Homo sapiens
cagggccaagcctgctgctggggaaagacaaagagggccctctggtgtctgggtcatcctggacacaggcaaaatgtatcttcttcaaaattgcctagtgggctctctctcactcatacttcagcacgaatgggctggcgtcaggccgttgctggcagtggctgctgcaggcttgtttttgggagcagagtcaaggagcagaagagctatgcttagaccttttgtgatgcttggagaaaccacccacacccatccagaccccagatccaggaaaacacctgggaagaagacaaaaataactatgaaagcccacgtggatgcaactggaggccgttatcctaagcaaattaatgcaggaacagagaatgaaatactgtatgttcccactaatagctgtgcttttcctgcagggactgaacaagggcagtgtgtgcacatgtgggagtgccagaagcaccagcgcaatccagatgtgcccaggcccatctgtgcgtgaaaatgcagacacaccacactatttatcaattagtgtctgctgctgccagtgtcaccagttctctgcctgatgaatgatgctaggctggacaagccacaccccaagatatcccgctgcactcagatacaagactgaagaagcaagaacgttataaaaaagaaagaatgaaaagaaagaagaaaagcaactaagcccagagatggatcccaaaactgaagaattggtttaattaaattgaaagctctggtgcttgtggtaattgctatgaaggaatccatatcccatcagaaccctctcccctggagtttgctccctctactttctctgcagcagcctgctagccagagtcaaagactgtgtgcatttgaaatctccaaccttttaaaacattactgtgaagttgaaagttcctggtgtcttttgattaaacatcgtgctagcaacaataatattgaccacgtttgagacagaagagccacaagagggaattagcctaaattcctaagcgcccacctggaaaggatcctccttggaagatctgtcagatccatagtaaactttgaatgaaagagaaataaaatgttatgtgttaaagttcctgaatttttgaagcttatcctattctatcctatctcatcttaatatactaagttattcatctggatgtctaaaaaccatgaccatcacaataaaaccttacactgctatcaaagtaatcaaataaatagatagggaaacaaggaactttagtcacttaggaaaaaaaaaaaaaaaagaaacatacctgacaatgtcccctccctccaccccagtggttactggtacctagctttatttgggaaagcaacaaaggaaatatttccagaggctgaggcacctctttggtatagaagtccatttctgcactgccttttaaaatggtcaaataatccatgttgaatttctgataatcagagttctatgtataaagaagccaaggtcaacaccactgccatgaaatgatggatgtaactatcaagcagaggtcaaagaggatcagaattcaacagagaccatgggatgtggtcaacaggaggtcacaggctacctttttaaaagagtagcttcattggaaaaaccagattacagagggttggggaaagagttagaggtgaaaaaatgaaagtagaaactctaaactacaggctcaaattacgtggtggtaaaaggaaagaaagaaaactgtagtttaaaagagaaaaataaaacttgagtttgaaggtagaggtgaaaaaacagatgataggaagaaatgcaagattttgaaaatttggacagaaagtcccatgtatgattgaaggaaggagggatcagagcacagggggaagacacttgttaccaggaggagaaacacatgagggtttaggtaggtttttcttctgcatttctcacttgagtcagtgcatcaacatacaactaacttctaatggccaagaactccaggaatcatcgcaaacatgttttatgtccttcagtcttccctgcattctgttatcatcagtgctatttaacctcctcaatatctcttaacctatacctttgtctgcatttctacagccttaaatcaggacattaattttgatggagctattcaaatcatagctttacaagtacattacaaacttctcagtttctcatctgtaaaatggaaacaaaaacaactaatttttttaagcactgctgtgaagattaaattaaataagcccctggcagtggatcacaaaaacttcttgcttggtatccctagccctggatttcctagtttttatttattcactattttgtcaccagaatgatctgtttgatctgtttgacaatcaagtcttgcatagtttcattcctgcctaaatcaagtcagttggtctctttcatttatagagtaaaatccaggggttcttttagtatgatactaggatacagtatgatacaattgttgcccaactcttcagtcttcaccaatctctcatcttaacttatgtcccagcaacattacacttcttatagcttcccttaagacacagtaatgtttcaaagtttcctatgactttgtaatgctgttccttctgctgaaatgtccattttctctctggttttctcagcaaaatcctattcatccttgaaacccagctcatatttggcctccttaagaacgttcttcatcgctcgttctccatgttacctctccataatgtattcacttcggttgtcacacttaactcattatattgtcatttatgtctttgcatgtcagctttcaataatcatgaatgctttgaagggcaggctgtgttttatttaactctgtaactctctttcctaaagccatatctactacctggtaggtattcatcaaatgtttgacaaatgaataattgaacaaatgcatttgcctgtatggagcaatcataaaacggtcatgaagatgatccctacatagccctcatcttcatggagcagatgtcatccactctgagtgatgtctgtgtttctggaattgttgaaagtggaagcattggaacctaatgttgggggaaaatataatacactaa

SEQ ID NO: 465496 - DNA, 2524 bp, Homo sapiens
gaggccccctttagggctgagggctcctctttgccaagcagctcttgtctcacagaccctcgcgccagccctcaattgtcccaattctgctgatgaggacttggagacgtggccaggtacatcacagagctgaggccatgccaagctcggcaccctcccagtcgaggtgcctcccccttgctcccctctcagccctcaaagtcactgggactcatcatctcaagccagaaagtggggccagatggtggcagatccacgggtgtctgttgcatcattaagtgagggtgaaaaatgttgcttgtaattaaacaagggaaccaggacagcagcggcccccgccacagctggggcggctcaggaagggaaggaagactggctgagagtgaggggtgggggaagaagcctgtggaggttgtgacctctgttcctcccctaacatcccagctccacctctgccagctgcatggccttggctccgtcccctcctctctttgtgccttagtttccagacaacagcaagagcggggcttgtcctggtcttgtctcacctgtccccacctcagggcctttgcacttgaggtgccccctccctggcaggtgcttcccacacccagatcttcccagggaggcccctccacctgctccaggtcacagctcaactgcctcctcctcctagcggcttctcgagctctcccatctggtcacctgcttctgttttctccacagcttggcttggtgccctgcacacagcttctcccacactgctcttagccccacagatggcagccgagaggtggagcggaaagtatgacccagtggacaggggtgacctggtgacgaatccctagacagcgcagatgaggctgtggggcagcaggcgagtaatctgtgggcccttcggcatcttccacccaggccctgtcagcctcctgtttttcccctctggctccaggagattaaagtcctccaagaaatgcagctgcttccgtgacaagagggaattatcatcttcggactcaggagacatcctgtggccacggctccctggtcagcagcaggccctgttgaatgggcaggcactgggagggaggccggaggtgtggctcctggagtctcacagctgctgctgtgtcctacagttacaacctgtcctgctgctgagccccatcccagggtggggcgagacggaggggcggtgccgaggggagaggcagcgcagagggaaggagcggggcgaggagaaggggcggggcgagtactgctccaagatatggcaaccgtgacagctttgcgagtagctccaggtcccctgctgctccgtgagaaatcaaacttctggcaatgacgaagcatgaagccagcatctcagggagaggggcggggcgcagttcttgcgggaggagcggggcggtgcgctcctggccacgcaggctggaaactgtagctctcaacggttccccgcccgttggtggcaaggcggctggactagaatcctagcaggcgatatgcgagaaggcgggcagcccaagagggttgggcagggcagtgtggatctcgccgcttccacagcgatgctggctactgatttcggacacctccttgccatgggatggaaattaatgttatgactggataagacaattgtgaagaaactgcacttcgaggttgtctgtctccgtattccgatggaaaaggctggactttagaagcattgctcgctccttcagtttctaacaagtcagtattctcatagcaatttaaatttaaatgtttgaattgtttctccttccctcattcacctgaaacttctgactccagggtttttcagttggggtttagagaggataactcccatatcgctgttgtatctatttctcttcagcatctggctgcatgtgctaaagatcatagaattagaccaggtcctgtatatattttgggaccaaaaattcaaagtaatcaactcaagacaggagtctacaactttgattcttaacaaaagatttcctttgatttccccaaatctttatgattcctagaagaaattcacccatgggtgaagcatgtggttctgttgaataacattttgttggggatttccacccactcctccctactttctggtactcagccccgtgtttttctctcctcacattctcaaccctatctctttaatgtggggacttccatgcgttgcctatatccaaccaccctgcactgccaggaggctctgcaggctctaagctggggcagcaatgtggtccccttagtttcagcctccagacctcagtcctgtgctccttgcagatgcttctagtgtctggaaacatctggttcatgtagttggtctggcttcctatgtgtttggttccagagggagtctgtttcttgctcttccaccatacagagaaggcaaagctctgaattgattttgaaatcaattcttgattatttcttttggaatgaaatacattgtctattactttatgatgacataaatattgtagcttagtttgtggcagtt

SEQ ID NO: 465497 - DNA, 2214 bp, Homo sapiens
  misc_feature (1902)..(1902): n is a, c, g, or t
  misc_feature (2009)..(2009): n is a, c, g, or t
  misc_feature (2056)..(2056): n is a, c, g, or t
  misc_feature (2071)..(2071): n is a, c, g, or t
  misc_feature (2085)..(2085): n is a, c, g, or t
  misc_feature (2090)..(2090): n is a, c, g, or t
  misc_feature (2092)..(2092): n is a, c, g, or t
  misc_feature (2129)..(2129): n is a, c, g, or t
  misc_feature (2139)..(2139): n is a, c, g, or t
  misc_feature (2147)..(2147): n is a, c, g, or t
gaggccccctttagggctgagggctcctctttgccaagcagctcttgtctcacagaccctcgcgccagccctcaattgtcccaattctgctgatgaggacttggagacgtggccaggtacatcacagagctgaggccatgccaagctcggcaccctcccagtcgaggtgcctcccccttgctcccctctcagccctcaaagtcactgggactcatcatctcaagccagaaagtggggccagatggtggcagatccacgggtgtctgttgcatcattaagtgagggtgaaaaatgttgcttgtaattaaacaagggaaccaggacagcagcggcccccgccacagctggggcggctcaggaagggaaggaagactggctgagagtgaggggtgggggaagaagcctgtggaggttgtgacctctgttcctcccctaacatcccagctccacctctgccagctgcatggccttggctccgtcccctcctctctttgtgccttagtttccagacaacagcaagagcggggcttgtcctggtcttgtctcacctgtccccacctcagggcctttgcacttgaggtgccccctccctggcaggtgcttcccacacccagatcttcccagggaggcccctccacctgctccaggtcacagctcaactgcctcctcctcctagcggcttctcgagctctcccatctggtcacctgcttctgttttctccacagcttggcttggtgccctgcacacagcttctcccacactgctcttagccccacagatggcagccgagaggtggagcggaaagtatgacccagtggacaggggtgacctggtgacgaatccctagacagcgcagatgaggctgtggggcagcaggcgagtaatctgtgggcccttcggcatcttccacccaggccctgtcagcctcctgtttttcccctctggctccaggagattaaagtcctccaagaaatgcagctgcttccgtgacaagagggaattatcatcttcggactcaggagacatcctgtggccacggctccctggtcagcagcaggccctgttgaatgggcaggcactgggagggaggccggaggtgtggctcctggagtctcacagctgctgctgtgtcctacagttacaacctgtcctgctgctgagccccatcccagggtggggcgagacggaggggcggtgccgaggggagaggcagcgcagagggaaggagcggggcgaggagaaggggcggggcgagtactgctccaagatatggcaaccgtgacagctttgcgagtagctccaggtcccctgctgctccgtgagaaatcaaacttctggcaatgacgaagcatgaagccagcatctcagggagaggggcggggcgcagttcttgcgggaggagcggggcggtgcgctcctggccacgcaggctggaaactgtagctctcaacggttccccgcccgttggtggcaaggcggctggactagaatcctagcaggcgatatgcgagaaggcgggcagcccaagagggttgggcagggcagtgtggatctcgccgcttccacagcgatgctggctactgatttcggacacctccttgccatgggatggaaattaatgttatgactggataagacaattgtgaagaaactgcacttcgaggttgtctgtctccgtattccgatggaaaaggctggactttagaagcattgctcgctccttcagtttctaacaagtcagttcttggagatactaggaagccaagagtttcctccaggaatggagattccttggaagtgaggttcaccttgagtcaagaaagacgaatcacacacggtcaaaggcaattgcccagggtctcaagaacagagccagaaagaagagctggggccggcgggantgtgggggtcctctctcccacctgaaaagctacagctgcctgccgatcctctcaagaggagacctctctgggctccagcacctaaaacagacaaactgggaggatgnttctctcttctgtgtcacacgtgtcctggagaaaacccatgtatctngaatgaccaaagaanagtatgagaaacangtgcnanaatctgtgccagggcattcagtgtctggctgggggcnctgggggtgncacatgcnttcccaggaagactgaagggggccaagcctgcaggaaatgtcccacttaaactggctttttaaccgg

SEQ ID NO: 465498 - DNA, 3025 bp, Homo sapiens
aagggccagagctcagagggcagccatttttcaccacagagactgtgtcatcatgagagtggtaggcactgacatgactccctgagccagcaggggaggggacactgagggagaagcgcacagggctgaggatctctcgggcccttactctctttatccggctcttttgcaaacatttcccatgatattctcccttcaccgtcacagtccttatgctcgtttcccaaaagagcttctccgatgatctctcccaggttggccgagtgagcgggcctagcctgcgctctcaccccagtgccaccccagtgggagcgccgcccgcgcccgccccctcgccccgcgcccgccccctcgccccgcgcccgccccctcgccccgcgcccgccgctccggcagcccaaacccagacgctaaagcgccgaactgggtttccgggcgctggaggccgcggtcggcctcgtactaggtgacggcccatcccgcgcgcgcaagcccggaaccccgctccgctcaccctccgcgcgctgccgctttgccctggcaacggtaaccacggcgaggccctgccccacgcccggtgattgtgcgcgcggccccgcccccgaggcgcacgccggcccagcgcccacagctgcggcggcctaggtgccgcgtggggcaagcaggtgcctcgcgtccaggcggctccgcggctggctgcctcccgagccggccgcgctcctcccagcgaggcgtggcggggaggcgtagtgaggctgggcccgtggcggttccctgaggagggccgagaaggggccgggggtgctaggggaacgggcgctgggggcagcggccccggtggatgctaagggcttcgggatcgggagagtccaccacgcctgcctgctcggctgagaatcgccatgccagctaaagggaaaaaaggaaaaggccagggcaagtctcatgggaagaaacagaagaaaccagaagtggacattctcagccccgcggccatgctgaacctctactacatcgcccacaacgtcgctgactgcctgcatctgcgaggcttccattggccgggtgctcccaaaggaaagaaagggagaagcaagtgacagcatttcacaacacatctctgttacagacaacaggacctggggaagagaagtcaggataacacaactgttgccagcaacatagactttactccagacgacttgagatgcaaattaagtgtgcttttctgtgatggtggaagatcaggaaatgcaccttacttcctctgttatgccagatatggttagccactttggttttttaggagctataggatgggaaaagcctgagtaattcctacacagtgtgctgaaattaatagaactttcagaaattattataattctgggtcaggattaaactttgctctcagaaggcagttctagttgcattaattgttttcttttgccaaagagcgtttgtcatttagagaagacacggcaagaaacactgggtttccttaggaacattcctctcttgggcaccatttccttttttttttttaatggaaaataataaatactttgtttctataattttcttctcagcagtctgactctgtttgatttgaattagccacaggctccacggatgctaagatggtcacgaatgctctgaccctgccagtcttgcaagcagatgggggcgtcctgcgcgtcacctgtctgcctcttacattaggagcccaagtgaagatgagcacgccaacgggcctggggagcaaacagcacaggagccccagagacattgtagaagcaatggaatgggtccttgtcatccatgaggagcacttttgcagaccttcaggaatccccggctttaagagcatcacccattgggctgaaggtgctgcgggcggtcgacgctcccttgctaaacgattcatttccctgtcagcaacctggatgcctgaagcacacgttcctgccaggcctctgcagtaccccaaatgcctgagggcaaagactttcaaattactcgcagtcacaagtttgggttgggacacaaacaggaaggtggtgtcaaatatgagttctgattttgagcccaggtaccaaagcttgctctgtgagaatctccacataaccattgaagtttgcaacaccccaaaccccaccactttgctcctggtatcagagagcccagttgaacataactgtgtagaggtgttggactcagtttattctagcaggcccgacctccgagaccatctttggacatcagtagactgggagctgtacgtggacgggagcagcttcatcaacccacaaggagagaggtgtgcgggatatgcggtggtaatcctggatgctgtcattgaagccaaatcattgccccagggcacttcagcccagaaggccgaactcattgctttaatttgggccttagagctgagtgaaggtaagactgtaaacatttacactgactctcggcaaggtccaaccgtcctgtctggcatacaagcttatggagaagccccctttgaagatctcaatatagacttcaccaagatgcccaaatgtggcagtaacaagtatttgctagttccagtgtgtacatactctgggtgggtggaggcctatccaacacgaaccaagaaagctcgtgttcttctccgagatctcatcgctaggtttggactgcccttatggatcggctcagaaaatgggccggcgtttgtggctgacttggtacagaagacagcaaaggtgatgagtgtggatcaaagactggaacgtagcccccttgcagccacggtggaaaggaccccagactgtcatcttgaccactcccacagctgtgaaggtagagggaatcccagcctgggtccaccacagctgcgtaaaacctgcagcaccggagacctggtaggtgagaccaagcctagacaacccctgcaaagtgactctgaagaagtcgacaagccctgctccagtcacacccggaagccgactggtccactcatggccgaagcatgaggaaa

SEQ ID NO: 465499 - DNA, 1419 bp, Homo sapiens
aagggccagagctcagagggcagccatttttcaccacagagactgtgtcatcatgagagtggtaggcactgacatgactccctgagccagcaggggaggggacactgagggagaagcgcacagggctgaggatctctcgggcccttactctctttatccggctcttttgcaaacatttcccatgatattctcccttcaccgtcacagtccttatgctcgtttcccaaaagagcttctccgatgatctctcccaggttggccgagtgagcgggcctagcctgcgctctcaccccagtgccaccccagtgggagcgccgcccgcgcccgccccctcgccccgcgcccgccccctcgccccgcgcccgccccctcgccccgcgcccgccgctccggcagcccaaacccagacgctaaagcgccgaactgggtttccgggcgctggaggccgcggtcggcctcgtactaggtgacggcccatcccgcgcgcgcaagcccggaaccccgctccgctcaccctccgcgcgctgccgctttgccctggcaacggtaaccacggcgaggccctgccccacgcccggtgattgtgcgcgcggccccgcccccgaggcgcacgccggcccagcgcccacagctgcggcggcctaggtgccgcgtggggcaagcaggtgcctcgcgtccaggcggctccgcggctggctgcctcccgagccggccgcgctcctcccagcgaggcgtggcggggaggcgtagtgaggctgggcccgtggcggttccctgaggagggccgagaaggggccgggggtgctaggggaacgggcgctgggggcagcggccccggtggatgctaagggcttcgggatcgggagagtccaccacgcctgcctgctcggctgagaatcgccatgccagctaaagggaaaaaaggaaaaggccagggcaagtctcatgggaagaaacagaagaaaccagaagtggacattctcagccccgcggccatgctgaacctctactacatcgcccacaacgtcgctgactgcctgcatctgcgaggcttccattggccgggtgctcccaaaggaaagaaagggagaagcaagtgacagcatttcacaacacatctctgttacagacaacaggacctggggaagagaagtcaggataacacaactgttgccagcaacatagactttactccagacgacttgagatgcaaattaagtgtgcttttctgtgatggtggaagatcaggaaatgcaccttacttcctctgttatgccagatatggttagccactttggttttttaggagctataggatgggaaaagcctgagtaattcctacacagtgtgctgaaattaatagaactttcagaaattattataattctgggtcaggattaaactttgctctcagaaggc

SEQ ID NO: 465500 - DNA, 549 bp, Homo sapiens
tttttgtgcttctagaagagacagggtttcaccatgttggccaggctggtctccaactcctggcctcaagtgatctgcctgcctggcctcccaaagtgctgggattacaggcatgagctaccacacccggccttcgtttttcttttgacacagggttttgctctgtcacccaggctggagtgcagtggtgcagtcatagctcactgcagcctcaaagtcctgagttcaagcaatcctcttgcctcagcctcccagcgtgctaggatctcaggcgtgagccactgcacctagcccgaaaccaagctttctcatcccaagcgccaacctttatcaagtctagcctagtcctctatcatctcctaagtgtccctcatgagtgatcacttctgagtcctcctgcgtggagagctcacccactgggggcgtatctttcccattgtaaaagtgtggttattggaagtttcctctttttagatacaggtgtgagccactgcacccagcctgaatttctccattcttcccacacaccctcctcaggttctccttcct

SEQ ID NO: 465501 - DNA, 222 bp, Homo sapiens
caaactcctggcctcaagtgatctgcctgtcttggcctcccaaagttctgggattacaggtgtgagccactgcacccagcctgaatttctccattcttcccacacaccctcctcaggttctccttcctgaccgctgacccttcttttcttttttcttttctttttttttttttttggagtgcagtagcgtgatctcagctcactgcaacctcttcctcccag

SEQ ID NO: 465502 - DNA, 1375 bp, Homo sapiens
tttttgtgcttctagaagagacagggtttcaccatgttggccaggctggtctccaactcctggcctcaagtgatctgcctgcctggcctcccaaagtgctgggattacaggcatgagctaccacacccggccttcgtttttcttttgacacagggttttgctctgtcacccaggctggagtgcagtggtgcagtcatagctcactgcagcctcaaagtcctgagttcaagcaatcctcttgcctcagcctcccagcgtgctaggatctcaggcgtgagccactgcacctagcccgaaaccaagctttctcatcccaagcgccaacctttatcaagtctagcctagtcctctatcatctcctaagtgtccctcatgagtgatcacttctgagtcctcctgcgtggagagctcacccactgggggcgtatctttcccattgtaaaagtgtggttattggaagtttcctctttttagaaagaacaggattggaggtgctctctggggtgtcctcctaccaagctgactgttgaagtccttgtggtgctcagggaggatgggtgacactcgctgttgcttcagcttcatcttgagcccacacagcatctccactacccaggtctcctcaggctcaggggcgagctccttctccggctcctcctcagattcatctgaccactccttcttccttttccagccaagggacctacatggggggctgggatctaccccaggggctgagtaaagaaaccaggccactgtgtgctccgctggagactctgctcattctgggggtgcggttgacggctggtcgtgatctttcccgtaatctgtcccctcttacggaacctagtcttcgttctgtccatggccttcttctggacactgctaggatccagaagagtatgttatcaattctcaagcctaggagaagtcaggagtggagaacagctctgagaagatactgttgtccaactgatctccaggcaccacggagtccggtccctccaatcaggaaggtcggaatctctgatgtcatcgttcatgccaacctggcaaccagtttgaaaaaaaacacatgtaactgccaggctgatctcttgtcctggagatcctgggtgaatgactgagttatagagtagctgtatcattttacattcccaccagtaatgtagaagagatccagtttctctgcacacttgccagcatttgaataatcagtatttttaatttttgccattctaggttatttaaaaacaaaaaaatatatgcaacagagtccatatgtaatctgctaagtctaacatatttactatatggtgtttacagataaagtttgcagatgaatggaaagaaaacctgatcttcttttttgggg

SEQ ID NO: 465503 - DNA, 1454 bp, Homo sapiens
aagggcaagaaagtgtcatttgaactcagtgacttagggaaatatatcttggcttcaggctgtggatagagattttcaagcacatctaggaagtatttcaaaaggtaatttaggaaaaatttcaaaagataatctttaggcccttcacatgctcctatcttccaggttctggaagcagctatcgcaagtgcttaaatgttcctcctgtgactctgtgactgtccaaagtccctgtttccagttcagctttctttgaaaagcccttgagctttaatatcaccatcatgcctcattaaaactcctattcactgggtgcagaagactgcttattactgaaagtaatttgactaaaacataaatactgcaaaatctgtctacatacgtctctttgaaacaacctgaactcttctctcaatataaaattgaggtgaaataccaaattaaggcacatgggtccgttattgccaaagtgatggatttcctgacaaccattccacccagaagattttttttcccagaactaataatcccatccccgttgctggtgattaacttaataacgagcatgacaatcaacaaacagattgaaaaggcaacctactcagaatgggagaaaatatgaaaccatataccagagatgaaagtaatatccagaatatataaagaattcctacaacttgataacaaaaacaccccaatctaaaaatggacacagaatttaaatagacatttctccaatgaagatggccaccacacatgtgaaaagatgctcaacatcactaatcatcaagggaaatgcaaatcaaaaccacaatagcacaatgagatatcatttcagaccccgtatgatgttaggatggctactttcaaaaaaacagaaaataagtgttggtgagaaaccagggaaaaagaaaatatttgcctttaagctctggagaagagctatcctctccttgactgccccttcgagtcctcagagtgggaagattaaaatggcaattgcaatggaattgaacttaatgcgggaaccacagatcctgtgtttctacaaccttagaggacgaattgaaatcagcatagataaacctggagtattgaggactgggcaatcaggaatatttaaaatgcgaataagcttcttgtctttaaaaatgtttttaagaagagttgcagtggtttcgttcacttagtctattttgtggattcaaagggacatttaagaggacagcatgggtgtcccctattatatcgttgtgttaaaaggagatgggcctggagtcagactgcctagatcccagctctgcctctcattagttgtgtgaacttagtcaaagtactgagatttcaaagctcagtttcctcttctgataaataaggataagaagagaaccttagagaactgttatgaggattaaataagataatgcatgtgaaattgttagcataggctttac

SEQ ID NO: 465504 - DNA, 704 bp, Homo sapiens
  misc_feature (3)..(3): n is a, c, g, or t
  misc_feature (5)..(5): n is a, c, g, or t
  misc_feature (7)..(7): n is a, c, g, or t
ctntntncagctaagtttttgagagctattgagtcagtttacacaccctgataaccattggagaacaagtatttgatgctatggttaagcatcaaactgtgtgcctgaagagtcaaaccaagtgggagggagcagagacctctgaggccccccgtggtcattcctgtgatcgacacaaagatgtgccacaaggtcaaggaaggacttgtagcccagccctgggaagtgtggtcagcagacagcctctagctgtccgcaacttcaaggtcagcctcagctgtagagagctgctccctcgctggaggtgtctgagccagtcagagccttggccttgctctgacccacagccacaatccaacatgaagatggttcaagagaccttagaccagggaagtgccttccaaagccaaatacaggagcatgagagaagctgtgtcgtgatggaccgcacccatccttcccactctgtgttctctttgtcctgactttattgatggggtgaggtggacttcttgtaaatccatcagaaagatatctgaagcatacctcggggtatatattaaatctaagaacctgatgtccttttactgctgcccctgaataaaaattatgcatctgtttccgcacttgaccatgtctcagatttgctgattttctttgcttatgctcatcttgccaagttttgagggaatgggcacttctcc

SEQ ID NO: 465505 - DNA, 711 bp, Homo sapiens
ctgagagccgcttggcctgggccctgcacctcgtcccactctgcatgaactgcctttgcgggtggccaggcctggctatgaccgcacgggagagcagggcggaccccgcgaacggggacagcacctgacggcgacatccacaaacgccgccccgcaggagcacgcactcccacacaaagcgcctgcagctgacagccgccgggaggggacatctggacagcctcacgcagctttcagacctgcagtccatgttaaaaggatcttgtttccaatttgccttaattaaacaaacattccaaaccacttcctctcagtctgaccattgttcttcattccatggtactcggagtcctgggaaccactcatcactgtcgggtgcaggtggacgtcccctcacggtgctggcctctcctcggatattccgccatgtgctcctgggggcggagggtcccccaagggcagagctcagccagcaccaccctgcccactcttctgtaaagtgcccctggcacgacgctcccagagaacccaaggatgcgcccagaatgctcccagcaaccactgagggggccctgctgggagacccgcaaaactgccaatgccttgtaggccagcagccgcacgcgccttcagtgctggagtcacgcccaggggctgacgggccagatggtctctgagtgcagcaaattccgtcttgtgagggaaagtgat

SEQ ID NO: 465506 - DNA, 772 bp, Homo sapiens
aggggtatcctgggaagctgaaaatgcatttgtcaagctcagccgtcacagaccgtccttgcagaccggcgctcccctccacaaaccttctgcagcctgtactgctacagcacgaggctgcagaatcagttgtgaaaatagaagccttctaccgtctcctgaagctggtttcatatggtggtttagatttaaatagtgattgtctagcaccatttgaaatcagtgttcttgggggagaccagctgcgctgcactaccaacagcaaaagaagtgaatgggacagctctgaagtatttgaaagcaacagcaggatggctgtggccttgcaccgaatggccaaccctgcccactgtacggaaacaatagatgctgccttagaagggagcaagctggcactgccctggtatgtggatgctggtgggatggagctgcagtttgtgtctctgaagcagattaaacactgtctgccccagcctgtcttaactatcttctcactggttaacagtccttggaagaataaacaatccacacaagctctcagaaagcagaagttccatgattcgtgaccagagtctcatagcacagaattcatctctaaaaacagagacagagtcttgctctggcacccagattggagtacagcggtgcaaccacgactcactgcagccttgacctcccagcctcagatgatcctcccacctcagtctcccaagtagtcaggactacaggtgtgcaccaccacacctggataattattttttaaaacttttgt

SEQ ID NO: 465507 - DNA, 987 bp, Homo sapiens
gtagtatgtagttgatgatgggagtggttatgagaacaatacagccaagaacaggattagagggtgcggtgggaggattgctgccgttagatgttcccttttgatgctaccagtgactctacctactctccacctaacagcgtaatcgcctgctctgggcccatgagacttgctcaagcattttttagcagctacatgactcactatgaccttaatttgcaggtttgcatcagtgtggtacagccaggctgcctctgctgcaagaattctaaagcagaaaccctagatgcaatcagtccacaaagggtgccggcagggcaccagtgctcatcagtgcttgttatgtgccagccaccctccctgtgtcatcgcatcctccccacaccgtcctgcgaagcaggcattagcatccctgtttacagtacttacttggttgtcacagaaaggttcttttacactggttccataatttatgtaatgtttaattaaattttctattttcatcaacaaatataaccatcctaagcagttttggaaatgaccccagctgactcttggtaagggtaacactgagtgtgtggaagcagaagaccatgggtgtgcgggagcaagcctgcccagtgtggacatagccgtccgctggcatcacttactgagggacagggtggcatgcagttagctcgctggcagatcacttaagcggaggtcaataacaggtttgccaggtaggtgtcgttatccctgttacagatgaccaagcggaggtgtgggaagaacaagttccttgctcacagccgcgttgctgaaagcggcaaagctgattccacagtctcaggcatttcactacctgcagactctgccctgtgggagccagctctgtctgaggtgagggagtagaggcaggcccacagcctgcatgagaaggagcaggcctgagttgagaccctgttccctctcctcactttggtattgtcttggatcctccgg

SEQ ID NO: 465508 - DNA, 3943 bp, Homo sapiens
  misc_feature (2)..(2): n is a, c, g, or t
  misc_feature (7)..(7): n is a, c, g, or t
tntgcanaattaacagtaatcaagcccacagtccaggtcctcgcatagtttgggcctttaaagtcggccatcccagattgagggggcctgacccctgggcgaggccgccgcctctcagttttggggcggtggcgaccccagtccgggagtggccccggtaggtccccgcaggcgggcaggagctccgaggccattggctggcgcgcgggctgccaaggggcggggagcgccgccgaaggggactgtttgctcctacgggctgtagatggagctgtccggccccggagagggggaaggcgcctggaaaacgttcttcttctccctggccgacccgagcggggaacagcactcccaggatgcagtttgtgtcaacacggccgcagcctcagcagctgggcatccagggcctggggctggacagcgggagctggagctgggcccaggctctgcccccggaggaggtctgccaccaggagccggcgctgcgcggggaaatggccgagggaatgccgcccatgcaggctcaagaatgggacatggacgcccggcggccaatgccttttcagttcccaccctttccagatagggcacctgtcttccccgaccgcatgatgcgagagccccagttgcccacagcagagatctcactctggactgtggtggctgccattcaggctgtggagaggaaggtggatgcccaggccagccagctgctgaacctggaggggcgcacggggacagccgagaagaagctggccgactgtgaaaagacggccgtggaatttgggaaccacatggagagcaagtgggccgtgctggggaccctgctgcaggagtacgggctgctgcagaggcggctggagaacttggagaacttgctgcgcaacaggaacttctgggtcctgcggctgcccccgggcagcaagggggaggcccccaaggttccagtgacttttgtcgacattgctgtgtacttctccgaagacgagtggaagaacttggacgaatggcagaaggagctttataacaaccttgttaaggagaactacaaaaccctcatgtccctggacgcggagggctcagtccccaagccagatgctccagtccaggctgagcccagggaagaaccttgtgtgtgggagcagcgccaccccgaagagagagaaatcccaatggatcccgaagcaggtgatggcagcagaagagagtgcggggtccagggaagggcgagagaggacagccggctttccgcacactgctgccgcgaggcgccactgtgtgtgcaccatggggcgagggtcttgggtggctcccaggggccagttctgccagagtcgaaatttggtggagcagagcccctggtgcctgcgcaggatgcgtcctcccaggtgaagcgtgaggacaccctgtgtgtccggggtcagcggggcctggaggaaagagccatccctacggaatccattaccgactccccaatttctgcccaggacctcttgtcccggattaaacaggaggagcatcagtgcgtgtgggatcagcaggatttggcagacagagatattcccacggatcccaattcaggtgacagcctgctgatggtgaagaacccacccccggccccgccacagccccagccccagccccagccaccgcagccgcagctgcagtcgcagccccagccccagagcctgccccccatcgcggtggccgagaacccgggcggccccccgagccgagggctgctggacgacggtttccaggtgctgcccggggagcgtggctccggcgaggcgccgccgggtggggaccgcagcaccgggggcggcgggggcgatgggggcggtgggggcggcggcgcggaggcggggacgggggcaggcggcggctgtggcagctgctgccctggcgggctgcggcggagcctcctcctgcacggcgcccgcagcaagccctactcgtgccccgagtgcggcaagagcttcggcgtgcgcaagagcctcatcatccaccaccgcagccacaccaaggagcggccctacgagtgcgctgagtgcgagaagagcttcaactgccactcgggcctcatccgccaccagatgacgcaccgcggcgagcggccctacaagtgctcggagtgcgagaagacctacagccgtaaggagcacctgcagaaccaccagcggctgcacacgggcgagcggcctttccaatgtgcactgtgcggcaagagcttcatccgcaagcagaacctgctcaagcaccagcgcatccacacgggcgagcgcccctacacgtgcggcgagtgcggcaagagcttccgctacaaggagtcgctcaaggaccacctgcgcgtgcacagcggcggcccgggccccggcgccccacggcagctcccgccgcctcctgagcgagactagggctgggctgggggagggcagggccggacggagtggatcgggggcggcctgagcaccaaccaccttgccgggtgtcctcagccaccgtctggaaatcggcaacaggcattgcactccggttgggggtcccccagggtggggcagggatcccccagatctgtctggtctgaatggacgcccagctcatctagggtggacccagctgctggggaagagccagggggaccgcgaggagccgagcgtcctcgggcaccgccctcacacctcctcgagtgccctgggaccactgggccacagatggtcatcaggggaagccaccagggagtcccgaagcccttctgagatcaggaaatcaggtcccaaggttaggagacgccctgaaaaaaagcgaaggccgagggatgtgctaagggtaacaccttcatgatgacaacactgcctcgcgtttcaatagcgctttatacttttttaagtgttttctatccgttatccatttcacccttggcctatccctctcagataggtggggtaggattttcctggtgaccgagtaaagtgagaggcaggtgagacggttcacccaatcacacgggaaggggcgcgcgctgcccaaccgcgctctccgcctacctccgctgctcgggaagctgctggcctggccctcctggtctctcttcctttcctggtctctcttcctttccttgctctcacccacggataaaaccagaagcgacaggaggccagctcctggggttcctgggagccgggaacagattggctacggaacgccccaggttgtacattcagagggctctttctccatgggagctcctggtgccgcctcggccccagcctgtccccagcccctcaatctggtgcagcagcatcttgtcactgcacaacagtggcctggtcccccacaggcagttagggccccaggtcagacctcaccatgatgatttgttccagttctcccagggcagaggggcgagggagaggcttttgctgtgagagtagccgtcacgtgtctcttcccagcagcgccgggcaagtgggtgctagagtctgagcctcaggctctcctgccctgggcctcccaattggtgctatctgttactgcccgtgctcacggacatggatacagaccctgctgtgctccacaccctgcaggcgcctcgggaagcgcccaaaggattccccttcacgttggtgcacctgctccatagctccgggcgctgcgtcccgaggggccacagtctccatttcagcgtcttgcatggcctggcaccgggtggggtggtatgccccaggacccttgtttgtgtcaaaaatgactttccctgcccttgccgtgggtccggcgttcctcccagccgggatcacagtgggcagccggcacccggcaccactttggcgagcgtcctgcttccgccctcgccctcatctacgctgctccgctttcctcagacccctttttgccgtgcaaagggaattcttgacattaaataaaaggtatccagattgca

SEQ ID NO: 465509 - DNA, 4037 bp, Homo sapiens
  misc_feature (2)..(2): n is a, c, g, or t
  misc_feature (7)..(7): n is a, c, g, or t
tntgcanaattaacagtaatcaagcccacagtccaggtcctcgcatagtttgggcctttaaagtcggccatcccagattgagggggcctgacccctgggcgaggccgccgcctctcagttttggggcggtggcgaccccagtccgggagtggccccggtaggtccccgcaggcgggcaggagctccgaggccattggctggcgcgcgggctgccaaggggcggggagcgccgccgaaggggactgtttgctcctacgggctgtagatggagctgtccggccccggagagggggaaggcgcctggaaaacgttcttcttctccctggccgacccgagcggggaacagcactcccaggatgcagtttgtgtcaacacggccgcagcctcagcagctgggcatccagggcctggggctggacagcgggagctggagctgggcccaggctctgcccccggaggaggtctgccaccaggagccggcgctgcgcggggaaatggccgagggaatgccgcccatgcaggctcaagaatgggacatggacgcccggcggccaatgccttttcagttcccaccctttccagatagggcacctgtcttccccgaccgcatgatgcgagagccccagttgcccacagcagagatctcactctggactgtggtggctgccattcaggctgtggagaggaaggtggatgcccaggccagccagctgctgaacctggaggggcgcacggggacagccgagaagaagctggccgactgtgaaaagacggccgtggaatttgggaaccacatggagagcaagtgggccgtgctggggaccctgctgcaggagtacgggctgctgcagaggcggctggagaacttggagaacttgctgcgcaacaggaacttctgggtcctgcggctgcccccgggcagcaagggggaggcccccaaggttccagtgacttttgtcgacattgctgtgtacttctccgaagacgagtggaagaacttggacgaatggcagaaggagctttataacaaccttgttaaggagaactacaaaaccctcatgtccctggacgcggagggctcagtccccaagccagatgctccagtccaggctgagcccagggaagaaccttgtgtgtgggagcagcgccaccccgaagagagagaaatcccaatggatcccgaagcaggtgatggcagcagaagagagtgcggggtccagggaagggcgagagaggacagccggctttccgcacactgctgccgcgaggcgccactgtgtgtgcaccatggggcgagggtcttgggtggctcccaggggccagttctgccagagtcgaaatttggtggagcagagcccctggtgcctgcgcaggatgcgtcctcccaggtgaagcgtgaggacaccctgtgtgtccggggtcagcggggcctggaggaaagagccatccctacggaatccattaccgactccccaatttctgcccaggacctcttgtcccggattaaacaggaggagcatcagtgcgtgtgggatcagcaggatttggcagacagagatattcccacggatcccaattcaggtgacagcctgctgatggtgaagaacccacccccggccccgccacagccccagccccagccccagccaccgcagccgcagctgcagtcgcagccccagccccagagcctgccccccatcgcggtggccgagaacccgggcggccccccgagccgagggctgctggacgacggtttccaggtgctgcccggggagcgtggctccggcgaggcgccgccgggtggggaccgcagcaccgggggcggcgggggcgatgggggcggtgggggcggcggcgcggaggcggggacgggggcaggcggcggctgtggcagctgctgccctggcgggctgcggcggagcctcctcctgcacggcgcccgcagcaagccctactcgtgccccgagtgcggcaagagcttcggcgtgcgcaagagcctcatcatccaccaccgcagccacaccaaggagcggccctacgagtgcgctgagtgcgagaagagcttcaactgccactcgggcctcatccgccaccagatgacgcaccgcggcgagcggccctacaagtgctcggagtgcgagaagacctacagccgtaaggagcacctgcagaaccaccagcggctgcacacgggcgagcggcctttccaatgtgcactgtgcggcaagagcttcatccgcaagcagaacctgctcaagcaccagcgcatccacacgggcgagcgcccctacacgtgcggcgagtgcggcaagagcttccgctacaaggagtcgctcaaggaccacctgcgcgtgcacagcggcggcccgggccccggcgccccacggcagctcccgccgcctcctgagcgagactagggctgggctgggggagggcagggccggacggagtggatcgggggcggcctgagcaccaaccaccttgccgggtgtcctcagccaccgtctggaaatcggcaacaggcattgcactccggttgggggtcccccagggtggggcagggatcccccagatctgtctggtctgaatggacgcccagctcatctagggtggacccagctgctggggaagagccagggggaccgcgaggagccgagcgtcctcgggcaccgccctcacacctcctcgagtgccctgggaccactgggccacagatggtcatcaggggaagccaccagggagtcccgaagcccttctgagatcaggaaatcaggtcccaaggttaggagacgccctgaaaaaaagcgaaggccgagggatgtgctaagggtaacaccttcatgatgacaacactgcctcgcgtttcaatagcgctttatacttttttaagtgttttctatccgttatccatttcacccttggcctatccctctcagataggtggggtaggattttcctggtgaccgagtaaagtgagaggcaggtgagacggttcacccaatcacacgggaaggggcgcgcgctgcccaaccgcgctctccgcctacctccgctgctcgggaagctgctggcctggccctcctggtctctcttcctttcctggtctctcttcctttccttgctctcacccacggataaaaccagaagcgacaggaggccagctcctggggttcctgggagccgggaacagattggctacggaacgccccaggttgtacattcagagggctctttctccatgggagctcctggtgccgcctcggccccagcctgtccccagcccctcaatctggtgcagcagcatcttgtcactgcacaacagtggcctggtcccccacaggcagttagggccccaggtcagacctcaccatgatgatttgttccagttctcccagggcagaggggcgagggagaggcttttgctgtgagagtagccgtcacgtgtctcttcccagcagcgccgggcaagtgggtgctagagtctgagcctcaggctctcctgccctgggcctcccaattggtgctatctgttactgcccgtgctcacggacatggatacagaccctgctgtgctccacaccctgcaggcgcctcgggaagcgcccaaaggattccccttcacgttggtgcacctgctccatagctccgggcgctgcgtcccgaggggccacagtctccatttcagcgtcttgcatggcctggcaccgggtggggtggtatgccccaggacccttgtttgtgtcaaaaatgactttccctgcccttgccgtgggtccggcgttcctcccagccgggatcacagtgggcagccggcacccggcaccactttggcgagcgtcctgcttccgccctcgccctcatctacgctgctccgctttcctcagacccctttttgccgtgcaaagggaattcttgacattaaataaaaggtatccagattgcagactgcatgttcacagagctgggggttctccagcttgcctacagtaaagcctcaatgaaactggaatccaaaaaaaaaaccaacaacccgaaaa

SEQ ID NO: 465510 - DNA, 3108 bp, Homo sapiens
  misc_feature (2)..(2): n is a, c, g, or t
  misc_feature (7)..(7): n is a, c, g, or t
tntgcanaattaacagtaatcaagcccacagtccaggtcctcgcatagtttgggcctttaaagtcggccatcccagattgagggggcctgacccctgggcgaggccgccgcctctcagttttggggcggtggcgaccccagtccgggagtggccccggtaggtccccgcaggcgggcaggagctccgaggccattggctggcgcgcgggctgccaaggggcggggagcgccgccgaaggggactgtttgctcctacgggctgtagatggagctgtccggccccggagagggggaaggcgcctggaaaacgttcttcttctccctggccgacccgagcggggaacagcactcccaggatgcagtttgtgtcaacacggccgcagcctcagcagctgggcatccagggcctggggctggacagcgggagctggagctgggcccaggctctgcccccggaggaggtctgccaccaggagccggcgctgcgcggggaaatggccgagggaatgccgcccatgcaggctcaagaatgggacatggacgcccggcggccaatgccttttcagttcccaccctttccagatagggcacctgtcttccccgaccgcatgatgcgagagccccagttgcccacagcagagatctcactctggactgtggtggctgccattcaggctgtggagaggaaggtggatgcccaggccagccagctgctgaacctggaggggcgcacggggacagccgagaagaagctggccgactgtgaaaagacggccgtggaatttgggaaccacatggagagcaagtgggccgtgctggggaccctgctgcaggagtacgggctgctgcagaggcggctggagaacttggagaacttgctgcgcaacaggaacttctgggtcctgcggctgcccccgggcagcaagggggaggcccccaaggttccagtgacttttgtcgacattgctgtgtacttctccgaagacgagtggaagaacttggacgaatggcagaaggagctttataacaaccttgttaaggagaactacaaaaccctcatgtccctggacgcggagggctcagtccccaagccagatgctccagtccaggctgaccctactcgtgccccgagtgcggcaagagcttcggcgtgcgcaagagcctcatcatccaccaccgcagccacaccaaggagcggccctacgagtgcgctgagtgcgagaagagcttcaactgccactcgggcctcatccgccaccagatgacgcaccgcggcgagcggccctacaagtgctcggagtgcgagaagacctacagccgtaaggagcacctgcagaaccaccagcggctgcacacgggcgagcggcctttccaatgtgcactgtgcggcaagagcttcatccgcaagcagaacctgctcaagcaccagcgcatccacacgggcgagcgcccctacacgtgcggcgagtgcggcaagagcttccgctacaaggagtcgctcaaggaccacctgcgcgtgcacagcggcggcccgggccccggcgccccacggcagctcccgccgcctcctgagcgagactagggctgggctgggggagggcagggccggacggagtggatcgggggcggcctgagcaccaaccaccttgccgggtgtcctcagccaccgtctggaaatcggcaacaggcattgcactccggttgggggtcccccagggtggggcagggatcccccagatctgtctggtctgaatggacgcccagctcatctagggtggacccagctgctggggaagagccagggggaccgcgaggagccgagcgtcctcgggcaccgccctcacacctcctcgagtgccctgggaccactgggccacagatggtcatcaggggaagccaccagggagtcccgaagcccttctgagatcaggaaatcaggtcccaaggttaggagacgccctgaaaaaaagcgaaggccgagggatgtgctaagggtaacaccttcatgatgacaacactgcctcgcgtttcaatagcgctttatacttttttaagtgttttctatccgttatccatttcacccttggcctatccctctcagataggtggggtaggattttcctggtgaccgagtaaagtgagaggcaggtgagacggttcacccaatcacacgggaaggggcgcgcgctgcccaaccgcgctctccgcctacctccgctgctcgggaagctgctggcctggccctcctggtctctcttcctttcctggtctctcttcctttccttgctctcacccacggataaaaccagaagcgacaggaggccagctcctggggttcctgggagccgggaacagattggctacggaacgccccaggttgtacattcagagggctctttctccatgggagctcctggtgccgcctcggccccagcctgtccccagcccctcaatctggtgcagcagcatcttgtcactgcacaacagtggcctggtcccccacaggcagttagggccccaggtcagacctcaccatgatgatttgttccagttctcccagggcagaggggcgagggagaggcttttgctgtgagagtagccgtcacgtgtctcttcccagcagcgccgggcaagtgggtgctagagtctgagcctcaggctctcctgccctgggcctcccaattggtgctatctgttactgcccgtgctcacggacatggatacagaccctgctgtgctccacaccctgcaggcgcctcgggaagcgcccaaaggattccccttcacgttggtgcacctgctccatagctccgggcgctgcgtcccgaggggccacagtctccatttcagcgtcttgcatggcctggcaccgggtggggtggtatgccccaggacccttgtttgtgtcaaaaatgactttccctgcccttgccgtgggtccggcgttcctcccagccgggatcacagtgggcagccggcacccggcaccactttggcgagcgtcctgcttccgccctcgccctcatctacgctgctccgctttcctcagacccctttttgccgtgcaaagggaattcttgacattaaataaaaggtatccagattgca

SEQ ID NO: 465511 - DNA, 3450 bp, Homo sapiens
  misc_feature (2)..(2): n is a, c, g, or t
  misc_feature (7)..(7): n is a, c, g, or t
tntgcanaattaacagtaatcaagcccacagtccaggtcctcgcatagtttgggcctttaaagtcggccatcccagattgagggggcctgacccctgggcgaggccgccgcctctcagttttggggcggtggcgaccccagtccgggagtggccccggtaggtccccgcaggcgggcaggagctccgaggccattggctggcgcgcgggctgccaaggggcggggagcgccgccgaaggggactgtttgctcctacgggctgtagatggagctgtccggccccggagagggggaaggcgcctggaaaacgttcttcttctccctggccgacccgagcggggaacagcactcccaggatgcagtttgtgtcaacacggccgcagcctcagcagctgggcatccagggcctggggctggacagcgggagctggagctgggcccaggctctgcccccggaggaggtctgccaccaggagccggcgctgcgcggggaaatggccgagggaatgccgcccatgcaggctcaagaatgggacatggacgcccggcggccaatgccttttcagttcccaccctttccagatagggcacctgtcttccccgaccgcatgatgcgagagccccagttgcccacagcagagatctcactctggactgtggtggctgccattcaggctgtggagaggaaggtggatgcccaggccagccagctgctgaacctggaggggcgcacggggacagccgagaagaagctggccgactgtgaaaagacggccgtggaatttgggaaccacatggagagcaagtgggccgtgctggggaccctgctgcaggagtacgggctgctgcagaggcggctggagaacttggagaacttgctgcgcaacaggaacttctgggtcctgcggctgcccccgggcagcaagggggaggcccccaaggttccagtgacttttgtcgacattgctgtgtacttctccgaagacgagtggaagaacttggacgaatggcagaaggagctttataacaaccttgttaaggagaactacaaaaccctcatgtccctggacgcggagggctcagtccccaagccagatgctccagtccaggctgagcccagggaagaaccttgtgtgtgggagcagcgccaccccgaagagagagaaatcccaatggatcccgaagcaggtgatggcagcagaagagagtgcggggtccagggaagggcgagagaggacagccggctttccgcacactgctgccgcgaggcgccactgtgtgtgcaccatggggcgagggtcttgggtggctcccaggggccagttctgccagagtcgaaatttggtggagcagagcccctggtgcctgcgcaggatgcgtcctcccaggtgaagcgtgaggacaccctgtgtgtccggggtcagcggggcctggaggaaagagccatccctacggaatccattaccgactccccaatttctgcccaggacctcttgtcccggattaaacaggaggagcatcagtgcgtgtgggatcagcaggatttggcagacagagatattcccacggatcccaattcaggtgacagcctgctgatggtgaagaacccacccccggccccgccacagccccagccccagccccagccaccgcagccgcagctgcagtcgcagccccagccccagagcctgccccccatcgcggtggccgagaacccgggcggccccccgagccgagggctgctggacgacggtttccaggtgctgcccggggagcgtggctccggcgaggcgccgccgggtggggaccgcagcaccgggggcggcgggggcgatgggggcggtgggggcggcggcgcggaggcggggacgggggcaggcggcggctgtggcagctgctgccctggcgggctgcggcggagcctcctcctgcacggcgcccgcagcaagccctactcgtgccccgagtgcggcaagagcttcggcgtgcgcaagagcctcatcatccaccaccgcagccacaccaaggagcggccctacgagtgcgctgagtgcgagaagagcttcaactgccactcgggcctcatccgccaccagatgacgcaccgcggcgagcggccctacaagtgctcggagtgcgagaagacctacagccgtaaggagcacctgcagaaccaccagcggctgcacacgggcgagcggcctttccaatgtgcactgtgcggcaagagcttcatccgcaagcagaacctgctcaagcaccagcgcatccacacgggcgagcgcccctacacgtgcggcgagtgcggcaagagcttccgctacaaggagtcgctcaaggaccacctgcgcgtgcacagcggcggcccgggccccggcgccccacggcagctcccgccgcctcctgagcgagactagggctgggctgggggagggcagggccggacggagtggatcgggggcggcctgagcaccaaccaccttgccgggtgtcctcagccaccgtctggaaatcggcaacaggcattgcactccggttgggggtcccccagggtggggcagggatcccccagatctgtctggtctgaatggacgcccagctcatctagggtggacccagctgctggggaagagccagggggaccgcgaggagccgagcgtcctcgggcaccgccctcacacctcctcgagtgccctgggaccactgggccacagatggtcatcaggggaagccaccagggagtcccgaagcccttctgagatcaggaaatcaggtcccaaggttaggagacgccctgaaaaaaagcgaaggccgagggatgtgctaagggtaacaccttcatgatgacaacactgcctcgcgtttcaatagcgctttatacttttttaagtgttttctatccgttatccatttcacccttggcctatccctctcagataggtggggtaggattttcctggtgaccgagtaaagtgagaggcaggtgagacggttcacccaatcacacgggaaggggcgcgcgctgcccaaccgcgctctccgcctacctccgctgctcgggaagctgctggcctggccctcctggtctctcttcctttcctggtctctcttcctttccttgctctcacccacggataaaaccagaagcgacaggaggccagctcctggggttcctgggagccgggaacagattggctacggaacgccccaggttgtacattcaggctgtgagagtagccgtcacgtgtctcttcccagcagcgccgggcaagtgggtgctagagtctgagccctcatctacgctgctccgctttcctcagacccctttttgccgtgcaaagggaattcttgacattaaataaaaggtatccagattgcagactgcatgttcacagagctgggggttctccagcttgcctacagtaaagcctcaatgaaactggaatccaa

SEQ ID NO: 465512 - DNA, 1254 bp, Homo sapiens
  misc_feature (2)..(2): n is a, c, g, or t
  misc_feature (7)..(7): n is a, c, g, or t
tntgcanaattaacagtaatcaagcccacagtccaggtcctcgcatagtttgggcctttaaagtcggccatcccagattgagggggcctgacccctgggcgaggccgccgcctctcagttttggggcggtggcgaccccagtccgggagtggccccggtaggtccccgcaggcgggcaggagctccgaggccattggctggcgcgcgggctgccaaggggcggggagcgccgccgaaggggactgtttgctcctacgggctgtagatggagctgtccggccccggagagggggaaggcgcctggaaaacgttcttcttctccctggccgacccgagcggggaacagcactcccaggatgcagtttgtgtcaacacggccgcagcctcagcagctgggcatccagggcctggggctggacagcgggagctggagctgggcccaggctctgcccccggaggaggtctgccaccaggagccggcgctgcgcggggaaatggccgagggaatgccgcccatgcaggctcaagaatgggacatggacgcccggcggccaatgccttttcagttcccaccctttccagatagggcacctgtcttccccgaccgcatgatgcgagagccccagttgcccacagcagagatctcactctggactgtggtggctgccattcaggctgtggagaggaaggtggatgcccaggccagccagctgctgaacctggaggggcgcacggggacagccgagaagaagctggccgactgtgaaaagaagaaagaaaaagggaagtggtaagaacccagagaaccgaggtgctcccattgatagaaagaaagaccagaatgggtaaaaacaggtatgagaagaagagattatccttttcctcctgagttttcaaaatcgtatttgatgtctgcagtaaaaattaccacaccatctgctgtggtattccataaaagaagagaaaagaccaccattatacagtcatgtgccacttcaccatggggacacattctgagaagcatcataaggccatttcatcattgtgccgacattccagagtgcatttacaccaacccagacccacccaggccgcctggcacagcctcctgctcctggaccacacacctgcacagcacgtgactgcacttaatactgcagccaactgtaacaccatgataagtatttgcatatctaaacacagaaaatacacactgaaagtatagcatcaaggtcaatggcacatccgtactgg

SEQ ID NO: 465513 - DNA, 297 bp, Homo sapiens
aagctgacttcaacctttagttaatgagacttatgtaattgtacctgatgtttaggggaaagagataattgcatgaaatcagagatttactcaaaacacaaacttgcaggagatttcgcatcttctaacacctttgccgctcttgttcccgcaagtagactccccaatttctgcccaggacctcttgtcccggattaaacaggaggagcatcagtgcgtgtgggatcagcaggatttggcagacagagatattcccacggatcccaattcagcaggtgagaacaaggtcagaatgaa

SEQ ID NO: 465514 - DNA, 298 bp, Homo sapiens
acgggggcctggcagaagaaagacgacatgtagcatctgattagttgacccctgttcccagctgacttccccggctcacacaaggtctcatcctgggttgtcgctttctccctctgcatacaggctcaagaatgggacatggacgcccggcggccaatgccttttcagttcccaccctttccagatagggcacctgtcttccccgaccgcatgatgcgagagccccagttgcccacagcagagatctcactctggactgtggtggctgccattcaggctgtggagaggaaggtggatg

SEQ ID NO: 465515 - DNA, 3969 bp, Homo sapiens
  misc_feature (2)..(2): n is a, c, g, or t
  misc_feature (7)..(7): n is a, c, g, or t
tntgcanaattaacagtaatcaagcccacagtccaggtcctcgcatagtttgggcctttaaagtcggccatcccagattgagggggcctgacccctgggcgaggccgccgcctctcagttttggggcggtggcgaccccagtccgggagtggccccggtaggtccccgcaggcgggcaggagctccgaggccattggctggcgcgcgggctgccaaggggcggggagcgccgccgaaggggactgtttgctcctacgggctgtagatggagctgtccggccccggagagggggaaggcgcctggaaaacgttcttcttctccctggccgacccgagcggggaacagcactcccaggatgcagtttgtgtcaacacggccgcagcctcagcagctgggcatccagggcctggggctggacagcgggagctggagctgggcccaggctctgcccccggaggaggtctgccaccaggagccggcgctgcgcggggaaatggccgagggaatgccgcccatgcaggctcaagaatgggacatggacgcccggcggccaatgccttttcagttcccaccctttccagatagggcacctgtcttccccgaccgcatgatgcgagagccccagttgcccacagcagagatctcactctggactgtggtggctgccattcaggctgtggagaggaaggtggatgcccaggccagccagctgctgaacctggaggggcgcacggggacagccgagaagaagctggccgactgtgaaaagacggccgtggaatttgggaaccacatggagagcaagtgggccgtgctggggaccctgctgcaggagtacgggctgctgcagaggcggctggagaacttggagaacttgctgcgcaacaggaacttctgggtcctgcggctgcccccgggcagcaagggggaggcccccaaggttccagtgacttttgtcgacattgctgtgtacttctccgaagacgagtggaagaacttggacgaatggcagaaggagctttataacaaccttgttaaggagaactacaaaaccctcatgtccctggacgcggagggctcagtccccaagccagatgctccagtccaggctgagcccagggaagaaccttgtgtgtgggagcagcgccaccccgaagagagagaaatcccaatggatcccgaagcaggagcagagcccctggtgcctgcgcaggatgcgtcctcccaggtgaagcgtgaggacaccctgtgtgtccggggtcagcggggcctggaggaaagagccatccctacggaatccattaccgactccccaatttctgcccaggacctcttgtcccggattaaacaggaggagcatcagtgcgtgtgggatcagcaggatttggcagacagagatattcccacggatcccaattcagagtctctcatctcagcacatgacattttgtcatggatcaagcaggaggagcagccatacccatggggaccacgcgactcaatggacggagagcttggattagactctggccctagtgacagcctgctgatggtgaagaacccacccccggccccgccacagccccagccccagccccagccaccgcagccgcagctgcagtcgcagccccagccccagagcctgccccccatcgcggtggccgagaacccgggcggccccccgagccgagggctgctggacgacggtttccaggtgctgcccggggagcgtggctccggcgaggcgccgccgggtggggaccgcagcaccgggggcggcgggggcgatgggggcggtgggggcggcggcgcggaggcggggacgggggcaggcggcggctgtggcagctgctgccctggcgggctgcggcggagcctcctcctgcacggcgcccgcagcaagccctactcgtgccccgagtgcggcaagagcttcggcgtgcgcaagagcctcatcatccaccaccgcagccacaccaaggagcggccctacgagtgcgctgagtgcgagaagagcttcaactgccactcgggcctcatccgccaccagatgacgcaccgcggcgagcggccctacaagtgctcggagtgcgagaagacctacagccgtaaggagcacctgcagaaccaccagcggctgcacacgggcgagcggcctttccaatgtgcactgtgcggcaagagcttcatccgcaagcagaacctgctcaagcaccagcgcatccacacgggcgagcgcccctacacgtgcggcgagtgcggcaagagcttccgctacaaggagtcgctcaaggaccacctgcgcgtgcacagcggcggcccgggccccggcgccccacggcagctcccgccgcctcctgagcgagactagggctgggctgggggagggcagggccggacggagtggatcgggggcggcctgagcaccaaccaccttgccgggtgtcctcagccaccgtctggaaatcggcaacaggcattgcactccggttgggggtcccccagggtggggcagggatcccccagatctgtctggtctgaatggacgcccagctcatctagggtggacccagctgctggggaagagccagggggaccgcgaggagccgagcgtcctcgggcaccgccctcacacctcctcgagtgccctgggaccactgggccacagatggtcatcaggggaagccaccagggagtcccgaagcccttctgagatcaggaaatcaggtcccaaggttaggagacgccctgaaaaaaagcgaaggccgagggatgtgctaagggtaacaccttcatgatgacaacactgcctcgcgtttcaatagcgctttatacttttttaagtgttttctatccgttatccatttcacccttggcctatccctctcagataggtggggtaggattttcctggtgaccgagtaaagtgagaggcaggtgagacggttcacccaatcacacgggaaggggcgcgcgctgcccaaccgcgctctccgcctacctccgctgctcgggaagctgctggcctggccctcctggtctctcttcctttcctggtctctcttcctttccttgctctcacccacggataaaaccagaagcgacaggaggccagctcctggggttcctgggagccgggaacagattggctacggaacgccccaggttgtacattcagagggctctttctccatgggagctcctggtgccgcctcggccccagcctgtccccagcccctcaatctggtgcagcagcatcttgtcactgcacaacagtggcctggtcccccacaggcagttagggccccaggtcagacctcaccatgatgatttgttccagttctcccagggcagaggggcgagggagaggcttttgctgtgagagtagccgtcacgtgtctcttcccagcagcgccgggcaagtgggtgctagagtctgagcctcaggctctcctgccctgggcctcccaattggtgctatctgttactgcccgtgctcacggacatggatacagaccctgctgtgctccacaccctgcaggcgcctcgggaagcgcccaaaggattccccttcacgttggtgcacctgctccatagctccgggcgctgcgtcccgaggggccacagtctccatttcagcgtcttgcatggcctggcaccgggtggggtggtatgccccaggacccttgtttgtgtcaaaaatgactttccctgcccttgccgtgggtccggcgttcctcccagccgggatcacagtgggcagccggcacccggcaccactttggcgagcgtcctgcttccgccctcgccctcatctacgctgctccgctttcctcagacccctttttgccgtgcaaagggaattcttgacattaaataaaaggtatccagattgcagactgcatgttcacagagctgggggttctccagcttgcctacagtaaagcctcaatgaaactggaatccaa

SEQ ID NO: 465516 - DNA, 3017 bp, Homo sapiens
aaggggaggtggtggggaggaacaggcaggaggcgctagattaaccgcttgttggcttaggttccagtgacttttgtcgacattgctgtgtacttctccgaagacgagtggaagaacttggacgaatggcagaaggagctttataacaaccttgttaaggagaactacaaaaccctcatgtccctggacgcggagggctcagtccccaagccagatgctccagtccaggctgagcccagggaagaaccttgtgtgtgggagcagcgccaccccgaagagagagaaatcccaatggatcccgaagcaggagcagagcccctggtgcctgcgcaggatgcgtcctcccaggtgaagcgtgaggacaccctgtgtgtccggggtcagcggggcctggaggaaagagccatccctacggaatccattaccgactccccaatttctgcccaggacctcttgtcccggattaaacaggaggagcatcagtgcgtgtgggatcagcaggatttggcagacagagatattcccacggatcccaattcagagtctctcatctcagcacatgacattttgtcatggatcaagcaggaggagcagccatacccatggggaccacgcgactcaatggacggagagcttggattagactctggccctagtgacagcctgctgatggtgaagaacccacccccggccccgccacagccccagccccagccccagccaccgcagccgcagctgcagtcgcagccccagccccagagcctgccccccatcgcggtggccgagaacccgggcggccccccgagccgagggctgctggacgacggtttccaggtgctgcccggggagcgtggctccggcgaggcgccgccgggtggggaccgcagcaccgggggcggcgggggcgatgggggcggtgggggcggcggcgcggaggcggggacgggggcaggcggcggctgtggcagctgctgccctggcgggctgcggcggagcctcctcctgcacggcgcccgcagcaagccctactcgtgccccgagtgcggcaagagcttcggcgtgcgcaagagcctcatcatccaccaccgcagccacaccaaggagcggccctacgagtgcgctgagtgcgagaagagcttcaactgccactcgggcctcatccgccaccagatgacgcaccgcggcgagcggccctacaagtgctcggagtgcgagaagacctacagccgtaaggagcacctgcagaaccaccagcggctgcacacgggcgagcggcctttccaatgtgcactgtgcggcaagagcttcatccgcaagcagaacctgctcaagcaccagcgcatccacacgggcgagcgcccctacacgtgcggcgagtgcggcaagagcttccgctacaaggagtcgctcaaggaccacctgcgcgtgcacagcggcggcccgggccccggcgccccacggcagctcccgccgcctcctgagcgagactagggctgggctgggggagggcagggccggacggagtggatcgggggcggcctgagcaccaaccaccttgccgggtgtcctcagccaccgtctggaaatcggcaacaggcattgcactccggttgggggtcccccagggtggggcagggatcccccagatctgtctggtctgaatggacgcccagctcatctagggtggacccagctgctggggaagagccagggggaccgcgaggagccgagcgtcctcgggcaccgccctcacacctcctcgagtgccctgggaccactgggccacagatggtcatcaggggaagccaccagggagtcccgaagcccttctgagatcaggaaatcaggtcccaaggttaggagacgccctgaaaaaaagcgaaggccgagggatgtgctaagggtaacaccttcatgatgacaacactgcctcgcgtttcaatagcgctttatacttttttaagtgttttctatccgttatccatttcacccttggcctatccctctcagataggtggggtaggattttcctggtgaccgagtaaagtgagaggcaggtgagacggttcacccaatcacacgggaaggggcgcgcgctgcccaaccgcgctctccgcctacctccgctgctcgggaagctgctggcctggccctcctggtctctcttcctttcctggtctctcttcctttccttgctctcacccacggataaaaccagaagcgacaggaggccagctcctggggttcctgggagccgggaacagattggctacggaacgccccaggttgtacattcagagggctctttctccatgggagctcctggtgccgcctcggccccagcctgtccccagcccctcaatctggtgcagcagcatcttgtcactgcacaacagtggcctggtcccccacaggcagttagggccccaggtcagacctcaccatgatgatttgttccagttctcccagggcagaggggcgagggagaggcttttgctgtgagagtagccgtcacgtgtctcttcccagcagcgccgggcaagtgggtgctagagtctgagcctcaggctctcctgccctgggcctcccaattggtgctatctgttactgcccgtgctcacggacatggatacagaccctgctgtgctccacaccctgcaggcgcctcgggaagcgcccaaaggattccccttcacgttggtgcacctgctccatagctccgggcgctgcgtcccgaggggccacagtctccatttcagcgtcttgcatggcctggcaccgggtggggtggtatgccccaggacccttgtttgtgtcaaaaatgactttccctgcccttgccgtgggtccggcgttcctcccagccgggatcacagtgggcagccggcacccggcaccactttggcgagcgtcctgcttccgccctcgccctcatctacgctgctccgctttcctcagacccctttttgccgtgcaaagggaattcttgacattaaataaaaggtatccagattgca

SEQ ID NO: 465517 - DNA, 3846 bp, Homo sapiens
  misc_feature (2)..(2): n is a, c, g, or t
  misc_feature (7)..(7): n is a, c, g, or t
tntgcanaattaacagtaatcaagcccacagtccaggtcctcgcatagtttgggcctttaaagtcggccatcccagattgagggggcctgacccctgggcgaggccgccgcctctcagttttggggcggtggcgaccccagtccgggagtggccccggtaggtccccgcaggcgggcaggagctccgaggccattggctggcgcgcgggctgccaaggggcggggagcgccgccgaaggggactgtttgctcctacgggctgtagatggagctgtccggccccggagagggggaaggcgcctggaaaacgttcttcttctccctggccgacccgagcggggaacagcactcccaggatgcagtttgtgtcaacacggccgcagcctcagcagctgggcatccagggcctggggctggacagcgggagctggagctgggcccaggctctgcccccggaggaggtctgccaccaggagccggcgctgcgcggggaaatggccgagggaatgccgcccatgcaggctcaagaatgggacatggacgcccggcggccaatgccttttcagttcccaccctttccagatagggcacctgtcttccccgaccgcatgatgcgagagccccagttgcccacagcagagatctcactctggactgtggtggctgccattcaggctgtggagaggaaggtggatgcccaggccagccagctgctgaacctggaggggcgcacggggacagccgagaagaagctggccgactgtgaaaagacggccgtggaatttgggaaccacatggagagcaagtgggccgtgctggggaccctgctgcaggagtacgggctgctgcagaggcggctggagaacttggagaacttgctgcgcaacaggaacttctgggtcctgcggctgcccccgggcagcaagggggaggcccccaaggttccagtgacttttgtcgacattgctgtgtacttctccgaagacgagtggaagaacttggacgaatggcagaaggagctttataacaaccttgttaaggagaactacaaaaccctcatgtccctggacgcggagggctcagtccccaagccagatgctccagtccaggctgagcccagggaagaaccttgtgtgtgggagcagcgccaccccgaagagagagaaatcccaatggatcccgaagcaggtgatggcagcagaagagagtgcggggtccagggaagggcgagagaggacagccggctttccgcacactgctgccgcgaggcgccactgtgtgtgcaccatggggcgagggtcttgggtggctcccaggggccagttctgccagagtcgaaatttggtggagcagagcccctggtgcctgcgcaggatgcgtcctcccaggtgaagcgtgaggacaccctgtgtgtccggggtcagcggggcctggaggaaagagccatccctacggaatccattaccgactccccaatttctgcccaggacctcttgtcccggattaaacaggaggagcatcagtgcgtgtgggatcagcaggatttggcagacagagatattcccacggatcccaattcaggtgacagcctgctgatggtgaagaacccacccccggccccgccacagccccagccccagccccagccaccgcagccgcagctgcagtcgcagccccagccccagagcctgccccccatcgcggtggccgagaacccgggcggccccccgagccgagggctgctggacgacggtttccaggtgctgcccggggagcgtggctccggcgaggcgccgccgggtggggaccgcagcaccgggggcggcgggggcgatgggggcggtgggggcggcggcgcggaggcggggacgggggcaggcggcggctgtggcagctgctgccctggcgggctgcggcggagcctcctcctgcacggcgcccgcagcaagccctactcgtgccccgagtgcggcaagagcttcggcgtgcgcaagagcctcatcatccaccaccgcagccacaccaaggagcggccctacgagtgcgctgagtgcgagaagagcttcaactgccactcgggcctcatccgccaccagatgacgcaccgcggcgagcggccctacaagtgctcggagtgcgagaagacctacagccgtaaggagcacctgcagaaccaccagcggctgcacacgggcgagcggcctttccaatgtgcactgtgcggcaagagcttcatccgcaagcagaacctgctcaagcaccagcgcatccacacgggcgagcgcccctacacgtgcggcgagtgcggcaagagcttccgctacaaggagtcgctcaaggaccacctgcgcgtgcacagcggcggcccgggccccggcgccccacggcagctcccgccgcctcctgagcgagactagggctgggctgggggagggcagggccggacggagtggatcgggggcggcctgagcaccaaccaccttgccgggtgtcctcagccaccgtctggaaatcggcaacaggcattgcactccggttgggggtcccccagggtggggcagggatcccccagatctgtctggtctgaatggacgcccagctcatctagggtggacccagctgctggggaagagccagggggaccgcgaggagccgagcgtcctcgggcaccgccctcacacctcctcgagtgccctgggaccactgggccacagatggtcatcaggggaagccaccagggagtcccgaagcccttctgagatcaggaaatcaggtcccaaggttaggagacgccctgaaaaaaagcgaaggccgagggatgtgctaagggtaacaccttcatgatgacaacactgcctcgcgtttcaatagcgctttatacttttttaagtgttttctatccgttatccatttcacccttggcctatccctctcagataggtggggtaggattttcctggtgaccgagtaaagtgagaggcaggtgagacggttcacccaatcacacgggaaggggcgcgcgctgcccaaccgcgctctccgcctacctccgctgctcgggaagctgctggcctggccctcctggtctctcttcctttcctggtctctcttcctttccttgctctcacccacggataaaaccagaagcgacaggaggccagctcctggggttcctgggagccgggaacagattggctacggaacgccccaggttgtacattcagagggctctttctccatgggagctcctggtgccgcctcggccccagcctgtccccagcccctcaatctggtgcagcagcatcttgtcactgcacaacagtggcctggtcccccacaggcagttagggccccaggtcagacctcaccatgatgatttgttccagttctcccagggcagaggggcgagggagaggcttttgcctcgggaagcgcccaaaggattccccttcacgttggtgcacctgctccatagctccgggcgctgcgtcccgaggggccacagtctccatttcagcgtcttgcatggcctggcaccgggtggggtggtatgccccaggacccttgtttgtgtcaaaaatgactttccctgcccttgccgtgggtccggcgttcctcccagccgggatcacagtgggcagccggcacccggcaccactttggcgagcgtcctgcttccgccctcgccctcatctacgctgctccgctttcctcagacccctttttgccgtgcaaagggaattcttgacattaaataaaaggtatccagattgcagactgcatgttcacagagctgggggttctccagcttgcctacagtaaagcctcaatgaaactggaatccaa

SEQ ID NO: 465518 - DNA, 1847 bp, Homo sapiens
  misc_feature (2)..(2): n is a, c, g, or t
  misc_feature (7)..(7): n is a, c, g, or t
tntgcanaattaacagtaatcaagcccacagtccaggtcctcgcatagtttgggcctttaaagtcggccatcccagattgagggggcctgacccctgggcgaggccgccgcctctcagttttggggcggtggcgaccccagtccgggagtggccccggtaggtccccgcaggcgggcaggagctccgaggccattggctggcgcgcgggctgccaaggggcggggagcgccgccgaaggggactgtttgctcctacgggctgtagatggagctgtccggccccggagagggggaaggcgcctggaaaacgttcttcttctccctggccgacccgagcggggaacagcactcccaggatgcagtttgtgtcaacacggccgcagcctcagcagctgggcatccagggcctggggctggacagcgggagctggagctgggcccaggctctgcccccggaggaggtctgccaccaggagccggcgctgcgcggggaaatggccgagggaatgccgcccatgcaggctcaagaatgggacatggacgcccggcggccaatgccttttcagttcccaccctttccagatagggcacctgtcttccccgaccgcatgatgcgagagccccagttgcccacagcagagatctcactctggactgtggtggctgccattcaggctgtggagaggaaggtggatgcccaggccagccagctgctgaacctggaggggcgcacggggacagccgagaagaagctggccgactgtgaaaagacggccgtggaatttgggaaccacatggagagcaagtgggccgtgctggggaccctgctgcaggagtacgggctgctgcagaggcggctggagaacttggagaacttgctgcgcaacaggaacttctgggtcctgcggctgcccccgggcagcaagggggaggcccccaaggttccagtgacttttgtcgacattgctgtgtacttctccgaagacgagtggaagaacttggacgaatggcagaaggagctttataacaaccttgttaaggagaactacaaaaccctcatgtccctggacgcggagggctcagtccccaagccagatgctccagtccaggctgagcccagggaagaaccttgtgtgtgggagcagcgccaccccgaagagagagaaatcccaatggatcccgaagcaggagcagagcccctggtgcctgcgcaggatgcgtcctcccaggtgaagcgtgaggacaccctgtgtgtccggggtcagcggggcctggaggaaagagccatccctacggaatccattaccgactccccaatttctgcccaggacctcttgtcccggattaaacaggaggagcatcagtgcgtgtgggatcagcaggatttggcagacagagatattcccacggatcccaattcaggcctcgggaagcgcccaaaggattccccttcacgttggtgcacctgctccatagctccgggcgctgcgtcccgaggggccacagtctccatttcagcgtcttgcatggcctggcaccgggtggggtggtatgccccaggacccttgtttgtgtcaaaaatgactttccctgcccttgccgtgggtccggcgttcctcccagccgggatcacagtgggcagccggcacccggcaccactttggcgagcgtcctgcttccgccctcgccctcatctacgctgctccgctttcctcagacccctttttgccgtgcaaagggaattcttgacattaaataaaaggtatccagattgcagactgcatgttcacagagctgggggttctccagcttgcctacagtaaagcctcaatgaaactggaatccaa

SEQ ID NO: 465519 - DNA, 2266 bp, Homo sapiens
  misc_feature (1)..(1): n is a, c, g, or t
nttcaagagtctgcttcggttgaggctttgaagatgagcacacaggaagaactgcaggagctgcgggaacgctaccatttcctgaatgaggaataccgggccctgcaggagagcaacagcagcctcacggggcagcttgcagatctggagaagcctgatcctgaaatgcagttgttacggcagcagctacgggatgctgaagagcagatgcatggcatgaagaacaaggtcagtgaggaggagcagaggcggctgcagagggagctcaagtgtgctcagaatgaggtgcttcggtttcagacctcccacagtgtcacccagaatgaggagctgaagtccagactctgtaccctgcagaaaaaatatgatactagccaggatgagcagaacgagctcttgaagatgcagctgcaacttcagactgagctccggcagctcaaagtcatgaaatccacacttgtagaaaaccagagtgagaaggagttactgtgccggctgcagaagctgcacctccagcaccagaacgtcacatgtgagaaggaaaagctgctggaacggcagcagcagctgcaggaggagctgcagtgccatgaggcagagctgcagcacctcagggatacggtggcctccttcaaagagagcaatgagaaggacacagagacgcacgctcagcttcaggagatgaagcagctgtaccaggccagcaaggacgagctggagcggcagaagcacatgtatgaccagctggagcaggacctcctgctctgccagctggagctgaaagagctcaaggcctcccaccccattccggaggacaaaggaaagtgtgctaataaggaaaagtacaaggccagccagaaggagatggggcagctgcagatggagcagtgtgagctcctggaggatcagaggaggatgcaggaggagcagggccagctgcaggaagagctgcacaggctcacactgccactgccaaagagtggcctcttactcaagagtcaggagctactcaccaagttagaagacctgtgtgagctgcagctgctctaccaaggcatgcaggaggaacagaagaagctgatacagaaccaagactgtgtattaaaagaacaattagagatccacgaagagctgcgacgtttcaaagagtctcatttccaggaagtgttggagaatcccgatgattccaaattggctaagtcctccaaatgtaatcgaaacaagcaatccaagctgctcatggagcagatgcaggccctgcaggtgatgtatgacgccggtcaggcgaagcaggagctcttgcagcaagagcaagggaggctcctagaggagcggaagaggctgcaggcagacttgcagctctgcctggaagaaatgcagctgcttcaagtccagtccccttctataaaaatgagccttgagtcctacgggaagagctatggtagcatggtccccagcaatgagaactgtcgcaagacttatgataccactgtggatgacaatgagagctattacaagagttacaccagcacccagaccagcagcaagagctttctcaagagctatgacagcagcaccagtgccagtgaggcctatgggaagagttactgcactaccagcaacagcagcattacctataagaagagttacggcagcaccagtagctctgacacctgccagaagagttttgtcagcagctgcactgacgaggaacctgctgagcctgaagacatggagcgctttgaggaaatggttgtgaaagtgctgatcaagctgcaggcggtgcaggccatgtaccagataagccaggaggaacacagccagctgcaagagcagatggaaaagttactggccaagcagaaagacctgaaggaagagctggatgcctgtgaaagggagttcaaggagtgcatggaatgccttgaaaagcccatggccccccagaacgacaagaatgaggtaaccactgtcagggaggcagggtttcctctggcagcccctggagccatagaggtcatggccacttcatagaggctaaagagagggacaaagcagggagaatatgcacctcagaggctgggcagtctgctccatccctgatgacatttcccaagtgcccgtggagctggggtttactagtcatcaggacttctctcatcgaatgatttctctctttctccctttgccacttctgttctcttttgctttgtgttctagaccacttctgtagaactgtatttttgcatttgccaatcttctttcatca

SEQ ID NO: 465520 - DNA, 2703 bp, Homo sapiens
  misc_feature (1)..(1): n is a, c, g, or t
  misc_feature (3)..(4): n is a, c, g, or t
ntnngcagactcccaaggtggcaaagatccaggtggtctggcctatcaaggaccccttgaaggtgcctctcacccccagcaccaaagtggcccacgtcctgaggcagttcacagagcacctcagccctggttccaagggtcaagaagacagtgaggacatggacagcctccttctacaccataggtccatggagtcagccaacatcctcctctatgaagttggagggaatatcaatgagcatcgcctggacccagatgcctacctcttagatctgtaccgtgccaacccgcatggcaaaattgtttcgaaagtggccctacaatgtgtagtagcagcagcaccagagacaaaaccaggagagctctgtgaccttggacaagccccttgccctctcagaatcctttcaggatgaggggctagggcctcagggagaggaagccaagattgtagccatgaccagccccgggagaaatggacagaggaagactttgcttcacagctctcatgctttacatgttgatttgtacaatcttgtcattttgtaatatgatataatatgtaaacgtaattgtttaaacagtaaaggcacaacaagttcaatgtcacatttactttgcctgtttttctctccagtccagtgctcggtaggtgttgtccttccagcgagttgacgtgggagcttggtgacgagagcatcttgctgagctgctcaaagggctctggcccatgtgatccagccacgccttgaacccacaaccaccgggggcgggagggcaggaagagaactcagaatggggaggcatggagtaatgatacccattgctgaagggtgggggcattgcagggacagcctctctgggaatcctctcatctcctacagtcccaggtctcacccttcctcttctcctctgccctgggtctgtatcctcaggccagatactgatgctgatggtgatggtgatgctgctgatggtggtgatggtgatgctgctgctgatgatgatggtggggataatgatggtgatgctgccgatggtgatggtggtgatgatgatggtgatgctgctgatggtgttgatggcgatgctgctgatggtgatgatggtggtgattacgatggtgatgctgctgctgctgctggtggtgatcctgctgatggttttgatggttatgatgatggtgatgctgctgacggtgatgatggtgatgatgatgatggtaatgatgatgatggtgagggtaataatggtaatgatggtgatggcgatgatggtgataataacgatgatgctgatggtgatgataatgatggtgatgctactgctgttgccactgatgatggtgatgatgccaagagcttgacaagtttgatcttcacaataatccagtatcttagtttgggcaatgatggtgatgatggcagctccagagttgctacttctgttcaccaatgtcctctctacctcccatggtctacctacaagccttttggacctccctccaaaatatactccaatccatccacttcactcctttgttcctactaccatcctaatccaaactactaccatctcgatgccttggataatagtgatcatgatggtggtggtggtagtggcgttgatgatggtgatggtaatggtgatgatggtggtggtggtgatggaaatgatgatgttagttgtggtgttgatgatggtaatgataatgattgtgatggtggtgttggtggtgctggtgatgataatgatggtggtggtggtggtggtgatgatggtggtggtggtgatggaaatgatgatgatgttagttgtggtgttgatgatggtaatgataatgattgtgatgatggtggtggtggtggtgatgatggtgatgatgattatgatggtggtgttggtggtgctgctgatgataatcatggtggcagtggtggtgatgatggtggcggtggtggtggtgatgatggtggtggtggtggtgactgatgagaatgatgataatctaaaatagttaagagtttacatcttgacaccagatggtgcaaggccttgatggcctccatgcctcttaactgctctcccttcttgctttcctctctattcatatatagcagctactgtgggcctttaaaaatataaattcaatcttactgaaagccctcctgctgaaaactttccagagggatcccattaaacaaatatcccaactctttaccctggcctatgaagccctatgtctgtgacaccacttcactcatactccctcccaccttactttgcagagccagtcagtcacatgagcctccttccaactcctcagacatcccaagttcattcctgctttgggcttttgcacctgctgttctctctgtccacaacactcttcccccagctacttccatggccagctcctttcgcctttggatctcaggtcagatgtcccttcctttgagaggccatctctgactaccctatctgaagttgcttcttctgtcactctctctggaattgccttggtgaattttcttcctagcatttattactatcctaaattatcttattgagtcagttttttattttctgtctccctgactaggatgtagccccatgaaggcagagactatgtgggcttttctcacttctatggatatgatggatatgatgtggatataatggtactagcagatgctcaataaaaat

SEQ ID NO: 465521 - DNA, 517 bp, Homo sapiens
gcaagggcactggtcttcagtacatctgtgtccgtcagtcatcgaccgtgggcttcccaggggaaagggggtgtcacttttctggcaaggcatcttccctcagcggagctcagttctccagcaaaagaagtagctgtgagctgtagcagtcaagatgcatacagccaggggacagtgcactgcctggtgaagggctctgtgcaggggaacagcatctcctacagcctcccactcaacctccttcaccccttcttcccacagatgagcatcgcctggacccagatgcctacctcttagatctgtaccgtgccaacccgcatggtgagtgggtccttaaacagaaccccacctaaaccctgcgagtctcaggagcagcctggatgcctcctcctctcccctgctggctctgtgtccatgtacccagcatgagaacaaagctattccaggggagggtctgagttttattccaaggcttccttttctgaaatgcctctcagacccctcagaaatagactca

SEQ ID NO: 465522 - DNA, 3228 bp, Homo sapiens
  misc_feature (1)..(1): n is a, c, g, or t
  misc_feature (3)..(4): n is a, c, g, or t
ntnngcagactcccaaggtggcaaagatccaggtggtctggcctatcaaggaccccttgaaggtgcctctcacccccagcaccaaagtggcccacgtcctgaggcagttcacagagcacctcagccctggttccaagggtcaagaagacagtgaggacatggacagcctccttctacaccataggtccatggagtcagccaacatcctcctctatgaagttggagggaatatcaatgagcatcgcctggacccagatgcctacctcttagatctgtaccgtgccaacccgcatggtgagtgggtccttaaacagaaccccacctaaaccctgcgagtctcaggagcagcctggatgcctcctcctctcccctgctggctctgtgtccatgtacccagcatgagaacaaagctattccaggggagggtctgagttttattccaaggcttccttttctgaaatgcctctcagacccctcagaaatagactcaggggtggtgctctctccactcagaggggatgaggggctagggcctcagggaggggaggccaacactgtagccatgatcagccctggaagaactggacagaggaagaacttcccttcacagctctcatgttttaaccgtgcacacaatgccctcactcccctccaccctccagccctccagagagttgcttcctacaccaagcttgctgtatgacgccaccacttggggcgcttggatctccatgggcttctgtctgtggcttccagactggaggaaaattaaaaatgcagtacctttatcaagaggtagttggggtcttttccccccaggcaaaattgtttcgaaagtggccctacaatgtgtagtagcagcagcaccagagacaaaaccaggagagctctgtgaccttggacaagccccttgccctctcagaatcctttcaggatgaggggctagggcctcagggagaggaagccaagattgtagccatgaccagccccgggagaaatggacagaggaagactttgcttcacagctctcatgctttacatgttgatttgtacaatcttgtcattttgtaatatgatataatatgtaaacgtaattgtttaaacagtaaaggcacaacaagttcaatgtcacatttactttgcctgtttttctctccagtccagtgctcggtaggtgttgtccttccagcgagttgacgtgggagcttggtgacgagagcatcttgctgagctgctcaaagggctctggcccatgtgatccagccacgccttgaacccacaaccaccgggggcgggagggcaggaagagaactcagaatggggaggcatggagtaatgatacccattgctgaagggtgggggcattgcagggacagcctctctgggaatcctctcatctcctacagtcccaggtctcacccttcctcttctcctctgccctgggtctgtatcctcaggccagatactgatgctgatggtgatggtgatgctgctgatggtggtgatggtgatgctgctgctgatgatgatggtggggataatgatggtgatgctgccgatggtgatggtggtgatgatgatggtgatgctgctgatggtgttgatggcgatgctgctgatggtgatgatggtggtgattacgatggtgatgctgctgctgctgctggtggtgatcctgctgatggttttgatggttatgatgatggtgatgctgctgacggtgatgatggtgatgatgatgatggtaatgatgatgatggtgagggtaataatggtaatgatggtgatggcgatgatggtgataataacgatgatgctgatggtgatgataatgatggtgatgctactgctgttgccactgatgatggtgatgatgccaagagcttgacaagtttgatcttcacaataatccagtatcttagtttgggcaatgatggtgatgatggcagctccagagttgctacttctgttcaccaatgtcctctctacctcccatggtctacctacaagccttttggacctccctccaaaatatactccaatccatccacttcactcctttgttcctactaccatcctaatccaaactactaccatctcgatgccttggataatagtgatcatgatggtggtggtggtagtggcgttgatgatggtgatggtaatggtgatgatggtggtggtggtgatggaaatgatgatgttagttgtggtgttgatgatggtaatgataatgattgtgatggtggtgttggtggtgctggtgatgataatgatggtggtggtggtggtggtgatgatggtggtggtggtgatggaaatgatgatgatgttagttgtggtgttgatgatggtaatgataatgattgtgatgatggtggtggtggtggtgatgatggtgatgatgattatgatggtggtgttggtggtgctgctgatgataatcatggtggcagtggtggtgatgatggtggcggtggtggtggtgatgatggtggtggtggtggtgactgatgagaatgatgataatctaaaatagttaagagtttacatcttgacaccagatggtgcaaggccttgatggcctccatgcctcttaactgctctcccttcttgctttcctctctattcatatatagcagctactgtgggcctttaaaaatataaattcaatcttactgaaagccctcctgctgaaaactttccagagggatcccattaaacaaatatcccaactctttaccctggcctatgaagccctatgtctgtgacaccacttcactcatactccctcccaccttactttgcagagccagtcagtcacatgagcctccttccaactcctcagacatcccaagttcattcctgctttgggcttttgcacctgctgttctctctgtccacaacactcttcccccagctacttccatggccagctcctttcgcctttggatctcaggtcagatgtcccttcctttgagaggccatctctgactaccctatctgaagttgcttcttctgtcactctctctggaattgccttggtgaattttcttcctagcatttattactatcctaaattatcttattgagtcagttttttattttctgtctccctgactaggatgtagccccatgaaggcagagactatgtgggcttttctcacttctatggatatgatggatatgatgtggatataatggtactagcagatgctcaataaaaat

SEQ ID NO: 465523 - DNA, 1074 bp, Homo sapiens
taaatcctgcagccattagaaagagagtaaggaactgctataaatgcattatactcacacatttgacaacttagaagatatgaacaaattccttgacatttacaagttaattgttgggcttgccattctaccctctatgaccttcccactcattatctcctatctcagtaactttaaactcactcatatgaggccctccatcctgtggtacttcacctgtatttcaagagcaagtcaacaactcattcttccctggaagccattcatgaatttaaattaccaagttgaaataaaactagtattagatttagaactgtgttctgtcaaagtcttttcccttgggaaacttgcctttattatgatcaagtttctgggaatattgcacaatgattactcttctctccctaacagagccatgagatcatcattggatcttcactgtgagaaaccagtggtattcttggaggatattcacccttggaatcaagacaccatactgtgagtatgccaagcagccacatggaaaggccaatagagctgttccaagcacagcctcagctaggtcccaggagatgaccagcatcaagcaccagacaaagtacttcaatgactgtcatcttgtccacatccccagctttcacaagacaggtctgctgtgatttcagcttcttctagttgactctatgatgcttggcttctagcaaatctgcttccttcctttgtccatccatgctgatggatggtaacagcaatagcaagaagctggatttttctcatcattcgttacagtatgtggattctcagatattccaccacctatttaacaaattccatgtattacattatttatgttttaaatactgtaataagcctatcttttgtttccttggttggaccctacctgagtacaaatttagctaaaggaacccagatacatagaggacaaggacatttggagttcatccatcatgtgtgaacttcttatccatctcctaaccaaggtgggagggagcatcattgatcaactgaattttggctagattgctgctcatacatgactcagctggcccttag

SEQ ID NO: 465524 - DNA, 1496 bp, Homo sapiens
cctgtctttactacaatctctgaacataaattgtgaagatttcatggacacttatcactttcccagtcaatactcctgtgatttcctatgcctgaaaaataaccactctcccctatttgcactcacatggcatgcaataaaccatatactgatatattcatgcatacccccaggtagtgcaaatgatctggtgtttgttgtgcttatctctgtgtctttagagcccatcgacattcatgtaatcagctgctgggaacaatttttaatgaatgaatctttgaatgagccttttaagactccatcagcctcgaagttcatttgtgtggcactaaaagtaaaccaaaagcaggaagctaaggatctttcacctctaatgcaccctgaccttggctatttcatgtcagggtctgtgcagtctaagcccaggcagccaacatgcttggaggatacttcatgtagtggtacctacagctctttccagaaggccatgaaaatcgaattacatggtatgtaatcttttacatttgtcttcttccagttatcaagactcatttaagattcatccatgctgtgcatcgagcaatagctcttctttgattgttgatattgcattgtgtgaatgcacacatcttgtttactcattcacctattcaagaatatctgggttgtttccatattttgggaattatgaatatgaatattttggcaattatgaatataaataaagctgctataagcttctgtgtacatgttttttgtatgaatataacttttagtcttcttgagtaaatattatgagagattgttgagtagtatggcaagtgtatgtttgcctttgtaagaaactctcagactacttttcaaaatggccgtataattttgaactcacaccagcaataaataaaatacagacagtcctcaaatgacgatgggtcagtttgtgattttcaactccgcgacagtggaaacatgatacacattcattagaaaccgcagtttgagtacccatacaaccattctgcttttcactttcagaacagtattcaataaattacctgtgatattcaacactttattataaaatagtttttgtgttagatgactttgcccacccataagctaatataagtgttcctgagcatatttaagataggctaggctaagcaataatagctatttgttaggttagatgttgatatggtttggctttgtatctctatgcaaatctaatctcaaattgtaatccccacgtgtcgagggaggaatctgtaatcctcatgtatcagagaaaacagggtggatcatgagggtggtttcccccacactgttctgatagatttctttcctttcatcacttggagaacattttaatgactatattgtgtttcatggtttcaatgaactctttttagccacgatttatgacccactgctgaacactgggaatgttctccagtcatttcctaccacactgaattcgatgaatgtgcacacat

SEQ ID NO: 465525 - DNA, 902 bp, Homo sapiens
  misc_feature (14)..(14): n is a, c, g, or t
ataaatggatacgncaatttcatttcatcagcccgtgcaaaagcctagaaataacagacaacatgagcaatggaggaccacagctgatatttaatggaagagtgtaatcaatgttttaaagaattgaacactttttaggattttcatgaggcaatgagacaccaaaggactagaaaataaaacagtttttgcatttgcatttatctctcctgagcatccactaaaattattcttcctaaaaaatatattgcctcactggtttctccacccttttttatggggtaaaaaactttccagaaacattctagtacaataatttcaagaggctttccagattgttctaaagaagacttttcaggaaaaagagataataaaacagaaataaaatgcatattctatacaaacactatttgactagcatgattattatatttgtaatgacatatttcatatgagtaattgaaaagtgcaaatatcaagaaataaaaataacttattgacgtctttgttctgaaagacagatggcttcaaggatgctacaattcaaaacctcagtaatgccttgttataaaaacattgtaattattttcaacttgtgaatgaaatatatttcataatttatttgtaaatgacaaaaaacctcaagcataaaaaagagactttttagagagagagaatactaatctatatggtatttttgcatttttgcacaaagagtgaaaagttatatgtgaatatcatttaagaaaataaacatgttttgatcatactgtgcagattgatctgcatgttcatgaatgagcctaagaataaagtatgtgtgtgaatgtgtgtatacatactgtaaatatagaacatgtatacagcatatattatagcatacatgaatgtaaataggtatt

SEQ ID NO: 465526 - DNA, 847 bp, Homo sapiens
ttaaagaatatgaagattattttaatgagcccgcgttgacgtaggcatcgcctcccctctccgctggatagaagcggagaaaggagccacggggagaagcggagtttcttctttgtggcatttgtggaatattgtgtgccaaaaaaaaatcaggacttgtcatgatcctcttttcagcctgctgtatctgtggacttattgggggcatcctgaattttcagttcctccgggcagtcacaaagaaaacttcctccctatacccactgcaccttgcctccatgtctctcgcgtgcattgggatcgggggctgcactctctcttcctggctcacttgtcgactagccagttatgaacagaggaggatgttctcagaaagggagcattccctgcatcactctcatgaaatggctgagaaaagattgagggctattgaaataaccgacttgcccagctgcccggtggtgcccccgacaccagagttacctacaaggaaataacagacaacatgagcaatggaggaccacagctgatatttaatggaagagtgtaatcaatgttttaaagaattgaacactttttaggattttcatgaggcaatgagacaccaaaggactagaaaataaaacagtttttgcatttgcatttatctctcctgagcatccactaaaattattcttcctaaaaaatatattgcctcactggtttctccacccttttttatggggtaaaaaactttccagaaacattctagtacaataatttcaagaggctttccagattgttctaaagaagacttttcaggaaaaagagataataaaacagaaataaaatgcatattctatacaaa

SEQ ID NO: 465527 - DNA, 714 bp, Homo sapiens
  misc_feature (54)..(54): n is a, c, g, or t
gcccatatccactcccttccacaccacacacacacctcaatgaacacgctttgnggcatttttgtggaatattgccgtgccaaaaaaaaatcaggacttgtcatgatcctcttttcagcctgctgtatctgtggacttattgggggcatcctgaattttcagttcctccgggcagtcacaaagaaaacttcctccctatacccactgcaccttgcctccatgtctctcgcgtgcattgggatcgggggctgcactctctcttcctggctcacttgtcgactagccagttatgaacagaggaggatgttctcagaaagggagcattccctgcatcactctcatgaaatggctgagaaagaaataacagacaacatgagcaatggaggaccacagctgatatttaatggaagagtgtaatcaatgttttaaagaattgaacactttttaggattttcatgaggcaatgagacaccaaaggactagaaaataaaacagtttttgcatttgcatttatctctcctgagcatccactaaaattattcttcctaaaaaatatattgcctcactggtttctccacccttttttatggggtaaaaaactttccagaaacattctagtacaataatttcaagaggctttccagattgttctaaagaagacttttcaggaaaaagagataataaaacagaaataaaatgcatattctatacaaa

SEQ ID NO: 465528 - DNA, 2676 bp, Homo sapiens
ttaaagaatatgaagattattttaatgagcccgcgttgacgtaggcatcgcctcccctctccgctggatagaagcggagaaaggagccacggggagaagcggaggtaggggtcgcctggatttctgttgctgcggtccgggggcggggcggatcaaaggccagccaagagtactggtcctggatctacaaatacattaggctttttcctcctccgtcaacctcctaaaccccaatgaggtcatagcaatgaaagagaatcagctcgagagaaaggaggaggaagaggacgacgacgagggagaagaaacccagacggaaagaggccatcagacaaggtcgctttttctggcgacaaagcaactgcaaggagcaactctggacagcgcctggggagcaaggctcggagctccctgggctcctccaggttttccgctgcttaaaagccccggtaccggaagatccttctacgatccctatctgaacgtgccagggggtggagcagctcctttgcctctggcccagccagggaaggtcttcgtttctggaaatccagcccttgtggataatgcctcgctcttgaagaaagaaaagttttgggatctggtagggggtggaaggggtaaggaggatagtggaagaaaaaaaggtagatggttgatttccctctctgatctggaaggaagatgaccgaggaaggatgtgcaccagcggtcagattattgggagcctcttggtgctctccgtgctggagatagggctgggggtgtccagcgtggccgtgggggcgccacagtgaacatctctgaatctataaggttgaatgaaggaaacctttatattgtcattatgtataaactttgttataaaggaaaacgcaaggattttaacttaggagatgcaggatagcattgtaagcaatgccccagaaaatcataatcataataaataataaataaatatgcatgggagagaccagtggaaatacatgtattacatggaaaaattaattaattgaaggaagtaatcctttttacaaatcactcccagttagaggaattgtgttttagataggcatggcatgaaaagtatagtacctgatgggttaaaataaccataagataacaaagaaattgaccctatttaaaaatgtattctgatattttaatgtcctgagacattttctaatatattttgactgttcatacgttatctgatcttgactgaacgaaaagtatctggatttcgtccagatgcaagattctagatgatattaggatagtgtgtgcatcaaggctaaaaaggggtctaaagaggagattgaactacaatcactcagaacagtgaaccagtcaatagcaggtaatagcatctcagcattcagatgaaagtgctaagacgttgtccaactttcagttttgccaaaagggaaaagctattctgcataaattctgaagccaaacctggtgtttgagagaaagtgaatcaactactggaatatattctcttagtttcttctttgtggcatttgtggaatattgtgtgccaaaaaaaaatcaggacttgtcatgatcctcttttcagcctgctgtatctgtggacttattgggggcatcctgaattttcagttcctccgggcagtcacaaagaaaacttcctccctatacccactgcaccttgcctccatgtctctcgcgtgcattgggatcgggggctgcactctctcttcctggctcacttgtcgactagccagttatgaacagaggaggatgttctcagaaagggagcattccctgcatcactctcatgaaatggctgagaaagaaataacagacaacatgagcaatggaggaccacagctgatatttaatggaagagtgtaatcaatgttttaaagaattgaacactttttaggattttcatgaggcaatgagacaccaaaggactagaaaataaaacagtttttgcatttgcatttatctctcctgagcatccactaaaattattcttcctaaaaaatatattgcctcactggtttctccacccttttttatggggtaaaaaactttccagaaacattctagtacaataatttcaagaggctttccagattgttctaaagaagacttttcaggaaaaagagataataaaacagaaataaaatgcatattctatacaaacactatttgactagcatgattattatatttgtaatgacatatttcatatgagtaattgaaaagtgcaaatatcaagaaataaaaataacttattgacgtctttgttctgaaagacagatggcttcaaggatgctacaattcaaaacctcagtaatgccttgttataaaaacattgtaattattttcaacttgtgaatgaaatatatttcataatttatttgtaaatgacaaaaaacctcaagcataaaaaagagactttttagagagagagaatactaatctatatggtatttttgcatttttgcacaaagagtgaaaagttatatgtgaatatcatttaagaaaataaacatgttttgatcatactgtgcagattgatctgcatgttcatgaatgagcctaagaataaagtatgtgtgtgaatgtgtgtatacatactgtaaatatagaacatgtatacagcatatattatagcatacatgaatgtaaataggtatt

SEQ ID NO: 465529 - DNA, 1212 bp, Homo sapiens
  misc_feature (54)..(54): n is a, c, g, or t
gcccatatccactcccttccacaccacacacacacctcaatgaacacgctttgnggcatttttgtggaatattgccgtgccaaaaaaaaatcaggacttgtcatgatcctcttttcagcctgctgtatctgtggacttattgggggcatcctgaattttcagttcctccgggcagtcacaaagaaaacttcctccctatacccactgcaccttgcctccatgtctctcgcgtgcattgggatcgggggctgcactctctcttcctggctcacttgtcgactagccagttatgaacagaggaggatgttctcagaaagggagcattccctgcatcactctcatgaaatggctgagaaagaaataacagacaacatgagcaatggaggaccacagctgatatttaatggaagagtgtaatcaatgttttaaagaattgaacactttttaggattttcatgaggcaatgagacaccaaaggactagaaaataaaacagtttttgcatttgcatttatctctcctgagcatccactaaaattattcttcctaaaaaatatattgcctcactggtttctccacccttttttatggggtaaaaaactttccagaaacattctagtacaataatttcaagaggctttccagattgttctaaagaagacttttcaggaaaaagagataataaaacagaaataaaatgcatattctatacaaacactatttgactagcatgattattatatttgtaatgacatatttcatatgagtaattgaaaagtgcaaatatcaagaaataaaaataacttattgacgtctttgttctgaaagacagatggcttcaaggatgctacaattcaaaacctcagtaatgccttgttataaaaacattgtaattattttcaacttgtgaatgaaatatatttcataatttatttgtaaatgacaaaaaacctcaagcataaaaaagagactttttagagagagagaatactaatctatatggtatttttgcatttttgcacaaagagtgaaaagttatatgtgaatatcatttaagaaaataaacatgttttgatcatactgtgcagattgatctgcatgttcatgaatgagcctaagaataaagtatgtgtgtgaatgtgtgtatacatactgtaaatatagaacatgtatacagcatatattatagcatacatgaatgtaaataggtatt

SEQ ID NO: 465530 - DNA, 1059 bp, Homo sapiens
tgatgagtgcatgtgtaagatcaagattcagaggaagaggagatggtcaagaggaatctgatttggttgcattcatggcttcccagaagcaccagctgcacttcaatgtggcagctattggccacctgtggctactgggtgcatggaatgtggctggtctgaactgcgatgtggtagaaagggcattagggggtggcgccctaaacattatccaatcagggacgcggggctgggacccgtccaatcaggcacgcagctggagcggacaggacggcttccgggatttggcggggcctttgtctctagctgctgcgggagctccaggtctagtctttactgctctgaccacctggaagcctagaaatggtgagagtgcggtccgacaccccgagagagggggaggggctggttggaaccggtcggaagtggctgtggcaggactccaggctccaagcactgggctccaaaatccgcggcccgagttgtccttggcgcagctcggtcctcagtaaaatatttacgaatggtgtaaaagaggtgagtttcagaaaaaaattaatatctacatatattccatttgttaaaaattctcatttactattttgttttccagactgagtttagtaattgtcacaggtagtttttttacggctgggtaattttttttttttttgagacagtctcattctgtcacccaggctggagtgcaccaagattgtgccacttcattccagcctgggcgaaagagtgaaacttcatctcaaaaaaaaaaaaaaaacagaaaagaaaatgaatacatttccaccagaaaatgtggtaggtaattggtgaagttacatagattcttgaaaacattagtacctctttttgcatggtaaatttgtgacagtgaatatttctagtctataccctgttatcttgatttctgagttttatgctaaattttatgagatgaaacttggtacctcctagaagtgtttccaaatgaataattgtttactacataatttttaatggaaataataaaataatacatttattatctaaaaggaatacttt

SEQ ID NO: 465531 - DNA, 883 bp, Homo sapiens
agttcccagtcatctttatccctttaagcatggtttattttctgagcaaggagtcatcatgggagaccttttttccttattttgggaggtagatcctcccccaatacctgtaaattgtgccattccaaatcaggattatgaatgctggaaggatgactcttgtggaaccatagggagcttcctgctttggtattttgttatcgtatttgtcctgatgttcttctctagggcttctgtctggatgtctgaggataaaaaggatgaaggcagtgggacaagtacttcagtaaggaaagcaagcaaagagacttcctgtaagcggcaaagcaaagacagtgcctgggatccctcacaaacaatgaagaaaccaaagcagaaccaacttacccctgtaaccaactcagaagtggctttggtcaatgcctatcctgaacaaagacgagccaggcgccagtctcagttcaatgaggtgaaccagaaccaacatgacagtgatactacggagtatggcagtgaagagtctaactcagaagcctcctcgtggaaggagagtgaaagtgaacaccacccatcaccagacagtattaagaggagaaaaatggctcagaggcaaaggaatctgggaagttaccaaatgagcgaaaggcactgcctccactgcaaagccttgagaaccaacgaatggttggcgcaccattcccgacagaagccttcagtaacaccgccaatgaaaagagacagtcaagaggaaagttccatatctgacattaacaagaaatttagtaaattttgaattttatcacgttcttccttcacttgaagccaaatgaaagagatgaataaaacatgaaaaatcaccagagctataggtgaggagactttt

SEQ ID NO: 465532 - DNA, 3171 bp, Homo sapiens
gctgggtgctggctcaggaggaaggtccgcatcggaatggtggactgtccaggtactggctcaggggggaggtccacgtcacaatggtggactgtccaggtagtggctcaggagggaggtccacgtcacaatggtggactgtccaggtgctggctcgggagggaggtccacgtcacaatggtggactgtccaggtagtggctcaggagggaggtccacgtcacaatggtggactgtccgggtagtggctcgggagggaggtccacgtcacaatggtggactgtccaggtgctggctcgggagggaggtccacgtcacaatggtggactgtccgggtagtggctcgggagggaggtccacgtcacaatggtggactgtccaggtactggctcaggagggaggtccacgtcacaatggtggactgtccgggtactggctcgggagggaggtccacgtcacaatggtggactgtccgggtgctggctcgggagggaggtccacgtcacaatggtggactgtccgggtagtggctcaggggggaggtccacgtcacaatggtggactgtccaggtgctggctcaggagggaggtccacgtcacaatggtggactgtccaggtgctggctcaggagggaggtccacgtcacaatggtggactgtccgggtactggctcgggagggaggtccacgtcacaatggtggactgtccaggtagtggctcaggagggaggtccacgtcacaatggtggactgtccaggtgctggctcgggagggaggtccacgtcacaatggtggactgtccgggtagtggctcgggagggaggtccacgtcacaatggtggactgtccaggtgctggctcgggagggaggtccacgtcacaatggtggactgtccaggtgctggctcagggggaaggtccacatcggaatggtagactgtttaggagaaaggtccacgtcagaatggtggactgttttaagaggaaggtccacgtcagaatggactgtccaggatggtgcatgtgcagggtgtgttctggcaccactgtgtgtgtacagcgaatcgctctctgtaacctggcccctggtgaccagatgcacttacaacatgcaccttgctgcggctagatgcagtctgtggacacagattaagcgagtctgccctgaagtggagtctgccctggagtggagtcgtctgccctggagcggagtcatctgccctggagcggagtctgccctgaagcggagtctgccctggagcggagtcgtctgccctggagtggagtcctctgccctggagtggagtcgtctgccctggagtggagtcgtctgccctggagcagagtctgccctggaatggagtcctctgccctggagtggagtcgtctgccctggagtggagtcatctgccctggagcagagtctgccctggagtggagtcatctgccctggagcggagtctgccctggagtggagtcgtctgccctggagcggagtcgtctgccctggagtggagtcgtctgccctggagtggagtctgccctggagtggagtcgtctgccctggagtggagtcgtctaccctggagtggagtctgccctggagtggagtcgtctgccctggagtggagtctgccctggagtggagtcgtctaccctggagtggagtcgtctaccctggagtggagtcgtctaccctggagtggagtctgccctggagtggagtcatctgccctggagcggagtctgccctggtgtggagtcgtctgccctggagtggagtcggccctggagtggagtctgctctggagtggagtcgtctaccctggagtggagtcgtctgccctggagtggagtctgccctggagtggagtcgtctgccctggagtggagtcatctaccctaggagtggagtcgtctaccctggagtggagtctgccctggagtggagtcgtctgccctggagtggagtctgccctggagtggagtcgtctaccctggagtggagtcgtctaccctggagtggagtctgccctggagtggagtcatctgccctggagcggagtctgccctggtgtggagtcgtctgccctggagtggagtcggccctggagtggagtctgccctggagtggagtcgtctaccctggagtggagtcgtctgccctggagtggagtctgccctggagtggagtcgtctgccctggagtggagtcatctaccctggagtggagtcgtctaccctggagtggagtctgccctggagtggagtcatctgccctggagtggagtctgccctggagtggagtcgtctaccctggagtggagtcgtctaccctggagtggagtcgtctaccctggagtggagtctgccctggagtggagtcatctgccctggagcggagtctgccctggtgtggagtcgtctgccctggagtggagtcggccctggagtggagtctgccctggagtggagtcgtctaccctggagtggagtcatctgccctggagtggagtctgccctggagtggagtcgtctgccctggagcggagtctgccctggagtggagtcgtctaccctggagcggagtctgccctggagcggagtctgccctggagcggagtctgccctggagtggagtcgtctgccctggagtggagtctgccctggagtggagtctgccctggagtggagggaagtgaagccagatcgctgaggagtgcgaggaaagctgttggttgttatggtcaagccccagaactcgtagatggatgtccccagcccagtgcctcagaaggtgactgcgtttggaaatcaggtttttgcaggaaaaattggcgttaaccctcagcatggagtggggattggtcccaggacccccacttacgccaaaatcttcacacactgaagtcctgcagctgccccacggaatctgcatacacaaaaagtcagcttctgtacacttggctttcacagccctcaaatactgcatttttgatccatatttggttggaaagatccatgaataaatgagttcagacccatgttgtcccagggcccactgtagttccgatgaggccactgggggctcctccagcacagccaacaccacctgtgccagcatcactgcccttcgaagtgtggccccagcagcggtctcctgcaccctcc

SEQ ID NO: 465533 - DNA, 1062 bp, Homo sapiens
gtcctttcaatctcagacctagtttttcctttctttccattatggtatgtttttctagggcctgtactttcattgctgcagatagctataggccaggtgtccctaacttcagtatctgccaacaagggaacaatgacaacgagacagccctgcattgtgcagcgcagtatggccacacagaggtggtgaaggtgctcttagaggagctgacggaccccaccatgcgcaacaacaaattcgagacccctttggacctggcagcactgtacgggcgactggaggtggtgaaaatgctccttaatgcacaccccaacctcctgagctgcaacactaagaagcacacccctctgcacttggcagcaaggaatggccacaaagccgtggtccaggtcctcctcgatgctggcatggacagcaactaccagacggagatgggcagtgctttgcatgaggctgctttgtttggcaagaccgatgtggtgcaaatcctgctggctgcaggaactgacgtcaacataaaagataaccatggactgactgccctagacactgttcgggaactgccttctcaaaagagccagcaaatagcagcattaattgaagatcacatgactggaaaaagaagtacaaaagaagtagataaaacccccccaccccagccacctctcatctccagtatggactccatatcacagaagtctcagggtgacgtggagaaagcagtgactgaactgattatagattttgatgcaaatgctgaagaagagggtccctacgaagctctgtataatgccatctcctgccattcgttggacagcatggccagcgggcgatcatctgaccaagactccacgaacaaggaggctgaggcagcaggagtgaaacctgctggagtgaggcctagggaacgtccaccacctccagcaaagccaccgcccgatgaagaggaagaagaccacatagataagaagtattttcccttgacagcttctgaggttctgtccatgagacctaggattcatgggagtgcagcccgggaagaagacgaacacccttatgaac

SEQ ID NO: 465534 - DNA, 1750 bp, Homo sapiens
gtcctttcaatctcagacctagtttttcctttctttccattatggtatgtttttctagggcctgtactttcattgctgcagatagctataggccaggtgtccctaacttcagtatctgccaacaagggaacaatgacaacgagacagccctgcattgtgcagcgcagtatggccacacagaggtggtgaaggtgctcttagaggagctgacggaccccaccatgcgcaacaacaaattcgagacccctttggacctggcagcactgtacgggcgactggaggtggtgaaaatgctccttaatgcacaccccaacctcctgagctgcaacactaagaagcacacccctctgcacttggcagcaaggaatggccacaaagccgtggtccaggtcctcctcgatgctggcatggacagcaactaccagacggagatgggcagtgctttgcatgaggctgctttgtttggcaagaccgatgtggtgcaaatcctgctggctgcaggaactgacgtcaacataaaagataaccatggactgactgccctagacactgttcgggaactgccttctcaaaagagccagcaaatagcagcattaattgaagatcacatgactggaaaaagaagtacaaaagaagtagataaaacccccccaccccagccacctctcatctccagtatggactccatatcacagaagtctcagggtgacgtggagaaagcagtgactgaactgattatagattttgatgcaaatgctgaagaagagggtccctacgaagctctgtataatgccatctcctgccattcgttggacagcatggccagcgggcgatcatctgaccaagactccacgaacaaggaggctgaggcagcaggagtgaaacctgctggagtgaggcctgtatgtgacccggggcttacacctcctgggggctgtgttggctggctggcccctgaggtgatggggcacggggaagggaagtgtgatccctggtgccagctcatgtttccggggcctggagcccacttattctcttcttcatggggctctgctgggtctctcttgctgagtgtactgaaactctacagatcacactgaggttagagtttcattttttctagtttcagtataagcagcttgcatctttacgtgacttcattggccttagagcaaattaaacatcttatttctatttagccttagtgttgcttctgtctttggaatttttgctgtatattgtctgttttctctctgaaaagcagaagcatacagtgaaagctcactgaaatgagttcctatctgtcctgagtgtatgcttactatccacttgccctgaaaggattctccatttggatttgggcaggttctggattcaacagggttgtagcagggcttaacattgtatttattagtatgtggcattcctattttatctaattataatgcctccagccattgagataagaggatgagaacaactctgaatttttccttctcaaggtccattttctcatctttctgtttctttctctagtacagatgctccttgacttacagtgggattatatcccgataaagccattgagacactgacttcatcaaacttaggtttttgtctttggcaagctatctgccccaatatttgtattcctattcctaagcctggtcattgtcagatgactcatagaagcctttaggagaagccagagtatacctagctctaggagtgcttatcagattaatgacct

SEQ ID NO: 465535 - DNA, 2150 bp, Homo sapiens
  misc_feature (2)..(6): n is a, c, g, or t
  misc_feature (10)..(10): n is a, c, g, or t
  misc_feature (12)..(12): n is a, c, g, or t
  misc_feature (14)..(14): n is a, c, g, or t
gnnnnntttncntnagttccgctttgctgatggactggacatcacactcatgatcctgggtatactggcatcactggtcaatggagcctgccttcctttaatgccactggttttaggagaaatgagtgataaccttattagtggatgtctagtccaaactaacacaacaaattatcagaactgtactcagtctcaagagaagctgaatgaagatatgactctgttgaccctgtattatgttggaataggtgttgctgccttgatttttggttacatacagatttccttgtggattataactgcagcacgacagaccaagaggattcgaaaacagttttttcattcagttttggcacaggacatcggctggtttgatagctgtgacatcggtgaacttaacactcgcatgacagagtatacacagaatctcaaagatgcaaaggattttggcataaaaaggactatagcttcaaaagtgtctcttggtgctgtgtacttctttatgaatggaacctatggacttgctttttggtatggaacctccttgattcttaatggagaacctggatataccatcgggactgttcttgctttagcagatttttctggtcacacatcccagcatgtgataaccacaagactatgagataatcaaaagttgttccttattaggaaaaggccaaggatacttggattaatctgtgtttctattgcttctcggccttttggctaagatcaagtgtaatctgtgttcttttttatttggtcatatcttccattctttcttacctaattcctctaatatctctctgtgagcctaaaccaataattatatattacattctattgtctttcttatataactgcagaaagataaatatcactttgtttgttcctgtaggttttctttagtgtaatccatagcagttattgcattggagcagcagtccctcactttgaaaccttcgcaatagcccgaggagctgcctttcatattttccaggttattgataagaaacccagtatagataacttttccacagctggatataaacctgaatccatagaaggaactgtggaatttaaaaatgtttctttcaattatccatcaagaccatctatcaagattctgaaaggtctgaatctcagaattaagtctggagagacagtcgccttggtcggtctcaatggcagtgggaagagtacggtagtccagcttctgcagaggttatatgatccggatgatggctttatcatggtggatgagaatgacatcagagctttaaatgtgcggcattatcgagaccatattggagtggttagtcaagagcctgttttgttcgggaccaccatcagtaacaatatcaagtatggacgagatgatgtgactgatgaagagatggagagagcagcaagggaagcaaatgcgtatgattttatcatggagtttcctaataaatttaatacattggtaggggaaaaaggagctcaaatgagtggagggcagaaacagaggatcgcaattgctcgtgccttagttcgaaaccccaagattctgattttagatgaggctacgtctgccctggattcagaaagcaagtcagctgttcaagctgcactggagaaggatacccccaggtattcattttgacctaatttcacctcaagtggagaatcgctgaccttgaaccagcgcccttcgacagctctggcccctcaaacctcaccctgacctcctgctgcctatgagctactgcacatacctcaaggccatatgcagttgtggccctgcaccaaattacactgaatctaggaggggagttggcagtggcggtatgaaaaaccattgaacagttttctcgatggcctgactcccttataaaccagagccttcagaccccttacaaggcttaatggcacattttactttgcatttgcttggaagtgagttaagcgtttttttttctctaagaaaatcgcaggcttctttttttaaaatgctgactttatggaaccagaaacggatactggcaggctaaatgtccactgcttcttgaaaaatctcttagttactattatttagtagcaaatcagattttcctgatattttgctatttgtcatcccccttgacaaaaaagaaagcattctc

SEQ ID NO: 465536 - DNA, 430 bp, Homo sapiens
gtgagtacactgtgcagcctgtgtccttagcttatggtggcagcgctgcgacattccaatataaggtaatgaaacaacaactgatgcagaatagtaggggtgtgattaaattctggattgtcctagaacaagcttgtccaaccagtggcacaagatggctttgaatgaggtccaacacaaatttgtaaactttcttaacacattatgagatttttttgtgatttttaaaatcttatcagctattgttaattttagtgtatttaatgtgtggcccaagacaattcttctttcaatgtggcccagggaagccaaaaaattggacactcctgtatgaaacatctgtagagaagaatgcatagtaacaaccaaaagaagaaatgcatcattgaaaggccagattgaaaagaatcatattttgttctgcaattga

SEQ ID NO: 465537 - DNA, 2060 bp, Homo sapiens
  misc_feature (2)..(6): n is a, c, g, or t
  misc_feature (10)..(10): n is a, c, g, or t
  misc_feature (12)..(12): n is a, c, g, or t
  misc_feature (14)..(14): n is a, c, g, or t
gnnnnntttncntnagttccgctttgctgatggactggacatcacactcatgatcctgggtatactggcatcactggtcaatggagcctgccttcctttaatgccactggttttaggagaaatgagtgataaccttattagtggatgtctagtccaaactaacacaacaaattatcagaactgtactcagtctcaagagaagctgaatgaagatatgactctgttgaccctgtattatgttggaataggtgttgctgccttgatttttggttacatacagatttccttgtggattataactgcagcacgacagaccaagaggattcgaaaacagttttttcattcagttttggcacaggacatcggctggtttgatagctgtgacatcggtgaacttaacactcgcatgacagagtatacacagaatctcaaagatgcaaaggattttggcataaaaaggactatagcttcaaaagtgtctcttggtgctgtgtacttctttatgaatggaacctatggacttgctttttggtatggaacctccttgattcttaatggagaacctggatataccatcgggactgttcttgctttagcagatttttctggtcacacatcccagcatgtgataaccacaagactatgagataatcaaaagttgttccttattaggaaaaggccaaggatacttggattaatctgtgtttctattgcttctcggccttttggctaagatcaagtgtaatctgtgttcttttttatttggtcatatcttccattctttcttacctaattcctctaatatctctctgttttctttagtgtaatccatagcagttattgcattggagcagcagtccctcactttgaaaccttcgcaatagcccgaggagctgcctttcatattttccaggttattgataagaaacccagtatagataacttttccacagctggatataaacctgaatccatagaaggaactgtggaatttaaaaatgtttctttcaattatccatcaagaccatctatcaagattctgaaaggtctgaatctcagaattaagtctggagagacagtcgccttggtcggtctcaatggcagtgggaagagtacggtagtccagcttctgcagaggttatatgatccggatgatggctttatcatggtggatgagaatgacatcagagctttaaatgtgcggcattatcgagaccatattggagtggttagtcaagagcctgttttgttcgggaccaccatcagtaacaatatcaagtatggacgagatgatgtgactgatgaagagatggagagagcagcaagggaagcaaatgcgtatgattttatcatggagtttcctaataaatttaatacattggtaggggaaaaaggagctcaaatgagtggagggcagaaacagaggatcgcaattgctcgtgccttagttcgaaaccccaagattctgattttagatgaggctacgtctgccctggattcagaaagcaagtcagctgttcaagctgcactggagaaggatacccccaggtattcattttgacctaatttcacctcaagtggagaatcgctgaccttgaaccagcgcccttcgacagctctggcccctcaaacctcaccctgacctcctgctgcctatgagctactgcacatacctcaaggccatatgcagttgtggccctgcaccaaattacactgaatctaggaggggagttggcagtggcggtatgaaaaaccattgaacagttttctcgatggcctgactcccttataaaccagagccttcagaccccttacaaggcttaatggcacattttactttgcatttgcttggaagtgagttaagcgtttttttttctctaagaaaatcgcaggcttctttttttaaaatgctgactttatggaaccagaaacggatactggcaggctaaatgtccactgcttcttgaaaaatctcttagttactattatttagtagcaaatcagattttcctgatattttgctatttgtcatcccccttgacaaaaaagaaagcattctc

SEQ ID NO: 465538 - DNA, 1043 bp, Homo sapiens
aaagggaggcggcacaggcagccaggggactactgcactactgcaatctgcaacgctgccctcggcaacccgggaaacttaaaaggacagcaaagggacagacactctcgtttattccgtgctcactcagctgatagaaccatggcgaccattgctgctgctgcgtttgaggccctcatggatggagtgacatgctgggatgtccccagaggccccatccccagtgaactccttcttattggagaagccgccttccccgtgatggtgaatgacaagggccaggtgctcattgctgcctcctcctacggccgaggccgcctcgtggttgtgtcccatgagggctacctgtcgcatgctggcttggctccatttctcctcaatgcagtgagctggctctgtccctgtcctggggctcccgtgggagtgcatccatccctggcacctctagtaaacatcctacaggatgctgggcttgaggcacaggtcaagccagaaccaggagagcccctaggggtttactgtatcaatgcctacaatgacaccttgactgcaacgctgatccagtttgtgaaacatggagggggcttgttaatcgggggccaggcctggtactgggccagccagcacggccctgacaaggtgctctccaggttccctgggaacaaggtgacaagtgtagccggagtgtacttcactgacacctatggggacagagaccggttcaaggtctctaagaaggtgcccaagatcccactccatgtcaggtgagtgtttgttcccctcttagggagtctgactcaggataaacaatagagttggttcccctcttcaacaagcttccattgcaatacaggtgattttccactcagtttggaaccaccacaaatcaaaagcaggatgattaaaatgcaccaagacacaagagaggctgggccctcactgccactccctcctgtggccaaagctgaatagaaaagcttgtcttaccactttatctccatgtctagtaaatagaacctagagagtgctcatcaatacctctt

SEQ ID NO: 465539 - DNA, 2185 bp, Homo sapiens
ggatctctctcggctgcttttttccactggtaacttctgaggctgagatcagcagctgatagaaccatggcgaccattgctgctgctgcgtttgaggccctcatggatggagtgacatgctgggatgtccccagaggccccatccccagtgaactccttcttattggagaagccgccttccccgtgatggtgaatgacaagggccaggtgctcattgctgcctcctcctacggccgaggccgcctcgtggttgtgtcccatgagggctacctgtcgcatgctggcttggctccatttctcctcaatgcagtgagctggctctgtccctgtcctggggctcccgtgggagtgcatccatccctggcacctctagtaaacatcctacaggatgctgggcttgaggcacaggtcaagccagaaccaggagagcccctaggggtttactgtatcaatgcctacaatgacaccttgactgcaacgctgatccagtttgtgaaacatggagggggcttgttaatcgggggccaggcctggtactgggccagccagcacggccctgacaaggtgctctccaggttccctgggaacaaggtgacaagtgtagccggagtgtacttcactgacacctatggggacagagaccggttcaaggtctctaagaaggtgcccaagatcccactccatgtcaggaggattccctgggagcacccaccagctgagatctgcacatcagccacaatcctctcaggacggcggaaagggaagggctcagctgccagcctggccacagcctgcatcatctcatcccagaggcggagcacaggctcggggtccttcagggcctgaaggtttgtggttggcactgtcaggatgatgttgtccgtggccagctctccccagggagccaggttctcctgcatctgcctcttccactcctccagcgatgtcttacccagcttgtagtatggggcaggcacagctcccctgatagtgacaggcacagggcctagttggctgcccttgggcacgatgacgtagaggaggccgccccagaggcaggagactgaccgctcagtcctgtccatccagcattggtgagtcaccacgggggctcgagatagcttcctggccttggtaaggtcatcggtgtggcagcctatctgtacctggacaggtgattccaccaagcgttggagaaattagagtctttgtgatgctttgtgatgtgcgtgtgaggttgtgtagatggaaggtattagacaaacatgcccatgaaaccccagcttcccttttctatgtgctaggcatggaaacttatgaaattttagcactccaaagtcatttggacttcaaggcatttaaaatcatttttctaaggatttaaacagctccactataagtcttcacctgacatgaattggtgagagacaaggctgatcctggcaaaggtcttgtgtctttctgccaggcaaaatcctgggttcttctagcaggacctaagccagtctggggacgctgatattgaggatgagctgggggactctgctctgtcctctgtgaacacacaggaggcccatccagagtgagtgaggttgattctctctccctttttgcccagagcttccctttctggccgccagatgggtggagatctgttttgtctggagtcctggagttgcttttcttaggtttgatataagcaagctccagaaagaatgctgacagaaaagggaccctagctgtggtaggaagtggccctcagagtcaaggaggcaggatgaatttaaattctgcatgtagggcatattttggggagtgatgggattatgcacacccttcaggtgtcaagataaagagataaaaccagagtttgtgcagaatgagcttgctgacacacagcctaaatttgtaccgcatgtttcatactaactccctctgagtttgcacatgggacccatgaggaggcatgaagaggtaactgcccatgcccgaggattttccagcccttccttttctttctatcaatcacctactaatcacagaatccactccctacaccttttctactaaaataactctttaaaataagtacaatgggacagatttgagctgggctcctgtctccttgttaatcaaattgcaataaaatgttttcttttgtttttgttttttttttggtgaaaaa

SEQ ID NO: 465540 - DNA, 184 bp, Homo sapiens
tgaaagtctttgcttccccctgcagcagctgatagaaccatggcgaccattgctgctgctgcgtttgaggccctcatggatggagtgacatgctgggatgtccccagaggccccatccccagtgaactccttcttattggagaagccgccttccccgtgatggtgaatgacaagggccaggtgc

SEQ ID NO: 465541 - DNA, 1941 bp, Homo sapiens
gggctggtacggtccggagtgtagggatcgcctcgcctccgacccgtcccccgggcgccactgcagagcctgtccgtcagtccctaggtatccgcactgctcaggggaggattccctgggagcacccaccagctgagatctgcacatcagccacaatcctctcaggacggcggaaagggaagggctcagctgccagcctggccacagcctgcatcatctcatcccagaggcggagcacaggctcggggtccttcagggcctgaaggtttgtggttggcactgtcaggatgatgttgtccgtggccagctctccccagggagccaggttctcctgcatctgcctcttccactcctccagcgatgtcttacctgggaataaatatcatggaacctaccacacccacttctccaacttcccttgagctgaaaaataccatttgaactctggaagaacattgcaataatgaactactatcacaggcgtctataggctgtaaagtgaagaaaaggcttcctgactcttctctttgtctgccctgaagtctccatggacacagggtattccgtatcttctgcctccatgttccctcccaacagttcttcctctttctctccaccaaagctcatccctctcccatttagcaaccaccccacagttcccacggcatctgccactcttcctcctccctaaatgttcactccacttacccagcttgtagtatggggcaggcacagctcccctgatagtgacaggcacagggcctagttggctgcccttgggcacgatgacgtagaggaggccgccccagaggcaggagactgaccgctcagtcctgtccatccagcattggtgagtcaccacgggggctcgagatagcttcctggccttggtaaggtcatcggtgtggcagcctatctgtacctggacaggtgattccaccaagcgttggagaaattagagtctttgtgatgctttgtgatgtgcgtgtgaggttgtgtagatggaaggtattagacaaacatgcccatgaaaccccagcttcccttttctatgtgctaggcatggaaacttatgaaattttagcactccaaagtcatttggacttcaaggcatttaaaatcatttttctaaggatttaaacagctccactataagtcttcacctgacatgaattggtgagagacaaggctgatcctggcaaaggtcttgtgtctttctgccaggcaaaatcctgggttcttctagcaggacctaagccagtctggggacgctgatattgaggatgagctgggggactctgctctgtcctctgtgaacacacaggaggcccatccagagtgagtgaggttgattctctctccctttttgcccagagcttccctttctggccgccagatgggtggagatctgttttgtctggagtcctggagttgcttttcttaggtttgatataagcaagctccagaaagaatgctgacagaaaagggaccctagctgtggtaggaagtggccctcagagtcaaggaggcaggatgaatttaaattctgcatgtagggcatattttggggagtgatgggattatgcacacccttcaggtgtcaagataaagagataaaaccagagtttgtgcagaatgagcttgctgacacacagcctaaatttgtaccgcatgtttcatactaactccctctgagtttgcacatgggacccatgaggaggcatgaagaggtaactgcccatgcccgaggattttccagcccttccttttctttctatcaatcacctactaatcacagaatccactccctacaccttttctactaaaataactctttaaaataagtacaatgggacagatttgagctgggctcctgtctccttgttaatcaaattgcaataaaatgttttcttttgtttttgttttttttttggtgaaaaa

SEQ ID NO: 465542 - DNA, 2239 bp, Homo sapiens
gggctggtacggtccggagtgtagggatcgcctcgcctccgacccgtcccccgggcgccactgcagagcctgtccgtcagtccctaggtatccgcactgctcagggcagctgatagaaccatggcgaccattgctgctgctgcgtttgaggccctcatggatggagtgacatgctgggatgtccccagaggccccatccccagtgaactccttcttattggagaagccgccttccccgtgatggtgaatgacaagggccaggtgctcattgctgcctcctcctacggccgaggccgcctcgtggttgtgtcccatgagggctacctgtcgcatgctggcttggctccatttctcctcaatgcagtgagctggctctgtccctgtcctggggctcccgtgggagtgcatccatccctggcacctctagtaaacatcctacaggatgctgggcttgaggcacaggtcaagccagaaccaggagagcccctaggggtttactgtatcaatgcctacaatgacaccttgactgcaacgctgatccagtttgtgaaacatggagggggcttgttaatcgggggccaggcctggtactgggccagccagcacggccctgacaaggtgctctccaggttccctgggaacaaggtgacaagtgtagccggagtgtacttcactgacacctatggggacagagaccggttcaaggtctctaagaaggtgcccaagatcccactccatgtcaggaggattccctgggagcacccaccagctgagatctgcacatcagccacaatcctctcaggacggcggaaagggaagggctcagctgccagcctggccacagcctgcatcatctcatcccagaggcggagcacaggctcggggtccttcagggcctgaaggtttgtggttggcactgtcaggatgatgttgtccgtggccagctctccccagggagccaggttctcctgcatctgcctcttccactcctccagcgatgtcttacccagcttgtagtatggggcaggcacagctcccctgatagtgacaggcacagggcctagttggctgcccttgggcacgatgacgtagaggaggccgccccagaggcaggagactgaccgctcagtcctgtccatccagcattggtgagtcaccacgggggctcgagatagcttcctggccttggtaaggtcatcggtgtggcagcctatctgtacctggacaggtgattccaccaagcgttggagaaattagagtctttgtgatgctttgtgatgtgcgtgtgaggttgtgtagatggaaggtattagacaaacatgcccatgaaaccccagcttcccttttctatgtgctaggcatggaaacttatgaaattttagcactccaaagtcatttggacttcaaggcatttaaaatcatttttctaaggatttaaacagctccactataagtcttcacctgacatgaattggtgagagacaaggctgatcctggcaaaggtcttgtgtctttctgccaggcaaaatcctgggttcttctagcaggacctaagccagtctggggacgctgatattgaggatgagctgggggactctgctctgtcctctgtgaacacacaggaggcccatccagagtgagtgaggttgattctctctccctttttgcccagagcttccctttctggccgccagatgggtggagatctgttttgtctggagtcctggagttgcttttcttaggtttgatataagcaagctccagaaagaatgctgacagaaaagggaccctagctgtggtaggaagtggccctcagagtcaaggaggcaggatgaatttaaattctgcatgtagggcatattttggggagtgatgggattatgcacacccttcaggtgtcaagataaagagataaaaccagagtttgtgcagaatgagcttgctgacacacagcctaaatttgtaccgcatgtttcatactaactccctctgagtttgcacatgggacccatgaggaggcatgaagaggtaactgcccatgcccgaggattttccagcccttccttttctttctatcaatcacctactaatcacagaatccactccctacaccttttctactaaaataactctttaaaataagtacaatgggacagatttgagctgggctcctgtctccttgttaatcaaattgcaataaaatgttttcttttgtttttgttttttttttggtgaaaaa

SEQ ID NO: 465543 - DNA, 1440 bp, Homo sapiens
atccgtacgcgaggcaggaaccgcccgccgcgcccccgagagctctcggcgccgcgcagtcgccgctgggcaccccgagaccatggggaagctcgtggcgctggtcctgctgggggtcggcctgtccttagtcggggagatgttcctggcgtttagagaaagggtgaatgcctctcgagaagtggagccagtagaacctgaaaactgccaccttattgaggaacttgaaagtggctctgaagatattgatatacttcctagtgggctggcttttatctccagtggattaaaatatccaggcatgccaaactttgcgccagatgaaccaggaaaaatcttcttgatggatctgaatgaacaaaacccaagggcacaagcactagaaatcagtggtggatttgacaaagaattatttaatccacatgggatcagtattttcatcgacaaagacaatactgtgtatctttatgttgtgaatcatccccacatgaagtccactgtggagatatttaaatttgaggaacaacaacgttctctggtatacctgaaaactataaaacatgaacttctcaaaagtgtgaatgacattgtggttcttggaccagaacagttctatgccaccagagaccactattttaccaactccctcctgtcattttttgagatgatcttggatcttcgctggacttatgttcttttctacagcccaagggaggttaaagtggtggccaaaggattttgtagtgccaatgggatcacagtctcagcagaccagaagtatgtctatgtagctgatgtagcagctaagaacattcacataatggaaaaacatgataactgggatttaactcaactgaaggtgatacagttgggcaccttagtggataacctgactgtcgatcctgccacaggagacattttggcaggatgccatcctaatcctatgaagctactgaactataaccctgaggaccctccaggatcagaagtacttcgcatccagaatgttttgtctgagaagcccagggtgagcaccgtgtatgccaacaatggctctgtgcttcagggcacctctgtggcttctgtgtaccatgggaaaattctcataggcaccgtatttcacaaaactctgtactgtgagctctagactctagatagtaaaaaaaaaaaaaaaaagtctacatattttgtaaaagtaaactgataattgtatgataagtggcactgtaagtaaatagcaaacaccaaccagtgagtgtggcttttcttatggatagaagtaaaggagcagacagagattccttgatagccatcaaattgcaagtcaggttaatgacagtccaacaagaagccaaactttacggatctttgttagcagccccaatgttctttctacaataaaacatgtggactatgtccagtgaggtctccgactcacct

SEQ ID NO: 465544 - DNA, 777 bp, Homo sapiens
agattcttcccacagagggaggaccaccatccacttgagaactaaataagagcatcttaactccttctgtaagggatgcctgcactaaaaaaattgtgtaagtcatccctgaggaatttggctaatgtcagaaagccagttcactttggtgcatagatatctatgacattagtactttcatcagaagaagaacaatttattgaagatatacagattttagcttctgatttctgaaaaatagatttatcctagaatgtttgggaaggacatcatgaaacaggtgtttactcacataatatactaataaacgatcttttctcgacaggtacttcgcatccagaatgttttgtctgagaagcccagggtgagcaccgtgtatgccaacaatggctctgtgcttcagggcacctctgtggcttctgtgtaccatgggaaaattctcataggcaccgtatttcacaaaactctgtactgtgagctctagactctagatagtaaaaaaaaaaaaaaaaagtctacatattttgtaaaagtaaactgataattgtatgataagtggcactgtaagtaaatagcaaacaccaaccagtgagtgtggcttttcttatggatagaagtaaaggagcagacagagattccttgatagccatcaaattgcaagtcaggttaatgacagtccaacaagaagccaaactttacggatctttgttagcagccccaatgttctttctacaataaaacatgtggactatgtccagtgaggtctccgactcacct

SEQ ID NO: 465545 - DNA, 524 bp, Homo sapiens
ccccgggctgcaggattcggcacgagtatgaagctactgaactataaccctgaggaccctccaggatcagaagtacttcgcatccagaatgttttgtctgagaagcccagggtgagcaccgtgtatgccaacaatggctctgtgcttcagggcacctctgtggcttctgtgtaccatgggaaaattctcataggcaccgtatttcacaaaactctgtactgtgagctctagactctagatagtaaaaaaaaaaaaaaaaagtctacatattttgtaaaagtaaactgataattgtatgataagtggcactgtaagtaaatagcaaacaccaaccagtgagtgtggcttttcttatggatagaagtaaaggagcagacagagattccttgatagccatcaaattgcaagtcaggttaatgacagtccaacaagaagccaaactttacggatctttgttagcagccccaatgttctttctacaataaaacatgtggactatgtccagtgaggtctccgactcacct

SEQ ID NO: 465546 - DNA, 298 bp, Homo sapiens
tacaccagggacagcatttcgggattaaaatatccaggcatgccaaactttgcgccagatgaaccaggaaaaatcttcttgatggatctgaatgaacaaaacccaagggcacaagcactagaaatcagtggtggatttgacaaagaattatttaatccacatgggatcagtattttcatcgacaaagttggaaggagcaaaatgggacttttggctgaaagtgctgagctcctgcggtgggggctgaccgcaagccacgccttctgtgcacctggtcggcccagctagctgccgaccc

SEQ ID NO: 465547 - DNA, 1347 bp, Homo sapiens
aacacgactaacaccctgcagaaacacataagctccttcgaggttgggttttatcttctacagagaaagggtgaatgcctctcgagaagtggagccagtagaacctgaaaactgccaccttattgaggaacttgaaagtggctctgaagatattgatatacttcctagtgggctggcttttatctccagtggattaaaatatccaggcatgccaaactttgcgccagatgaaccaggaaaaatcttcttgatggatctgaatgaacaaaacccaagggcacaagcactagaaatcagtggtggatttgacaaagaattatttaatccacatgggatcagtattttcatcgacaaagacaatactgtgtatctttatgttgtgaatcatccccacatgaagtccactgtggagatatttaaatttgaggaacaacaacgttctctggtatacctgaaaactataaaacatgaacttctcaaaagtgtgaatgacattgtggttcttggaccagaacagttctatgccaccagagaccactattttaccaactccctcctgtcattttttgagatgatcttggatcttcgctggacttatgttcttttctacagcccaagggaggttaaagtggtggccaaaggattttgtagtgccaatgggatcacagtctcagcagaccagaagtatgtctatgtagctgatgtagcagctaagaacattcacataatggaaaaacatgataactgggatttaactcaactgaaggtgatacagttgggcaccttagtggataacctgactgtcgatcctgccacaggagacattttggcaggatgccatcctaatcctatgaagctactgaactataaccctgaggaccctccaggatcagaagtacttcgcatccagaatgttttgtctgagaagcccagggtgagcaccgtgtatgccaacaatggctctgtgcttcagggcacctctgtggcttctgtgtaccatgggaaaattctcataggcaccgtatttcacaaaactctgtactgtgagctctagactctagatagtaaaaaaaaaaaaaaaaagtctacatattttgtaaaagtaaactgataattgtatgataagtggcactgtaagtaaatagcaaacaccaaccagtgagtgtggcttttcttatggatagaagtaaaggagcagacagagattccttgatagccatcaaattgcaagtcaggttaatgacagtccaacaagaagccaaactttacggatctttgttagcagccccaatgttctttctacaataaaacatgtggactatgtccagtgaggtctccgactcacct

SEQ ID NO: 465548 - DNA, 1457 bp, Homo sapiens
atccgtacgcgaggcaggaaccgcccgccgcgcccccgagagctctcggcgccgcgcagtcgccgctgggcaccccgagaccatggggaagctcgtggcgctggtcctgctgggggtcggcctgtccttagtcggggagatgttcctggcgtttagagaaagggtgaatgcctctcgagaagtggagccagtagaacctgaaaactgccaccttattgaggaacttgaaagtggctctgaagatattgatatacttcctagtgggctggcttttatctccagtctgcaggtctgttggagtttgctggaagtccactccagaccctgtttgcctgggtatcaccagtggaggctgcagaacggcaaatattgctgcctgatttttcttctggaagcttcatcccagaggggcatccgcctgtatgagggattaaaatatccaggcatgccaaactttgcgccagatgaaccaggaaaaatcttcttgatggatctgaatgaacaaaacccaagggcacaagcactagaaatcagtggtggatttgacaaagaattatttaatccacatgggatcagtattttcatcgacaaagtgtgaatgacattgtggttcttggaccagaacagttctatgccaccagagaccactattttaccaactccctcctgtcattttttgagatgatcttggatcttcgctggacttatgttcttttctacagcccaagggaggttaaagtggtggccaaaggattttgtagtgccaatgggatcacagtctcagcagaccagaagtatgtctatgtagctgatgtagcagctaagaacattcacataatggaaaaacatgataactgggatttaactcaactgaaggtgatacagttgggcaccttagtggataacctgactgtcgatcctgccacaggagacattttggcaggatgccatcctaatcctatgaagctactgaactataaccctgaggaccctccaggatcagaagtacttcgcatccagaatgttttgtctgagaagcccagggtgagcaccgtgtatgccaacaatggctctgtgcttcagggcacctctgtggcttctgtgtaccatgggaaaattctcataggcaccgtatttcacaaaactctgtactgtgagctctagactctagatagtaaaaaaaaaaaaaaaaagtctacatattttgtaaaagtaaactgataattgtatgataagtggcactgtaagtaaatagcaaacaccaaccagtgagtgtggcttttcttatggatagaagtaaaggagcagacagagattccttgatagccatcaaattgcaagtcaggttaatgacagtccaacaagaagccaaactttacggatctttgttagcagccccaatgttctttctacaataaaacatgtggactatgtccagtgaggtctccgactcacct

SEQ ID NO: 465549 - DNA, 1536 bp, Homo sapiens
atccgtacgcgaggcaggaaccgcccgccgcgcccccgagagctctcggcgccgcgcagtcgccgctgggcaccccgagaccatggggaagctcgtggcgctggtcctgctgggggtcggcctgtccttagtcggggagatgttcctggcgtttagagaaagggtgaatgcctctcgagaagtggagccagtagaacctgaaaactgccaccttattgaggaacttgaaagtggctctgaagatattgatatacttcctagtgggctggcttttatctccagtctgcaggtctgttggagtttgctggaagtccactccagaccctgtttgcctgggtatcaccagtggaggctgcagaacggcaaatattgctgcctgatttttcttctggaagcttcatcccagaggggcatccgcctgtatgagggattaaaatatccaggcatgccaaactttgcgccagatgaaccaggaaaaatcttcttgatggatctgaatgaacaaaacccaagggcacaagcactagaaatcagtggtggatttgacaaagaattatttaatccacatgggatcagtattttcatcgacaaagacaatactgtgtatctttatgttgtgaatcatccccacatgaagtccactgtggagatatttaaatttgaggaacaacaacgttctctggtatacctgaaaactataaaacatgaacttctcaaaagagaccactattttaccaactccctcctgtcattttttgagatgatcttggatcttcgctggacttatgttcttttctacagcccaagggaggttaaagtggtggccaaaggattttgtagtgccaatgggatcacagtctcagcagaccagaagtatgtctatgtagctgatgtagcagctaagaacattcacataatggaaaaacatgataactgggatttaactcaactgaaggtgatacagttgggcaccttagtggataacctgactgtcgatcctgccacaggagacattttggcaggatgccatcctaatcctatgaagctactgaactataaccctgaggaccctccaggatcagaagtacttcgcatccagaatgttttgtctgagaagcccagggtgagcaccgtgtatgccaacaatggctctgtgcttcagggcacctctgtggcttctgtgtaccatgggaaaattctcataggcaccgtatttcacaaaactctgtactgtgagctctagactctagatagtaaaaaaaaaaaaaaaaagtctacatattttgtaaaagtaaactgataattgtatgataagtggcactgtaagtaaatagcaaacaccaaccagtgagtgtggcttttcttatggatagaagtaaaggagcagacagagattccttgatagccatcaaattgcaagtcaggttaatgacagtccaacaagaagccaaactttacggatctttgttagcagccccaatgttctttctacaataaaacatgtggactatgtccagtgaggtctccgactcacct

SEQ ID NO: 465550 - DNA, 1575 bp, Homo sapiens
atccgtacgcgaggcaggaaccgcccgccgcgcccccgagagctctcggcgccgcgcagtcgccgctgggcaccccgagaccatggggaagctcgtggcgctggtcctgctgggggtcggcctgtccttagtcggggagatgttcctggcgtttagagaaagggtgaatgcctctcgagaagtggagccagtagaacctgaaaactgccaccttattgaggaacttgaaagtggctctgaagatattgatatacttcctagtgggctggcttttatctccagtctgcaggtctgttggagtttgctggaagtccactccagaccctgtttgcctgggtatcaccagtggaggctgcagaacggcaaatattgctgcctgatttttcttctggaagcttcatcccagaggggcatccgcctgtatgagggattaaaatatccaggcatgccaaactttgcgccagatgaaccaggaaaaatcttcttgatggatctgaatgaacaaaacccaagggcacaagcactagaaatcagtggtggatttgacaaagaattatttaatccacatgggatcagtattttcatcgacaaaggggtaactttcttggaaattatcccttttttccatgtagacaatactgtgtatctttatgttgtgaatcatccccacatgaagtccactgtggagatatttaaatttgaggaacaacaacgttctctggtatacctgaaaactataaaacatgaacttctcaaaagagaccactattttaccaactccctcctgtcattttttgagatgatcttggatcttcgctggacttatgttcttttctacagcccaagggaggttaaagtggtggccaaaggattttgtagtgccaatgggatcacagtctcagcagaccagaagtatgtctatgtagctgatgtagcagctaagaacattcacataatggaaaaacatgataactgggatttaactcaactgaaggtgatacagttgggcaccttagtggataacctgactgtcgatcctgccacaggagacattttggcaggatgccatcctaatcctatgaagctactgaactataaccctgaggaccctccaggatcagaagtacttcgcatccagaatgttttgtctgagaagcccagggtgagcaccgtgtatgccaacaatggctctgtgcttcagggcacctctgtggcttctgtgtaccatgggaaaattctcataggcaccgtatttcacaaaactctgtactgtgagctctagactctagatagtaaaaaaaaaaaaaaaaagtctacatattttgtaaaagtaaactgataattgtatgataagtggcactgtaagtaaatagcaaacaccaaccagtgagtgtggcttttcttatggatagaagtaaaggagcagacagagattccttgatagccatcaaattgcaagtcaggttaatgacagtccaacaagaagccaaactttacggatctttgttagcagccccaatgttctttctacaataaaacatgtggactatgtccagtgaggtctccgactcacct

SEQ ID NO: 465551 - DNA, 1709 bp, Homo sapiens
atccgtacgcgaggcaggaaccgcccgccgcgcccccgagagctctcggcgccgcgcagtcgccgctgggcaccccgagaccatggggaagctcgtggcgctggtcctgctgggggtcggcctgtccttagtcggggagatgttcctggcgtttagagaaagggtgaatgcctctcgagaagtggagccagtagaacctgaaaactgccaccttattgaggaacttgaaagtggctctgaagatattgatatacttcctagtgggctggcttttatctccagtggattaaaatatccaggcatgccaaactttgcgccagatgaaccaggaaaaatcttcttgatggatctgaatgaacaaaacccaagggcacaagcactagaaatcagtggtggatttgacaaagaattatttaatccacatgggatcagtattttcatcgacaaagacaatactgtgtatctttatgttgtgaatcatccccacatgaagtccactgtggagatatttaaatttgaggaacaacaacgttctctggtatacctgaaaactataaaacatgaacttctcaaaagtgtgaatgacattgtggttcttggaccagaacagttctatgccaccagagaccactattttaccaactccctcctgtcattttttgagatgatcttggatcttcgctggacttatgttcttttctacagcccaagggaggttaaagtggtggccaaaggattttgtagtgccaatgggatcacagtctcagcagaccagaagtatgtctatgtagctgatgtagcagctaagaacattcacataatggaaaaacatgataactgggatttaactcaactgaaggtaagagtaccctgtctggcccacacaatctgacttcttaccttagtcccatacttgacccaggaatgtgccccttgaatgaggaaaacatggctatttgagagcaatgccagtgagattatgcatgcgtttctaaaatacagaagcaaagccccctaaaaacaccaactttaggtgccagaagaagctgtaggggttgtggggatgaatagggaagaaagcgaggaatcattgagacaatgtcttcactactccctctttgttgtaaggtgatacagttgggcaccttagtggataacctgactgtcgatcctgccacaggagacattttggcaggatgccatcctaatcctatgaagctactgaactataaccctgaggaccctccaggatcagaagtacttcgcatccagaatgttttgtctgagaagcccagggtgagcaccgtgtatgccaacaatggctctgtgcttcagggcacctctgtggcttctgtgtaccatgggaaaattctcataggcaccgtatttcacaaaactctgtactgtgagctctagactctagatagtaaaaaaaaaaaaaaaaagtctacatattttgtaaaagtaaactgataattgtatgataagtggcactgtaagtaaatagcaaacaccaaccagtgagtgtggcttttcttatggatagaagtaaaggagcagacagagattccttgatagccatcaaattgcaagtcaggttaatgacagtccaacaagaagccaaactttacggatctttgttagcagccccaatgttctttctacaataaaacatgtggactatgtccagtgaggtctccgactcacct

SEQ ID NO: 465552 - DNA, 1086 bp, Homo sapiens
atccgtacgcgaggcaggaaccgcccgccgcgcccccgagagctctcggcgccgcgcagtcgccgctgggcaccccgagaccatggggaagctcgtggcgctggtcctgctgggggtcggcctgtccttagtcggggagatgttcctggcgtttaggctgcccctctgggaagtacatcagacctgtgcagaactggttgaaatagcagcagctggaacaagtgtgaatgacattgtggttcttggaccagaacagttctatgccaccagagaccactattttaccaactccctcctgtcattttttgagatgatcttggatcttcgctggacttatgttcttttctacagcccaagggaggttaaagtggtggccaaaggattttgtagtgccaatgggatcacagtctcagcagaccagaagtatgtctatgtagctgatgtagcagctaagaacattcacataatggaaaaacatgataactgggatttaactcaactgaaggtgatacagttgggcaccttagtggataacctgactgtcgatcctgccacaggagacattttggcaggatgccatcctaatcctatgaagctactgaactataaccctgaggaccctccaggatcagaagtacttcgcatccagaatgttttgtctgagaagcccagggtgagcaccgtgtatgccaacaatggctctgtgcttcagggcacctctgtggcttctgtgtaccatgggaaaattctcataggcaccgtatttcacaaaactctgtactgtgagctctagactctagatagtaaaaaaaaaaaaaaaaagtctacatattttgtaaaagtaaactgataattgtatgataagtggcactgtaagtaaatagcaaacaccaaccagtgagtgtggcttttcttatggatagaagtaaaggagcagacagagattccttgatagccatcaaattgcaagtcaggttaatgacagtccaacaagaagccaaactttacggatctttgttagcagccccaatgttctttctacaataaaacatgtggactatgtccagtgaggtctccgactcacct

SEQ ID NO: 465553 - DNA, 1584 bp, Homo sapiens
atccgtacgcgaggcaggaaccgcccgccgcgcccccgagagctctcggcgccgcgcagtcgccgctgggcaccccgagaccatggggaagctcgtggcgctggtcctgctgggggtcggcctgtccttagtcggggagatgttcctggcgtttagagaaagggtgaatgcctctcgagaagtggagccagtagaacctgaaaactgccaccttattgaggaacttgaaagtggctctgaagatattgatatacttcctagtgggctggcttttatctccagtctgcaggtctgttggagtttgctggaagtccactccagaccctgtttgcctgggtatcaccagtggaggctgcagaacggcaaatattgctgcctgatttttcttctggaagcttcatcccagaggggcatccgcctgtatgagggattaaaatatccaggcatgccaaactttgcgccagatgaaccaggaaaaatcttcttgatggatctgaatgaacaaaacccaagggcacaagcactagaaatcagtggtggatttgacaaagaattatttaatccacatgggatcagtattttcatcgacaaagacaatactgtgtatctttatgttgtgaatcatccccacatgaagtccactgtggagatatttaaatttgaggaacaacaacgttctctggtatacctgaaaactataaaacatgaacttctcaaaagtgtgaatgacattgtggttcttggaccagaacagttctatgccaccagagaccactattttaccaactccctcctgtcattttttgagatgatcttggatcttcgctggacttatgttcttttctacagcccaagggaggttaaagtggtggccaaaggattttgtagtgccaatgggatcacagtctcagcagaccagaagtatgtctatgtagctgatgtagcagctaagaacattcacataatggaaaaacatgataactgggatttaactcaactgaaggtgatacagttgggcaccttagtggataacctgactgtcgatcctgccacaggagacattttggcaggatgccatcctaatcctatgaagctactgaactataaccctgaggaccctccaggatcagaagtacttcgcatccagaatgttttgtctgagaagcccagggtgagcaccgtgtatgccaacaatggctctgtgcttcagggcacctctgtggcttctgtgtaccatgggaaaattctcataggcaccgtatttcacaaaactctgtactgtgagctctagactctagatagtaaaaaaaaaaaaaaaaagtctacatattttgtaaaagtaaactgataattgtatgataagtggcactgtaagtaaatagcaaacaccaaccagtgagtgtggcttttcttatggatagaagtaaaggagcagacagagattccttgatagccatcaaattgcaagtcaggttaatgacagtccaacaagaagccaaactttacggatctttgttagcagccccaatgttctttctacaataaaacatgtggactatgtccagtgaggtctccgactcacct

SEQ ID NO: 465554 - DNA, 1386 bp, Homo sapiens
atccgtacgcgaggcaggaaccgcccgccgcgcccccgagagctctcggcgccgcgcagtcgccgctgggcaccccgagaccatggggaagctcgtggcgctggtcctgctgggggtcggcctgtccttagtcggggagatgttcctggcgtttagagaaagggtgaatgcctctcgagaagtggagccagtagaacctgaaaactgccaccttattgaggaacttgaaagtggctctgaagatattgatatacttcctagtgggctggcttttatctccagtggattaaaatatccaggcatgccaaactttgcgccagatgaaccaggaaaaatcttcttgatggatctgaatgaacttaatccacatgggatcagtattttcatcgacaaagacaatactgtgtatctttatgttgtgaatcatccccacatgaagtccactgtggagatatttaaatttgaggaacaacaacgttctctggtatacctgaaaactataaaacatgaacttctcaaaagtgtgaatgacattgtggttcttggaccagaacagttctatgccaccagagaccactattttaccaactccctcctgtcattttttgagatgatcttggatcttcgctggacttatgttcttttctacagcccaagggaggttaaagtggtggccaaaggattttgtagtgccaatgggatcacagtctcagcagaccagaagtatgtctatgtagctgatgtagcagctaagaacattcacataatggaaaaacatgataactgggatttaactcaactgaaggtgatacagttgggcaccttagtggataacctgactgtcgatcctgccacaggagacattttggcaggatgccatcctaatcctatgaagctactgaactataaccctgaggaccctccaggatcagaagtacttcgcatccagaatgttttgtctgagaagcccagggtgagcaccgtgtatgccaacaatggctctgtgcttcagggcacctctgtggcttctgtgtaccatgggaaaattctcataggcaccgtatttcacaaaactctgtactgtgagctctagactctagatagtaaaaaaaaaaaaaaaaagtctacatattttgtaaaagtaaactgataattgtatgataagtggcactgtaagtaaatagcaaacaccaaccagtgagtgtggcttttcttatggatagaagtaaaggagcagacagagattccttgatagccatcaaattgcaagtcaggttaatgacagtccaacaagaagccaaactttacggatctttgttagcagccccaatgttctttctacaataaaacatgtggactatgtccagtgaggtctccgactcacct

SEQ ID NO: 465555 - DNA, 1348 bp, Homo sapiens
agtgctgtgtgtatgcggtgtttctgccacggaggaagagactcaggagaaagggtgaatgcctctcgagaagtggagccagtagaacctgaaaactgccaccttattgaggaacttgaaagtggctctgaagatattgatatacttcctagtgggctggcttttatctccagtctgcaggtctgttggagtttgctggaagtccactccagaccctgtttgcctgggtatcaccagtggaggctgcagaacggcaaatattgctgcctgatttttcttctggaagcttcatcccagaggggcatccgcctgtatgagggattaaaatatccaggcatgccaaactttgcgccagatgaaccaggaaaaatcttcttgatggatctgaatgaacaaaacccaagggcacaagcactagaaatcagtggtggatttgacaaagaattatttaatccacatgggatcagtattttcatcgacaaagtgtgaatgacattgtggttcttggaccagaacagttctatgccaccagagaccactattttaccaactccctcctgtcattttttgagatgatcttggatcttcgctggacttatgttcttttctacagcccaagggaggttaaagtggtggccaaaggattttgtagtgccaatgggatcacagtctcagcagaccagaagtatgtctatgtagctgatgtagcagctaagaacattcacataatggaaaaacatgataactgggatttaactcaactgaaggtgatacagttgggcaccttagtggataacctgactgtcgatcctgccacaggagacattttggcaggatgccatcctaatcctatgaagctactgaactataaccctgaggaccctccaggatcagaagtacttcgcatccagaatgttttgtctgagaagcccagggtgagcaccgtgtatgccaacaatggctctgtgcttcagggcacctctgtggcttctgtgtaccatgggaaaattctcataggcaccgtatttcacaaaactctgtactgtgagctctagactctagatagtaaaaaaaaaaaaaaaaagtctacatattttgtaaaagtaaactgataattgtatgataagtggcactgtaagtaaatagcaaacaccaaccagtgagtgtggcttttcttatggatagaagtaaaggagcagacagagattccttgatagccatcaaattgcaagtcaggttaatgacagtccaacaagaagccaaactttacggatctttgttagcagccccaatgttctttctacaataaaacatgtggactatgtccagtgaggtctccgactcacct

SEQ ID NO: 465556 - DNA, 1392 bp, Homo sapiens
atccgtacgcgaggcaggaaccgcccgccgcgcccccgagagctctcggcgccgcgcagtcgccgctgggcaccccgagaccatggggaagctcgtggcgctggtcctgctgggggtcggcctgtccttagtcggggagatgttcctggcgtttagagaaagggtgaatgcctctcgagaagtggagccagtagaacctgaaaactgccaccttattgaggaacttgaaagtggctctgaagatattgatatacttcctagtgggctggcttttatctccagtggattaaaatatccaggcatgccaaactttgcgccagatgaaccaggaaaaatcttcttgatggatctgaatgaacaaaacccaagggcacaagcactagaaatcagtggtggatttgacaaagaattatttaatccacatgggatcagtattttcatcgacaaagacaatactgtgtatctttatgttgtgaatcatccccacatgaagtccactgtggagatatttaaatttgaggaacaacaacgttctctggtatacctgaaaactataaaacatgaacttctcaaaagagaccactattttaccaactccctcctgtcattttttgagatgatcttggatcttcgctggacttatgttcttttctacagcccaagggaggttaaagtggtggccaaaggattttgtagtgccaatgggatcacagtctcagcagaccagaagtatgtctatgtagctgatgtagcagctaagaacattcacataatggaaaaacatgataactgggatttaactcaactgaaggtgatacagttgggcaccttagtggataacctgactgtcgatcctgccacaggagacattttggcaggatgccatcctaatcctatgaagctactgaactataaccctgaggaccctccaggatcagaagtacttcgcatccagaatgttttgtctgagaagcccagggtgagcaccgtgtatgccaacaatggctctgtgcttcagggcacctctgtggcttctgtgtaccatgggaaaattctcataggcaccgtatttcacaaaactctgtactgtgagctctagactctagatagtaaaaaaaaaaaaaaaaagtctacatattttgtaaaagtaaactgataattgtatgataagtggcactgtaagtaaatagcaaacaccaaccagtgagtgtggcttttcttatggatagaagtaaaggagcagacagagattccttgatagccatcaaattgcaagtcaggttaatgacagtccaacaagaagccaaactttacggatctttgttagcagccccaatgttctttctacaataaaacatgtggactatgtccagtgaggtctccgactcacct

SEQ ID NO: 465557 - DNA, 1733 bp, Homo sapiens
  misc_feature (2)..(2): n is a, c, g, or t
  misc_feature (6)..(6): n is a, c, g, or t
  misc_feature (9)..(11): n is a, c, g, or t
  misc_feature (13)..(14): n is a, c, g, or t
  misc_feature (19)..(20): n is a, c, g, or t
  misc_feature (1505)..(1505): n is a, c, g, or t
anaganctnnncnncgaannagatgtttaggaatgaggggaaaaagaaagagaagacaaagatggtttcaggtttcccagtctgggcaatttggagagggtgggtaccattaagagatttggagagggtgggtaccattaagagaatgaggcaggacacctttgacactggacgtagtgtcaaatggggcaaaatagatacttgcattcagttcacaggtcctggtatttctccctttgaaatgcagaagatacaacttttggttccttatgaaagcttttcgtctcctatgtggagaggctctggagcacacctgtgtgaatgtgtgtgtgtgtgtggtgggaaaatgttaagtagagtgaaaaatgtatcactgattaaccagtggaaatttattacagcagttaagagccctgggtctggagcaaaactgctgaggtttgaggccccgttttgctgctcactagctacatgatcttgggcaagttatttaagctctctgagcttcagtttcttcctctgcagaatggggatgaaagtggactactacctcatggcatgttttgaggatgaaatgagctaataaacacagtcttcagccctacattaggatggcctaaggaaaacaagaagactgaatgatattccctgaggttctcgactctgtcatccaagctagagtgcagtggggtaaaacacggctcactgcagcctcgatctcttggctcaagctatcctcctgcctcagcctcctgtttatctgggaccacagctgacttatataagttattagtcttctagaaggatcacaaggaaccagcatcaaagaaatggaatccagctaattcccccaagaaactgaagttttcgggacatgacttgtgaaaggcaaacataagctgacatcttttcacactgaacagcaagagccaaagtgtatccgaaaagccattgtcaaaacaaggagtgagaacagctggggtcaagacctaatgaagggcatcactcagcctctttgagcctcggattcctcatttgtaaagtgggcataataatacctcacagggtagttatgagggcaaatgagataatggacacgaaggcacctgtacactccacggtgctatcagaatattgactattagtgctttcatcacgcggctccatccaaacccctgctttccctcactccaacaggcttttactctgtcacccatgctggagtgcagtggtgcaatcttggctcactgaaacctctgcctcctggattcaagcgatcctcccacctcagcctcccgagtagctgggactacaggcaacctggcggttccccgctccagggaggtcaccctcttgatgctgaatttagcacggacacctgatgggcacagtgcactgcagcccagagctcctgagctcaagccatcctcctgcctcagcctccaagtagccaggaccacaggcacgcaccctgaggaggaagaaataccaggtgcgcagctccnagaaaaagccattgaggacgcggcaagaaggccgccatctacaagccaaggagaggggcctcaggcagaaatcgaacctgtcacaccttgcatcttggacttccagcccttcagaactgtgagaaagtaaatttctgtgttcaagctaccaggtctgtgggatttttatggcagccctagcagactaagacaggcatcaatggttccaatgttgcactttattttccg

SEQ ID NO: 465558 - DNA, 1612 bp, Homo sapiens
  misc_feature (2)..(2): n is a, c, g, or t
  misc_feature (6)..(6): n is a, c, g, or t
  misc_feature (9)..(11): n is a, c, g, or t
  misc_feature (13)..(14): n is a, c, g, or t
  misc_feature (19)..(20): n is a, c, g, or t
  misc_feature (1384)..(1384): n is a, c, g, or t
anaganctnnncnncgaannagatgtttaggaatgaggggaaaaagaaagagaagacaaagatggtttcaggtttcccagtctgggcaatttggagagggtgggtaccattaagagatttggagagggtgggtaccattaagagaatgaggcaggacacctttgacactggacgtagtgtcaaatggggcaaaatagatacttgcattcagttcacaggtcctggtatttctccctttgaaatgcagaagatacaacttttggttccttatgaaagcttttcgtctcctatgtggagaggctctggagcacacctgtgtgaatgtgtgtgtgtgtgtggtgggaaaatgttaagtagagtgaaaaatgtatcactgattaaccagtggaaatttattacagcagttaagagccctgggtctggagcaaaactgctgaggtttgaggccccgttttgctgctcactagctacatgatcttgggcaagttatttaagctctctgagcttcagtttcttcctctgcagaatggggatgaaagtggactactacctcatggcatgttttgaggatgaaatgagctaataaacacagtcttcagccctacattaggatggcctaaggaaaacaagaagactgaatgatattccctgctgacttatataagttattagtcttctagaaggatcacaaggaaccagcatcaaagaaatggaatccagctaattcccccaagaaactgaagttttcgggacatgacttgtgaaaggcaaacataagctgacatcttttcacactgaacagcaagagccaaagtgtatccgaaaagccattgtcaaaacaaggagtgagaacagctggggtcaagacctaatgaagggcatcactcagcctctttgagcctcggattcctcatttgtaaagtgggcataataatacctcacagggtagttatgagggcaaatgagataatggacacgaaggcacctgtacactccacggtgctatcagaatattgactattagtgctttcatcacgcggctccatccaaacccctgctttccctcactccaacaggcttttactctgtcacccatgctggagtgcagtggtgcaatcttggctcactgaaacctctgcctcctggattcaagcgatcctcccacctcagcctcccgagtagctgggactacaggcaacctggcggttccccgctccagggaggtcaccctcttgatgctgaatttagcacggacacctgatgggcacagtgcactgcagcccagagctcctgagctcaagccatcctcctgcctcagcctccaagtagccaggaccacaggcacgcaccctgaggaggaagaaataccaggtgcgcagctccnagaaaaagccattgaggacgcggcaagaaggccgccatctacaagccaaggagaggggcctcaggcagaaatcgaacctgtcacaccttgcatcttggacttccagcccttcagaactgtgagaaagtaaatttctgtgttcaagctaccaggtctgtgggatttttatggcagccctagcagactaagacaggcatcaatggttccaatgttgcactttattttccg

SEQ ID NO: 465559 - DNA, 1279 bp, Homo sapiens
  misc_feature (2)..(2): n is a, c, g, or t
  misc_feature (6)..(6): n is a, c, g, or t
  misc_feature (9)..(11): n is a, c, g, or t
  misc_feature (13)..(14): n is a, c, g, or t
  misc_feature (19)..(20): n is a, c, g, or t
  misc_feature (1051)..(1051): n is a, c, g, or t
anaganctnnncnncgaannagatgtttaggaatgaggggaaaaagaaagagaagacaaagatggtttcaggtttcccagtctgggcaatttggagagggtgggtaccattaagagatttggagagggtgggtaccattaagagaatgaggcaggacacctttgacactggacgtagtgtcaaatggggcaaaatagatacttgcattcagttcacaggtcctggtatttctccctttgaaatgcagaagatacaacttttggttccttatgaaagcttttcgtctcctatgtggagaggctctggagcacacctgtgtgaatgtgtgtgtgtgtgtggtgggaaaatgttaagtagagtgaaaaatgtatcactgattaaccagtggaaatttattacagcagttaagagccctgggtctggagcaaaactgctgaggtttgaggccccgttttgctgctcactagctacatgatcttgggcaagttatttaagctctctgagcttcagtttcttcctctgcagaatggggatgaaagtggactactacctcatggcatgttttgaggatgaaatgagctaataaacacagtcttcagccctacattaggatggcctaaggaaaacaagaagactgaatgatattccctgaggttctcgactctgtcatccaagctagagtgcagtggggtaaaacacggctcactgcagcctcgatctcttggctcaagctatcctcctgcctcagcctcctgtttatctgggaccacagaaattattcctttgcaggtggtgcaaaggatcagcacgggagttttgacctgctccgtttccgacctgggtcggttcacccctccttaggcaacctggcggttccccgctccagggaggtcaccctcttgatgctgaatttagcacggacacctgatgggcacagtgcactgcagcccagagctcctgagctcaagccatcctcctgcctcagcctccaagtagccaggaccacaggcacgcaccctgaggaggaagaaataccaggtgcgcagctccnagaaaaagccattgaggacgcggcaagaaggccgccatctacaagccaaggagaggggcctcaggcagaaatcgaacctgtcacaccttgcatcttggacttccagcccttcagaactgtgagaaagtaaatttctgtgttcaagctaccaggtctgtgggatttttatggcagccctagcagactaagacaggcatcaatggttccaatgttgcactttattttccg

SEQ ID NO: 465560 - DNA, 2520 bp, Homo sapiens
  misc_feature (2)..(2): n is a, c, g, or t
  misc_feature (7)..(9): n is a, c, g, or t
  misc_feature (11)..(13): n is a, c, g, or t
tnttttnnnannnaagtatggaaatcatttgcctgatatacataattgatttatttatttattttagaggcagggtctcacttcatctcagcctccagagtagctgaaactacaggtaagtaccaccatgcccagataatttttttttttttggtagagatgacgccttgctgtgttgcccagggtggtctctaattcctggcctttagcaattctcccgccttggcctcctaaagcactggggttacaggcatgaaccactgtgcccagcctgcatgatgtaatctccaaattgagggtcacccaggcatggaatgcacagctctgccagacagaaagcgctttggatgcctgagaaacaacagcttgtccgggctactgatgcgaagagaggccatggtttcctttttctctgctctgaatggcagccttgacgtcacaacagctaggaaccactggagggacaaataacaaggcgcaagccagaagcgccctgctctgtcgcaggggcagggccattttcatccagttctgatgtcttctgtggccgctgcgagtcggcgggagtagagacaaatgactggagctttaggcgtaaaggcggtctctctctaggctgatcaaacagccctttgcccagtgctaattgccttcacggaacctggataaactacagttcccgaattaaacttgtttctgatgaactagacttcccagggaatgggtgtagtgattttgctgatggttcagacatcggcactttccctgaagggctcaacttcctgtgaaacacagcacattcacaaacatctgaagccaactgcaaggcacccgtcactcagcgagaaaagcagaaaggtgccaattcagatggctgagctacttcgcctgggtcccgacctgtatcaccacagggtcacagaaatggaaccttctccgtcacacctcctgatggcagtcagctgtgacccgctgaatccaggacatcatgcattccagtttcatttgcgagaacatttccaggtccggctgaagcctagtggctccagcagaggtctcaacccctttgggatgctcagtgggagacagaatcaagggccaatgatccatgacctagtcctagtgcccatgtcagtttgtcaaaggccctcagagcagattgtgttttccctggcgggggcttgacttctttgctttaaaaaggattcttaagtatttattgcagtaaaattaaccaccttcaaatttctgccagatcccctggaggtatatagcttattaacacaaaacaaatgtgacacttgaaaggcaggagacttggtttctattctctggcccactactgacttattgggtggcttcaggcaaataagtgaaatcaagaagacaccatcttcaacaagcacagagtgggcacctggcagaggtggaaacgaaggcaagcaaatgcagtcattttgttggaggactattctacatttccaaagcaatgaagacatgaccccaaactaaactctcctgcaacgtattcttacaagaaaaaggctaaaagccttattgcttaacaaaagctaaacaatgtgaattatttcaataactggtccaaaaagctgcagcaggccactgagtaacttggacatctgttgccatgcttgttcatgctttcccctgagatgacatatatgtatcatcattaataggtgtccttgattttgataagaacaatattcctgtacatccccacatctcctgtacatagccatgtgctgccatcttctgattatgcccagtggagtgtaaacattttttcatgaaaaagcaaaatcaataaaagtaaaactccccacttttcctgccagtagtgcccttggtaacaaacagggcagagacaccaatacagagattacaatactctcagacataattcaagcagaactttaaatggatcagtgcatgttataaactttcttttttttgcaagtgccaagcgtgcttatgctactattcattctgagatagacagatcatcaatgaccttctgggtcactgactagggagaaagctgactataaaaaagagtgggagaaaaataaagtgggggttgcttccttccaccctagaccccctactgccttgaatgaaagaagacagatggcagccacctttccctttaattaggaggggcagcttagaagggacagtcctgctcacttggcactatctttaacaagactgtttagatggcaatgctctgctcattcgcccttctttcaaactgttcttaatttttcacttacaaactgaatttccgtaaatttaatggtgaaacaattacagctctgactacaacgctatacataaatgacacacttaaagatgtttgctgaattaaaaattcacagatattcctataaagaggctggaatgtttcaaatgaaatacagctacctccagtcctatcagcaccactttgagataaaatatgaattcccaggacacagaagctctaacttaaattca

SEQ ID NO: 465561 - DNA, 3773 bp, Homo sapiens
  misc_feature (1)..(3): n is a, c, g, or t
  misc_feature (9)..(11): n is a, c, g, or t
  misc_feature (13)..(13): n is a, c, g, or t
nnnatactnnnanagtcagcaccactatgctaccaaatttcacagaaagctcaagatatacaaatgagtttctgattcccaaagtgattgtgaaaagtgatcccattgaaactactcctggtaaagatgttttgaacattgttgaaatgacaacaaaagatctggaatattacgtaaagttagttgataaagcagcaacaggacttgagaggattaactccaatcttaaaagaagttctactctgggaaaaaatgctatcaaaaaacattgcatgctacagagaaatctttcctggaagaaagagtcaatcaatgccgcaaactttattattgtctcattttatgaaattgccacagtcaccccagcctttagcaaccaccatcctgatcagtcagcagctttcaacactgagataagaacctccatcagcaaaaagattatgccttgttgaaacctcaggtgattgcagcagttttaacaataaagtatttttaaattaaggtatatacatttttagacataatgccattgaacatttaatacactccattatagtgtaaatataactgttatatgcactgggaaaccaaaaaattcgtgtgactcaccttattgcaatatttgctctattgcagtgttctggaaccaaacttacaatatgtctgagctatgcctgtacacatattctaattttgtggtaaatgtataaaattctaggagaaaaaatagctttggaagacttttagcaagttagttttatttcatctttatcacatcagagggctagggatcataaaaatggttgcaactttcttattacttatatagaaaacctttagcggaaagattcaaaatgtctatacggataattatatatttttaatacatgattttacttacctctgtgacatttattaaagcttaatgttaatatgttttataaatccattgtaacttcttgtggcagtctacatttagtcctcaccccttacagtcactgaaaaatttagccaaaaataactaatgctacataagcatatggctctatggcataataaaaggaaaatctatgtcatccatggatttcccactaggttttgaagctctggctttcaagaaaatcttcttaacactgtattaaacacaaccattagtattatctttggaaaatcaagcattatttagaccatcaatcaaattcataggaaaatctcacaaacattatccctaaaataaaaaagcatttaagcacctaatcatgcatgaagccctcagtgctaagaaaattaattgtatagctctaggtcattgacctgtagtagttttacaacctgaaacagatcatgtccctgtccctgtaggtcttgtggttaacagagaagtaatagtagtcttcaaggagtttagacctttacatgatttcatggggaaaaattagaataagtatctgcagtaatgaggagaactacagttggaaagggggagaaagaaaactgaatgccaattgctacttaattctgtcaacataaagaattattagagatttttaaacccttctatttccctcacttcccttccttcattaaaagcagtatatttggacatggctagtaaaagtgaagaggcataaaaataccgaacaggatcacttggagggagaatatttgtaacaagaacatcaaggcattggtggtttgggccacatgcaactacatggaaatctctttattttctgaaatgcttatttatgaggaaaggtttatgtatgattgactggttctgtgatatccaagtctgtacctcaaattccctatttaggctttattatttcacatatttaagattcagtactaagttatatagtcaataatgggtatttgccaaatatatgtattctaagttccacctgaaacttcttggatattcttaaccgaaacattttgtgctgacctttagattctgcagctttaaaatggtgacaaaaatatctttcctgacagatttacaaggtgattttgagaaacagataaaataatgaattcataggtgttatgtaaataagttttataaaatgttataaagtttaaagtgttatgaagaacactatactgacccctcacaaagaggcatgaattctttccccctcccctccccttgagatggagtctcgctctgtcgccaggctggaaagcagaattattcaaataatttatttcattttgcttttaatcctttgtatctatatttcccagaaacattctagggtgttttaaataagtaaatattcacagttcacagaatccaaaaatgcattcaaatatctaccactcaaaaaaaaaaaaaaaaaacggcccacctaaagcctttcttcctgtttactaaaacgagtctctcataataactattttccgttttcccttttcactaaaacttagttgacaggaaaacagatgatactgactcaaatgataacctaaaactcacttctagtaattcaatttattcaagatttcacttatttattcccatgtgcaagataccactatcaaaataatctgtttgaaactgaaagtaacaagttgttagttttcatttgtctttctaatgaattgttcgttagcccatagtacaggcatataacagttttttccacaaagtattttaacctagtactggagatgaatggatagatagaaactgctatttcccctttttcatctggttatacattttcattgtgccatcattgtgaataattgggctcacatgatactaatagcatagagatttggaatttttgcatttataaagatctaaaatagtcatgattaaatatttggaagaaactaaaactaattttgaataactgttattgtgatgggggatgggattcaatcttaacacatttaggaaatgcaaaataaattatctaatctccttaattatgtagagtattttaatatatgcaaaattaaactttaaatgatcgttcagtaagatcaaatattcgttatgaaatcactatttaatcattgctcatagttgcctaacccattacagttcaaactgctgttaaaagaatggcctaaacttgcagtttcacctattacattgtttgaggagccacagatcatagcgtgtgtggtccaaaaaaagtcagaaagaataaaattgatattagcattttttgtttacttctcttaatattgctgaaaaaagcaaagacactcttcatcctccttgatgtgatgctgattttccattcaagtggaatcccacagcaggacattggaattaagcaataaagtgctcttggtgaccaaacaccagacatgtcacaattaacatgagtaaattaggttacatcttatttgtcaactcattttcattactagttttctctaaccaccaaatggatgggttagaaagtgatggattatatgcctgttcaccaagctgctataagtgtcttagaggctttgtcaagaaagtcacccacgactgggcaagctaaagggacttgccaaaggagtcaagaggaggtaggcagagcatgaaagcccttcttaggagaatgaaaaaagaaatgggaacagaagctaaaaggatcctttctttatcctggacctttgggatttgattgttaaatgtcttgaggtaatcttctttatgttaaatctgattggtgttctataaccttcctgtacttgaatattgattcctcaccctaggtttggaaagttctctgttatctctttgaatctctttctaa

SEQ ID NO: 465562 - DNA, 1969 bp, Homo sapiens
tcgatgggaacgtctccgttcggccaggagccgaccaggatgaggaaaccacaggcgtagtccgagggtagcagcacagcatctcagcctcaggcctgcccggatgatgttggggatcaagatgaacacactgcagccaaggacaagagccccagaggagctctttgtcctgcaggagagggccggacacacgtcagagaagatggttgtatcttttcacggctcttctctgagaaatgaagccacaccatgttacagtctggaagaggaagccgggaatgggagatggcaacaatccctgtcattggaacgctggcctctctggacaagccacccttttggaaccccttcccttatgcctgtggcggtggcatggtgctgtatcctgcctgggctctgggctctggcctctgctctgtcctccctcttgctctccctaccctgtttctcaggggcctggatgcctctcgctctggtcaaatgtcttcaacaaagatgacttcccagtctgtcagggagacacttcctggagatccgtgtcactcgttccccccttccaccggcacatacctggacaacaccgtgtgtttcgccgtcgccccgtatgcctcctgtgaaacacattcacaccatctgctgtgggatacgccagtgccacgcgtggtcacatggtctccacctcggattcgcccctgttcctgtttgcacgtgtcccataaagcgtggtctgctttccggagccccagggcttttagaagcggggcaggccactgctctttcaaaggacgagggaggcagagggctgatggatcagtgcacttgcagctgacactaggccttgattcctatgggatcattctgtgctgcagggaggccctgcctgcctcaccagatgtggtgagtccatcctatctcactcggagggcgccaaaatcagatctgaagtggagtcctgagaacagatgcaggcgtcctgatgttccccatccctcggtggaagggacgcagcctgactgccaggagtggagcgggagtcggcccagccaatgcgcatgcgcgaggagccagcggcttctcccatcacagtggttcccaccgttgtcttagaaaccagtccccgaggcttggcaaagcaggagccctccatggaggtgcttgggtgtcggggcaaaccccaggcggagtccgggggaagcagcacggcatcccagcctcaggcctgcccggacggtgttggttgggctacattgaggccaggtgcagtggctcacacctctaatcccagttctttgggaggctgaggccagcggatcacgaagtcaggagatcaagaccatcctggacaacacggtgaaaccctgtctcttcaaatatacaaagaattaaccagagaagcagggaatctggaattttgggtgaaatgtctgtttccagaagctgaaaatgctctcaaatggaaaattcagtagggtcagaatggcctggggtactgcacacttcctgccaggaatagaaggccccacagctataggacctctcttccgtttagttctttggaaggatgagcaaattattcagcctctctgagcctcagttttctcatccataaaatgaggacagtacaccaacctcgcaggtcacaaggatgttatgaaatcagagtgcagtgaatagaagacacttctctgcaccccaaaagctccatgctgattgcgagaaggaaatgctggatggaggggttcctggaactactgtgagggaaatggtaacagaactttggatgtggaacgtgcagtaggagttacacgaagtgcgggtctgcacttggggtggtcagcacggcggatgcccagcaaacgcactgcctggtccacatcccggagtggtctctacgccccagtcggcatcgcagctgatggtgaaacttttggtgtggcagaagagtgtccacaaactttggaaggtatcc

SEQ ID NO: 465563 - DNA, 1724 bp, Homo sapiens
tcgatgggaacgtctccgttcggccaggagccgaccaggatgaggaaaccacaggcgtagtccgagggtagcagcacagcatctcagcctcaggcctgcccggatgatgttggggatcaagatgaacacactgcagccaaggacaagagccccagaggagctctttgtcctgcaggagagggccggacacacgtcagagaagatggttgtatcttttcacggctcttctctgagaaatgaagccacaccatgttacagtctggaagaggaagccgggaatgggagatggcaacaatccctgtcattggaacgctggcctctctggacaagccacccttttggaaccccttcccttatgcctgtggcggtggcatggtgctgtatcctgcctgggctctgggctctggcctctgctctgtcctccctcttgctctccctaccctgtttctcaggggcctggatgcctctcgctctggtcaaatgtcttcaacaaagatgacttcccagtctgtcagggagacacttcctggagatccgtgtcactcgttccccccttccaccggcacatacctggacaacaccgtgtgtttcgccgtcgccccgtatgcctcctgtgaaacacattcacaccatctgctgtgggatacgccagtgccacgcgtggtcacatggtctccacctcggattcgcccctgttcctgtttgcacgtgtcccataaagcgtggtctgctttccggagccccagggcttttagaagcggggcaggccactgctctttcaaaggacgagggaggcagagggctgatggatcagtgcacttgcagctgacactaggccttgattcctatgggatcattctgtgctgcagggaggccctgcctgcctcaccagatgtggtgagtccatcctatctcactcggagggcgccaaaatcagatctgaagtggagtcctgagaacagatgcaggcgtcctgatgttccccatccctcggtggaagggacgcagcctgactgccaggagtggagcgggagtcggcccagccaatgcgcatgcgcgaggagccagcggcttctcccatcacagtggttcccaccgttgtcttagaaaccagtccccgaggcttggcaaagcaggagccctccatggaggtgcttgggtgtcggggcaaaccccaggcggagtccgggggaagcagcacggcatcccagcctcaggcctgcccggacggtgttggttgggctacattgaggccaggtgcagtggctcacacctctaatcccagttctttgggaggctgaggccagcggatcacgaagtcaggagatcaagaccatcctggacaacacggtgaaaccctgtctcttcaaatatacaaagaattaaccagagaagcagggaatctggaattttgggtgaaatgtctgtttccagaagctgaaaatgctctcaaatggaaaattcagtagggtcagaatggcctggggtactgcacacttcctgccaggaatagaaggccccacagctataggacctctcttccgtttagttctttggaaggatgagcaaattattcagcctctctgagcctcagttttctcatccataaaatgaggacagtacaccaacctcgcaggtcacaaggatgttatgaaatcagagaagctccctggctccaggcagtgcttggtcccctcactgcagcaggaagcccagcttgtgaa

SEQ ID NO: 465564 - DNA, 4169 bp, Homo sapiens
  misc_feature (1)..(3): n is a, c, g, or t
  misc_feature (9)..(11): n is a, c, g, or t
nnntccttnnnaggtttgttactcagaaccgccaaatcccgcgctcctgagactggggccctgtgttccacccactcctctccctttgatagatattgccagccgatttttccaagtagttgcaccattttccactcccaccagcagcgtatgagaattctgtttgccccacatgggctctgacacttgggattgtccgtctgagaatgacagcacagcagtatggctgagtcccgcagacatgcgcccgatggagaatccaaggtgcccaaggaggcccctggcggagaagaaagccaggtctctggacaggccgcaggcccccgggaaaggctcggagtcgtgggactgccattggctctccctgcccactgccccctccaggaaggcgcttcactggacgaccagtgattgggccagacattcagacagcccagctccatctgcagaggctcactgcaccaccgctgcagcccccactcccgaggagaccggagattttctccccagcgagcagaggccttcgcaagacaccaagaaggggtggctgaagaccatgctgaacttcttcgtgaggacgggccctgaggagcccagagaaaaggccagcaggaggccaagggggaaggagggtatctcccagcatccggagcccctggaagcagcaggggagccagccctcaggaagaaagcccaccacgacaagaagcccagccgcaagaagcaaggtcacaagaaacacgcggccgaggtgactaaggcagctcaagaccaggaggccagaggccgagaggaagggttgtccaaggcagctgctgccttgcgctccggggaggctgacctgggcccagctcgcaggggtggggaagattctgatcaccagtccttcctcatcaaagtggatggtactggagctttggatgtttctccccatgccacaggtcatcagcaagaagaggagctcaaaaagcctgaccaggatgctatcattcagatgatagtggaattgctcaaaagagtgggagaccagtgggaagaagagcaatctctggcctcacagctgggggtggccctgccaaacccagcaccagctgttaggaagaaatcccaagagaaaaagacaagcctcaagagaacctcaaagacaaaccccaagaaacacggctccgaggaggccaagaggggggctgcagatgtttccagtccagaggcctggccacccaagaagtccagctttctgcccctgtgtgtcagcggccatcggccttccatctccagcagctatgaagaattcattcagaagatcatttccatgctccaagatgcagaagaacagcaaggagaggagcaacctcaagtccagcaggaagaggtgggtgtagaaaacccggccccacactgcagaaggaaatctcaagaaaaaaggtcgagcttcaggagagcgttttaccataagaaacacacctccaaggaacccagaagagcgggggcagcaggggctgccagcccagaggcccgacgacccaagaggcccagctttctgcccctgtgtgttggtggccatcggccctccacctccagcagccttgatccagaagatctcgagtgccgggagcccctgcccgcagaaggggagccagttgtgatctcagaagcaccctcccaggctagaggccacacgccagaaggggcacctcagctgagtggagcatgtgaatctaaggagatcatcatccagaagcttgtggcacttctccaagaagtggatggccaactggggcagcagatcaggcgccaccccagctttaagaggtttttttacgagttctcggactcctccctcagcaagctggtagccaccctgcgcagccaggtggctcactcctctaagctggacaggaaccgcgccaggagactctaccagtttgacgttagcttagctaacaaatttgctggcagcaacagccatgccatgtgcatcctcatgggcctaagagaccactacaattgcacccagttcccatacagggaggaccagccgaacatcacaagtcctaaggttgaaagtccagattgaaagctgtgtcttgcactcaaattcccttgaactagccaaatggttcgcagctttagccaggagaccctgaagatgctctgtgatgtcccaatccctgcttcacaaacgtgatggaagacaagagcagacaatcattctgtgtccataccctagtatctgagaagcacagagcattcttccacaaggcaagacacagaggccatgtctggggaaatcagcactggactgggaatgaggaagactggggctctacctgctgaacctaccccagacttgctgcatgaccctctacacattccccctcctctccagactttggagtctaggatcccacccagaaggcctactgatattttctcagatgttcatgttaactgagtctagtttttaaactaaatttttatttaatctctaaacagaacatccacatgcatccaaacagatatgcatcgaagtgtatcccatcatttcttcagttgaccagtagttcttcatgctcatatggatttgtagatgcctcccaggaactctgcaggcccaagatggaaaaacctagagactggggacacttggtctctcagaatccttctaaccctgtgtcctgtcattctatgactagagaaatggagctgataccttgcacctctcccatctcatgggattggctaggagtcagtgagaaaatggatgtgaagagttctgaaaattacctagtgccatgtccatgtaggcactatagcttcttttgggtagttttcaggaagtggaggagggcttcaatgggctggactgccatggattgttgcacaggggtgcactgctcaagagcaccatactccaggaggtactattcatgtcctagacattgtggatttgtagatttatcatgacagttttgcagctggtagcagtaacatgtcttgagaaaagggctattttttgtatttgcacaaaggtgaagtgtgggggtgccagaggctctgccttctgtatagctcaacagtttcaatagcttgactcaggtgtgaaatttgccacatgttcatatctatgtgcaggaaggacaagactgtagacagacagtcggctcccttggacactgcccagaacatgtggtcatgggggaaagggtgttaaacctggatggcaagtgagatcttgtgacccttggggacatggtattgccgtgttgaacctgctgtcgcaccatggggtaggactggggaggaggagcagtctagagcggagaggccctgggtgcttatatgggactggcctccaacctgaggcactggcttcataagctcaactcagcctatccggaaagccatttagtttttattgctgcttctgagaagtgggggagaggtgagctatttgtggatttgttttaggcagtgttcacaatcatagcacctaaatatgaaggatcagaataagttatgaaatgaaggtcaggaaccttttgtacatagtttcttatttggaatgatgttctttaagccctatgagtatttggtatgtgctcctgatgctggcatctgagtctcatttttgtaccgtgttatttgagcaaataaatacattaacttgcacaaacctgtgatctgggttattcaccatggaagcaagacagatacccacctgccacatctatgactgtctggtgcctgcaaggctgtgtgggttggcctccttgtccctgcctggatcccctccaggtgtcccatccttggagcgccagctctctgatgcagtaaaaaagtgtcctgggctgggtgtcagaagacttgggttttaatccagctgcccccaggctgggtgaccctggggacaagatacttgccctccagacctgacattctacaactcagtgactctcaatgtgacagttcattgcatgtccaggaaaatcgggagcagtactgattccaccttgtctcttattagtcccccaaatctggtgcttaaattctgtcactcagagccaagataaaaaattgttagacaaggagaacacatggacacaggaaggggaacatcacactctggggactgttgtggggtggggggaggggggagggatagcatt

SEQ ID NO: 465565 - DNA, 1088 bp, Homo sapiens
ggagtcggctgtgttggcttttacgcccataatgtttgtgtgggctcgcctgtctgcacctgtcattgtttatgtacgcgttctacctataggaatgtgcggggaactttctagacgcatgaagagtgatgctgtggaatctgatacagcctacagttctaggattcacccttggttcttttgcagagtcaagaatagtcttggtgctagagggaccaagccagcaaagatttgcactgccagccaagggacttatttccctgcctccaacagttttgccgtcactaaagctgctacacatgctgagcttaaatgcctgcttatagcaaaagcagccatttttggtggggacaaacaaaccacatccaaaccactgcaaatcccatacataccagggctccactccagacccactgaattgaatcctttggggatggtgcctgaaaaaaatatattttaaacacccaagggggaggctctttggccgtggtcagcagaggcagctgtgccactgcctgtgggtgccacgcctgcctcacagcagcaacttcctcataagaaagtctctgctgttatttagatgtgtgtcttgtctcccagactcagatacaagcccatcaaggcagtgaggttgacatctttttttctgacttgtctgcaaacccgtcatgaggattgttgcacagtcatgtttgggtaatgccacgtacagtctttccttcttaggcaattatattagcagttaaaggctctgagaagttttgcaatgaagatgctgtcataagtttgtctaattcagcatttgacaacagaactgattttcctagcaacattttggtccagagagaaggtgatgcaagatgcagaaatgactgagagtatggtgagcacttgttcactacgccagaaataaaagatcattgaagtgagattgattaaaactacaatcaataaaagatcattgaagtgaaattgattaaaactacaatcattgtcaaataaccacatttaactcctctcttaaaacttgtcacttaagacactctgttaactaaatctctttaaagtattaaatcatgtcattgttc

SEQ ID NO: 465566 - DNA, 2157 bp, Homo sapiens
gagttaatgggtgcagcacaccagcatgtcacacgtatacatatctgttgcagtttctcggtgcaaacagaaccctgagaaatggtctgggaaaatgtctaatcaacaggagaagtatgaagctcagaatatagtcaattcaacagaagagagtgatgatgcttttgatactgtcactattccagttccctcagaagagcctcaagagtcagatcaaactgaagagcatgaatctggaatagaacaattcagtgagagccatgcaatacatgttgaggagcagagtgaccaaagcttttcaagcctggaaccagacaatgaacaactcatggaagaggttatatcaccaagacaagtttcatatactccgcaacatcatgaaaagcaatatgcaatgcagaggccaaatgatgatagtttggcatttctggataaaataaagtctgtaaaggaatctttgcaagaatcagtggaagattctctagcaacaggaaaaattcttaaaaataatgagactctagtacaacatggagttaagccacaggaaattgtacaagtggaaatcttttctacaaatccagatctgtatccagtcagaagaatagatggattaactgatgtctctcaaatcataactgtcactgtccaaactggacttgatcaataccagcaggtacctgttgagattgtcaaatctgactttcacaaaccatttcttggtggattcagacataaagtaacaggagtagagtatcacaatgctggaacacaaactgtacctaaaaggattcccgaaagactcagtatattttgtagggatacgcagaaaaaaaatctccaacaaactacaaatacaacatccacacagatgactaacattggtgtatatgtatcaaatatgactgataaactggtaacaccaggaaagtatttttcagcagcagaataccatgctcaaagactaaaggcggtccctcaagacccattgaaattttataagaagatttacttttgccacagttgccagctttatttgccttctacagaattttctgtatcatccacctcacgccgcatataccggtgtcgtaactgcattaaccttcagaatgaggctcaaaaacgagaatcatttttgaagtacaaatgtttacttcaacagctctactatacagaagctgattatgaagatgattctaaaattgctttcttgatgcagctacaagacattcagtacctgacagagaacatctgggcgtcccagtcagtcctcagtgcttgcgacaatctcagtgatctggtcatggtcagatggaataaatccctggagtggtccccctggaactgcattcttcttaccaaagatgaagcagctgctcatctcaagctaacaagtattgaagagggatatgaacgctcatttattcacaagatcaaacacaaacatatcctggctaagaactatttttctcaggttccagtgctggcttcatttatacttgatgatggtgaaattgatgagatcagatggaagtatcactcagacacaacacctaagattatagaatcccagaggcctcctcattaggtgatccaggagtatttgtttgatgatcggcattttgttcactgctaatagggtaatacagaggtcacagagtatggaaatggaatttaatctgtttattgattttgttttttgtttttcatagtattttgagttatataaagagaaaacatttctatataagtaagtattctttgttaggaagttggtgctaaattgaaatgcaattttgttactgaaattaatattttggggtaaagaaaacattttaaaatgtgttttcacattaaattttttaaattttttcaagtatattagagttaaaatctaacaaacagccaaataaaaactagacaactttcaagttatttattttagatagaatgtagttataggaagctaatcagtatgtggaggggaggaaacattataaagtgctctttcttgaaaacttctttaagtaggataaaaaaatttatattttagtataggcatttgaatctttgcagtttatcgtctgctttcaccttccatccttctcataatcccaataaaacaacacttgaaactatttataaataaacaaaaaa

SEQ ID NO: 465567 - DNA, 942 bp, Homo sapiens
gatgtgaagggagtggccagagaacagcagcacactgggggttgggccagtcagcagccatggtcaccatgtgtgaaggagtgcatgagagtggtgcatggctgtggtgtgcacgtgtgtgcgtgtgatgcatgtgcatttgcacgcatgtgctgtggtgtgtgtgatgtacgtgcatttgcacgcgtgtgctgtggcgtgtgtgatgtacgtgcatttgcacgcgtgtgctgtggcgtgtgatcccatcctaatgaggagcaagggatcagagggagatggtgctcagattgatgagtgtggtggaaatcagcacgagggctatgttatctcagtgaaatatgagttccacagcacgaaaggaaacgacagccaacaggatttggccagtggcagtccctgcctttggattaaagagccctttgaggcttgcttggtgatgtcatggaaaacagcatatgacaccaagatatccccatatccaacgagacttgctgggtttatccccgtatccaacgagacttgctgggtttatccccgtatccaacgagacttgctgggtttatccccgtatccaacgagacttgctgggtttatccccgtatccaacgagacttgctgggtttatccccgtatccaacgagacttgctgggtttatccccgtatccaacgagacttgctgggtttatccccgtatccaacgagacttgctgggtttatccccgtatccaacgagacttgctgggtttatccccgtatccaacgagacttgctgggtttatccccgtatccaacgagacttgctgggtttatccccgtatccaacgagacttgctgggtttatccccgtatccaatgagacttgctgggtttatccccgtatccaatgagacttgctgggtttatccccgtatccaatgagacttgctgggtttatcccc

SEQ ID NO: 465568 - DNA, 3661 bp, Homo sapiens
aggggtttggtgtagattattttgttaatgagctgttgggtacacctcccagacggggcagccggtcagaggcgcccccccacctcccagacggggcagcggccgggtgggggctgccccccacctcctggacggggcagctggccgggctggggctgccccccacctcccggacggggcggctgccaggcggaggagctcctcacttcccagactgggtggccggtcagagacgctcctcacttcccagacgggttggcggcagggcagagacactcctcagttcccagacggggtcgcggccgggcagaggcgctcttcacatctcagacggggcggcggggcagaggcgctccccacatcccagacgatgggcggccgggcagagacgctcctcacttcctagacgggatgacggccgggaagaggcgctcctcacttcccagactgggcggccgggcagaggggctcctcacatcccagaggatgggcggccaggcagagacgctcctcacttcctagacggggtggcggccgggcagaggctgcaatctcggcactttgggaggccaaggcaggcggctgggaggaggcctgcaggctctcctcctgcagctcaggcttcactctctgatgtggcgctggagtgctgctgtggcaattggggttcatggaccactgacatttagggatgtggccatagaattctctctggaggagtggcaatgcctggacactgcacaacggaatttatataggaaagtgatgtttgagaactacagaaacctggtcttcctggtgatactgagaggatatggaaaatgtggacatgagaatttacaattaagaataagttgtaaaagtgtggatgagtctaaggtgttcaaagaaggttataatgaacttaaccaatgtttgagaactacccagagcaaaatatttcaatgtgataaatacgtgaaagtctttcataaattttcaaattcaaacagtcataagaaaagaaatactggaaagaaggttttcaaatgtaaagaatgtggcaaatcattttgcatgctttcacatctaacacaacatataagaattcacactagagagaattcttacaaatgtgaggaatgtggcaaagttcttaactggttctcagagcttattaaacataagggaattcatatgggagagaaaccctacaaatgtgaggaatgtggcaaagcctttaaccaatcctcaacccttattaaacataagaaaattcatattgaagagaaacccttcaaatgtgaagaatgtggcaaagcctttagtttattctcaatccttagtaaacataagataattcatactggagacaaaccttacaaatgtgatgaatgtcacaaagcctttaactggtttgcaacccttactaaccataagagaattcatactggagagaaacccttcaaatgtgaagaatgtggcaaagactttaaccagttttcaaaccttactaaacataagaaaattcatactggagagaaaccctacaaatgtgaagaatgtggcaaagcttttaaccagtttgcaaaccttactagacataagaaaattcatactggagagaaatcctacaaatgtgaagaatgcggcaaagcttttatacagtcctcaaaccttactgaacatatgagaattcatactggagagaaaccctacaaatgtgaagaatgtggcaaagcttttaatgggtgctccagccttactcgacataagagaattcacactagagagaatacctacaaatgtgaagaatgtggcaaaggctttactttattttcaacccttactaaccataaagtaattcatactggagagaaatcctacaaatgtgatgaatgtggcaatgtttttaactggcctgcaactcttgctaatcataagagaattcatgctagagagaaaccctacaaatgtgaagaatgtggcaaagcttttaaccggtcctcacaccttactagacataagaaaattcatactggtgagaaactctacaaacctgaaaaatgtgacaataattttgataacacctaaaacttttctaaacataaaagacaccatcctgttgagaaaccctaaaaatgtgaagaatttgacaaagccttccaatgattgttacacttgcttgtaggtaagataatttatattggagaaaactttataagtgtaaagaatgtgacaaaacttaaccaatactcacatcttattgcacaggaaagcatttttacttgagaaagattgtacaagtataaagaatgtgaaaaagtcattgatatcttttcacatcttactcaacaccagagtttatacttattaaaagcattataaatgcaattactgtcaaaagaaatttcagaaaacataacactttaaagtgaagaagcatgtttattttgaagacaaacataacaaatataaggagcataggagggttgtagtacctttacttgtattacaaatcttattgtacgcattttgtactagagaaaaacactgaagcagttgctcaaactttgttcaacatcagggaatttatattggagaaaaatcctgcaaatgtaatgaatttggaaaaacattttttttcaaaaactacggcgtagaaaacatgaatttatattgaaatgtgtttttgcagatgcagtaagtatgaaaaatatttaatccaaaattgagtctatgtaaatattaaataatttacagtagaaataactaaggcactgacactttagacattacactaaaacagagtgttgagtataaaaaaatctataagttgttagattatttgtaaataactttaaaaggagtagaagattctttggagagttataattacattgaaagtatactttttttcttgaaaaaattatggcttatttgaaaagtaaataatgatgaaattcaactctcaaattactttatttcattcctattgtattcacatgtgaaagcatgtgataaattgttgctgtgtcagatataggagagattcttttttattagatgggcattatttatggttttttctgtggaagagtatgggcattaaaatgtaaggtttatgatgaaaatctaagtggagaggccctgttagtttacttttcatattgagtgatgcatgaggtaggtgtttggagtaatattctgcatcatagagaaaagcatttttaattttactttaaattaaatgtaattaaattactagtgaatcattttactaattgtacttttatgctataaatgcagtacatttgaaaatttttagattatgtataagcttaattttataattaaacatttctttaacatgttaagactattgtgcattcaatgaagcgttattatgccattaactttaacctttttcactttactcaaggagggaggggggggtgctagtttaagggtttttggaagaggtgcacatttatgtgtgtgtgtatgtgtgtgtgttgcactgatgcaaacaactatattgttggatccctgattttccgcgtttttcagctgggggtcggaggtttatttgctgttaaaaagactcttttgcttctgcatcggcagagagtcttctccagcatgggccccataagtagatttgaccaactttgaaccctct

SEQ ID NO: 465569 - DNA, 1566 bp, Homo sapiens
aaccagtgttctttaaaactatcaagtttatcaaaaacaaggacaatctgagagactgtaacagccaagaggagcctaaggcgacatgatgacaaaatgtactgggatattcagggatggggatcctagaacagaaaaagaacatacagaagagtatacaatgcacaatctcatttatataaattaccagaaaatcaaaacaagttatgctgttagaaatcgggatagtggtgacccttggtatagcaaaggtcggactacaatcgtggtagcacaccgactttctactattcgaagtgcagatttgattgtgaccctaaaggatggaatgctggcggagaaaggagcacatgctgaactaatggcaaaacgaggtctatattattcacttgtgatgtcacaggatccatacttgcgtgtgtcatggatccaccctactggatttcacataactttctcattagggcacattaatatgagtcatgggaattaggctctagctctcttctttgtcttaagttaaatgctttcacaatgtataaaaagcaaaaatggtgtgtttgtgggatgagtgtgtaaaaattttaaacaccttatttaaaatggattagtattctctggttacctaaaatgatgcccaatcagatataacaacaccgttttaaatattaatactaagtataatattctaagcatggtacagtaaatgtaacatacataatatctacacaaacacttttgaaatgtgaagatctgcacattcttatttgccaagattgactgcggtatcaaaatgtgtcaattttgataattcgtgattatcacaaatatcacagttaatgctgctaaaataatcccgagaagcaatatagcaatgtggttaagatgatgaactcttggtcactacaagttgactctaccactaatagttttagtccttggcaagttatttaaattctcagtgcatcaatttcctaacctttaacaagagggaaatggtaataacctattaataaattattgtgagtattaaacaggcaaaatcatgtgaagtacttagaattattgttagtgtaataaattttattatgttattgacattaacattattttatcaaactttttagaaaagttcaaactatggagactaatattataattatttatttagactgtccatggttatatacatgtatattgctttagtgagtttgtatgtgaaaatgaaatataaacatgtagagatatacacatatcaaaacttactgtcatcattattttgtccagcgaccttctcaagaaaagaaaatttccttgacttattaaagcaccttctcagaaaatgtattatgaagagaggtcaaagttctattttaaacttgccacaaagtgagaaactcctgggggcaggggagaaaagccaaacaaggcaggacatgacggctggttcctgtaatcccagctacttggaaggctgaggcaggaggactgcttgagctgaggagtttaacactagcttgggcaacacagtgagacctactctctaaataagtaaataaataaata

SEQ ID NO: 465570 - DNA, 1687 bp, Homo sapiens
ggatgatggtttccagcttcatctgtgtccctgcaaaggacatgaattcattctttttatggctgcacagtattccatggtgtatatgtgccgcacttcctttattcagtctatcattgatgggcatttggctttgggtgaaactttagttggggcttttgcctggaacacctacatgaggcctcctcatgtggtctgggcttccccacaacatggcgactggtttttaaagatgagcatggagagtcaggtggaagccatattgtcttttatgaccttgtctccaagctgtgtagtgtcactagccctgaattttgttcatcaagacagccacaaacgcccatccaatttcaaagtgaggaaaaaatttactctatctctggctggggattggcaaaattctgaaagactactggggaccagatatattgctgtggcaaattttggaaaaaaaaatacatcatgctgtaatgttgtactttaataaaatatttaaaattaaaagaagagaatgcaggttcccacagatactgcaagccccctcaagcttaggcagtggccctaacttagatctctcttccttctagatcaacacagctgcaatggagggttcataacggcacctgcctggttggagagaggtttaagcagatgacaaggaggaagtgcctggtgcaggataaggcctcaggaatggcccaggttgtccctgcttggagcttcagatgtggtttgaacccaggtctgcatgattctcaagtcatacttcaacaaacacaataaaactcatatcaaatgttggacagcattacttggcattattgggttgcaaaacttcaagccagttacaggattaggtttgattctagcctggaaataggcttatcacctaagtcgaggatggttatagacaagacctatgtttaaaatgaactgaagaggaaaagtaacaaaaacagactaagacccagagtcccagggaatctgaggccataattagcaaggactgatacagggtaaatactaagaaattagacatatatgttggaagtttaggtgaggaacagagtctcttggtatcctttttcctctctcctccactcacttgtagttccagtaatctgtgccttaaatctaaatgacattcataagtagaacaagtgatgccaccattatgatcaataggcatgtaccaagatcaagcttccagatcaaaaaagtataaggcctttgagactgatccttcagtagagagatttcatgtggtagagaaagtgatagttgtcttcatactcttaggcaacccctcaccatcccctacatcttcctaatttccttgcagttagacagattggcgtaagagtggttttggcaaatgggctatgagtgggagtcatgtcatcacttccaggctaatgtgtttaagagatggcacagaactgtccaagagcctcttcccttgccacatatgagaggacttcaaaatctggaaaaatggaaattaaattaaatggaattaaaagtgtaaaaatataaacttcatttctttacataagctccatcaagttcaagacacttttttttatttttccctccatattttcaaaagaagggactttagaaagcaaatataagtctctccaattttatgtttaaagtgtcatttcccaactgaactggcatttgg

SEQ ID NO: 465571 - DNA, 6821 bp, Homo sapiens
agcagtatgattcctaaaggtggcccctcctgactgcggcagagcaccctcagcctggcttctgccaccacgagaaacgtgcatgccagcagggcctctccagcctgcacgtgcctggtctctcggagtcattcagcacagcgacccttccccagtaccgaccgattttctgttttcttgtcacctcccgttcctggttttcccatgtctccctggcttctcctcttcacattccagttccactctgtctgggtggtcttataattgatttatttaccttctggaaacctttctttactcatgtcataaatgagagaaaatggactgaacagccccctctgtttccagtatcctacggttctgtgggaaaaactgtaaatatgccctccccacccccacacatacacagcttaggtaaaaacagtgcccaagtttaggaatatttgcagatattgtcctgatggtaattctgtcaatttctcgtttccagctagctgtttaacttctgacggtgattcatggatatttatgatgagctctctccggaacagcacaacctttctttatactccatggagctcgtgctgaagaaaagcactgggcacagcgctgcacaagtggccttaacagaaactgctcccggctcccagcacagcagtcctctccatgtcacagccccgccgtctgccactacttttgatacagccttttttaaccaaggaaaacagaccaaaagtacagcagatcccagcatctttgtggcaacttacgtgtcagtgacgagtaaagaggtggccgtcaatgacgatgagatggataactttctgccagatactcactggaccactccacggatggtttctccaatacagtatatcacagtcagcccaccagggctgcccagggaagcattagaacctatgctcactccatcattacccatggtttctttacaagatgaagaagtgacatcgggctggcagaacacaacgcgacaaccagcggcatatgctgagtccgccagtcatttccacacctttcggtcagcttttcgcacctctgagggcatcctcccggtctttaatgccacagccgttaggcgacggcattactataccgttgccctccttgggggaggtctcacagcctccagaggaggtttgggccacaagtgcagacagatacactgatgtgaccactgtgttgagtcaaagcctagaagaaaccatctctccaagaacataccccactgtgactgcatcgcacgcagcccttgcattcagcaggacacattctccattgctttcaactcctcttgcatttgcgtcctctgcttcaccaactgatgtttcatctaacccctttctccctagcgactccagcaaaacatccgaattgcatagcaattcagccctccccggtcctgtggacaacactcatatcctgagcccggtgtcctcattcagaccatacacttggtgtgcggcctgcactgtgccttcacctcagcaagttctggccacgagcctcatggagaaagacgtgggatcaggggatggtgccgagactctgtgcatgaccgtgctggaagaaagcagcatctctctaatgagtagcgtcgtagcagacttctctgaatttgaggaagatcctcaagtatttaatacgcttttcccctccagacctatcgtcccactttcttctagatccatggaaatctcagagacgagtgttggcatttctgccgaggtggatatgagtagtgttacaaccacacaggttccccctgcccacggccgcctctctgtgccggcgtcacttgatcctactgctggctccttgtctgttgctgaaacccaagtgacgccatccagcgtgaccactgcatttttctcggtcatcaccagcattctccttgactcatctttctctgtcatagcaaacaaaaacacaccgtcgcttgccgtcagagacccgagtgtttttacgccttatagtctggttccttcagtggagtcttcacttttctctgaccaagaacgttccagtttttctgagcataaacccagaggtgctttggattttgcatccagctttttctcaacacccccgctggaactcagcggctccatctcttcgccttcggaagcacctgcgtctctgtctctgatgccgagtgacttgtcccccttcacatctcagtctttttctcccttggttgagacatttacattgtttgactctagtgatctgcagtcatctcagctgtctcttcccagttccacaaatcttgagttttcgcagctccagccaagttccgagctgcctttaaacaccatcatgttgctacctagccgttctgaggtgtcaccatggtcaagcttcccttctgattctctcgagtttgttgaagcgtctacggtttcactgacggattcagaagctcattttacctcagctttcattgaaactacctcctatcttgagtcttcactcatttcccatgaatccgcagtcactgcactggtgccccccggctctgagtcttttgacattttgactgccgggattcaagcaacatcaccattgaccactgtccacacaacgcccattttaactgagtcttctttgttctcaactctgacacctcctgacgaccaaatcagtgctctagacggtcacgtgtctgtcctggcctctttctccaaagccattcccactggtacggtgttgatcactgacgcgtacctgccatcaggatccttgtttgtttctgaagcaacccccttccctctgcccacagagctgaccgtcgtgggcccatcactcacacccacagaggtgccactgaacacctccacggaagtgagcacaaccagcaccggtgctgccactggtggtcccctcgactccaccctgatgggtgacgccgcaagtcagagccccccagagagtagtgctgctcctcccctgccatccctgcgtcccgtgactgccttcactctcgaagcaacagtcgacacaccaacactggctactgccaagccgccatatgtttgtgatatcacagtccccgatgcctatctgatcacaactgtgctggccagaagagctgtgcaggagtacatcattacagcaatcaaagaagtactgaggattcacttcaaccgtgcagtggaactgaaggtttatgaactatttactgacttcacttttctggtaacatccggtcctttcgtttacacggcaatatccgtcataaatgtgcttataaacagtaagcttgtccgtgaccagactcctttaatcctgtctgtgaaaccttctttccttgtgccagagtccaggttccaagttcaaacagtacttcagtttgtgcctccgagtgtggatactggcttctgcaacttcacccagcgcattgagaaaggcctaatgacagctctctttgaagtgagaaaacaccaccagggaacgtataacctcacggtgcagatcttgaatatcaccatcagttcctcaagggtgactcctcggcggggcccggtgaatatcatctttgcggttaaaagcacacagggatttttgaatgggtcggaagtgagcgagctgctcagaaacttgagtgtggtggagttcagtttctatctgggatacccagtgctgcagatcgcagagcccttccagtatccacagctcaacttatctcagttgctgaagtcctcttgggtcagaacagttctcctgggcgtcatggagaagcaactccagaatgaagtgtttcaagccgagatggaacgcaagctggcccagctgctcagcgaggtttccaccagaaggcggatgtggagaagggccactgtagctgcagggaacagtgtggtgcaggtggtaaatgtgtcgaggctggagggagatgacaatccggtacagctcatctactttgtggaggatcaagatggagaaagactcagtgcagtcaagtcttcggacctgattaacaaaatggacctccagagagcagccatcatcttgggttaccgaattcaaggtgtcattgcccagcctgtcgacagggtgaagaggccgtctccggaatcccagagcaacaacttgtgggtcattgttggcgtggtcatcccagtgctggtggtgatggtgattgttgtcatcctctactggaaactatgccgcacagacaagctagactttcagcctgacactgtggccaacattcagcagcgtcagaagctgcagatccctagtgtgaagggcttcgattttgctaagcagcatctgggtcagcacaataaagacgacatattgattattcatgagccagcgccactgccaggacctctgaaggaccacaccacgccctcggaaaatggagacgtgccaagccccaagtcaaagatcccttccaagaatgttcgtcacagaggaagagtttctccctcagatgctgactctacggtcagtgaagagtccagcgagagggacgcaggagataagacgccgggagccgtcaacgatggcaggtcccacagagctccgcagagcgggccaccactgcccagttcgggaaatgagcagcactcatcagcctccatcttcgagcacgtggacaggatctcccgccccccggaggctagccggcgggtccccagtaagatccagcttatcgccatgcagccgatcccggcacctcccgtccagcgcccctccccagccgaccgagtggcggaaagcaataaaatcaacaaagagattcagaccgcgctgcggcacaagtctgagatcgagcaccatcgcaacaagatccgcctgcgcgccaagcgccgcgggcactacgagttcccggtggtagacgacctgtcctcgggcgacactaaggagcgacaccgggtgtaccgcagggcacagatgcagatcgacaagatcctggaccccacggccagcgtgccctccgtgttcatagagcccaggaagagctcacggataaaacgttctcccaagcctcgccggaaacaccaggtcaacggctgtcctgccgacgctgagaaggaccggctcatcaccacagacagcgatggcacctacaggaggccccccggcgtccacaactcagcctacatcggatgcccatcggatcctgacctcccagccgatgtgcagacaccatcctcggtggaactggggaggtatccagcccttcccttcccggcctcccagtacatcccaccccagccgtccatcgaggaggcacgccagaccatgcactccctcctggacgacgcctttgccctcgtggcccccagcagccagcctgccagcaccgcaggtgtaggccccggagtcccacccggcctgcccgcaaacagcaccccttcccaggaagagaggcgagccacccagtgggggtccttctacagcccagcccagacggccaacaatccctgcagtagatacgaagactatggaatgactcccccgacgggtccattgccaagaccaggttttggccccggtttgctgcagtctacagagctggtgccccctgaccctcagcagccacaggcctccgccgaagccccatttgctgccagagggatctactcggaggagatgccgtcggtggcccggcctcggcctgtcgggggtaccacaggctcccagatccagcacctgacacaggtggggattgccagcagaattggagctcagccagtggaaatcccgccaagcagaggcagccagtatggggggccaggctggccttcgtacggggaggacgaagcggggcgaagagaggccgtgccaaggacttcaggcagggagccctcagctccttccgggaacctcccccaccggggactgcagggccctgggctgggttaccccaccagctccacggaagacctccagcctggccactcctcggcctctctcatcaaagcaatccgcgaggagctcctccggctctcccagaaacagagcaccgtgcagaacttccacagctgatcggcctcgcctcgcagatttgccaagtatccgcttcctgtggaagcaagaccaaaaggaaatcaactgagtgggtgtttggaagaggaaggagcaactctcgggcagcctgcccaagggagggagcaagttgcaatttagaagatgccatacgtcgtgtgacagctcatgagcctttcactgggctggcaattgtctgaacacttgggttcagttgaaatatatgtattttggccaaaagccagcagcacttcacaaaaacaaaacacaaacctaagctaacaaaatgactgcattcgtctcttttttaaaggtagagattaaactgtatagacagcatagggatgaaaggaaccaagcgtttctgtgggattgagactggtacgtgtacgatgaacctgctgctttgttttctgagaagaggtttgaagacattttattaacagcttaatttttctcttttactccataggaacttattttaatagtaacattaacaacaagaatactaagactgtttgggaattttaaaaagctactagtgagaaaccaaatgataggttgtagagcctgatgactccaaacaaagccatcacccgcattcttcctccttcttctggtgctacagctccaagggcccttcaccttcatgtctgaaatggaactttggctttttcagtggaagaatatgttgaaggtttcattttgttctagaaaaaaaaaatccctcccaaagtggggcaaaaagctttatatttatttgattatccaaaatacagatcaaagtttagatctac

SEQ ID NO: 465572 - DNA, 276 bp, Homo sapiens
ttgtggcttccctaacagagggtgtggaaaccaccctttttttaagctcccggtctttaatgccacagccgttaggcgacggcattactataccgttgccctccttgggggaggtctcacagcctccagaggaggtttgggccacaagtgcagacagatacactgatgtgaccactgtgttgagtcaaagcctagaagaaaccatctctccaagaacataccccactgtgactgcatcgcacgcagcccttgcattcagcaggacacattctccat

SEQ ID NO: 465573 - DNA, 5736 bp, Homo sapiens
  misc_feature (40)..(40): n is a, c, g, or t
  misc_feature (43)..(43): n is a, c, g, or t
  misc_feature (117)..(117): n is a, c, g, or t
tgtgtcaggagacagagatgagaattccttctctctcaanagntctatctcttcttcagcacggcggaccaccaggtcagagccaattcgcagagcagggaagagtggtacctcaanacccactacccctgggtctactgccatctctccaagaacataccccactgtgactgcatcgcacgcagcccttgcattcagcaggacacattctccattgctttcaactcctcttgcatttgcgtcctctgcttcaccaactgatgtttcatctaacccctttctccctagcgactccagcaaaacatccgaattgcatagcaattcagccctccccggtcctgtggacaacactcatatcctgagcccggtgtcctcattcagaccatacacttggtgtgcggcctgcactgtgccttcacctcagcaagttctggccacgagcctcatggagaaagacgtgggatcaggggatggtgccgagactctgtgcatgaccgtgctggaagaaagcagcatctctctaatgagtagcgtcgtagcagacttctctgaatttgaggaagatcctcaagtatttaatacgcttttcccctccagacctatcgtcccactttcttctagatccatggaaatctcagagacgagtgttggcatttctgccgaggtggatatgagtagtgttacaaccacacaggttccccctgcccacggccgcctctctgtgccggcgtcacttgatcctactgctggctccttgtctgttgctgaaacccaagtgacgccatccagcgtgaccactgcatttttctcggtcatcaccagcattctccttgactcatctttctctgtcatagcaaacaaaaacacaccgtcgcttgccgtcagagacccgagtgtttttacgccttatagtctggttccttcagtggagtcttcacttttctctgaccaagaacgttccagtttttctgagcataaacccagaggtgctttggattttgcatccagctttttctcaacacccccgctggaactcagcggctccatctcttcgccttcggaagcacctgcgtctctgtctctgatgccgagtgacttgtcccccttcacatctcagtctttttctcccttggttgagacatttacattgtttgactctagtgatctgcagtcatctcagctgtctcttcccagttccacaaatcttgagttttcgcagctccagccaagttccgagctgcctttaaacaccatcatgttgctacctagccgttctgaggtgtcaccatggtcaagcttcccttctgattctctcgagtttgttgaagcgtctacggtttcactgacggattcagaagctcattttacctcagctttcattgaaactacctcctatcttgagtcttcactcatttcccatgaatccgcagtcactgcactggtgccccccggctctgagtcttttgacattttgactgccgggattcaagcaacatcaccattgaccactgtccacacaacgcccattttaactgagtcttctttgttctcaactctgacacctcctgacgaccaaatcagtgctctagacggtcacgtgtctgtcctggcctctttctccaaagccattcccactggtacggtgttgatcactgacgcgtacctgccatcaggatccttgtttgtttctgaagcaacccccttccctctgcccacagagctgaccgtcgtgggcccatcactcacacccacagaggtgccactgaacacctccacggaagtgagcacaaccagcaccggtgctgccactggtggtcccctcgactccaccctgatgggtgacgccgcaagtcagagccccccagagagtagtgctgctcctcccctgccatccctgcgtcccgtgactgccttcactctcgaagcaacagtcgacacaccaacactggctactgccaagccgccatatgtttgtgatatcacagtccccgatgcctatctgatcacaactgtgctggccagaagagctgtgcaggagtacatcattacagcaatcaaagaagtactgaggattcacttcaaccgtgcagtggaactgaaggtttatgaactatttactgacttcacttttctggtaacatccggtcctttcgtttacacggcaatatccgtcataaatgtgcttataaacagtaagcttgtccgtgaccagactcctttaatcctgtctgtgaaaccttctttccttgtgccagagtccaggttccaagttcaaacagtacttcagtttgtgcctccgagtgtggatactggcttctgcaacttcacccagcgcattgagaaaggcctaatgacagctctctttgaagtgagaaaacaccaccagggaacgtataacctcacggtgcagatcttgaatatcaccatcagttcctcaagggtgactcctcggcggggcccggtgaatatcatctttgcggttaaaagcacacagggatttttgaatgggtcggaagtgagcgagctgctcagaaacttgagtgtggtggagttcagtttctatctgggatacccagtgctgcagatcgcagagcccttccagtatccacagctcaacttatctcagttgctgaagtcctcttgggtcagaacagttctcctgggcgtcatggagaagcaactccagaatgaagtgtttcaagccgagatggaacgcaagctggcccagctgctcagcgaggtttccaccagaaggcggatgtggagaagggccactgtagctgcagggaacagtgtggtgcaggtggtaaatgtgtcgaggctggagggagatgacaatccggtacagctcatctactttgtggaggatcaagatggagaaagactcagtgcagtcaagtcttcggacctgattaacaaaatggacctccagagagcagccatcatcttgggttaccgaattcaaggtgtcattgcccagcctgtcgacagggtgaagaggccgtctccggaatcccagagcaacaacttgtgggtcattgttggcgtggtcatcccagtgctggtggtgatggtgattgttgtcatcctctactggaaactatgccgcacagacaagctagactttcagcctgacactgtggccaacattcagcagcgtcagaagctgcagatccctagtgtgaagggcttcgattttgctaagcagcatctgggtcagcacaataaagacgacatattgattattcatgagccagcgccactgccaggacctctgaaggaccacaccacgccctcggaaaatggagacgtgccaagccccaagtcaaagatcccttccaagaatgttcgtcacagaggaagagtttctccctcagatgctgactctacggtcagtgaagagtccagcgagagggacgcaggagataagacgccgggagccgtcaacgatggcaggtcccacagagctccgcagagcgggccaccactgcccagttcgggaaatgagcagcactcatcagcctccatcttcgagcacgtggacaggatctcccgccccccggaggctagccggcgggtccccagtaagatccagcttatcgccatgcagccgatcccggcacctcccgtccagcgcccctccccagccgaccgagtggcggaaagcaataaaatcaacaaagagattcagaccgcgctgcggcacaagtctgagatcgagcaccatcgcaacaagatccgcctgcgcgccaagcgccgcgggcactacgagttcccggtggtagacgacctgtcctcgggcgacactaaggagcgacaccgggtgtaccgcagggcacagatgcagatcgacaagatcctggaccccacggccagcgtgccctccgtgttcatagagcccaggaagagctcacggataaaacgttctcccaagcctcgccggaaacaccaggtcaacggctgtcctgccgacgctgagaaggaccggctcatcaccacagacagcgatggcacctacaggaggccccccggcgtccacaactcagcctacatcggatgcccatcggatcctgacctcccagccgatgtgcagacaccatcctcggtggaactggggaggtatccagcccttcccttcccggcctcccagtacatcccaccccagccgtccatcgaggaggcacgccagaccatgcactccctcctggacgacgcctttgccctcgtggcccccagcagccagcctgccagcaccgcaggtgtaggccccggagtcccacccggcctgcccgcaaacagcaccccttcccaggaagagaggcgagccacccagtgggggtccttctacagcccagcccagacggccaacaatccctgcagtagatacgaagactatggaatgactcccccgacgggtccattgccaagaccaggttttggccccggtttgctgcagtctacagagctggtgccccctgaccctcagcagccacaggcctccgccgaagccccatttgctgccagagggatctactcggaggagatgccgtcggtggcccggcctcggcctgtcgggggtaccacaggctcccagatccagcacctgacacaggtggggattgccagcagaattggagctcagccagtggaaatcccgccaagcagaggcagccagtatggggggccaggctggccttcgtacggggaggacgaagcggggcgaagagaggccgtgccaaggacttcaggcagggagccctcagctccttccgggaacctcccccaccggggactgcagggccctgggctgggttaccccaccagctccacggaagacctccagcctggccactcctcggcctctctcatcaaagcaatccgcgaggagctcctccggctctcccagaaacagagcaccgtgcagaacttccacagctgatcggcctcgcctcgcagatttgccaagtatccgcttcctgtggaagcaagaccaaaaggaaatcaactgagtgggtgtttggaagaggaaggagcaactctcgggcagcctgcccaagggagggagcaagttgcaatttagaagatgccatacgtcgtgtgacagctcatgagcctttcactgggctggcaattgtctgaacacttgggttcagttgaaatatatgtattttggccaaaagccagcagcacttcacaaaaacaaaacacaaacctaagctaacaaaatgactgcattcgtctcttttttaaaggtagagattaaactgtatagacagcatagggatgaaaggaaccaagcgtttctgtgggattgagactggtacgtgtacgatgaacctgctgctttgttttctgagaagaggtttgaagacattttattaacagcttaatttttctcttttactccataggaacttattttaatagtaacattaacaacaagaatactaagactgtttgggaattttaaaaagctactagtgagaaaccaaatgataggttgtagagcctgatgactccaaacaaagccatcacccgcattcttcctccttcttctggtgctacagctccaagggcccttcaccttcatgtctgaaatggaactttggctttttcagtggaagaatatgttgaaggtttcattttgttctagaaaaaaaaaatccctcccaaagtggggcaaaaagctttatatttatttgattatccaaaatacagatcaaagtttagatctac

SEQ ID NO: 465574 - DNA, 1863 bp, Homo sapiens
atacaccatctggggaccccctcaaagtattcacttcaactcccacaacccccgaggaatgactagtgggtttctttcccctcccctcgggtggccttgtgaggaagccaggaagtactgtgagcggcagggcctgggagagcccctgtggccgacaggaggagatcagccttcatcgcactctcagaaacggaagtgtgggcgtgtgttatgttgctgcagcaaccaaaggcaaccgagcagcaaacctcagatgactgagcccagcccattcaacgagggggagtttcaggtggcctgtgttccccagggactgggcctagctcaatcgggaaaagtcagcatccaaaagtcctcaatgacgcagaggaagccaggagaaaacagtcaatggctagtcatcactgattcacagtggaagctggaccttgaagctcccctaacaaataatgtagcaattgttgagagtcctcatggtcatgggataatgcttggcagtcaacaggggctcacattctgaaataaatgtaaattgtttgcctagactgtttaaaaacatgtttaaaatggtacttccagaccaatgatgagaatgtgtcctgaaacaggtattattactgatttaattctgtgctcctgaagtttattttaaaaatagcatattgtaaaggagataatcctagattgtgtgggtatagtgtgtgcatttctatatgtacatagcagtcataaagtaatattctgggcaccacaaatctaaaaaacgtccaagtcatggaatcatagtagagatgtcaaagggagggaaagggtgagaaaagggtgaactgaaaaaacctgatagtattatttcttcctgctcagggttaataatatagtaaaaagagatttttattacatacaactagaaaggaccaattagagtgtggaaagtgttcctttgcatagtcaaatgataggcaggggaatataatttcaccagaaattactatagcgagtttcaataaaggactgcagaacaataaggccttgttaatcccatactggtctgttcaaatagtgtgtaattcaaagcaattgctgctccctaggcaggaatttacaattgctacatgtgaagggaggataatgtgtcattccaaggggaaatcaggttctggaaagggcctcctggctgcagaactgtatgtgtccccaaacagctccacagcaggccaagttaaacaaaataagtagagaaccaccctgtgaaatgagtctgcttcgaattgatctgtatttgccttgctctctcctgcctttttggtggatgacaaaatgtccccaaaccaaggatcaagaggggaaggcagagaaactcagacctgaataagctatcacttagaaattgactgcctccaccagtgcacggtggctcacgcctgtaatcccagcactttgggaggccaatgcaggcagatcacttgagctcaggaggtagagacagcctgggcaacatggtgaaaccccatttctaaaaaaaatgcaaaaattagctgggcctgctggcacatgtctgtagtcccaactacttgaggagtgctgagacaggagaattgtttgagcccaggaggttgaggctgcagtgagccatgttcataccactgcacttcagcctgagtgacaaagtgagaccctgtcttaaaaaaaaaaaaaaaaaaaaaggcaagaaaaagaaaaagacagaaaaaagaaagtgactcctcccaccctactcccctacttggcaagggcatacaacttcattcaagtgaactgcagcctacatgtacggactgtatgtatatttaattgataatagtgatgcatacagagcaccatccc

SEQ ID NO: 465575 - DNA, 2166 bp, Homo sapiens
cgcccttcttctgcccccagctcacgtctgaatccctcggcgccccctttctcttctcctagccccttcctcacgtcccctgcctccgggtatttcctctctccaatcccccacccccgcaccgcctgattccgaggggcgggagcgcattgggctgcgcacgggtgggggcgccgcgccagcttcgcgtagctgctctgacgccgctgccgccgccgccgccgccgccgccctccgcagcccagctcgcgccccgcggcagctccgcagtgcactagccaccaccgccgccgccgccgctccgccagacctgctgccagcttgcccggtccagccctgagagagcctcgaacgccagctgcgagggtcatgagccagagagccccggggcgccgcgcggagagcaagcggagatagcgactttgcgccccccagccctcgccttcttgcatcgcgttccccgcatcctcgggtccttctgtcctttccgctgtccccaccgccgccatggccaccttgctccgcagcaagctgtccaacgtggccacgtccgtgtccaacaagtcccaggccaagatgagcggcatgttcgccaggatgggttttcaggcggccacggatgaggaggcggtgggcttcgcgcattgcgacgacctcgactttgagcaccgccagggcctgcagatggacatcctgaaagccgagggagagccctgcggggacgagggcgctgaagcgcccgtcgagggagacatccattatcagcgaggcagcggagctcctctgccgccctccggctccaaggaccaggtgggaggtggtggcgaattcgggggccacgacaagcccaaaatcacggcgtgggaggcaggctggaacgtgaccaacgccatccagggcatgttcgtgctgggcctaccctacgccatcctgcacggcggctacctggggttgtttctcatcatcttcgccgccgttgtgtgctgctacaccggcaagatcctcatcgcgtgcctgtacgaggagaatgaagacggcgaggtggtgcgcgtgcgggactcgtacgtggccatagccaacgcctgctgcgccccgcgcttcccaacgctgggcggccgagtggtgaacgtagcgcagatcatcgagctggtgatgacgtgcatcctgtacgtggtggtgagtggcaacctcatgtacaacagcttcccggggctgcccgtgtcgcagaagtcctggtccattatcgccacggccgtgctgctgccttgcgccttccttaagaacctcaaggccgtgtccaagttcagtctgctgtgcactctggcccacttcgtcatcaatatcctggtcatagcctactgtctatcgcgggcgcgcgactgggcctgggagaaggtcaagttctacatcgacgtcaagaagttccccatctccattggcatcatcgtgttcagctacacgtctcagatcttcctgccttcgctggagggcaatatgcagcagcccagcgagttccactgcatgatgaactggacgcacatcgcagcctgcgtgctcaagggcctcttcgcgctcgtcgcctacctcacctgggccgacgagaccaaggaggtcatcacggataacctgcccggctccatccgcgccgtggtcaacatctttctggtggccaaggcgctgttgtcctatcctctgccattctttgccgctgtcgaggtgctggagaagtcgctcttccaggaaggcagccgcgcctttttcccggcctgctacagcggcgacgggcgcctgaagtcctgggggctgacgctgcgctgcgcgctcgtcgtcttcacgctgctcatggccatttatgtgccgcacttcgcgctgctcatgggcctcaccggcagcctcacgggcgccggcctctgtttcttgctgcccagcctctttcacctgcgcctgctctggcgcaagctgctgtggcaccaagtcttcttcgacgtcgccatcttcgtcatcggcggcatctgcagcgtgtccggcttcgtgcactccctcgagggcctcatcgaagcctaccgaaccaacgcggaggactagggcgcaagggcgagcccccgccgcgcttctgcgctctctcccttctcccctcaccccgcccccaccagcccagtgcgccct

SEQ ID NO: 465576 - DNA, 1051 bp, Homo sapiens
  misc_feature (32)..(32): n is a, c, g, or t
  misc_feature (34)..(34): n is a, c, g, or t
  misc_feature (39)..(43): n is a, c, g, or t
tgtgttctcattgctcaactcccacttataantnagaannnnnggttcttcatcccacttctcaatggctctcagttgaccacctcatctcatactttattcacaaaattggcagtgtcagtaaaacatcctatatcatcctactcatacacattacaaagttgcctgcctcctctgcccaagtctcagagggcaagttcttcctgccctcatcaccactgggaacctactccctcctgctccctctgcaattggcttcatcaatctttttcttgttttcctttaccttcaacctcaccttcttcattgagccctcctctagtatctacagacctgctcatgttcctctcaacctaacattttatgccttgtatatttcaaaggaagctagaaatgcagatttcttgagatacctctcaattcttaactgttggcaactatttttaaaaaatattgtaaacactggtgagggaaacaaaatgaaaatttgggccaacttggtccaaaggctgtggatgagtgcccatggattccatggctgaatttgcttggttttctttgggaatctttggtttttgctgctggtggttgtttgcgggcaccaccacgccctgctaatttttcttttgtgttgtttgtagagacggggtttcaccatgttgcccaggctggtctagaagtcctgggctgaagcgatccgaccgcctcccaaagtgctgggattacaggagtgagccatctcgcccagccgaaaaagtgttttttgatcttaaaatcttacgtggaatgaaagtgaacaatgaggcaatgaaagtggaagtttctcttaagcaaacacagaagtcaaccattccagctttctaaggtactggtaatactctttcgtctattttattttatggcataattttaagactcctgtgagctatgtctttaggggaagtttgggaaggacaggcagagtgtcaatactaaattaacatcagtttaatttccgcccatggttatctgggcctcattccagcattaagactttcagaaaaaacattga

SEQ ID NO: 465577 - DNA, 1434 bp, Homo sapiens
  misc_feature (32)..(32): n is a, c, g, or t
  misc_feature (34)..(34): n is a, c, g, or t
  misc_feature (39)..(43): n is a, c, g, or t
tgtgttctcattgctcaactcccacttataantnagaannnnnggttcttcatcccacttctcaatggctctcagttgaccacctcatctcatactttattcacaaaattggcagtgtcagtaaaacatcctatatcatcctactcatacacattacaaagttgcctgcctcctctgcccaagtctcagagggcaagttcttcctgccctcatcaccactgggaacctactccctcctgctccctctgcaattggcttcatcaatctttttcttgttttcctttaccttcaacctcaccttcttcattgagccctcctctagtatctacagacctgctcatgttcctctcaacctaacattttatgccttgtatatttcaaaggaagctagaaatgcagatttcttgagatacctctcaattcttaactgttggcaactatttttaaaaaatattgtaaacactggtgagggaaacaaaatgaaaatttgggccaacttggtccaaaggctgtggatgagtgcccatggattccatggctgaatttgcttggttttctttgggaatctttggtttttgctgctggtggttgtttgcgggcaccaccacgccctgctaatttttcttttgtgttgtttgtagagacggggtttcaccatgttgcccaggctggtctagaagtcctgggctgaagcgatccgaccgcctcccaaagtgctgggattacaggagtgagccatctcgcccagccgaaaaagtgttttttgatcttaaaatcttacgtggaatgaaagtgaacaatgaggcaatgaaagtggaagtttctcttaagcaaacacagaagtcaaccattccagctttctaagacagggatctggctctgttgcccaggctggagtgcagtggtatattcatagctcactggaacatcgaactcctgggctccagtgatcctccccaaagcacagggattaaaggcaggacccacctcaccctcagatctcacccagcttaaaggatgcagttacagcagccatctcgaaccatgaggttgccgtgcacatggaaaccttttagcggggggagtggtagctcagcctgttttcccagcactcttgagaggccaaggtgggaggatcgcttgagcccaggagtttgagatcagcctgggtaacatagtgagaccctctctacaaaaaataaaaatattacctggacgtggtgacttgtgcctgtagtcccagctacttaggagggggaggtgggaggatcgcttgagccaaggaggtcaagactacagtgagctatggtcacactactgcattccagcctaggcaagaaagcaaaaccctgtcttaaaaacaagaatgaaacaaaccatttggtagatgatagaatgggaaggtactttttaaaaaactcatcttttcacatg

SEQ ID NO: 465578 - DNA, 960 bp, Homo sapiens
cgccgaaagcaagcgagggctctgaggactgccagcatgctgtcacctgtgccggatgctgtccacaagtgacatgattgtggcctgtctcgctgcctcccgtttctgcctgcatggggtagccatggtgaacaacctcctggcctccttagatttttcgcgtgcagttccctatatgaacatcttctgggaccttttcaatgccctcactttgtggtttactgccttgcttgctgctttctactgtgtgaagatctcatctttctcccaccccaccttcgcctggctgaagtggaggaactctcggttagtgcccaagctgatcaagggctccctgatcatctgtggcctggaagtcatctcatcagccactgggaacatcctgtttggtcagaggaaggtctccctgagttcctacagaaacgaaactctagtttatagagtgcaggcttcatttcagctctactttttcctttatgaagggtttgtgtggtcgattctgttcctcctgttcctagtgtccactgtcttgctcatagtctcactgtgctggcagttggggtagatgagggacctcaggcccggcccctgtgatcccagcacccaggcttacactatggctttaaagtcactcaccttttccctcatcttctgtacattgtacttcctgtccttgtttgcttctgctttgaaaatcataaactttcagaatcactggcactgggcctggtaagtgctaatctatgccaacatctgtctgcactctaccgtcctggtgctgaggagccccaaactgaaaaagggcctgaagacatggcctcagctccagtgcccacgtgctgctggctcacagggctttggaaggtgctggccatagggtggttctgctcctgagttatctgtgtcagtaaccagtcctgggatgaatgatcctggtaggaatgtataaggtttgggtac

SEQ ID NO: 465579 - DNA, 474 bp, Homo sapiens
  misc_feature (5)..(5): n is a, c, g, or t
aaacngttgctgcaaccctctcttaatttccaccgctacagctgtagctcttcttgtctcttcaaaaccaaaaagcgccgtgcctctggttcatgtgaaggaaaccgtcagcaagccttatgtaacggagagccctgctgaagactcaaactgggtgaataaggtcttcaagaagaacaagcaaaagacaagtggcaccagaaaaggcttcccaagacattcgggatccaaaaaaccaagcagcaaagtgcagcaggtggttgtctgctgcgttcctttacagaacagatgctgagcctgcctggaggtggcaatttaccaatcgatggtcttaagcaattccaaaggctggggtctgctccctgcccactcaacttccctctgctctccacttctgagacagtttgggtcacctacagacctcatcccagccggatccaggaatgctgccctgaagtgtggaattccttagga

SEQ ID NO: 465580 - DNA, 1408 bp, Homo sapiens
gctgtctgcctcatcataatccagtaaggtgttaagctgctcactaagaattccctgccctggcttgactccccatcccagctggtgttatgggcgagacctcagtgatccaacaccttggtatccaaatgagcagttgccgcatcacctatgagtatctcagagtcctcaacgtgggtgtggccgaggtgaagaaatccttcctggggcccttgtccccgtcctgtaagatggtgcagatgatgaggcagtttctgtaccgggtcctgcccgaggactcctacaaggccctatactgcagctgcttcgtcccggtgtactgtggcctcatccccccgacttaccgcggtgtgaggtacatcgatgggggcttcacgggcatgcagccctgtgccttctggaccgacgccatcaccatctccaccttcagtgggcagcaggacatctgtccccgggactgcccggccatcttccacgacttccgcatgttcaactgctccttccagttctccctggagaacatcgccaggatgacccacgcattgttccccccggacctggtgatcctgcacgattactactaccgagggtacgaggatgcagttttgtacttgaggcggctgagtaagtaccggtggggccccagctgtgcacaagccacccagctccacacctggttcatcactgcccaccccaccacctggactgtcacctctgtcacctcagcagcaggtacaaccgtctggatcaccagccagatccctacactctcaggcacccacttcacccaggccatccctggggccttcaactgtgggggcacctcaaacactgccccgaagttctctttcagccttccctgctcagccacctgtggaggaactaggccaagaacagccccaagggtccgagtcagccgctccacagatgccgcgggcctgcgtctcagtcaagtcccacgacatgactctggttctgtagctcttcttgtctcttcaaaaccaaaaagcgccgtgcctctggttcatgtgaaggaaaccgtcagcaagccttatgtaacggagagccctgctgaagactcaaactgggtgaataaggtcttcaagaagaacaagcaaaagacaagtggcaccagaaaaggcttcccaagacattcgggatccaaaaaaccaagcagcaaagtgcagcaggtggttgtctgctgcgttcctttacagaacagatgctgagcctgcctggaggtggcaatttaccaatcgatggtcttaagcaattccaaaggctggggtctgctccctgcccactcaacttccctctgctctccacttctgagacagtttgggtcacctacagacctcatcccagccggatccaggaatgctgccctgaagtgtggaattccttagga

SEQ ID NO: 465581 - DNA, 1216 bp, Homo sapiens
tgcttgtaatcccagctctttgggaggctgagggacagagggccagggaaggcccaagtcacagccagggtggccgagtcaggtccagaatttgtgattcccacacccacgttccttccgcttttccacactaccttctcttatcagttgtcaaagaaggatgggcgagttggccctcagctgggctggatcccaggtgtccagtgctgttaagtcccaagtatggtgcatttcacagcactgctgtgttcggtgtgttggcttcattcccgaccccactcaagacaaagtggcgtcgctgtcttccctggtcctcacattggaaccacatggaggggctgatattctgctggaggacatccgcaaagaaataaaggagctagctgtgagaggtggcagagggagcagcaagttcaagggccctggggtgggctgtgctagcatgtgcaaggaacagtacagagaccgtgtggctggaaccaggtgtgcaagggagagaggggaaggcaataagagatgtctcctgggctggcgagcctttgccaaggtcctggagaagactcaggatggagaggaggagccagagagacctggaaaggaactggtgggaaggagaggtgttgtccacagcagggatggagtggcaggcggctggtgctgcaaagaagccagtagggctggaaaggagaggtcgaggagaagtgggcaggggccagatctcacgggccagggcagccctggcaagaagtttgcatcttatcctgtgagccatgagcagccagggaaggtgcggcaggtgagcacaggactggcactaagagcaccctgggccaatgccacagtgttgtttgtctacagcaagctttgcatatcaaaacgacattaaaatctaaatgtctcatggcactgaacagcaacattagagtctcctcccagctgacacagtggggtgagtgctgtccacgctcatgcaggtgagctggcacccactctgccaggtatgtgagcctggcatggttacataccccataatttgagtgacacttgtcaatcaagtttggcatgggttcttctgccattactgcctctgctgatgaacagagttgcaccatcatggctgttgaaaagcaactgagtggtggttttggggcctgcaaaagtgccatgggaaccagccttccactgggtgttaaaaacgcgtgtgtcacaaccactc

SEQ ID NO: 465582 - DNA, 1998 bp, Homo sapiens
gtccttagcctcctgagcttatagtgtggtgtatgcttcccccttctggccacaaatggtcaacaatgatttttggtaatccctggtgggaggccctgcttactgctgggaagtggaccttcctagtaacagcgacgacaatgatactgttgccagagctattgatggaagtggtacaatccaataggtgcagtaaaaagccctttacatacactgtctcatttaatcctcaaagccaggggtctccaactcccggggccacagaccggagcatgaaccctactgtgaactgcgcatgcgagggatctaggctgcgcgctccttatgagaatctaacgcctgatgacctatcactgtctcccatcactcccagatgggaccgtctagttgcaggaaaacaagctcagggctcccactgattctacattatgatcaactgcatggggtcctacaggagaagaccaagagacagagacagagaccagggaaaatgaccgataccattccttctcagggatgctacacacccatggggcagaggataagaggttcctgaaggcatcacccctctggccatggctggtgtgcagacaaagctggagatttggagtagcctgttgtcccactgactcttagactgccccagctaagaagaaccaactcctcctattacagatgaaataaacaaagctactcaagctctctggcatcgccctgacggtcatcatgtgcttcacatttccctcctgccccccctgattttctggaaaagggagaaacacaccaaagagagttctagaaaaaatgagaataagaaatttacctgtaatccttgctcaagaaactgaagctctgaggccacattgttccagccttttgcagctcctgcatgtggataccagcaccagcagctccccgaccaggggccccagctaagccctcccagaggatgatcttggctttgtacatggggtgtcaatatcctgtgagtccaacagagggaagacataagaatatggtcacccaggtaagtggtggatagctgagtgactgtattcttgctcaccaccacccccatcagagggggtgtctttgtttctagttgggggaagctttggtagactgtcagtaattcctccctgtgtcccccatcctgtgtcaggtaacagacatttgtcttaatgtattcactgtgtcatcagaagccacttcttatccatccttgtgaatacttgatgaatgaggagtcaatgattaaatgaaggaaagaaaagagactgaaaaggaggtatgagaatgggaaagacgagtggaaagacgagatagatattgccctaaagacacagtaagccatcaaatatctgttttctagtccccttctgggccctcttggattttgaaaaagggaggaagaaattggaaaaattaccaataacttctattgactttgtagattcctagtttccccacatgtggctatgcttgaatcaacttgtaaaagtctctttatagtctgttgatgttcatgcaggcactaaaaggccacggtcggcctacttagatgatccactccaccctgggctccggaagatgttccagggcatttgcctttacttgaccctatgctgagaagctaccaatatttttctttccccaaattggttttatttgtaccctttatatattaaatattagagtattggccaagttgaaggagtcttcttctatggctggtttcaataaacatggtggaataaatatatatatcatatatatatagtatacgtatatatattttatatatatagtatatgtatatacattatatatatagtatatgtatatattatatatatagtatatgtatatattatatatatagtatatgtatatatattatatatatagtatatgtatatatattatatatagtatatgtatatatcttatatatagtatatgtatatatcttatatatatagtatatgtatatatata

SEQ ID NO: 465583 - DNA, 1073 bp, Homo sapiens
gtccttagcctcctgagcttatagtgtggtgtatgcttcccccttctggccacaaatggtcaacaatgatttttggtaatccctggtgggaggccctgcttactgctgggaagtggaccttcctagtaacagcgacgacaatgatactgttgccagagctattgatggaagtggtacaatccaataggtgcagtaaaaagccctttacatacactgtctcatttaatcctcaaagccaggggtctccaactcccggggccacagaccggagcatgaaccctactgtgaactgcgcatgcgagggatctaggctgcgcgctccttatgagaatctaacgcctgatgacctatcactgtctcccatcactcccagatgggaccgtctagttgcaggaaaacaagctcagggctcccactgattctacattatgatcaactgcatggggtcctacaggagaagaccaagagacagagacagagaccagggaaaatgaccgataccattccttctcagggatgctacacacccatggggcagaggataagaggttcctgaaggcatcacccctctggccatggctggtgtgcagacaaagctggagatttggagtagcctgttgtcccactgactcttagactgccccagctaagaagaaccaactcctcctattacagatgaaataaacaaagctactcaagctctctggcatcgccctgacggtcatcatgtgcttcacatttccctcctgccccccctgattttctggaaaagggagaaagtgtgtgaaaaaaaatggacaataacttctgttaactttgtagatgtctggttcctccatatgaggctgtgcttgaatcaattttggagagagggtttctaaagtctctctagattctattaattttgatagagacaataaaaggcagcaggaccaactctgtgtggtgggagatctagcaaccattatagtcacaatagccaccacttactgaacacccaccatgtgacaaagaacaatgtgctgaattatgtcacatttttcacaagcaccccttgagttgggagttcactc

SEQ ID NO: 465584 - DNA, 2063 bp, Homo sapiens
agctgctgtggagatgtttggaaagggtcaaaagagaaagtaggctgacccattaggaaatgtttgcagagttcagaagtcagtagaggacagcagtgaggacagcagtaaggacagggagagggtatggtgaagtaccatgagcttcaaaggagctgggtgtttgcaggagagacaatgaagaagagatgttcagatgtgggcttacaaagtgaagattacaccaccccacctcatggccctggagaattatgttttcttgatagcctctccaaatctgcaggttgtgaaatgtcatcaaaacctctgtggacagccctttcagaaaagaagagatacagtcatggaaatattccgaattttgaatattatgaaacaacaggaacaaagtatgttgtgcaaggagtgacgcattttaaggaatggcattgcctttcccagaaagtgaagagaggaaattggaaaattgtgagtggaccttctgatactgctcctccttgcgtggaaaaggggaaagaactgcatgcatattattcagcgtcctatattcaaagtgaaacttttttacctaatggcataaatggtatcaaagatgcaaggaaggtcactgtaggtgtgattggaagtggagattttgccaaatccttgaccattcgacttattagatgcggctatcatgtggtcataggaagtagaaatcctaagtttgcttctgaattttttcctcatgtggtagatgtcactcatcatgaagatgctctcacaaaaacaaatataatatttgttgctatacacagagaacattatacctccctgtgggacctgagacatctgcttgtgggtaaaatcctgattgatgtgagcaataacatgaggataaaccagtacccagaatccaatgctgaatatttggcttcattattcccagattctttgattgtcaaaggatttaatgttgtctcagcttgggcacttcagttaggacctaaggatgccagccggcaggtttatatatgcagcaacaatattcaagcgcgacaacaggttattgaacttgcccgccagttgaatttcattcccattgacttgggatccttatcatcagccagagagattgaaaatttacccctacgactctttactctctggagagggccagtgtatacctcgcaggtcttctggcagctgcttatcaactttattacggcaccaagtataggagatttccaccttggttggaaacctggttacagtgtagaaaacagcttggattactaagttttttcttcgctatggtccatgttgcctacagcctctgcttaccgatgagaaggtcagagagatatttgtttctcaacatggcttatcagcagaatttccctaaagctaacctactaaaaactatgactagatttcatatgtgctataaacattctttatttaaaataaattactctaattcagaaaggaataacatttgcttgcacatttagaacatctggcattagagactataaaattcatatatagtctcaaatacttattagacatattcttaattcaagaatatataattattcatatgattagaaataattataattttactaaacattgctaattaggcagagtacaaacaagaaaaagtcagaaggaaaatagaaccacaatttgcaatatatttattttaaaacatttttagctttctttgttacttttaaaagtaaaacttgtaagtcaatatattattaaaactactagttaatctttaagtctacaggtgctactaagaaattgcaatttgtaacttaacagagatattaaattctgtagaattgttaccacattcaagcatttctattctgtaggtataactcatttcccatgtttctctgctatttatctttttgctgaaataatttactccttcagtagtcatttcaccctttcacccttctgtgtttttgtgtcataacagaagaatcactaaataatgattaaaattaagtcaacataccaaatataaagttaaagcttttatgaagcttaatctttgtgcactt

SEQ ID NO: 465585 - DNA, 1189 bp, Homo sapiens
tatagacgaaaattcaacaagtatttattcctcaaggtcatcacaggtgatggtccgtaagtggagcatgcgattgctaccatttttataaacaacaatggtaatgctgagtctttttgttttttccacaggtttatatatgcagcaacaatattcaagcgcgacaacaggttattgaacttgcccgccagttgaatttcattcccattgacttgggatccttatcatcagccagagagattgaaaatttacccctacgactctttactctctggagagggccagtgtatacctcgcaggtcttctggcagctgcttatcaactttattacggcaccaagtataggagatttccaccttggttggaaacctggttacagtgtagaaaacagcttggattactaagttttttcttcgctatggtccatgttgcctacagcctctgcttaccgatgagaaggtcagagagatatttgtttctcaacatggcttatcagcagaatttccctaaagctaacctactaaaaactatgactagatttcatatgtgctataaacattctttatttaaaataaattactctaattcagaaaggaataacatttgcttgcacatttagaacatctggcattagagactataaaattcatatatagtctcaaatacttattagacatattcttaattcaagaatatataattattcatatgattagaaataattataattttactaaacattgctaattaggcagagtacaaacaagaaaaagtcagaaggaaaatagaaccacaatttgcaatatatttattttaaaacatttttagctttctttgttacttttaaaagtaaaacttgtaagtcaatatattattaaaactactagttaatctttaagtctacaggtgctactaagaaattgcaatttgtaacttaacagagatattaaattctgtagaattgttaccacattcaagcatttctattctgtaggtataactcatttcccatgtttctctgctatttatctttttgctgaaataatttactccttcagtagtcatttcaccctttcacccttctgtgtttttgtgtcataacagaagaatcactaaataatgattaaaattaagtcaacataccaaatataaagttaaagcttttatgaagcttaatctttgtgcactt

SEQ ID NO: 465586 - DNA, 1142 bp, Homo sapiens
agctgctgtggagatgtttggaaagggtcaaaagagaaagtaggctgacccattaggaaatgtttgcagagttcagaagtcagtagaggacagcagtgaggacagcagtaaggacagggagagggtatggtgaagtaccatgagcttcaaaggagctgggtgtttgcaggagagacaatgaagaagagatgttcagatgtgggcttacaaagtgaagattacaccaccccacctcatggccctggagaattatgttttcttgatagcctctccaaatctgcaggttgtgaaatgtcatcaaaacctctgtggacagccctttcagaaaagaagagatacagtcatggaaatattccgaattttgaatattatgaaacaacaggaacaaagtatgttgtgcaaggagtgacgcattttaaggaatggcattgcctttcccagaaagtgaagagaggaaattggaaaattgtgagtggaccttctgatactgctcctccttgcgtggaaaaggggaaagaactgcatgcatattattcagcgtcctatattcaaagtgaaacttttttacctaatggcataaatggtatcaaagatgcaaggaaggtcactgtaggtgtgattggaagtggagattttgccaaatccttgaccattcgacttattagatgcggctatcatgtggtcataggaagtagaaatcctaagtttgcttctgaattttttcctcatgtggtagatgtcactcatcatgaagatgctctcacaaaaacaaatataatatttgttgctatacacagagaacattatacctccctgtgggacctgagacatctgcttgtgggtaaaatcctgattgatgtgagcaataacatgaggataaaccagtacccagaatccaatgctgaatatttggcttcattattcccagattctttgattgtcaaaggatttaatgttgtctcagcttgggcacttcagttaggacctaaggatgccagccggcaggtttatatatgcagcaacaatattcaagcgcgacaacaggttattgaacttgcccgccagttgaatttcattcccattgacttgggatccttatcatcagagagctgcaggggatactctagaatcaactatcaccc

SEQ ID NO: 465587 - DNA, 2684 bp, Homo sapiens
gaagcaggtagcccagggagcccaagggggcaacgatggatctggatgggaaccacatgaccagctttttgttagagaaatttcaagaagtcatccacagtagagagcagggcaccgagaacccacaggaagtaaaagaagtacttttaccttttacagactaccggctgctgtgtcccagtcactcattaaatcctatggaggaggcactattaggtccttctgaagctgcaggctccccaccctgtgagagctttcgtgtgccaagtcattggctacaggtggcaaagttgtggctccagttcaagtctctcccctggagctggatgttccagaaaggacactcagttcttcagggctgtctctgtgatccaggctttgatctgggaaaggttgcgcctcattgcagagttgaagctatctgcctgctttgtttacacgaacgcccttccaggactctgtctgcttttggggtggaagtgccctgccaaaaactccagctctccatgctggctgtgtggccagcatacctcctgccttttcaacgattcctctgccctggatagagagcggtgtctcataacagtttggaaactacaaaagtttccctggcaggatgaatgattgactcggcaacatgttcttgccttttggagttgccctccaatttttccaggcttgattctgtaaatcatttcatcttgtaaaaatactgggctgtgagcacggatgatctcaaaggtgaggattatttgaaactccatttgaaaatctatcctcctttcaacagattattcttgtgaataaaaattttcttgtgagcatgccagtacacaggtagttctagggcctttgagaggaagtagaatacgcttctgctccaagaggctttggaaaaagtaacttgtctatatattgacaactaatttatcatcgaaaacattaggcctgctctctgcaagtgctcctgggaggtgttggggaatgaagtggggaaaattcggaaatgttttgaaagatatgtcaaacccataaacctgaaaatgtcattcagaatattctgttgctttctgccatcccaaggagatggaaatctgtggttttcaagataggttaaggttatgtaactcacagagttggaagaacattttgggcaatgatttgaattattgcttgttgtagtttttgctcatttttccctttttccaacaatgagagagaatcggttgaaggcaggctgtgacagagaaggtccaacaaccataagttgatggatgatatcagagaggaagcttctttgacatctctgctcttctttaacttgctgaccaaagagtagcccatgtgcaattgccatatgcttttgaaatgaacattcatgaatattagaaattatcttgctggtttttggagtgaaggcaaatgtgcctacttttcagccatacttaggagacctaactcattttttagagtatctacaatttagtgtgatccaatgagttaaaaaaaatgtacccaaatattcggtttaaaattttgttttagatatgaaatcctttcatcaagctataccctagaaaggtaatttcataaagtatatttgtaatgttataatgattaaaactgatcacaacgtgatataaatggattagctaggggagagaaaagaagacctgaaaatcttctatatgtttgtgaagcattaaaaaaaatgacattccatttaactctcacaaaattttttcttttttgcagatgaggaaacagaagctgggatattaaaactagtactaatgcagaagtctgaaattagactttaaaaacgagtactactctttttttccccctttttgagagagctggtgattttcttccttgcttggcattaactgtcttactgtcttatgatacttatctttaatgtggcatatcagagaacctctttgaaaatgttacggcttaatgcggctcagggaaataaaagcccactttaaaaaagccaaaataaagctttctgatacggacttcacaattaatttttgagaaggtccactttcatatgcaagcaaatctgtttagaaatgttttaaattttaaagcatgcatacacatataaaactaatttatgtgtttttaaatgctgtttaaaattttaaagcatatatagagagcaagagagcaagagagggtgctcaatatgcatcataatagcatgagaactgaaaaataaaagtttacttgcaaacttaaccggctttgcaatgcaacagactaaacaagtcacattttatacaatgtatatgtttataatatgagtgcagcatgccaatgtgctatttagatcattgtcctggttgaatgaacaagctcacaggttcaccatttaatatttgttctcttaaaaacatgaaactcgttttgaaaataccggcttaaatgggcattattaagtctttatcagttctaagcatttcagccttttgcatccagaaatttctcaatctgacagaataagaaatgcatttacatggcctaagctcttaaattgtccctttcaattaatgccccatcatggagcaatctggaaaccattactcagtaactcttcattataattgcttgcagctgagtatccagcccttggtaatataagaataaaagaaaactcagttagtaacaagtgc

SEQ ID NO: 465588 - DNA, 1806 bp, Homo sapiens
agtgcgcatggataaccacatgtatatactggaggaggccgctcttctaacttcttactcccgttgcaattccagatattccagagacaggatatctccaaggcactccagggccccaaataacaaaccttatttgttttccacctcacacaatctgaactcttctgcctgccctttgaaacccttcgcgaacacctccaaccttatttcttgctcctcctcaatacagcctgttctggttggcacagcctcacctcttacctttgccacgatgctactcctgctgcgtcactcagttctgcatgcgtcagcctccctcgggcctcggcagcggcggcggctcgctcgcctcagccccagcgcccctcggctaccctcggaccaggcccgcagcgccgcccgccctcggccgccccgacgccggcctgggccgcggtcgcagccccgggctcgcgtaggcgccgaacgctcccggcccgcccactacgggcccaggctagaggcgccgccgccaccggcccgcggagcccggatgctggcccggaggaagccgatgctgccggcgctcaccatcaaccctaccatcgccgagggcccgtccccaaccagcgagggcgcctccgaggcaaacctggtggacctgcagaagaagctggaggagctggaacttgacgagcagcagaagcggctggaagcctttctcacccagaaagccaaggtcggcgaactcaaagacgatgacttcgaaaggacctcagagctggacgcgggcaacggcggggtggtcaccaaagtccagcacagaccctcgggcctcatcatggccaggaagctgatccaccttgagatcaagccggccatccggaaccagatcatccgcgagcaccaggtcctgcacgagtgcaactcaccgtacatcgtgggcttctacggggccttctactgtgacagggagatcagcatctgcatggagcacatggatggcggctccctggaccaggggctgaaagaggccaagaggattcccgaggacatcctggggaaagtcagcattgcggttctccggggcttggcgtacctccgagagaagcaccagatcatgcaccgaaatgtgaagccctccaacatcctcgtgaactctagaggggagatcaagctgtgtgacttcggggtgagcggccagctcatcgactccatggccaactccttcgtgggcacgcgctcctacatggctccggagcggttgcagggcacacattactcggtgcagtcggtcatctggagcatggacctgtccctggtggagctggccatcgaaaggtaccccatccccccgcccgacgccaaggagctggaggccatctttggccagcccgtggtcgacagggaagaaggagagcctcacagcatctcctcttggccagggtcccccgggcgccccaacagcggttacgggatggacagcctgcccgccatggccatcttcgaactgctggactatattgtgaaagagccgcctcctaagctgcccaacggtgtgttcacccccgacttccaggagtttgtcaataaatgcctcatcaaaaacccaacggagcgggcggacctaaagatgctcacaaaccacgccttcatcaagcggtccgaggcttgccttctctcaaaccatcaggcaaaacataccctgatgaacacatcaaattcagcatcaaagtggacgcttacaactttaatgctcactacgaattaacctcaaaatagctacgtaaataaaattagcaggattatcagagaattgttcaaata

SEQ ID NO: 465589 - DNA, 2012 bp, Homo sapiens
agtgcgcatggataaccacatgtatatactggaggaggccgctcttctaacttcttactcccgttgcaattccagatattccagagacaggatatctccaaggcactccagggccccaaataacaaaccttatttgttttccacctcacacaatctgaactcttctgcctgccctttgaaacccttcgcgaacacctccaaccttatttcttgctcctcctcaatacagcctgttctggttggcacagcctcacctcttacctttgccacgatgctactcctgctgcgtcactcagttctgcatgcgtcagcctccctcgggcctcggcagcggcggcggctcgctcgcctcagccccagcgcccctcggctaccctcggaccaggcccgcagcgccgcccgccctcggccgccccgacgccggcctgggccgcggtcgcagccccgggctcgcgtaggcgccgaacgctcccggcccgcccactacgggcccaggctagaggcgccgccgccaccggcccgcggagcccggatgctggcccggaggaagccgatgctgccggcgctcaccatcaaccctaccatcgccgagggcccgtccccaaccagcgagggcgcctccgaggcaaacctggtggacctgcagaagaagctggaggagctggaacttgacgagcagcagaagcggctggaagcctttctcacccagaaagccaaggtcggcgaactcaaagacgatgacttcgaaaggacctcagagctggacgcgggcaacggcggggtggtcaccaaagtccagcacagaccctcgggcctcatcatggccaggaagctgatccaccttgagatcaagccggccatccggaaccagatcatccgcgagcaccaggtcctgcacgagtgcaactcaccgtacatcgtgggcttctacggggccttctactgtgacagggagatcagcatctgcatggagcacatggatggcggctccctggaccaggggctgaaagaggccaagaggattcccgaggacatcctggggaaagtcagcattgcggttctccggggcttggcgtacctccgagagaagcaccagatcatgcaccgaaatgtgaagccctccaacatcctcgtgaactctagaggggagatcaagctgtgtgacttcggggtgagcggccagctcatcgactccatggccaactccttcgtgggcacgcgctcctacatggctccggagcggttgcagggcacacattactcggtgcagtcggtcatctggagcatggacctgtccctggtggagctggccatcgaaaggtaccccatccccccgcccgacgccaaggagctggaggccatctttggccagcccgtggtcgacagggaagaaggagagcctcacagcatctcctcttggccagggtcccccgggcgccccaacagcggttacgggatggacagcctgcccgccatggccatcttcgaactgctggactatattgtgaaagagccgcctcctaagctgcccaacggtgtgttcacccccgacttccaggagtttgtcaataaatgcctcatcaaaaacccaacggagcgggcggacctaaagatgctcacaaaccacgccttcatcaagcggtccgaggtgaaagaagcggattttgcctgctagttgtgtaaaaccctggggctgaaccagcccggcacacccacgcgcaccgccgtgtaacagtggccaggctccccgcgtcccgctggtgacctgcccaccgtccctgtccacgccccgcccttccagctgaggacaggctggcgcctccacccaccctcctgcctcacccctgcggagagcaccgtggcggggcgacaactgcgcacgcaggaacgggggtctcctctcctgctggtccctgccggcgtgcctctagggacgggcgacgctgctgtgtgtggtctcagagcctctgcttccttaggttacaaaacaaaacagggagagaaaaaccaaa

SEQ ID NO: 465590 - DNA, 1672 bp, Homo sapiens
gtacaggagcggtggggagacagaccgaatcccataaagtgtgacctcctgccactgccacagccagggcagagtgcccttcggggctacacagctccccccaccaccccaatcattacaggagaaagcaaattggtggaagaagagggagagaaagaggcagtgctggcccacggggatggcagctgggggtgaatccgggcgaccctccctccatccaaccgtcggcgctcgcagggcgttgagagtgcttcacacaaacggagagaaatgtgccttcagaagctcccctaccgagtgggcctgtcttagggaggaattacttcctacagctaatccagagttcccgccccctgcaacaaaacccacagcagcttctcctccggtaaagccgggatctgagcagacagtcactcctgtgggcagcgctggctggaaaggacactggagcaggccgcgcctgggccttggagacacgcacaggaccctggaggaggccacacctgggcctcgggaacgcgcacaggaccccggaggaggccacacctgggcctcgggaacaggcaccagcagaggcaggactggaaaggacaggagaggctgggcccacatttaatctctgttccctctccctccacagtggtgcctttatttctagaagcaacgaaggaaacacagtagactcagagccagaagaggaagaggaggccagctcccactgctgcagcactcagctggggtcagcggggctgtagtgatggtagtgatggtaggtagtgatgggtagtgatagtaggtagggatggtagtgatagtagtgatggtaggtagtgatgatggtagtgatggtaggtagggatggtagtgatggtagtgatggtaggtggggatggtagtgatggtaggtagtgatgatggtagtgatagtaggtagtaatggtagtgatggtaggtagtgatgatggtagtgatagtaggtagtaatagtagtgatggtaggttgtgatggtagtgatggtaggtagtgatgggtagtgatggtaggtagggatggtagtgatagtagtgatggtaggtagtgatgatggtagtgatggtaggtagtcatggtagtgttggtaggtagtgatggtagtgatggtaggtagggatggtagtgatggtacgtagtgatggtaggtagggatggtagtgatggtaggtagggatggtagtgatggtagtgatggtaggtagggatggtagtgatggtaggtagtgatgatggtagtgatggtaggtagggatggtagtgatggtaggtagggatggtagggatggtagtgatggtaggtagtgatgatggtagtgatggtaggtagtgatggtagtgatggtaggtagtgatggtagtgatggtaggtagggatggtagtgatggtaggtagtgatgatggtagcgatggtagggatggtagtgatagtagtgagggtaggtagtgatgatggtagtgatggtaggtagggatgatggtagcgatggtaggtagtgatggttgtgatagtagtgatggtaggtagtgatgggtagtgatggtaggtagtgatagtaagtagcggtggtagcatggggatgctgccgtgaagcagaggaggcttcacaattctgattgtgaaggcttcagaactctga

SEQ ID NO: 465591 - DNA, 3949 bp, Homo sapiens
tgtgcattgtttacgaatgcacacatgttagttaatgcataaagacctggttccagttgggcttcatcgctagtaaccaggacgcctgcctatagtttcttctttttttttccttttcaattcatccccagttctcgccacctcgtaggtattcaattaatacatgtttaagtggacctgtccaggaaggggagttctcaactctaagctcctgcatttcttttgggacttctcatggttacaaagagcattcattcatactgtgactgagggtaaacaagtcgctgcccactcggcctcagtttcctcctaaatgacccgtctggccacttccagccccagcagggtctgattctaggaattcggtcctttcatgtcgaaaacaacactcgggcatttcacaaaagcacccaaccccctggctccccttggaagcacagcccgcgtccctggaacccgggctgcactgagctggtcacatgaactccgggctttctctggtgtgacgggtttcttagatccctttgtgagcgcaggttttgaaagggaacgaccccgggttctgggtgtgagaggcgcaggggatcggcgggaggaaggctgtcggagccaatcaagccgcctccagaccccggcacgtcgcctgggctgcgcgctccgactgcgcctccgcccgcgcgcctcccggcctcgcccgagggtgcctgggcaggcgaggaccccaggttcagcagctggacatggagaaccaacgctcatcacctctgtcgttccccagtgttccacaagaagaaaccttacgtcaggcccctgctggactcccccgagaaactctgttccaatcccgcgttcttcctcccaaagaaattccttctttgtctcccaccattccccgtcaaggctccctgccccaaacttccagtgctcccaagcaagagacttctggctggatgccacatgtgctccagaagggaccctcactcctgtgttctgccgcttctgagcaagagacttctctccagggccccctggcttcccaggaagggacccagtatccacccccagctgctgctgaacaagaagtctcccttctctcccactccccccaccaccaggaagcccccgttcactcccctgaagctcctgagaaagaccccctgaccctttccccaacagttcccgagactgacatggacccgctgctccagagcccggtttcccaaaaggacacccctttccagatctcttctgcagtccagaaggaacagccgctccccacggcagagatcacccgcttggctgtgtgggctgccgtccaagcagtggagaggaagctggaggcccaggccatgaggctactgaccctggaaggcaggacggggacaaatgaaaagaagatagccgactgcgagaagacagccgtggagttcgcgaaccatctggagagcaagtgggtcgtgttggggaccctgctgcaggagtatgggctgctgcagaggcggctggagaacatggagaacctgctgaaaaacagaaatttctggatcctgcggctgccccccggcagcaatggagaagttcccaaggtccctgtcacatttgatgatgttgctgtgcacttctcggagcaggagtggggaaacctgtctgagtggcagaaggagctctacaagaacgtgatgaggggcaactacgagtccctggtttccatggactatgcaatttccaaaccagacctcatgtcacagatggagcgcggggagcggcccaccatgcaggagcaggaagactctgaggagggcgaaacgccgacagatcccagtgctgcgcacgatgggatcgtgattaagatcgaggtacagaccaacgacgagggctcagaaagtttggagacacctgagcccctgatgggacaggtggaagagcacggcttccaggactcagagctgggtgacccctgtggggaacagccagacctggacatgcaggagccagagaacacgctggaggagtccacggaaggctccagcgagttcagcgaactgaagcagatgctggtgcagcagaggaactgcacggaggggatcgtgatcaagacagaggaacaagacgaggaggaagaagaggaggaggaggatgagctgccgcagcacttgcaatcccttgggcagctgtccgggagatatgaggccagtatgtaccagaccccgctgcccggggagatgtcccccgagggcgaggagagccccccgcccctgcagctaggaaaccccgcagtgaaaaggctggcgccctccgtgcacggtgagcggcacctgagcgagaaccgcggggcctcgagccagcagcagcggaaccggcgcggcgagcggcccttcacatgcatggagtgcggcaagagcttccgcctgaagatcaacctcatcatccaccagcgcaaccacatcaaggaggggccctacgagtgcgccgaatgcgagatcagcttccggcacaagcaacagctcacgctgcaccagcgcatccaccgcgtgcgcggaggctgcgtctcacccgaacgcgggcccacgttcaaccccaagcacgcgctcaagccgcgtcccaagtcacccagctctggtagcggcggcggtggccctaagccctacaagtgccccgagtgcgacagcagcttcagccacaagtccagcctgaccaaacaccagatcacgcacacgggtgagcggccctacacgtgccccgagtgcaagaagagcttccgcctgcacatcagcttggtgatccatcagcgcgtgcacgcgggcaagcatgaggtctccttcatctgcagcctgtgcggcaagagcttcagccgcccctcgcacctgctgcgccaccagcggactcacacaggcgagcggcccttcaagtgccccgagtgcgagaagagcttcagcgagaagtccaagctcaccaaccactgccgcgtgcactcgcgcgagcggccgcacgcctgccccgagtgcggcaagagcttcatccgcaagcaccacctcctggaacaccggcgcatccacacaggcgagcggccctaccactgcgccgagtgcggcaagcgcttcacgcagaagcatcacctgctggagcaccagcgcgcgcacacgggcgagcggccctacccctgcacgcactgcgccaagtgcttccgctacaagcagtcgctcaagtaccacctgcggacccacacgggcgagtgagcgcgcgccccgccgccgccgcccggccaggtgcgcgggccgtgccccccctcggacaccgccaggcccgagcccagcgggcgggggcggggcgccccccagcccctttgccgtgagctccccctctcctctcgtccctcctcccaaggacatgggggcagtgagaccaggtcccttgctgccgcgtttccccgggggccccaggggggagggcgcggacctggggaaccctttcgggctgttaatttccttgacaataaaatggatgaaaccaatcagcacggggggcgtgatttggccgccggccactcagaggggcggtgtagggcccatctagttggggatagaactttataattaccttttggatactgtggttctatttgataataatagagtaatttttaaaagaagagcgtttcctgtttgccgtttttgtttggtttgaaggggagggattgagaaggccggagggacatacgctagtgtcagttgacaggttctgttgggacccttttttgtgttccttctccatttgggtggtgagggagacgctgatcccgccggttctgaaatggaggaggagaggcaggactgacgtctaagggaccacgggaaccccagaccatcgcgtctgccctggagtccatgaggttgctgggagctcaggactgaataggtcccagttgactagcgtggtcaaggagagtgac

SEQ ID NO: 465592 - DNA, 4312 bp, Homo sapiens
tgtgcattgtttacgaatgcacacatgttagttaatgcataaagacctggttccagttgggcttcatcgctagtaaccaggacgcctgcctatagtttcttctttttttttccttttcaattcatccccagttctcgccacctcgtaggtattcaattaatacatgtttaagtggacctgtccaggaaggggagttctcaactctaagctcctgcatttcttttgggacttctcatggttacaaagagcattcattcatactgtgactgagggtaaacaagtcgctgcccactcggcctcagtttcctcctaaatgacccgtctggccacttccagccccagcagggtctgattctaggaattcggtcctttcatgtcgaaaacaacactcgggcatttcacaaaagcacccaaccccctggctccccttggaagcacagcccgcgtccctggaacccgggctgcactgagctggtcacatgaactccgggctttctctggtgtgacgggtttcttagatccctttgtgagcgcaggttttgaaagggaacgaccccgggttctgggtgtgagaggcgcaggggatcggcgggaggaaggctgtcggagccaatcaagccgcctccagaccccggcacgtcgcctgggctgcgcgctccgactgcgcctccgcccgcgcgcctcccggcctcgcccgagggtgcctgggcaggcgaggaccccaggtgagaggccggagggtcctggagggtgggaggccccggcggttcggcccgggctccacgacgggctggcccgggctcagggcgtgtccgtcgccgccgggcggctcgctcgacactgttcgctcctaccggctgtagatggagctgtctgggttccggcagcctccgacgagcctcggagtgtttctctttaaacggcctgagagggacatgcctcccaggatgcagtttgtagcaacatggcagctgctgtgcagctccccggctcctgtgagggcggcccgcgcgcgcacggacgcgcggcctcggggccccggggacggcctgcgtgtcccgggctcggcggcccggcctgggatctcggttcagcagctggacatggagaaccaacgctcatcacctctgtcgttccccagtgttccacaagaagaaaccttacgtcaggcccctgctggactcccccgagaaactctgttccaatcccgcgttcttcctcccaaagaaattccttctttgtctcccaccattccccgtcaaggctccctgccccaaacttccagtgctcccaagcaagagacttctggctggatgccacatgtgctccagaagggaccctcactcctgtgttctgccgcttctgagcaagagacttctctccagggccccctggcttcccaggaagggacccagtatccacccccagctgctgctgaacaagaagtctcccttctctcccactccccccaccaccaggaagcccccgttcactcccctgaagctcctgagaaagaccccctgaccctttccccaacagttcccgagactgacatggacccgctgctccagagcccggtttcccaaaaggacacccctttccagatctcttctgcagtccagaaggaacagccgctccccacggcagagatcacccgcttggctgtgtgggctgccgtccaagcagtggagaggaagctggaggcccaggccatgaggctactgaccctggaaggcaggacggggacaaatgaaaagaagatagccgactgcgagaagacagccgtggagttcgcgaaccatctggagagcaagtgggtcgtgttggggaccctgctgcaggagtatgggctgctgcagaggcggctggagaacatggagaacctgctgaaaaacagaaatttctggatcctgcggctgccccccggcagcaatggagaagttcccaaggtccctgtcacatttgatgatgttgctgtgcacttctcggagcaggagtggggaaacctgtctgagtggcagaaggagctctacaagaacgtgatgaggggcaactacgagtccctggtttccatggactatgcaatttccaaaccagacctcatgtcacagatggagcgcggggagcggcccaccatgcaggagcaggaagactctgaggagggcgaaacgccgacagatcccagtgctgcgcacgatgggatcgtgattaagatcgaggtacagaccaacgacgagggctcagaaagtttggagacacctgagcccctgatgggacaggtggaagagcacggcttccaggactcagagctgggtgacccctgtggggaacagccagacctggacatgcaggagccagagaacacgctggaggagtccacggaaggctccagcgagttcagcgaactgaagcagatgctggtgcagcagaggaactgcacggaggggatcgtgatcaagacagaggaacaagacgaggaggaagaagaggaggaggaggatgagctgccgcagcacttgcaatcccttgggcagctgtccgggagatatgaggccagtatgtaccagaccccgctgcccggggagatgtcccccgagggcgaggagagccccccgcccctgcagctaggaaaccccgcagtgaaaaggctggcgccctccgtgcacggtgagcggcacctgagcgagaaccgcggggcctcgagccagcagcagcggaaccggcgcggcgagcggcccttcacatgcatggagtgcggcaagagcttccgcctgaagatcaacctcatcatccaccagcgcaaccacatcaaggaggggccctacgagtgcgccgaatgcgagatcagcttccggcacaagcaacagctcacgctgcaccagcgcatccaccgcgtgcgcggaggctgcgtctcacccgaacgcgggcccacgttcaaccccaagcacgcgctcaagccgcgtcccaagtcacccagctctggtagcggcggcggtggccctaagccctacaagtgccccgagtgcgacagcagcttcagccacaagtccagcctgaccaaacaccagatcacgcacacgggtgagcggccctacacgtgccccgagtgcaagaagagcttccgcctgcacatcagcttggtgatccatcagcgcgtgcacgcgggcaagcatgaggtctccttcatctgcagcctgtgcggcaagagcttcagccgcccctcgcacctgctgcgccaccagcggactcacacaggcgagcggcccttcaagtgccccgagtgcgagaagagcttcagcgagaagtccaagctcaccaaccactgccgcgtgcactcgcgcgagcggccgcacgcctgccccgagtgcggcaagagcttcatccgcaagcaccacctcctggaacaccggcgcatccacacaggcgagcggccctaccactgcgccgagtgcggcaagcgcttcacgcagaagcatcacctgctggagcaccagcgcgcgcacacgggcgagcggccctacccctgcacgcactgcgccaagtgcttccgctacaagcagtcgctcaagtaccacctgcggacccacacgggcgagtgagcgcgcgccccgccgccgccgcccggccaggtgcgcgggccgtgccccccctcggacaccgccaggcccgagcccagcgggcgggggcggggcgccccccagcccctttgccgtgagctccccctctcctctcgtccctcctcccaaggacatgggggcagtgagaccaggtcccttgctgccgcgtttccccgggggccccaggggggagggcgcggacctggggaaccctttcgggctgttaatttccttgacaataaaatggatgaaaccaatcagcacggggggcgtgatttggccgccggccactcagaggggcggtgtagggcccatctagttggggatagaactttataattaccttttggatactgtggttctatttgataataatagagtaatttttaaaagaagagcgtttcctgtttgccgtttttgtttggtttgaaggggagggattgagaaggccggagggacatacgctagtgtcagttgacaggttctgttgggacccttttttgtgttccttctccatttgggtggtgagggagacgctgatcccgccggttctgaaatggaggaggagaggcaggactgacgtctaagggaccacgggaaccccagaccatcgcgtctgccctggagtccatgaggttgctgggagctcaggactgaataggtcccagttgactagcgtggtcaaggagagtgac

SEQ ID NO: 465593 - DNA, 3968 bp, Homo sapiens
tgtgcattgtttacgaatgcacacatgttagttaatgcataaagacctggttccagttgggcttcatcgctagtaaccaggacgcctgcctatagtttcttctttttttttccttttcaattcatccccagttctcgccacctcgtaggtattcaattaatacatgtttaagtggacctgtccaggaaggggagttctcaactctaagctcctgcatttcttttgggacttctcatggttacaaagagcattcattcatactgtgactgagggtaaacaagtcgctgcccactcggcctcagtttcctcctaaatgacccgtctggccacttccagccccagcagggtctgattctaggaattcggtcctttcatgtcgaaaacaacactcgggcatttcacaaaagcacccaaccccctggctccccttggaagcacagcccgcgtccctggaacccgggctgcactgagctggtcacatgaactccgggctttctctggtgtgacgggtttcttagatccctttgtgagcgcaggttttgaaagggaacgaccccgggttctgggtgtgagaggcgcaggggatcggcgggaggaaggctgtcggagccaatcaagccgcctccagaccccggcacgtcgcctgggctgcgcgctccgactgcgcctccgcccgcgcgcctcccggcctcgcccgagggtgcctgggcaggcgaggaccccaggtgagaggccggagggtcctggagggtgggaggccccggcggttcggcccgggctccacgacgggctggcccgggctcagggcgtgtccgtcgccgccgggcggctcgctcgacactgttcgctcctaccggctgtagatggagctgtctgggttccggcagcctccgacgagcctcggagtgtttctctttaaacggcctgagagggacatgcctcccaggatgcagtttgtagcaacatggcagctgctgtgcagctccccggctcctgtgagggcggcccgcgcgcgcacggacgcgcggcctcggggccccggggacggcctgcgtgtcccgggctcggcggcccggcctgggatctcggttcagcagctggacatggagaaccaacgctcatcacctctgtcgttccccagtgttccacaagaagaaaccttacgtcaggcccctgctggactcccccgagaaactctgttccaatcccgcgttcttcctcccaaagaaattccttctttgtctcccaccattccccgtcaaggctccctgccccaaacttccagtgctcccaagcaagagacttctggctggatgccacatgtgctccagaagggaccctcactcctgtgttctgccgcttctgagcaagagacttctctccagggccccctggcttcccaggaagggacccagtatccacccccagctgctgctgaacaagaagtctcccttctctcccactccccccaccaccaggaagcccccgttcactcccctgaagctcctgagaaagaccccctgaccctttccccaacagttcccgagactgacatggacccgctgctccagagcccggtttcccaaaaggacacccctttccagatctcttctgcagtccagaaggaacagccgctccccacggcagagatcacccgcttggctgtgtgggctgccgtccaagcagtggagaggaagctggaggcccaggccatgaggctactgaccctggaaggcaggacggggacaaatgaaaagaagatagccgactgcgagaagacagccgtggagttcgcgaaccatctggagagcaagtgggtcgtgttggggaccctgctgcaggagtatgggctgctgcagaggcggctggagaacatggagaacctgctgaaaaacagaaatttctggatcctgcggctgccccccggcagcaatggagaagttcccaaggtccctgtcacatttgatgatgttgctgtgcacttctcggagcaggagtggggaaacctgtctgagtggcagaaggagctctacaagaacgtgatgaggggcaactacgagtccctggtttccatggactatgcaatttccaaaccagacctcatgtcacagatggagcgcggggagcggcccaccatgcaggagcaggaagactctgaggagggcgaaacgccgacagatcccagtgctgcgcacgatgggatcgtgattaagatcgaggtacagaccaacgacgagggctcagaaagtttggagacacctgagcccctgatgggacaggtggaagagcacggcttccaggactcagagctgggtgacccctgtggggaacagccagacctggacatgcaggagccagagaacacgctggaggagtccacggaaggctccagcgagttcagcgaactgaagcagatgctggtgcagcagaggaactgcacggaggggatcgtgatcaagacagaggaacaagacgaggaggaagaagaggaggaggaggatgagctgccgcagcacttgcaatcccttgggcagctgtccgggagatatgaggccagtatgtaccagaccccgctgcccggggagatgtcccccgagggcgaggagagccccccgcccctgcagcagaggaactgcacggaggggatcgtgatcaagacagaggaacaagtgccccgagtgcgacagcagcttcagccacaagtccagcctgaccaaacaccagatcacgcacacgggtgagcggccctacacgtgccccgagtgcaagaagagcttccgcctgcacatcagcttggtgatccatcagcgcgtgcacgcgggcaagcatgaggtctccttcatctgcagcctgtgcggcaagagcttcagccgcccctcgcacctgctgcgccaccagcggactcacacaggcgagcggcccttcaagtgccccgagtgcgagaagagcttcagcgagaagtccaagctcaccaaccactgccgcgtgcactcgcgcgagcggccgcacgcctgccccgagtgcggcaagagcttcatccgcaagcaccacctcctggaacaccggcgcatccacacaggcgagcggccctaccactgcgccgagtgcggcaagcgcttcacgcagaagcatcacctgctggagcaccagcgcgcgcacacgggcgagcggccctacccctgcacgcactgcgccaagtgcttccgctacaagcagtcgctcaagtaccacctgcggacccacacgggcgagtgagcgcgcgccccgccgccgccgcccggccaggtgcgcgggccgtgccccccctcggacaccgccaggcccgagcccagcgggcgggggcggggcgccccccagcccctttgccgtgagctccccctctcctctcgtccctcctcccaaggacatgggggcagtgagaccaggtcccttgctgccgcgtttccccgggggccccaggggggagggcgcggacctggggaaccctttcgggctgttaatttccttgacaataaaatggatgaaaccaatcagcacggggggcgtgatttggccgccggccactcagaggggcggtgtagggcccatctagttggggatagaactttataattaccttttggatactgtggttctatttgataataatagagtaatttttaaaagaagagcgtttcctgtttgccgtttttgtttggtttgaaggggagggattgagaaggccggagggacatacgctagtgtcagttgacaggttctgttgggacccttttttgtgttccttctccatttgggtggtgagggagacgctgatcccgccggttctgaaatggaggaggagaggcaggactgacgtctaagggaccacgggaaccccagaccatcgcgtctgccctggagtccatgaggttgctgggagctcaggactgaataggtcccagttgactagcgtggtcaaggagagtgac

SEQ ID NO: 465594 - DNA, 1065 bp, Homo sapiens
tgtgcattgtttacgaatgcacacatgttagttaatgcataaagacctggttccagttgggcttcatcgctagtaaccaggacgcctgcctatagtttcttctttttttttccttttcaattcatccccagttctcgccacctcgtaggtattcaattaatacatgtttaagtggacctgtccaggaaggggagttctcaactctaagctcctgcatttcttttgggacttctcatggttacaaagagcattcattcatactgtgactgagggtaaacaagtcgctgcccactcggcctcagtttcctcctaaatgacccgtctggccacttccagccccagcagggtctgattctaggaattcggtcctttcatgtcgaaaacaacactcgggcatttcacaaaagcacccaaccccctggctccccttggaagcacagcccgcgtccctggaacccgggctgcactgagctggtcacatgaactccgggctttctctggtgtgacgggtttcttagatccctttgtgagcgcaggttttgaaagggaacgaccccgggttctgggtgtgagaggcgcaggggatcggcgggaggaaggctgtcggagccaatcaagccgcctccagaccccggcacgtcgcctgggctgcgcgctccgactgcgcctccgcccgcgcgcctcccggcctcgcccgagggtgcctgggcaggcgaggaccccaggtgagaggccggagggtcctggagggtgggaggccccggcggttcggcccgggctccacgacgggctggcccgggctcagggcgtgtccgtcgccgccgggcggctcgctcgacactgttcgctcctaccggctgtagatggagctgtctgggttccggcagcctccgacgagcctcggagtgtttctctttaaacggcctgagagggacatgcctcccaggatgcagtttgtagcaacatggcagctgctgtgcagctcccctgctaaagaggcgccgggacggcagcgcagctcgcagccggggccggggccggagctggggtcccagccgcggccgc

SEQ ID NO: 465595 - DNA, 1505 bp, Homo sapiens
tcgaactaggcaggactgaagtgagggggagggaagacctagacatggccaggaagcctctgtcaactgcatttggtgctcggacaagtgaatttcgcagaggtgatctctacccacctgtcaggactttgcatgtgggggcagaggcatcaacccagcaagacacccagctctggtagcggcggcggtggccctaagccctacaagtgccccgagtgcgacagcagcttcagccacaagtccagcctgaccaaacaccagatcacgcacacgggtgagcggccctacacgtgccccgagtgcaagaagagcttccgcctgcacatcagcttggtgatccatcagcgcgtgcacgcgggcaagcatgaggtctccttcatctgcagcctgtgcggcaagagcttcagccgcccctcgcacctgctgcgccaccagcggactcacacaggcgagcggcccttcaagtgccccgagtgcgagaagagcttcagcgagaagtccaagctcaccaaccactgccgcgtgcactcgcgcgagcggccgcacgcctgccccgagtgcggcaagagcttcatccgcaagcaccacctcctggaacaccggcgcatccacacaggcgagcggccctaccactgcgccgagtgcggcaagcgcttcacgcagaagcatcacctgctggagcaccagcgcgcgcacacgggcgagcggccctacccctgcacgcactgcgccaagtgcttccgctacaagcagtcgctcaagtaccacctgcggacccacacgggcgagtgagcgcgcgccccgccgccgccgcccggccaggtgcgcgggccgtgccccccctcggacaccgccaggcccgagcccagcgggcgggggcggggcgccccccagcccctttgccgtgagctccccctctcctctcgtccctcctcccaaggacatgggggcagtgagaccaggtcccttgctgccgcgtttccccgggggccccaggggggagggcgcggacctggggaaccctttcgggctgttaatttccttgacaataaaatggatgaaaccaatcagcacggggggcgtgatttggccgccggccactcagaggggcggtgtagggcccatctagttggggatagaactttataattaccttttggatactgtggttctatttgataataatagagtaatttttaaaagaagagcgtttcctgtttgccgtttttgtttggtttgaaggggagggattgagaaggccggagggacatacgctagtgtcagttgacaggttctgttgggacccttttttgtgttccttctccatttgggtggtgagggagacgctgatcccgccggttctgaaatggaggaggagaggcaggactgacgtctaagggaccacgggaaccccagaccatcgcgtctgccctggagtccatgaggttgctgggagctcaggactgaataggtcccagttgactagcgtggtcaaggagagtgac

SEQ ID NO: 465596 - DNA, 3635 bp, Homo sapiens
tgtgcattgtttacgaatgcacacatgttagttaatgcataaagacctggttccagttgggcttcatcgctagtaaccaggacgcctgcctatagtttcttctttttttttccttttcaattcatccccagttctcgccacctcgtaggtattcaattaatacatgtttaagtggacctgtccaggaaggggagttctcaactctaagctcctgcatttcttttgggacttctcatggttacaaagagcattcattcatactgtgactgagggtaaacaagtcgctgcccactcggcctcagtttcctcctaaatgacccgtctggccacttccagccccagcagggtctgattctaggaattcggtcctttcatgtcgaaaacaacactcgggcatttcacaaaagcacccaaccccctggctccccttggaagcacagcccgcgtccctggaacccgggctgcactgagctggtcacatgaactccgggctttctctggtgtgacgggtttcttagatccctttgtgagcgcaggttttgaaagggaacgaccccgggttctgggtgtgagaggcgcaggggatcggcgggaggaaggctgtcggagccaatcaagccgcctccagaccccggcacgtcgcctgggctgcgcgctccgactgcgcctccgcccgcgcgcctcccggcctcgcccgagggtgcctgggcaggcgaggaccccaggtgagaggccggagggtcctggagggtgggaggccccggcggttcggcccgggctccacgacgggctggcccgggctcagggcgtgtccgtcgccgccgggcggctcgctcgacactgttcgctcctaccggctgtagatggagctgtctgggttccggcagcctccgacgagcctcggagtgtttctctttaaacggcctgagagggacatgcctcccaggatgcagtttgtagcaacatggcagctgctgtgcagctccccggctcctgtgagggcggcccgcgcgcgcacggacgcgcggcctcggggccccggggacggcctgcgtgtcccgggctcggcggcccggcctgggatctcggttcagcagctggacatggagaaccaacgctcatcacctctgtcgttccccagtgttccacaagaagaaaccttacgtcaggcccctgctggactcccccgagaaactctgttccaatcccgcgttcttcctcccaaagaaattccttctttgtctcccaccattccccgtcaaggctccctgccccaaacttccagtgctcccaagcaagagacttctggctggatgccacatgtgctccagaagggaccctcactcctgtgttctgccgcttctgagcaagagacttctctccagggccccctggcttcccaggaagggacccagtatccacccccagctgctgctgaacaagaagtctcccttctctcccactccccccaccaccaggaagcccccgttcactcccctgaagctcctgagaaagaccccctgaccctttccccaacagttcccgagactgacatggacccgctgctccagagcccggtttcccaaaaggacacccctttccagatctcttctgcagtccagaaggaacagccgctccccacggcagagatcacccgcttggctgtgtgggctgccgtccaagcagtggagaggaagctggaggcccaggccatgaggctactgaccctggaaggcaggacggggacaaatgaaaagaagatagccgactgcgagaagacagccgtggagttcgcgaaccatctggagagcaagtgggtcgtgttggggaccctgctgcaggagtatgggctgctgcagaggcggctggagaacatggagaacctgctgaaaaacagaaatttctggatcctgcggctgccccccggcagcaatggagaagttcccaaggtccctgtcacatttgatgatgttgctgtgcacttctcggagcaggagtggggaaacctgtctgagtggcagaaggagctctacaagaacgtgatgaggggcaactacgagtccctggtttccatggactatgcaatttccaaaccagacctcatgtcacagatggagcgcggggagcggcccaccatgcaggagcaggaagactctgaggagggcgaaacgccgacagatcccagtgctgcgcacgatgggatcgtgattaagatcgaggtacagaccaacgacgagggctcagaaagtttggagacacctgagcccctgatgggacaggtggaagagcacggcttccagctctggtagcggcggcggtggccctaagccctacaagtgccccgagtgcgacagcagcttcagccacaagtccagcctgaccaaacaccagatcacgcacacgggtgagcggccctacacgtgccccgagtgcaagaagagcttccgcctgcacatcagcttggtgatccatcagcgcgtgcacgcgggcaagcatgaggtctccttcatctgcagcctgtgcggcaagagcttcagccgcccctcgcacctgctgcgccaccagcggactcacacaggcgagcggcccttcaagtgccccgagtgcgagaagagcttcagcgagaagtccaagctcaccaaccactgccgcgtgcactcgcgcgagcggccgcacgcctgccccgagtgcggcaagagcttcatccgcaagcaccacctcctggaacaccggcgcatccacacaggcgagcggccctaccactgcgccgagtgcggcaagcgcttcacgcagaagcatcacctgctggagcaccagcgcgcgcacacgggcgagcggccctacccctgcacgcactgcgccaagtgcttccgctacaagcagtcgctcaagtaccacctgcggacccacacgggcgagtgagcgcgcgccccgccgccgccgcccggccaggtgcgcgggccgtgccccccctcggacaccgccaggcccgagcccagcgggcgggggcggggcgccccccagcccctttgccgtgagctccccctctcctctcgtccctcctcccaaggacatgggggcagtgagaccaggtcccttgctgccgcgtttccccgggggccccaggggggagggcgcggacctggggaaccctttcgggctgttaatttccttgacaataaaatggatgaaaccaatcagcacggggggcgtgatttggccgccggccactcagaggggcggtgtagggcccatctagttggggatagaactttataattaccttttggatactgtggttctatttgataataatagagtaatttttaaaagaagagcgtttcctgtttgccgtttttgtttggtttgaaggggagggattgagaaggccggagggacatacgctagtgtcagttgacaggttctgttgggacccttttttgtgttccttctccatttgggtggtgagggagacgctgatcccgccggttctgaaatggaggaggagaggcaggactgacgtctaagggaccacgggaaccccagaccatcgcgtctgccctggagtccatgaggttgctgggagctcaggactgaataggtcccagttgactagcgtggtcaaggagagtgac

SEQ ID NO: 465597 - DNA, 2263 bp, Homo sapiens
tgtgcattgtttacgaatgcacacatgttagttaatgcataaagacctggttccagttgggcttcatcgctagtaaccaggacgcctgcctatagtttcttctttttttttccttttcaattcatccccagttctcgccacctcgtaggtattcaattaatacatgtttaagtggacctgtccaggaaggggagttctcaactctaagctcctgcatttcttttgggacttctcatggttacaaagagcattcattcatactgtgactgagggtaaacaagtcgctgcccactcggcctcagtttcctcctaaatgacccgtctggccacttccagccccagcagggtctgattctaggaattcggtcctttcatgtcgaaaacaacactcgggcatttcacaaaagcacccaaccccctggctccccttggaagcacagcccgcgtccctggaacccgggctgcactgagctggtcacatgaactccgggctttctctggtgtgacgggtttcttagatccctttgtgagcgcaggttttgaaagggaacgaccccgggttctgggtgtgagaggcgcaggggatcggcgggaggaaggctgtcggagccaatcaagccgcctccagaccccggcacgtcgcctgggctgcgcgctccgactgcgcctccgcccgcgcgcctcccggcctcgcccgagggtgcctgggcaggcgaggaccccaggtgagaggccggagggtcctggagggtgggaggccccggcggttcggcccgggctccacgacgggctggcccgggctcagggcgtgtccgtcgccgccgggcggctcgctcgacactgttcgctcctaccggctgtagatggagctgtctgggttccggcagcctccgacgagcctcggagtgtttctctttaaacggcctgagagggacatgcctcccaggatgcagtttgtagcaacatggcagctgctgtgcagctccccggctcctgtgagggcggcccgcgcgcgcacggacgcgcggcctcggggccccggggacggcctgcgtgtcccgggctcggcggcccggcctgggatctcggttcagcagctggacatggagaaccaacgctcatcacctctgtcgttccccagtgttccacaagaagaaaccttacgtcaggcccctgctggactcccccgagaaactctgttccaatcccgcgttcttcctcccaaagaaattccttctttgtctcccaccattccccgtcaaggctccctgccccaaacttccagtgctcccaagcaagagacttctggctggatgccacatgtgctccagaagggaccctcactcctgtgttctgccgcttctgagcaagagacttctctccagggccccctggcttcccaggaagggacccagtatccacccccagctgctgctgaacaagaagtctcccttctctcccactccccccaccaccaggaagcccccgttcactcccctgaagctcctgagaaagaccccctgaccctttccccaacagttcccgagactgacatggacccgctgctccagagcccggtttcccaaaaggacacccctttccagatctcttctgcagtccagaaggaacagccgctccccacggcagagatcacccgcttggctgtgtgggctgccgtccaagcagtggagaggaagctggaggcccaggccatgaggctactgaccctggaaggcaggacggggacaaatgaaaagaagatagccgactgcgagaagacagccgtggagttcgcgaaccatctggagagcaagtgggtcgtgttggggaccctgctgcaggagtatgggctgctgcagaggcggctggagaacatggagaacctgctgaaaaacagaaatttctggatcctgcggctgccccccggcagcaatggagaagttcccaaggtccctgtcacatttgatgatgttgctgtgcacttctcggagcaggagtggggaaacctgtctgagtggcagaaggagctctacaagaacgtgatgaggggcaactacgagtccctggtttccatgggtaaggagaagccttcgctcgctggggctgcctggacgccagctcaaagtgcattcataaacttagggagttctgaaccccagcagagccaatagttgcaagcaaggagaacagagttgtagagatcacaacaaattaaagcaaacgccctcatatacccacacacatcagtgcggcccaggccaga

SEQ ID NO: 465598 - DNA, 557 bp, Homo sapiens
gggcgccggggttcgctctgagtcgcgtggcaggccgcgctgcgtccaccgctgccgagttcagagccgcgcaccgcccgccgccgcaggtcgggttcccagcgctactcccaagacaccgctcagccatgaagatgcatttctgtatcccggtgtcccagcagcggtccgacgcgctggggggccgctacgtgctgtactccgtgcacctggacgggttcctcttctgcagggtgcgctacagccagctgcacggttggaacgaacagctaaggcgggtctttggaaattgcctgccacccttcccaccaaagtactatctggcaatgaccacagctatggctgatgagaggagggaccaactggaacaatatttgcaaaatgcagccccagctgaaggcgaggaccctgcccttccttccttcttccgagggagtgagaattgcactgagcatcgaaacctggaggacgtgccagacaggaggaggaaaggaagtaaggggcagtgggccaccaattcctctcatcctgaccaatggcaaagagtcgggtgacct

SEQ ID NO: 465599 - DNA, 1200 bp, Homo sapiens
ggaagaagtgtattcagcattctaccttcttcctgattctgtgagcttagacctgcttccactttcaatctctctcattgcaggctgaagaggactggcctttcagtggccctcgtggaacggtaggaagctgagctggactctctgccacatcgttcggttcccacaacagcctgatgaagcagcagcagaaaaaatggaagccattttggttaacgggtcacatcttagcagttggcagcgtaagaagcggaaggatccactggtcagaaatggagattgaggagaagctgagagcacggagggcttcaggggagagcctgtcctttggaaaagcgggcaatttgcactcgtggtagatgagtggggaggccgctcagtctctctgcccctttgcacatgctgcacccgtttagtttgacgtcgtggagagctcctccaggcacgggctgtgtgaaagggtttaaaagtttgggggcatggctgggggtccccgcatgaggggtgctgtgtaggctcccatcttttctgccggtcatgctgggagccaacagcaccggctcctgacgtggggacttgccctgtgccatgacgtggggactcgccctgtgccctgcgccccggttcctgctggttctgtgccttctggactcatttcctttccagggtccgcaaccgcttccgacacaatcactattttggctgcggccacggcttcattcgcttcagctgcgagcttttctcagcgcagagagcacagggaagctgggaggagtccgcctagatgggtaaggacggtatttttggcagcagttccggggaccctcccctgatcagcctgcacttccgccctgggttgaggggagcatttccagcgagggggcgaagaggagacgggatggaagagagagaagaggacgcccctgcttccaggggcaagtgggtacaaccagaggacgggacaatgttcccctggagaatggcccaggctccatctagacctggctggtcccagtcccaggcttgtcctaggtccttggcatccgtgctggtagcaaccccagggccaccctcagcgtctcatgacgtctacccttctctggcccctgtagaaattatgttcaagagaaaacacccggggggtcacaatgataacaataacaccaccacctgtgccccgtgggtgtgaggctgtcatgg

SEQ ID NO: 465600 - DNA, 1841 bp, Homo sapiens
atattggtcaaggggtatgaagtttcagttatgctaagtgaacatgctttggaaacctaaggggcagggaggaggccagggaccaaggcactcaagtggggactgcaggaggggtcagaatgcaagcagcactgacggccttcttcgtgttgctctttagcctgctgagtcttctggggattgcagcgaatggcttcattgtgctggtgctgggcagggagtggctgcgatatggcaggttgctgcccttggatatgatcctcattagcttgggtgcctcccgcttctgcctgcagttggttgggacggtgcacaacttctactactctgcccagaaggtcgagtactctgggggtctcggccgacagttcttccatctacactggcacttcctgaactcagccaccttctggttttgcagctggctcagtgtcctgttctgtgtgaagattgctaacatcacacactccaccttcctgtggctgaagtggaggttcccagggtgggtgccctggctcctgttgggctcttgaaatttaaattttacgtattttatttttcatctttacaagtcttgtttagtttcttctgtttctaggcctgtgtttgttgaccaatctgttccaggttatgaatcttattttcctgattttttaaggtctagtaattttttactgaatgttgtaaattagaaatcttaagttatttaatacttggttttgttgttttctattgaagcattttagactttttctgacagttacttgtaaattagtttgatgcttttgatttttttaaaagcaaatttaggtcttacagggtttcacactactcacatacggattggtgtttagccaaggactcaaagactgatttctggaaccattttcctgtgtagcttatttttccctctaatctccgcatccttcactgagcaagatttccaggtactagattctgaggtctgagactaaagtcattccatcatgagttccaaactggacttgagaggggaagaatcatttcctttgagattgaccaataccaggagtttcactaaagaaggcaatgaaagacccacagccttggacataattgatttcctgtgatatctgtgtgggcccaggcatgctgctcacctgggtctttcccctctttcactcctttggaactgccccaccactaaccactttcctactctctccttccccaccccagtatctccttgcctcaagagtttcctgttactagcaataatttagttcactcccagggaactactatttctggttctcagttactaacctttccattcagttctttccattccatttttaccagaattaacgtttcctcatctttcccagtgaatgtaaaaggtaccttctgggaagcattttaccggaactgatgactgctatgcttgacagcagcttcaacagcctcggatacaactcatcatgaattagctctggcatgactgagttagaatactgttctgtttcctatctctacatgtaggaaaaatttaaagtggcatttctatgctttggtcttttctcataaatgacttaggggaaaacacttaatgaggatgagtaactaaaattcaatgaatactaaaagctttataagaatcatctaattgaaactttacataatttccttattatgtattaacattgaacgggcattatgcattccatttctagaaaagaagtctttccttaataaattacaagtgcaaacatgaagtccaggacaatttttacttcaagatcaacttgtctatatgctaggataatgaatttgaatactctttactgatgttccctgaagac

SEQ ID NO: 465601 - DNA, 2331 bp, Homo sapiens
agccaacatcctggacccccgaggctctcggatgatagagtggagacacttgaagccgttctgctgcggcatcaccaacatgagcttccccttgtccgaccagcctgtgttgggagaatggttcatttttgttgaaatgcaaggccacgcgtacaacaagtcttttgaagttcagaagtatgtgttgcccaagttcgagcttctgattgacccgccccggtatatccaagacctggacgcctgtgagacaggcactgtgcgggccaggtatacctttgggaaacctgtggctggtgccttaacgatcaacatgactgttaatggtgtagggtactacagccacgaggtgggacgccccgtcctcagaacatccaagatcctcggctcccgggacttcgacatctgcgtgagggacatgatcccagcggacgtccctgagcacttccggggcagggtcagcatctgggccatggtgaccagtgtggacgggagccagcaggtcgcgttcgatgactccacccccgtgcagaggcagctggtggacatccggtactccaaggacacgaggaagcagttcaagccgggcctggcctacgtggggaaggtggagctatcctaccccgatggcagcccagctgagtgggtgacggtccagattaaggcagagctgacaccaaaggataacatctacaccagtgaagttgtgtcccagggtggactagtggggtttgaaatcccttccatccccacgtcagcccagcacgtgtggctggagaccaaggtgatggcactgaacgggaagcccgtgggggctcagtacctgcccagctacctctcccttggcagctggtactcccccagccagtgctacctgcagctgcagccactctcccacccactgcaggttggggaagaagcctatttttctgataagtacacatgtccctgcaactttaccctgtactacgaggtggctgcacggggcaatattgtgctatcaggccagcagcctgcccacatcacccagcagcgaagcaagcgggcggcccctgccctggagaaaccgattcgtttaacacacctttctgagacagagcccccaccagccccagaagctgaggtcgacgtgtgtgtgacctctcttcgtctggccgtgaccccaagcatggtcccccttggtcgcctgctggtcttctatgtcagggagaatggagaaggggtcgccgacagccttcagtttgcagtcgagaccttcttcgaaaaccaggtttcagtgacgtattcagcaaatgagacccaacctggggaggttgtcgacctgcggatcagggctgcaaggggcagctgtgtgtgcgtcgccgcagttgataagagtgtctacctgctcaggtctgggttccggctgactcctgcccaggttttccaggaactggaagattatgatgtttctgattcctttggagtgtccagggaggatggtcctttttggtgggctgggctgacggcacaacgacgccggcgctcctccgtcttcctgtggccttggggcatcaccaaagactctgggtttgccttcaccgtaaggagaggtggtctcagatcccgctgcccccttctaaggtcctcttgcctagaaataagagtcttggagattcagaaatgggttggaaacagaattggaagcttttctttctttttttcgaaatggggtcttgctctgtggcccaggctggagtgcagtggtgtcccagaacagggccaagcattaaggagcttcaataaatatttcttgagtgaaataaaggactttacccacataaagaaggtgttgccctggggactggctgagagaaattacagactgttactcacttcaaaagaaacggactgctacagtggtacttacgtcaccagaaagaaacacttccacaaagaatttgatttgatggcatcatgtggacatagaactctcatagtaatgacccaacctgtgtttccagtcatcctgatgaactctcaacaaaatcagattgttatactgttgttctcactttacaccgatattttctcttgctcctaaaaaaagtatctggtattaaatagaattctgtatcttaaaaaacttgccattgagaaaaatgagaagtaactgtacattttaatactgaaggttttaataaaaaaagcagtgtgaactatctgttccatttttattcctcgtctacaaaagacaaaagtgtcagtattgagacaattgcttgataacagggatcacaaatattgctcttcctgaaatttttgcaaacttgaggtttactttctttaagattt

SEQ ID NO: 465602 - DNA, 559 bp, Homo sapiens
caactctggtcctcttggatattttagataaggactttacccacataaagaaggtgttgccctggggactggctgagagaaattacagactgttactcacttcaaaagaaacggactgctacagtggtacttacgtcaccagaaagaaacacttccacaaagaatttgatttgatggcatcatgtggacatagaactctcatagtaatgacccaacctgtgtttccagtcatcctgatgaactctcaacaaaatcagattgttatactgttgttctcactttacaccgatattttctcttgctcctaaaaaaagtatctggtattaaatagaattctgtatcttaaaaaacttgccattgagaaaaatgagaagtaactgtacattttaatactgaaggttttaataaaaaaagcagtgtgaactatctgttccatttttattcctcgtctacaaaagacaaaagtgtcagtattgagacaattgcttgataacagggatcacaaatattgctcttcctgaaatttttgcaaacttgaggtttactttctttaagattt

SEQ ID NO: 465603 - DNA, 1015 bp, Homo sapiens
  misc_feature (995)..(995): n is a, c, g, or t
  misc_feature (1000)..(1001): n is a, c, g, or t
  misc_feature (1003)..(1004): n is a, c, g, or t
  misc_feature (1011)..(1011): n is a, c, g, or t
  misc_feature (1013)..(1013): n is a, c, g, or t
tctctctctttcccccatgttttgggctgcaaaacacccaaaagccaaacacagtgggccacatccctggctaagttccaaggaagtgacagcagccttccaggagatctctggaaaattggtgcccccagggagggtgaaatcaaagaggccctggaggattggctgtatcttaggttccttggttgttctcccagcaaatgccagtacctctgcagataatcatccacagagtaaaacaacaggccagaagctcctggaagcaaccaattctccagttcttgaacatcacaatggctgtccaacaattcaattcaattatgacatgctttgcttggagttggcatcagatccctcacgtttaagggctcagctccacaagactacccccttcacatgccagcagcaaatatggggcccaagttacccacatttctgcccagctgactacaaattctggtttccatgaccccctctcaggtgaccagtccgcatcctgatactatctcggagtcccccagccaagaatcatctcatcagcataaactcaggcaatgttgaaaggcattcagaatggtactggccatgtaacatcctcaggaaaatggagaaaggagtcacatcatcttctgtgtttggagactgctatgtaagccagaatactagtcacacagtgcaggtgggagcggccgggaagtaacctcctttttttttaagactaatacatttatggtatacacctgaatttgtgttgcggaaatctgatacccattgcacacattctgtatcatgtttaaaataatttcaacttttattttagattcaaggggtacacttgcagttttgttacacgggtttattgcgtgatgctgaggtttggggtacaattgatcgcatcaccttccaggtgtcagcatgtaaaagggaagatccaaatgaccaatcaggagattactgggggaccacaaagttggggctcaggtcagctgaccagntgagnncnngttcacnangg

SEQ ID NO: 465604 - DNA, 1136 bp, Homo sapiens
  misc_feature (1116)..(1116): n is a, c, g, or t
  misc_feature (1121)..(1122): n is a, c, g, or t
  misc_feature (1124)..(1125): n is a, c, g, or t
  misc_feature (1132)..(1132): n is a, c, g, or t
  misc_feature (1134)..(1134): n is a, c, g, or t
tctctctctttcccccatgttttgggctgcaaaacacccaaaagccaaacacagtgggccacatccctggctaagttccaaggaagtgacagcagccttccaggagatctctggaaaattggtgcccccagggagggtgaaatcaaagaggccctggaggattggctgtatcttaggttccttggttgttctcccagcaaatgccagtacctctgcagataatcatccacagagtaaaacaacaggccagaagctcctggaagcaaccaattctccagttcttgaacatcacaatggctgtccaacaattcaattcaattatgacatgctttgcttggagttggcatcagatccctcacgtttaagggctcagctccacaagactacccccttcacatgccagcagcaaatatggggcccaagttacccacatttctgcccagctgactacaaattctggtttccatgaccccctctcaggtttgatagtttgctagaacaactcacaaagtgaaggaaaatggtgtacttactattactggcttattataaaggctacaactcagaaacagccaaacggaggagatgcacagagcaaggtgtgaccagtccgcatcctgatactatctcggagtcccccagccaagaatcatctcatcagcataaactcaggcaatgttgaaaggcattcagaatggtactggccatgtaacatcctcaggaaaatggagaaaggagtcacatcatcttctgtgtttggagactgctatgtaagccagaatactagtcacacagtgcaggtgggagcggccgggaagtaacctcctttttttttaagactaatacatttatggtatacacctgaatttgtgttgcggaaatctgatacccattgcacacattctgtatcatgtttaaaataatttcaacttttattttagattcaaggggtacacttgcagttttgttacacgggtttattgcgtgatgctgaggtttggggtacaattgatcgcatcaccttccaggtgtcagcatgtaaaagggaagatccaaatgaccaatcaggagattactgggggaccacaaagttggggctcaggtcagctgaccagntgagnncnngttcacnangg

SEQ ID NO: 465605 - DNA, 1682 bp, Homo sapiens
cgggagcctaaggcaccactccccgctacctaccgaggtgcatcctgcaggctccttaccgcaagcctgcaaactcgccctgccgggcgcggagtgcaattaggctttggggtggtttggctctccggctttccgtagcctctggccccgccccctagcaacgcgctggcttgtgttaacaaccggcccgggatcagaggtctgggtcaactggggggcggcagcggcgctaagcggactgtatggcggtggcctaggcccctggcggaattttgggacctttcgcgactctagcgactctcaggctgccttcccttctcggtggcggggcctctttgggcccagcggctgcgggcgcactgtaggacaggaagatccccccactctccaccccgccgccaccggccatgtggacagaggaagccggggcgaccgccgaggcccaggaatccggcatcaggaacaagtctagcagttccagtcaaatcccggtggttggggtggtgacggaggacgatgaggcgcaggatgttttcaagcctatggaccttaatcgtgtcatcaaactcctcgaagagactgataaagatggcttggaagaaaaacaacttaaatttgtcaagaaactggtacagtgttatcagaatggacttccattaagggatttagcacagatatttaaaattctgaatctgtgttcaggaaaaataaaaaaccagcctcgttttatagaatctgcatatgatatcataaaactgtgtggcttgccatttttgaaaaagaaagtgtcggatgaaataacttatgctgaagatactgctaattcaattgcacttctgggtgacttaatgaaaataccaagttctgaattgaggatacaaatttgtaagtgtattgttgatttttatcatgcagaaccaccaaagaagcatattccaggtgaagtttacaatggtctttcagtgataacttgtgtatgtagaaaacagaacattctcatatctctttgaatttgacagacacagtgggctcataaatgtaacacattaaaaagaaaacttttttgtagtcttgagctctttggtcatcttttgaaagttatatatgtatttttcagtttttgatttgcatatttttattctgatgctaaatatgaacaaatttgtaaagtgatgcccaatttagtttattaataattataaatgttactattatgttatttaataccattgataaaattattttttaaacactttataattatttataatatctgcccccactcagttaaatgttaagctaccaatgccagggccattctccatcctgtttgggaaaatagttctatgtgttatagctaagggaccttaatatatagtggtaaatgagccacactgaattggttgggaccaagacagtggcacgtgcactgtgaggatataatgttaagatgtacttcttaccttcatagtttctgtaatttctaatcaatctaggaagggagagaggatataaacaataatttcttaagttatatgattcttaatataggtggaaataagtgtctgtggtagttcaaaagaaagattatttaagactaaggaaaaatgggaaccagaagtcagttaaaaaaagacaatttaaaaaaaaaaaagaaattcagggaaaacagaaggaagtca

SEQ ID NO: 465606 - DNA, 1024 bp, Homo sapiens
atagaaatgagccactgcggccagcctggacttcctcttctgagtgccctgctgacctgccctgatgatgactgttcctgcagaggtctgcgggacccccagttacctggcccctgagattatcgagtgctccatgaatgaggaccacccgggctacgggaaagaggtggacatgtggagcactggcgtcatcatgtacacgctgctggccggctccccgcccttctggcaccggaagcagatgctgatgctgaggatgatcatgagcggcaactaccagtttggctcgcccgagtgggatgattactcggacaccgtgaaggacctggtctcccgattcctggtggtgcaaccccagaaccgctacacagcggaagaggccttggcacaccccttcttccagcagtacttggtggaggaagtgcggcacttcagcccccgggggaagttcaaggagtccttacaccccgtgaatttccagagtacccatccctcccctcccagctgccctgtgatggcttcaaagacggcaggtgtcagcccactggctcggtccctgaggatgctggccaagtgggaagtgggggacactaggaaggccccgcagaagccacccaaggcttcgtggcaaacgagcccagagcgtccctgtgctggaggggcagggcctggcagggcgggggctgcagcccagcttctccgcctggccctgcaggtgatcgctctgaccgtgctggcttcagtgcggatctactaccagtaccgccgggtgaagcctgtgacccgggagatcgtcatccgagacccctatgccctccggcctctgcgccggctcatcgacgcctacgctttccgaatctatggccactgggtgaagaaggggcagcagcagaaccgggcagcccttttcgagaacacacccaaggccgtgctcctctccctggccgaggaggactactgaggggctggccagtcagggagggctagggggcaggtggggaggggaagccatggaaatacaagt

SEQ ID NO: 465607 - DNA, 1419 bp, Homo sapiens
tcatctctctcaagttcaaagttccgcagatctctagaaggaaccagaagctgactgaagagagttagggatggttgtatgggcagatttcttgctgcttggggtagccaaaaggaggactaacgtgcccttgctgcaagcctgtattgatggggactttaattattccaagcggcttttggaaagtggctttgacccaaatattcgtgacagcaggggcagaacaggccttcaccttgcagcagctcgagggaatgtagacatctgccagttactgcataaattcggtgccgatcttctggccacagattatcaaggaaacacagctcttcacctctgtggccatgtggatactatccaatttttggtttccaatggactcaaaattgatatttgcaatcatcaaggtgctacccctttagttctggcaaagcgcagaggagtaaataaagatgtcatccgattgctggaatctttggaagaacaggaggtgaaaggatttaacagaggaacccactcgaaactggagaccatgcaaacagctgagagtgaaagtgccatggaaagccattcactcctcaatcccaacctgcagcaaggtgaaggagtcctctccagcttccgaaccacgtggcaggagtttgtggaggatctgggcttctggagagtattgctgttgatcttcgtcattgctttgctgtctcttggcattgcttattatgacctggtggaagagggattccagattgaggctccagccccaattatgcttgtgctttcctcctgtcccgctgtctttcatgaatctggaaatggaaccatatttatccagaacctcgcctgataccatttcagcaggacattactaaattttccactcttttattttcttgttctaaatattcactttagcctacttaagttgtttttagattatgatgggggggtggatagttagatagctattagtgtgaattgataggactaccataaaattactttttgatttctggaacataacagcagaaaatgtattgaccttttgcaatttgaaacaatactttgttgcctcatattcaaaatgcagtcttggtttctagcatacctggaaatgtcagtttaccttatttgtgtctttctgtgttccaaaaaaggatttatgttcagctgaataagccgatattattctaaactatggaaatcaaatgacctgagttctattctagcattctaatgaatcatttgaatgaagcctgaaaaatgaacattaacaagttactgggggccagtgactcacacttgtaatcccagcattttgggaggccgaggcgggtggatcacctgaggtcgagagttcgagaccagcctgaccaatgtggagaaaccccatttctactgaagacacaaaattagctgggc

SEQ ID NO: 465608 - DNA, 1790 bp, Homo sapiens
caaatactactgaatggctctctaaaatttacatgaaggaaagagctattttatgctagcacacagaagaatccacattgggtagtaaacaagacaagagactaatgggaatccaaaatcagactcactggataactaagctttgtgaacaccggcagtgaaggaaatatgaaatgggcccagcaggttctccaacgacttcaaatgttttggtcaaacttcgcatctctccgttatctatttttgggcaatcctgatcacgctttagtttatcaaaagtatgttgaaatgaccactttgcttgatcaatttgaaagtcgtatctataatgaatggaaaagtaatgtggatgaaatctgtgaattcaatttgaatcaacccttggttaaattcagtgccataaatggtcttctctgtgtcaattttgacccaaagtacattggaaatcttgaccttcttgtgcaagggtataataaactcaaacagacgctcctggaagttgaataccctctgattgaagatgagctgagggctattgacgagcagctgacagcagccacaacgtggctgacatggcaggatgactgctggggctacatcgagagggtgagggcagccacgtccgagttggagcacagagttgagcgcacacagaaaaacgtgaaggtgatccagcagaccatgaggggctgggccaggtgcgtgctacctcccaggagagagcacagacgagaggcagccttcaccttggaggacaagggtgatttgtttacaaaaaaatacaagttaatccaaggagatggctgcaagatccacaacttggtcgaggaaaataggaagctcttcaaagccaatccctctctggatacctggaaaatttatgtagaattcattgacgacattgtggtggaaggcttttttcaggctataatgcacgacttagacttctttctgaagaatacagagaaacaattgaaaccggcacctctgaatgagctacaagaatttataaaggagacagattccggacttcagagagaattaaatgaaggtgatcatgatggtttagttgacatcatggtgcatcttctggctgtaagaagccgacagagagctactgatgaactctttgaacctctaaaagaaacgatcaccctcttggaaagctatggccagaagatgcctgagcaggtctatattcagctagaggaaatttggtcactcaacaaggaagtccgcgtctgggatgcttacacgggcctggaaggcacagttaaggacatgacagcctccctgagggccatcacagagttacagagccctgccctcagggacaggcattggcaccagctgatgaaagctattggggtcaagtttttaataaatgaagccacaactttggcagatttgttagcactgcggttacacagagtggaagatgatgtccgaaggattgtggacaaggcggtgaaagagctggggactgagaaggttattactgaaatcagtcagacctgggcaaccatgaagttttcttacgaagttcactatcgaacaggcattccattactaaagtctgatgaacaactttttgaaactctagagcacaaccaaggtacacgcgcacaatgtgcaggttagttacatatgtatacatgtgccatgctggtgtgctgcacccattaactcgtcatttagcattaggtatatctcctaaagctatccctcccccctccccccaccccacaacagtccccagagtgtgatgttccccttcctgtgtccatgtg

SEQ ID NO: 465609 - DNA, 2773 bp, Homo sapiens
caccggaagctgcacgctcggggaagcgcggaggcgggggtgctgcgcgcttgggagcacgtgggggaacacgcagggactgccggcgcgaatggcttcgaacgcatgcgccccacccgacatttcacagtcgccatgacgaccggtaggtccgcaacggctgcggggacaagaccgttgaggctgccaggcgagtcaggcctttctggacctcgcctgactcggctgggctgtgcctgaaattgacccagctctatcagggattatgaaaaaacaaggagtaagcccgaagccgctgcagtcttcccgccccagccagtctaagcggcggtgcgggcctcccccttcccccccgcctccgccccggagccggaggtagaggaggtggaaaagtcggccctaggcggcgggaggtccttccggcggaggatccgaaatgtggaaaatcgaaaaggcttggagctaaaggtggtggccaagacccttcttctcggccccttcctgttggtccgtaattccctggcgcagctccgggaagaggtgcacgaactgcaggcgtggtggttccccagcagaaccactttggacttcgcagtccttgtggcttatctacattggttacatttagtaaaactttgtgaaaattatcgtcatttctctcacctctcatctttggaacgggagatgactttttgcaccaaaatggttaggtttcttcttctaacgaattaatttgtggtttaagaatagcgagactatgaggtagagatgtattaggaattgaaatgaacttttggtgaactgcactgtttcataaagctataacccaggtttattatttaaatagtaaagtgtttgagattatttttctgttacttcattatctctcaccctttcctaatgcagacttctttttaagataataaagatgaattataatagctgaggaaggagaagaatgcaagctctgaaatgacatccttaaatgctgatactggttacaacctctttacctctctgaggaaattggacgcgggtgaagctagaagccatcgttctcagcaaactaacacaagaacagaaaaccaaacaccatatgttctcactcataagtgggagttgaacaatgagaacacatggacacagagaggggaacatcacacaccagggcctattgatgtcaacgggctgaaggctttacccacccaatcctgctccccctcctctaacagctatgacaccttcctagtttcaccccttcacccattccaggacccgcccggcatcacacgttctgcttcagcaacaatgaactgctggaaatttccagcaactctttttcctgccagtgctcacactgtacccttgcctgttaaggtcttacctgtcttcctcgcacacccctgcctctcacctgctcagacgtcccctcctgccagcagccagtcctgaccatcccctctgtgatctgctaatgccactccacctgtcacatagttcgatcacttaaaaatgatctgttttcctttgaagtctttcattgaactctgaattacttaataaaaaggtttgtatattatttattcctgttttccacccgacacagtacctggaacatagtagatgctcagcaaacattgcacaaaagaataatgtggaaaataaatggttaaaacatagaaaaattttaaagatagggtatttgggtcacttttactgttttctgtccctacaatatggctgaatcatcccccatatggctcaacattttcttaattcttttaaaagtacccaacactatattgagtgctctggggatcaaaataatagtatatatattaaggctgggtttgaatctctgctctaccatttactagctgggcaatttatataacattttaaaatttcatcatctgtaaagtggaaatattaaaggtatcttcttcaaaagtgacatttggaagaaaaaaataaagtaatacatataaagcatatgagattcagtaagcactcggttagtggtgagttgtttttgttgcttttgctaagacccaggaacccattgtttgaagatcagcatagagcactaactggttggatgggatttctgttctctactcaatgatttgtttattctttagagactgtctgtcccctctagagtctattattaatattttctaatgccaatttatgggagttttactattgtgctgtttctctaataatagctaatttatatttttaatttttaaaagccattatgctggaaacagagcattcatacaaacaatacacgaatgaatgtaggttatactgcaaaatagctggttactataatgtagttgtattccatggctttaagtttaaaaataacttcgcatttactagagtggacttaccctccaggcataaaattttaaaacccaacaactccaggcctccagagtctttacttcccactaacttctcaccagtgaaggcgaagctaatgaaaaaggatagatgactgcttctcaattggaaatggatccaaatgccatcaagggaattggtgtcggtatacagattttacctactgtcacagcctggttgggtggaggatggggaaggtggtggtatcggtctacttttagagttttaaatgtttctctgaattcctgtagcagacaattttgagaaaattttgcctagagaaagagtctgaaaccaaaaagctaagcagaggcaaaggtttgcagcttggatctttaacattaataagtctgttgct

SEQ ID NO: 465610 - DNA, 603 bp, Homo sapiens
caccggaagctgcacgctcggggaagcgcggaggcgggggtgctgcgcgcttgggagcacgtgggggaacacgcagggactgccggcgcgaatggcttcgaacgcatgcgccccacccgacatttcacagtcgccatgacgaccggtaggtccgcaacggctgcggggacaagaccgttgaggctgccaggcgagtcaggcctttctggacctcgcctgactcggctgggctgtgcctgaaattgacccagctctatcagggattatgaaaaaacaaggagtaagcccgaagccgctgcagtcttcccacacccagccaatttgttgtatttttggtggagacaaggtttcaccatgttggccaggctggtgtcaaactcctggcctcaaatgatccacctgcctcggcctcccaaagtcctgggattacaggcatgagccactccacccagccagtgaaataactttggtgataaagttttagcaacacctgccaattggaaatcaggtaaaaaagaagttaaagattctgcagtggttatatggttaaatggctctgagtctttcagtgtgcaagcctgtgtacattattttacaaaagtg

SEQ ID NO: 465611 - DNA, 431 bp, Homo sapiens
acccaacccattccttgttaagtttctatcagcatcaattttcctccttcactataatggtacatttattactctccaagtcataatagtagacatatagagtagaagaagacaaaatcagttaatgtgttgatcacagcgctatgttgatagagctaatgtggttcagaaaagaaatactattaaagttcctctagttctctctccagctgaagacaattagcttaataaccatttctactcattatttccatgctaactagttttatctttgcattttttaggcttacctcattgatgctgaacatcctaaaaagcttctgctgctttgagtcactgaaaaagaccaagaaacatgaatttaaaaaaaaatttcaaatgttataaaataaataatatgaactcattatacctacaatgaataatttaaa

SEQ ID NO: 465612 - DNA, 755 bp, Homo sapiens
tggataggaagaatcagtattgtgaaaatggccatactgttcaaagtaatttatagattcagtgctattcccattatattaccatcgatattcttcacagaattagaaaaaactagtttaaaactcgtatggaaacaaaacagagcccttattagccaagacaaacctaagcaaaaagaacaaagtgggaggtatcaggctacccaacttcaaactatactacaaggctactgtaaccaaaacagcatgagaaagagagagtctttggagagttgtgaggagataagtgacataaactggcatgttctgaaagaatcactctggatgctgtgtggagaaaacactgaaaagggtttgaaatggaaattacaagcgcaatattacagaagtgtggattttagttacaatgtctctatgagaaagtctaaaagttaaacataagcaaaacaacaaaaacatctaaataccaggaatttgttatctcgattatggagggcgacaagtcccacagtctgccatctgcaggatggagaaccagggggagaataattgactccattcaagtgttcgctcctgtttcaatcaactatggctgaagagtgaggagacatttggaataaatatggcttctgggggcccattcctatggatcagcagctggcttctggaggcccattcctgtgaatcgtcgatctcatagaagataatattgttagaaggtaggtaggcagttctcaaactgtgaagctattgga

SEQ ID NO: 465613 - DNA, 866 bp, Homo sapiens
tggataggaagaatcagtattgtgaaaatggccatactgttcaaagtaatttatagattcagtgctattcccattatattaccatcgatattcttcacagaattagaaaaaactagtttaaaactcgtatggaaacaaaacagagcccttattagccaagacaaacctaagcaaaaagaacaaagtgggaggtatcaggctacccaacttcaaactatactacaaggctactgtaaccaaaacagcatgagaaagagagagtctttggagagttgtgaggagataagtgacataaactggcatgttctgaaagaatcactctggatgctgtgtggagaaaacactgaaaagggtttgaaatggaaattacaagcgcaatattacagaagtgtggattttagttacaatgtctctatgagaaagtctaaaagttaaacataagcaaaacaacaaaaacatctaaataccaggaatttgttatctcgattatggagggcgacaagtcccacagtctgccatctgcaggatggagaaccagggggagaataattgactccattcaagtgttcgctcctgtttcaatcaactatggctgaagagtgaggagacatttggaataaatatggcttctgggggcccattcctatggatcagcagctggcttctggaggcccattcctgtgaatcgtcgatctcatagaagataatattgttagaaggcttacctcattgatgctgaacatcctaaaaagcttctgctgctttgagtcactgaaaaagaccaagaaacatgaatttaaaaaaaaatttcaaatgttataaaataaataatatgaactcattatacctacaatgaataatttaaa

SEQ ID NO: 465614 - DNA, 2926 bp, Homo sapiens
gggttgggaagggtagttggggggtggcggggaagtggagatggagagcaggtgagcctggccgcgcacgaatccgagggggcggccgcccagctgggaagcagccctgaaatagacccccgccgcccccgctgcctccttccggaatctgctcaggtgaaaaacaagcctctcaatccgggcgtgtccccgggcgtgggacggggaggtgcccagcactgtgggaggcgtagactgggcctgggtcccgctcggacccgccccaggcccggccgctgggtgcaatgagggcgttcggccaccgggcggcggtgctggcccgcgatggggagcctggctgcagcggctgtgggcgccggggcaagcggctgcggccccctcgcccccttgcgcttcccggctctcccgccctctcccgcagcctcccctctcagcgccttcctcgctctctcgtctctcgctccctctctcgctcgctctccagcgcgctctctagctcgctctcattttttttcctgctgctgttgccgctgttgcggcgccgccaggcgcccgtacctcggccggctgcgctcgctggtcgctcccgctccgctcccttcccagcccggagctctcggccagacccagctcctcttgccgcctctcccgctccttccggctcggacgccgggctccgccgcagcaggagcaggggttgccgccgatctccctctcgcttgctcgcttgccggagcagcagccgaacgccgcgcgcttggcggcggctccggccgggcggccgccagctcatccctgctgcgtcccggactccgggcggctccgcggcgcgctgggtccgcagcgtcagcgctgcccgccgcggcccgggctctgggcaccgcgagaaccgtgcctccggccgtcgactgcctgcgcccccggggcaggccggcacgcagccgacccctcgccgcggcttaaaccttgctggcgcgcggtgagttgtggcccgagggggaccgacagaggggaccgtgccctccggcctcctggggcgagggctgcggcggggacatcggggctcggggaggtggcctccggcgagctcccgcgcttggagtgctccgaggagagctggcgcccccggagccctaggggccggagggcgcgggatctgaactagagggtctcccctcggggctaaggcaggctttccgggtgcccctgagggagggaatggggcagaggcttttttgcgggcccggtggaaagtactgtctctgtatacaggggcttccaccggatggagggtcgtgccagctttcaggtgggggcggcggcattagcgcatcccggtctgcggagaggcgggacaggcgggggcgcggggcattatttgcacctcttcccggcagtctcccggcgggagggcacccagcctcgcgcgcctcggctcctttcccaggcaccgcgtccagctcccgtgcccgccccagcgccgccttcgccagcggccggagcccggcaaccgcttgcccgtggcctcggcaggttgtgggggtctctagggtctggggtctccctgcagccccaggacttcagggtcaggctctctccggacactcgggaccgtccctccccgggaccgtgatgaacctgcgcgtctacgcggccgccgggcgagcggaccggcagtggtctctgtgtgtgcatgtgtgtacgcgcgtgtgtgctgggggtccccgctccggggtcggtcttccccggcgctcgcaggtgggaggcgtctcctccccgcgcgggggcggggccgggaggtggaggcctcgactgcgagaggcgcccccgcaccagggcggtctgaggctgtttgtgctgagatggggcagcagcatcggcggcggcagggagtcctgaggcccgaacgtacgagcgccccctgcccctaggccttgagtgacatcccgccctcagactttcagtccctgtcggaggaggcgccttgcttctttctcccctctccgcaccattgccggcccctggcgcgggagaacgcggcctttccggacaccgactgagctgggcttgcctagctgggtgcccgaagccacgtgtctctcagagcggtggctgcccctgtgtcaatctggcagaaagcccgaagtgacagggagggaggggcatcctttacggcccctggatgccttcctccctgggaaagcccaaaggccaccctcacatgaattccatccgcatagatggggacatcacactgggaggcctgttcccggtgcatggccggggctcagagggcaagccctgtggagaacttaagaaggaaaagggcatccaccggctggaggccatgctgttcgccctggatcgcatcaacaacgacccggacctgctgcctaacatcacgctgggcgcccgcattctggacacctgctccagggacacccatgccctcgagcagtcgctgacctttgtgcaggcgctcatcgagaaggatggcacagaggtccgctgtggcagtggcggcccacccatcatcaccaagcctgaacgtgtggtgggtgtcatcggtgcttcagggagctcggtctccatcatggtggccaacatccttcgcctcttcaaggtcagtgccttggttggtcccctgagccttgtggcgctgaccgaggtgctgaaacagcacctgccgctggaggctcgccttgtggcgctgaccgaggtgctgaaacagcacctgccgctggaggctcggacaggggtgctgatgggtgtgaagaataccttttggtgggcacccaagcccagtggttgtagcctgtacaatgcactgttgtgggcccagcccaggttgtggagaaagtcaggcctgggtttgaatccctgatccactagttacctcacctccacttaccatgtcagttattta

SEQ ID NO: 465615 - DNA, 1317 bp, Homo sapiens
cagctgatttctcagggtggttctttctataattcctgaacaacgttggtttcttttttccactgataatgatgctgacgtggatggtgtctgtggccagcatggtcagaaagttggtgtatgagcaggagatacagatagaagagggtgtgcaaatgtgtccatctgttagatcaggggtccccaacccctgggccatggagcagtccgtggcctgttgggaactgagccttacagcaggagggattcaatggaataatatgtaccaggctctggaacaagggggcatgacatttggctgggtttgctggatgattctttttgattcaagcctttattttttgtgtggatggtacttgagcaacttgattcctggaacatttggtttacggaaaccatggtatttcccctttactgcctcatattggaagagtgtgggtttcttggtggagaaaaggcaatactttctaagttctagtctgttcttcttcaatgagaactttgacaataaagggtcatcactgcaaaacagggaaggagagcttgaaggaagtgccccgggagtcaccctggtgtctgtgaccaaggaatatgagggccacaaggctgtggtccaagacctcagcctgaccttctacagagaccaaatcaccgccctgctggggacaaacggtgccgggaaaaccactatcatatccatgttgacggggctccaccctcccacttctggaaccatcatcatcaatggcaagaacctacagacagacctgtcgagggtcagaatggagcttggtgtgtgtccgcagcaggacatcctgttggacaacctcaccgtccgggaacatttgctgctctttgcttccataaaggcgcctcagtggaccaagaaggagctgcatcagcaagtcaatcagttagtaaacagttgtctctctgctcctcctgcctctgcccattgtgtaaggaagtgaagacaatagaaagagacacttaaaaaatcatctgtgtctacatttataagatgaaataattagcaaatggttgttaactatggaattatgacacagccaccaacactgagaatgtcagaaaaggcttctgtgggaaggcattgaatttgatttgatttgtctttgaaatgtggaagagatgagcacatgtaagcacagaggctgttgatggaaactttgtgtatctggagtaaaaggtccctaggggtgtcctgaaatgaaaagaattcaaaggcagcgggaaaactggttgtcaagaagctgattagtctgccttttctctccttgatccctagctcttcctcaa

SEQ ID NO: 465616 - DNA, 1856 bp, Homo sapiens
tccattttcagaaggtggatttggtgagcatgaaaaaagggggtgggggagtaatcatacaaacaattgtgtccaggccagcttcctaggacatgagggctccctctgtatggcagaggcacctgacatccgtaactgttgtgcaccctgcgaatgactttatggtctaagaatgtatgttcagagccccagctaaggaatcaggagtggcaagatcctggaaggatgccaatctatgaaaccctgagtcaagaggtcaagctgggcacttgttttcctttttctttttttttgtaggagtttcactcttgttgcccaggctggagtacaatggcgtgatctcggctcactgcaatctctggttcaggcgattctctcacctcagccttcccgagtagctgggattacagacatgtgccaccatgcccagctaaatatggagatgcggtttctccatattggtcaggctggtctcgaactcccaacctcagggacggggtttcactatcgttggccaggctggtctcgaactcctggcctcaagtgatctgcccccctcgggttcccaaagtgcacctggcctctctccctgcatctttatgtgcctgcaacaccaagagggagctcttggcccctgggttaaggtcagggctccagaagcccagggtcaaggctatggccgcatcccaaggacgtgcatccctgcaagaggctgcatcagacaggcatggaagaggcgccgctggggcctccttgaattcctgctgggaaaagcaagtggaggtgctccttgaagaaacagggggatcccaccgatctcaggggttctgttctggcctgcggccctggatcgtccagcctgggtcggggtggggagcagacctcgcccttatcggctggggctgagggtgagggtcccgtttccccaaaggcctagcctggggttccagccacaagccctaccgggcagcgcccggccccgcccctccaggcctggcactcgtcctcaaccaagatggcgcggatggcttcaggcgcatcacgacaccggcgcgtcacgcgacccgccctacgggcacctcccgcgcttttcttagcgccgcagacggtggccgagcgggggaccgggaagcatggcccgggggtcggcggttgcctgggcggcgctcgggccgttgttgtggggctgcgcgctggggctgcagggcgggatgctgtacccccaggagagcccgtcgcgggagtgcaaggagctggacggcctctggagcttccgcgccgacttctctgacaaccgacgccggggcttcgaggagcagtggtaccggcggccgctgtgggagtcaggccccaccgtggacatgccagttccctccagcttcaatgacatcagccaggactggcgtctgcggcattttgtcggctgggtgtggtacgaacgggaggtgatcctgccggagcgatggacccaggacctgcgcacaagagtggtgctgaggattggcagtgcccattcctatgccatcgtgtgggtgaatggggtcgacacgctagagcatgaggggggctacctccccttcgaggccgacatcagcaacctggtccaggtggggcccctgcctcccggctccgaatcactatcgccatcaacaacacactcacccccaccaccctgccaccagggaccatccaatacctgactgacacctccaagtatcccaagggttactttgtccagaacacatattttgactttttcaactacgctggactgcagcggtctgtacttctgtacacgacacccaccacctacatcgatgacatcaccgtcaccaccagcgtggagcaagacagtg

SEQ ID NO: 465617 - DNA, 1829 bp, Homo sapiens
tggccttgactccgtcagagactgggggaagaaatcgtgagtcagggcagcgaggtctgcggggagcgttgtgaaggtgtgaagtgctgagctcccaggtccctggctgccaccatgggctcggagccgcgtgagatgggacaggagctgctgtaggttcagtctacctgggaaagagggagagggatttgctcaccaaatcccatgtcccattcgtcaatgtctgccccacgaggtattaatttccagcactcccggagctgcctgaatgtgggcccccaagggtcccttggagttgagatctcaaaggcagttgacaactctggcaaagccttcacttcttgcttgagcacagctttaaggccagccagagcttacactgcagcccgatggaattacacacagtgccctgcatatgccaaggttcttccacctctagtcatgctgcttcctgtcctgacacccccttcccaactcgatcctgctgagcagcctgggatctgtgtacgggacgcccctcagagtcacccagacacaggggaagctggggtgtttattccccgcccctcagtcacaggtgcaggcctgctcctggggcactcaccccagcatctccaacgctaaggcagctcagagagccactttcctgtccaaggaacccttagagaccattcccaggaggagcgaatgtccacctgtgtggcgtcctcctggggcgctccttctaggggggaccccagtccctcctgcccttccacccagaatcctcctgtctcctgggtgaaaactggagcccagattctagctctgctgtgtctctcagactctggaggtctcagcagagcccagagctggctttcccagcagggccccggggtgctgatgctgctgcccctaggaccacccctgagagccctggctctccaccagagcctgctcacctggagacagtgaccacaggccacaggtcacccctcactgcttcactccacgccctctcctgtgacctcatctcctcccacctccccctgggtcacgtggctccagccacacccacctccctgctgttcctcacccaggatcaccaaggtctctcctaccccggggcctgtgcacctgctgtgcctctgcttggggtgctcttcccagggcttgcccacctcctcagagaggcctcctgacccctgacacggccttgcccttcacctctatcgtcctttagaacagcccccacctcccgcacatcatgcagttgcaggttcaatggctactgcttgtcctccagactcgataggcctcatcactcctcagatgattctcgaaggataacacacaggccagtgggcagccctaggccagggggattaccaagacatgaagactttctttctgtctcagcaaccttcatgcttggtcaagcaaaggtgttgcttaagtcaaacccagggcaggggagagcagttgaagcaaagtgagtctttggaggccctgtggttgtggggtctggtgtggagacagtgagaacggaaaaggtgggagaggagcagtcaacccgtgaatggccccattcagacgcctttacctggaagacgtggcaggtctactggggttcatcccatctgagccaggcctggcttttcttggctgcaagctgagagctgggtccaggtctgctgaaccaaggttctcccatcttccttgagccagtgacaatcagaggcctatttctttcatgacggaaggcaggagaacaagcaggcaagaccagagactccacctctaggtgcacaaactacagagtcacggacagagaacacagatctagggaa

SEQ ID NO: 465618 - DNA, 317 bp, Homo sapiens
tcttatactaaggattttcagtgttttttcatgcaccatccaatcttttttgactcttagatcatatgcctcagagcccatctgggtacaaaaacacccgttttcaaaaaaggaaccagaaagtggtttcatctcgctttaggatgtgaatgaaagcctctccttccgtctcccgagaagggactttcagaagctgcaggtgcccaggtccaggccccacgctgtggccccgcagggactgtactcactctttatttttctcttttccagctctccacaagccaacagctctctcctggctttgattttcaaccatt

SEQ ID NO: 465619 - DNA, 2137 bp, Homo sapiens
tggccttgactccgtcagagactgggggaagaaatcgtgagtcagggcagcgaggtctgcggggagcgttgtgaaggtgtgaagtgctgagctcccaggtccctggctgccaccatgggctcggagccgcgtgagatgggacaggagctgctgtaggttcagtctacctgggaaagagggagagggatttgctcaccaaatcccatgtcccattcgtcaatgtctgccccacgaggtattaatttccagcactcccggagctgcctgaatgtgggcccccaagggtcccttggagttgagatctcaaaggcagttgacaactctggcaaagccttcacttcttgcttgagcacagctttaaggccagccagagcttacactgcagcccgatggaattacacacagtgccctgcatatgccaaggttcttccacctctagtcatgctgcttcctgtcctgacacccccttcccaactcgatcctgctgagcagcctgggatctgtgtacgggacgcccctcagagtcacccagacacaggggaagctggggtgtttattccccgcccctcagtcacaggtgcaggcctgctcctggggcactcaccccagcatctccaacgctaaggcagctcagagagccactttcctgtccaaggaacccttagagaccattcccaggaggagcgaatgtccacctgtgtggcgtcctcctggggcgctccttctaggggggaccccagtccctcctgcccttccacccagaatcctcctgtctcctgggtgaaaactggagcccagattctagctctgctgtgtctctcagactctggaggtctcagcagagcccagagctggctttcccagcagggccccggggtgctgatgctgctgcccctaggaccacccctgagagccctggctctccaccagagcctgctcacctggagacagtgaccacaggccacaggtcacccctcactgcttcactccacgccctctcctgtgacctcatctcctcccacctccccctgggtcacgtggctccagccacacccacctccctgctgttcctcacccaggatcaccaaggtctctcctaccccggggcctgtgcacctgctgtgcctctgcttggggtgctcttcccagggcttgcccacctcctcagagaggcctcctgacccctgacacggccttgcccttcacctctatcgtcctttagaacagcccccacctcccgcacatcatgcagttgcaggttcaatggctactgcttgtcctccagactcctctccacaagccaacagctctctcctggctttgattttcaaccatttaagttgaaaaaaattcaaaacaaatgaaatgcacttaagagaaagccttgaggagttcagcaggccacccaaagtgaagggactcctttgggggtctttgttgttatcaattatttattgagccctgatgtgttcctggcgccaccaagaccgaaaggagacagggtccctgccctggggcatcccaacaaagaagggagagtttgtgaagcttaaaaatgtcccagatggtaaaacagttacacgtcatacctcaaggctgctctatacttttattatagttttattcttaaggctgtttatttattttctgatgtaaaaggagccttgttatggaacctggtggacaaaccattttaactggacatgatgttgctttttaatcaatgactcctgaaattttaggtgagtatgagtctggagttttagattacaaacaacaggaagccaattcaacccagctttttaaaagaagatttctaattaaatgtgttgattctgttagcagagaactctgggggcagtgtgggttgcaggcatgggtagatccaggtgtcaaatgacattctcaggacccatgctctctccatcattggctctgattgctcaggtttgggctccattcttgggccactctcttgctctgcagcaagatggtcaatggcagctctaggctctcaccctcatcttcacatctctaagtccagaacaaagagctttccacacctgctacagatctgggagaagatgatcctatctttcttgaacctgaggctagtccttactcctccctaagttct

SEQ ID NO: 465620 - DNA, 658 bp, Homo sapiens
agcgcgacttccctggccctccccctgcggaccagtgaacctcgcccgagggctcaataaagaagatttttgccctctttttctcacctctcagccttattgatccatggtgcccttccattgcctttcattggtgccgaaacccgggaggggacacctcctaagcccccccagaggctcagggggactcccctcctggtcggatcagtcctctccctcagtcaggtcaggcttctcctccacggccatctgtccatttcgtccggttacttgctgccaggtcgcagttgctgcagctactccagtccaattcggccgacgctagatcaactgagatgcaaaacccatgttcacatcatgagtgagtcttctaactcggacaatgcaatcaacaaattctaagaccaaattccggtggcactggctccaaagctccttgagttgtgcgcaaccgcacgtcgaaccaggggaaaaagcagagagcgacaaaaggtcactattcccttcccacacacagacccattactgggggaacgcgtgcacagactttaccctgccgactccagcttcaggacttctcgcttacccatcactgggcattgcccatttcgacaattcacgaatcaagaactgcttgcgccttctacactctgcctcg

SEQ ID NO: 465621 - DNA, 1272 bp, Homo sapiens
cggccgctgtggctccacatggcgacccctccctggatggcgaaggtgccctctagctcctccaactggatgacgactgaagaggcccaggctcgggaacccctctcacccttgccgagcccagggtaatgcttcaggtagcggagacaaatgaagacactcgaccatctctaaatgctaccaaacacatagagtctactctgaatgcagatactgctctcataaaaattctgcaaaggaggaaggggttggtgcagaactgttccgatgctgatcaactgagatgcaaaacccatgttcacatcatgagtgagtcttctaactcggacaatgcaatcaacaaattctaagaccaaattccggtggcactggctccaaagctcctgagtgtggaaggaggtgaacagggaaaagcagagaggacaaaagtcacatcccctccccacagacccatactggggaagggtggaagatttagctgcgagtcaaagaaacaaagacagttggcgacacacgctgaccgccatgcggacgtccatcaaacccagcactggccctgggtacgtgcgcctttgctattaccccaatacattttcttctgcagagcaagcaacagaacacatgcagaccttaataaataccactggggtccaagccatggacatatggacaaatgcccttaagcagcctggtggggacctgtcacactacaacattggtgctgctgctgctcctggtggaggttgcacgagggctgagatcgtcacaagtaaaagacacctgctgcttgtcaccctcgtcctaggcatcctgcaaggacgttcacaatgccagctgctcagtgacgtcttccccgaggtggaattttgttgctccccacccccgactccttccccaattgccctttctactgttacaggctcaatgggacatgaagaggaaccagggcatcctggaagagctggggccgtaaaggggacacttaccaagcctgaagctatggagacaggggatgcccctagaaccaggaatcgaggcttgggggcaggaaactgtatttctacacctagaacagtgccgggcacataaaaggagtttaaaaactattcattcagtgaaggaaaaaatgaacacacaatcagggacactcccaggtctaaataagacacattgtttatcagacattctgagttcatttcccagactgccagtgttgacttccccagaattctgtcttttgattaatatgaccaaaaccactctcctcctcac

SEQ ID NO: 465622 - DNA, 795 bp, Homo sapiens
gggctttccaacaagcaacttggaaatgagcgacggttgaagctcttcaacaaatctctcctcagccaaatacatctggtaccttaatggaggcgacagcacaggcttctgattagttcacacatcactcaccaattagaatagaagtgcatttacagtctgcaaacaaggattcatcatgggaaactgtttttaaagtcagaagatcttgattcaagtccaattctgcccgttaccatgtgaccttgagtgaatcttgtaatctctcttttaaaaatacagacagcaacacttgccccctccatttacggcattacaagcatctgatgggatcacacatttgaaaatatattgtaaaacatacatgaatatatggtgtctagttatcaagactccaggtcctgtgccttccaatgaagttgtgatttcctaaccaatattaattaattaactaatttaaaaaaataaacaatggcatctccttctaaactagtttttaagccaaactatttactttatccctttgctgtaaataaaattttaaatgctaacttcagtatgccaaataattaaacgtaggcaattcttttcagatgtctgtgtcttattaaccttatgctaagaaccaaattctggcttatctatgatgctatgtgagaaaaaccacacccaacatggaatttgtatggttagacagaaactggaatgagtgtatctcttagagggttaaagcaggctaaaggctgcaaaacaactaagactgaaaagattgcaaaaaaaaaagatgtttatacc

SEQ ID NO: 465623 - DNA, 1845 bp, Homo sapiens
caccacagctctctctgttaagatcaaggctctgctcacacatgcttgagctgccagtgggtgaacaccaggaattatggttcacctggggccaccaatggaatgtcttactacagtagacaagtgggacataaaagtggggagacaaagggcagtatcaatcgattcacaaactaaattggttttcacctcatttgattcacctgatttagataagctgcagaatgctaaagggataagacaaaacgtagcagccagaagttctggggctgaagggagatgtgatggtattttgcagaaagcgttgccagatcagtacaagaaactctccacgtcagttttaaccgccaactcttggaagaaagactccccttatcaaacaccaaatgccctcaaccaagggaaagttctacatggtgccattactgtattatccaactttcttcaaaaactggctctcccagaggttgcacttgggtatctgaacattttggacaaagtacttgctgtgaccacatacagctgcattgaacagaaacccaacatcagtggtataactaaatcagggtctgtttttcttgcataccaagcactccagggctgcacggctgccacactgacttgaggacctataggatgggtttctcttggttttccaggctgccactcttaagtgcattgctttcatcctcttacttgaaagatggatgctatagttccttacaccgttcaatatggagtgattgccacgtgtagctatttaagcttaaattattttaataaaattaaattaaaaattctgctcctcagtcacactagccacatttaaagtgctccatagacacaggggctagtggctactctatggacagtgccaatggagcacatttccatcatcgcagagagttctatcaaacagtgctgctccggacagcacatctgcaaagagaatccataggtttatgaattgaaagccactaatataaatcatccttggtaatgaaaagtgaaaaaaaagacataatataatttctatttgtcaaggtataatgatgtcaccatccatttatcctctgcacttaaaggttgaagctcttcaacaaatctctcctcagccaaatacatctggtaccttaatggaggcgacagcacaggcttctgattagttcacacatcactcaccaattagaatagaagtgcatttacagtctgcaaacaaggattcatcatgggaaactgtttttaaagtcagaagatcttgattcaagtccaattctgcccgttaccatgtgaccttgagtgaatcttgtaatctctcttttaaaaatacagacagcaacacttgccccctccatttacggcattacaagcatctgatgggatcacacatttgaaaatatattgtaaaacatacatgaatatatggtgtctagttatcaagactccaggtcctgtgccttccaatgaagttgtgatttcctaaccaatattaattaattaactaatttaaaaaaataaacaatggcatctccttctaaactagtttttaagccaaactatttactttatccctttgctgtaaataaaattttaaatgctaacttcagtatgccaaataattaaacgtaggcaattcttttcagatgtctgtgtcttattaaccttatgctaagaaccaaattctggcttatctatgatgctatgtgagaaaaaccacacccaacatggaatttgtatggttagacagaaactggaatgagtgtatctcttagagggttaaagcaggctaaaggctgcaaaacaactaagactgaaaagattgcaaaaaaaaaagatgtttatacc

SEQ ID NO: 465624 - DNA, 1381 bp, Homo sapiens
  misc_feature (1)..(1): n is a, c, g, or t
  misc_feature (3)..(3): n is a, c, g, or t
  misc_feature (7)..(8): n is a, c, g, or t
  misc_feature (11)..(11): n is a, c, g, or t
  misc_feature (14)..(14): n is a, c, g, or t
  misc_feature (1375)..(1377): n is a, c, g, or t
  misc_feature (1379)..(1379): n is a, c, g, or t
ntncccnntgncangactgcagggcgatactggctatacttgcatcacccttctctgtgcctgtagaagctgaccactatgaattgtaccaactggtctcccttatctcccttccctgacttctggttgggttctacaaatgaaggactgctccctcagggtataggggcagggggcccttcccaacctctaacattcccagaccaaacacaagcagatcccctggctggacttgcagctcctgggggaacacatgcctcatgtcctggaaagaacacagttctggagtcagaggccatcatttcatctgggctaactgtgtcttggtccctgactaatattgatgagaaaggggagcccagcagacccagattccctagtgcctccagcccttccagatggtccattggcaggaagcttgctatacaaatccatcaggctctggaagatgcaagacaaaagctgagagataatctcagaagtgacatcccttcacttctgcgcttcttagaatggaagggattaggcaagggtgtgaatgccaagaagtgtgaatccctgaggccatttcggatccttaccataaaagtggaagtgaaacaaggttggatgaagacacaggacaaggaggaatgtaccagtggggactggcatggggatacagaacaaggtggtaatccaaaaaaggggaaacatgggatcaagaaaaaaagaacacaagacagcagtaaagggaattcccaaatgagatccgtctcagagcagtgccaaatcaaagaaacattcacaatcaaaatgctacctgctccccagtgccactccactgaatccttgcagaggcagcacagtcccgagtatggtactaatatcgagatggataaggctcatcacagctcaagattaactataaattcctaatgtgttcaggtaagatgcatctctacctcccggcagacaaagaggcaaacacaatgatccatgaaagaaagaaacagagatgctgcccaagtgaaatgagccttgatatgtcaccttcctcaccttgtgtttttgtagccatacctccagacttccagatctctgcctgaggtttactgatggtttctttcagggatcattaaaagtgattcgtgggctggcaaggcttttgttttccatgctaaggattcagtttatagcatgcagcttgggaaggggtgtctggaggacggcatccccatccaggaaatctactccaggaaggccaagaaggcttcaacagtccatgggtgatccgtgatgcttgagtgggaggaagtggttccatggggatgggcattcattgcaaagatttgacgtggtggaaaagggaaaaagaacaaaggagttggaaggnnntntt

SEQ ID NO: 465625 - DNA, 2652 bp, Homo sapiens
aatgaacagtctcaacgatttactttgaaacaaatcgtcctgctgcactctgagggcgggcgtctgggtctccatcccggatctggggcggcatcttggggtagaaactgacacaaagccgggcctctgcggtccgggggcggcggccaagctccgcctccacccgcggcagccaatcagctcccggggacgccccaacccccaaccgtctgcactgcagcccacctccccccacacgcctcctcctagccacttcactaccaatttgcaaattcccaaggcgtctgccccagcgccttcccacatctctgtggaagactccccactccaaagtagcctggtgtggaaattgctggacgaaagggtgagtctcgtccaaagctggtttcggggaccagaccaggcccgggcacacggaccaattcaggggcggctcccgatgcagtccgctgaggtgcgggtgggagaaggaggcactgggtcggggtccttggggagcgcggccgaggggggcgcacgcggggctgccaaagtgccacagcaatgccaagccaccagggccggcgacacaaagaagcgctgtcccccgccaagcgccgccccctggagctcccactccagcctgggaggaagtggggaggaggggactcccgtggaaacccctcctctcctccagctccagcctcctccccgctcccaaatcccggctcggtcgcccagtcactggtacagggaagcctcttccctgtgcattcctctctgcgccaggctctgcccgctcccacctgcccccgtggaaatcgcagggtgacctgaaaccaatagagccatggcgactccctctgctgccttcgaggcccttatgaatggtgtgacaagctgggatgtacccgaagatgctgttccatgtgaactgcttcttattggagaggcttcatttcctgtgatggtgaatgacatgggccaggtcctcattgctgcctcctcctatggccgtggccgcctggtggtcgtgtcccatgaggactacttggtggaagcccagctcacgccctttctcctgaacgcagtggggtggctttgctcttcccctggggctcccattggtgtacacccatccctggcacctttggccaaaatcctcgagggctctggagtggatgcaaaggttgagccagaagtgaaagactccctgggggtttactgtattgatgcctacaatgaaaccatgacagaaaagctggtcaagttcatgaaatgtggtggcggcttgctcataggaggacaagcctgggattgggccaaccagggggaggatgaaagggttctgttcacgttccctgggaacctcgtgaccagtgtggctggcatttactttactgacaacaaaggggacacgagtttctttaaagtctccaagaagatgcccaagatcccagtgttggttagttgtgaagatgacctctccgacgacagagaagagcttctgcatgggatttcagagctggacatcagcaactcggattgtttcccatcccagctgctagtgcatggggctttagcctttcctctagggttagattcctaccatggctgtgttatagcggctgcccgctatggccggggccgggtggttgtgactggccataaggtattattcactgttggtaaactgggcccctttctgctcaatgctgtccgctggctggatgggggccgcagaggcaagattgtggtgcagacagagctgagaaccctgagtggcctcctcgcagtggggggcatagacaccagcatcgagcccaatctgaccagtgatgcaagtgtctactgctttgaacccgtgagtgaagtgggggtcaaggaactgcaggagtttgtagcagagggtggcgggctatttgttggagcccaagcctggtggtgggccttcaagaaccccggagtgtcccctttggctcgattcccaggaaacctcctcctcaacccctttggcatcagcattacaagccaaagcctcaatccagggccctttcgtactcctaaagcagggataaggacctatcacttccgctccaccttggccgagttccaggttataatgggcaggaagagaggaaatgtggaaaagggctggttggcaaagctgggaccagatggtgcagctttcctgcagattcccgcagaagagatccctgcctacatgtctgtgcatcgactcctgaggaagctgctaagtcgatatcggcttccagtagcaacccgagagaaccctgttatcaatgactgctgcagaggtgctatgctttccctggccacagggctggcccactctggaagcgacctctctctgttagtcccagaaattgaagatatgtacagcagcccctatctgcgcccctcagaatctcctatcaccgtcgaggtcaactgcaccaatccaggtaaggaacaagggttggaagctcagtattatgggaatgggggaatggggacaggctgacatcagcagtccatttcagggacccgatcatgtccagaaggtggtctccattttttaccatgaactttgaagaagataagggttgggattttaagtactgtttggaagagttgagtcaaggcagcatgtaggggaagatacgtgcttac

SEQ ID NO: 465626 - DNA, 2032 bp, Homo sapiens
gtagtttcgagcccgctgccctttgcctcctgggcggagaagctgcttcctcctgggaacaaccgcctcccgctcctagcaggttgctactgccccgaacccgcgctgcagggaacagcggggcaaacagtgagtggggttcagcgtagactctggaccaggagaggcccgcggtgaccgaggcctgggccccggaaaccaatagagccatggcgactccctctgctgccttcgaggcccttatgaatggtgtgacaagctgggatgtacccgaagatgctgttccatgtgaactgcttcttattggagaggcttcatttcctgtgatggtgaatgacatgggccaggtcctcattgctgcctcctcctatggccgtggccgcctggtggtcgtgtcccatgaggactacttggtggaagcccagctcacgccctttctcctgaacgcagtggggtggctttgctcttcccctggggctcccattggtgtacacccatccctggcacctttggccaaaatcctcgagggctctggagtggatgcaaaggttgagccagaagtgaaagactccctgggggtttactgtattgatgcctacaatgaaaccatgacagaaaagctggtcaagttcatgaaatgtggtggcggcttgctcataggaggacaagcctgggattgggccaaccagggggaggatgaaagggttctgttcacgttccctgggaacctcgtgaccagtgtggctggcatttactttactgacaacaaaggggacacgagtttctttaaagtctccaagaagatgcccaagatcccagtgttggttagttgtgaagatgacctctccgacgacagagaagagcttctgcatgggatttcagagctggacatcagcaactcggattgtttcccatcccagctgctagtgcatggggctttagcctttcctctagggttagattcctaccatggctgtgttatagcggctgcccgctatggccggggccgggtggttgtgactggccataaggtattattcactgttggtaaactgggcccctttctgctcaatgctgtccgctggctggatgggggccgcagaggcaagattgtggtgcagacagagctgagaaccctgagtggcctcctcgcagtggggggcatagacaccagcatcgagcccaatctgaccagtgatgcaagtgtctactgctttgaacccgtgagtgaagtgggggtcaaggaactgcaggagtttgtagcagagggtggcgggctatttgttggagcccaagcctggtggtgggccttcaagaaccccggagtgtcccctttggctcgattcccaggaaacctcctcctcaacccctttggcatcagcattacaagccaaagcctcaatccagggccctttcgtactcctaaagcagggataaggacctatcacttccgctccaccttggccgagttccaggttataatgggcaggaagagaggaaatgtggaaaagggctggttggcaaagctgggaccagatggtgcagctttcctgcagattcccgcagaagagatccctgcctacatgtctgtgcatcgactcctgaggaagctgctaagtcgatatcggcttccagtagcaacccgagagaaccctgttatcaatgactgctgcagaggtgctatgctttccctggccacagggctggcccactctggaagcgacctctctctgttagtcccagaaattgaagatatgtacagcagcccctatctgcgcccctcagaatctcctatcaccgtcgaggtcaactgcaccaatccaggtaaggaacaagggttggaagctcagtattatgggaatgggggaatggggacaggctgacatcagcagtccatttcagggacccgatcatgtccagaaggtggtctccattttttaccatgaactttgaagaagataagggttgggattttaagtactgtttggaagagttgagtcaaggcagcatgtaggggaagatacgtgcttac

SEQ ID NO: 465627 - DNA, 583 bp, Homo sapiens
gtagtttcgagcccgctgccctttgcctcctgggcggagaagctgcttcctcctgggaacaaccgcctcccgctcctagcaggttgctactgccccgaacccgcgctgcagggaacagcggggcaaacaaaaccaatagagccatggcgactccctctgctgccttcgaggcccttatgaatggtgtgacaagctgggatgtacccgaagatgctgttccatgtgaactgcttcttattggagaggcttcatttcctgtgatggtgaatgacatgggccaggtcctcattgctgcctcctcctatggccgtggccgcctggtggtcgtgtcccatgaggactacttggtggaagcccagctcacgccctttctcctgaacgcagtggggtggctttgctcttcccctggggctcccattggtgtacacccatccctggcacctttggccaaaatcctcgagggctctggagtggatgcaaaggttgagccagaagtgaaagactccctgggggtttactgtattgatgcctacaatgaaaccatgacagaacaagacaaaaaacaaaaaacaaaccaaaaaaa

SEQ ID NO: 465628 - DNA, 574 bp, Homo sapiens
tcgtaatgttttaagaaagtttatgaatttgtgttgggctgtattcaaaccttgggccgtattcaaagctgtccttggccacatgcggcctgtgggccatgggcagaagaggagtctttttagtctgcatgagggagagctgaactgtgttaggcaagagaattttgttgtagttgatgttgtgcttaatattggtggatggtggatattggccttggggccccttaagcaattgaatgaagcagacacctgccacgtttcctggctgtccagcaactttttaaactcacctttgctctacttgggaaatgtcctgctttgcgatttgcctgagatcacacagcctcgtgtgtggcagagccttagattccaagccaggctgtccgatgccagaccttcacagctatcctatgcttccacggcaccccggacttccccttggagcacttgccagtgaaacaaacatgccctggagaaatgcctggatggggaaatgaagacttaagaaacttaggtaatctgcccaaaggcttatagccaatacatggtaaagctgagatgtgaactcaagtat

SEQ ID NO: 465629 - DNA, 2811 bp, Homo sapiens
tcagctcccatgtgttgtgggtgtgcacctcccgtgctccccggactccttaagagggagtattttccctcttaaggagtctgctggggacctgtgtaatcatttagcccacatcctgggccatgtcagctctcctggaattgtccctactagcgttgagtgtggctgtcttactcccctttgctggaggaacagacctggacttctgccaaactgaggtccctgcctggccaggagctgccattatgattcatggcgcctctgacatcactcagtggttttgtgatgcaaagttcacatgtctgagcacacataagggactctgtgaatatgtgtgtatttgttgtgtgcatgcccgcagaatgggatacagagactcactctattcatcagggatttgttttaatcaggaattggcaggcatgggaagagcacgctgtccagggtcggcaaggcctggaaatgtcagagcatcagaatactgaaaataaaagacatggtcagtactcatacatagacatgacacacacatatacacacatacgcagactcacacatgtcaacagctgaatgaaaaatgtctttcattcctggaagcaggagtcatatcactttctccaaagcatgtctttttctatgcaatggtgtgctttaggtgcaagaacactcgagaagcggcaaagataaagttaaacaaatccaagtgttataattctgcattatgcatatgttttgacttttcatcttttattcagagagtaagataaccaaatagagtaaaggaagcccagccaaccagctcagtttcatgtgggcagaaccagcaggaaattgaaaggggagagaagccccttgccaaagccgcctccacttgcactgggaagcccaccacaggccaccacctgggctgggagatttgtcagcaggcgttggcctgtgacagtcacacttcctgctcctcagtctgagatgccccaaccagatggcggaggcccgatggggaaggagcagcctccacggaggcccgcctggttttccagccttggacttgcagccgggacatgagggctccctcctactctcccacccctcctgctggtgaagcaagcccctcctactcagaagggagctttctctgccctggaagatgcttggaaacttggcttccagacgtgcaggcgccaggggcctgtccactcctcctcccccttctcctggactcactgaccttccttctgtgccacaaacagccaggttcattcccaacccagggaccctgtgtgactgaccattctcctcctggatgctgtccccagccctgtgcatggctgccccttctcacctttcagggctctgccaggtgccacctcctgggctccagggaaacacaagagaattacacagatgtagcctcagaccacacagagctcacatttagtctgaggagtcagaccctaagggaggtaaataagtcactaaacaagacaattccagaaaataataaatgccaacatgaaaagagagcagcctctgcagacagagctgcaagatcctcgaggcctttttaatccccagaaacaaggttcgcaggaggccagagcctttggtggtggggagcggagtcagcagggggaggggagaggcccttcggagagactgagccgccaggccatcgagggaacctgggccagggatgaggcacttcagccctcggagcagctgcgacagcagagtctgacctcccagcaaggggctctggctgcgggcaagctgggtctgacccctggacactgtcccctggagcccctggcctccacgtgtccacccactgccatggtcatggctcctcagcaggaggaggcccagcagcctccaggtgcccctgcctgcggtgccattacctcgaggccttctgtggttgctggagctgccacgctcggcctcctgtctgcctccagatgggagaggaggaaggaggagaatccccagcagctgcctgttctccccctccactgggctagagctgtgtcacacaggctgagcggccaggaagctgggcaccatccagggagtgtgtgatcgtcggggtcctgttgattcctgcttttgagtaatgaaggtgaccaaaccacatgaccctgtctgcaaagattccacctggactcccagttcctccaaggaaccgtcatgtggttcaaatccaatgaaattctctaaatctccaccctcctcagggtgcagagttggctgcttctctgtgccccctgctgatcacggcaacccctgggtgcctcggcctgcgaagccccagctgtcctccgtctgcagacaagccgaggtatgaaagcctcctcgctggcccaggagcctgtcattgtcctccagcagctctagcctggatgcggtcccagagataaatcatatctctttaaaaagccacagtggcccattatttctgcttgaaaatacccctggctctctgctgtttatttcctgtagagcagtttcaccctcttcaccaatcttgtttatttccttgtttattgtgcctcctttaccagaacgttcaccctctgagggcctgggccaggtctgtctgttcacagctctagtgctcagagaagtcactgcataaataaacaaatactttgctcagaaaattgtggatatgtaaatgaaataggtctgaataaatgaattaaatacaaagcatatattttttgttggtatggaaatttgtgcttagaaaaacactgcagatctgtacccaagtgatatgatcgaataaaaataatcttcaaaaaagtcatc

SEQ ID NO: 465630 - DNA, 933 bp, Homo sapiens
ttccccttcatggctgacaatggaaacccacagacaggactggccaggtcgagcggaaggggcagggccattcctctgggctcaggtttccacttggtggaggctggaccgtctcttcccagcgtgggcacacagcgggacctgctgtctctttctgaggggacacagcccccgtcttatgtcctccgggccgcggtggtggggtcaggactgagcatcccccgcgcccacccccacgctcagcccgagtcgaagccttcgagactccccagtgccatctgcacaggacccaggtgccatcgccccaggactctcagaaactcagggcggtccccgagcagctcgcatctcttggggctgagcgtccgcagatgctgtaggcaggaggcgaccggcagttcctgcctccctgagataggggcgggccaggccccccatcaacctctcgctctctggacttgggttgtaaatcgcctcaaggggacagaaaccacccagaaagctgggaggggccccacgagcttacgactgaggtgggataatccgcggagtggtcacccacgtgctcgtggccctggagtccctgtgaccagccctggagacgtcacctcagagggagggggctttgcccgcttccttcaccgctggggccgggacctggatcttgagcacagagtagatctcggtgagatgacatcatcgccattaaagtcaaaagaagtctgtcttttcataaagatacaaatgtctggaggagataattgatttggctaagtgataacatgtgccccatttattaaacaaaatttttcaataaaaaggattttttatgattctctgatataaaatgtgtcataggatacaggaaggttgaattatttttataaactatatacagctcacgacccagctccatggttaacagcaggtccc

SEQ ID NO: 465631 - DNA, 4338 bp, Homo sapiens
gcttttagcagcaccaaccaggactgtgcccattgcgcatgcacaatgagggcttgtgaatcagataccagggaccccgagacagacaagcacacagaggaccagagtccttcgacacccttgccccagccagctgctgagaagaactcgtacctctactccacggaaatcacactgtggacggtggtggccgccattcaggccttggagaagaaggtggattcctgcctgacccgcttgctgactctggaggggcgcacggggacagccgagaagaagctggccgactgcgagaagacagctgtggagttcgggaaccagctggagggcaagtgggccgtgctggggaccttgctgcaggagtacgggctgctgcagaggcggctggagaatgtggagaacttgctgcgcaacaggaacttctggatcttgcggctgcccccgggcagcaagggggaggcccccaaggtgcccgtgaccttcgatgatgtggccgtgtatttctctgagctggagtggggcaagctggaggactggcagaaggagctctacaagcacgtgatgaggggcaactacgagacgctggtctccctggattatgcaatctccaaaccagacatcctcacccggatagagaggggagaggagccttgtcttgaccggtggggccaggagaaggggaatgaagtagaggtgggacgtccaaggatgatgggcactggcctccctccgtatccagagcacctcaccagcccacttagccctgcccaggaggagctgaaagaagggcaggcccccaagcagcagcaggactcagaggcgagagtggccccagccgggccagaagcaggtggtggtgtggccatcaagacagaggcacagtctgaagacgagatgacgcctgagcggctctttctgggggtgtcccgaggccagaccgagtgtagaatcccccgagggcccaggaacaggcctgggggccccagccgtcatcaggcccagggcatgcccagggtgcgggcaggggagccacggccaccgggggccagtggggagacgccccgagtcctctcccgcaggcggcagcgggcattcccctgccccgactgcgggcagagcttccgcctgaagatcaatctgacgattcatcagcggacccatgtggaggaggggcggcaggaggcccccggccgctcgcccaccagctgcggggacagccaggccatgctggagccgggggaggtggtggtacccggccctgtcatccgctggctccccgaggagcctgagggtcgccgctccgtggcagggggccgtgccttggtggggcggcggcctgcagccagcaagatgtaccactgcagcgagtgcctgcgcttcttccagcagcgcaagagcctgctgctgcaccagcgcctgcacaccggcaatggccagggctggcccgcctgcccctactgcggcaaggccttccgccggccctcggacctcttccggcaccagcgcatccacaccggtgagcggccctaccagtgcccccagtgtggccggaccttcaaccgcaaccaccacctggccgtgcacatgcagacccacgcccgaggccaggtgggcccacacttccctgccgcccccgcccgccacgggagcctgcccctgccctggcccagccggaaggaggagggctgacctggcaggagcccacagaggacccctggcggggtctctcccctgtgcctgacgcaggttcttccttttcctgggatggagagaggtttgttgtttttacccattcaaatgggaagctagctgcccttctggtgacattgtgtgtgaccgggtgctttctgtttcctgtttgcactcttcgctgccttttctgcattcctgacttctaaaagatgccttaaggcttaagggatgccatatttttgataaggcctctggtaggtaccacagccaagaggaccagagatcatggcccttccagtatgggggcgatagagacatcggggacctgggatttttgttttgtgcagagatctcctgcctgctgtcaccatgagaaacagtggagtggagtggatggatggcctgacttgaagaaagggccctggaaagttttctactttgctattttgaaatttttttcccttcttatagagactttgaaatacttttgtaaatgtgtgtagttgttaatggaactttgccttttgcaaagtcggaaagagtcggcttttccatgtgaggctcgcagagctgaaaggggagctacgtccaccagcctgtgggtcttttgggttttttttttgttgttgttgttgtttttttaagatggagtttcactcttgttgcccaggctggagtgcaatggtacaatctccgctcactgcaacctccgcctctcgggttcaggtgattctcctgcctcagcctcctgagtagctgggattacaggcgcccaccaccactcccggctaatttttgtatttttagtagagacagggtttcatcatgttgtccagactggtctcgaactcctgatgttaggtgacccgcacacctcggcctcctgaagtgctgggattacaggcgtgagccaccactcttggcccagcctgtgggttttgatggggatgtcttggctgctgtcttggaggcacagtgtctccccatgtgtgtgtttcttggcccagagtgactcccagtattcctagtccttccccacaggatagtcacatccattatttacttttgttgtcagctgggaggggaaactgaagcctggacacgtctccccaagggctcagtgttcatgggtgtgtaagatccattgactggaccccagaaagcaccctgaggggcagtgcagagagagcccaggaagcccctccactagaggaggcccttggtctggctgaggaccacgtccaccctgggcctccaggcctgcttttcacattaaaggcggggcagtctcctctcaaaggagttctcccttgagcactttgggctctggggcagagttgggctaggagatctgggtgaatcctttagtcacagctagtctcatgttcctcttctgtcaaaggggtcatggccccagtgtgtcctacctcagagttgtcagggtcaaagtaacaggcactgggacaaatatgaagcctagctttgtgcttcctttcaaattcagggcctcctttctactccattccagcctttttttcctgtcagaatccctcaggaaggacctttatcttctggagtgagtggcagttccactgggttcagtgaaagagtcgcccatggggctctgttccccaggagtcctttgtattttggtgaacaaattcttaccaaagcatgagattcggactgtagaagttcagactgcctcagttcagactgcctcatggggcagtctggaggtcagctggcttctggtgtctctcatcacaccactgcggacgctgtctgtagagcagccttggtgtgggtgactctgaagctggagtgatgggaccccagctatccttgttttttaccgccttgtctggcactgtgaccacgcttcagggctgcttctgggggtcttggtccctggatgtgccatttccttgcccttctgaccctcacacttcttccaaagtcttgagcagagttgggggccaatggtagcattgctgtcatctctgggaggagagtgagtatacaagtcagtgacagttcagccaggctcccttgggtttgggaagaggcactgcccttctgtgctgtggatcctgcttgtctgctctggagtccccccacccttgccaggagcttcacaaaccagagacgggctgtcagcaagagctcagacaggatgtggtgcaagtgcaggtgcacgagtttaaccctcagctgcaggagctagtctcaggtgttctggggatgcctcaggctaagaattttgccgactttctgggcttggttggctaatgccaaatgcccctgcttaaatatcacaaggtgctgattctccttttttctttttttcataccaatgtgctcaaactttgagctaggtcttgtgagtttgcctagcactcagacctgtttaagtaacgttctttacattgaaacaagtcaaccgaagctttgtggtgcaggagctgagggtgccccagactcagtgggagccctggttgggccccaaactctcccagcagggtcctcggtttcctcatttgtgaaataaatgagtgggccacgacgttaataagcccaagagaactgtgaaggtggtagtcccttgccctaattggtgctcaataaagttgttggcataaacga

SEQ ID NO: 465632 - DNA, 1070 bp, Homo sapiens
  misc_feature (1070)..(1070): n is a, c, g, or t
gcttttagcagcaccaaccaggactgtgcccattgcgcatgcacaatgagggcttgtgaatcagataccagggaccccgagacagacaagcacacagaggaccagagtccttcgacacccttgccccagccagctgctgagaagaactcgtacctctactccacggaaatcacactgtggacggtggtggccgccattcaggccttggagaagaaggtggattcctgcctgacccgcttgctgactctggaggggcgcacggggacagccgagaagaagctggccgactgcgagaagacagctgtggagttcgggaaccagctggagggcaagtgggccgtgctggggaccttgctgcaggagtacgggctgctgcagaggcggctggagaatgtggagaacttgctgcgcaacaggaacttctggatcttgcggctgcccccgggcagcaagggggaggcccccaaggtgcccgtgaccttcgatgatgtggccgtgtatttctctgagctggagtggggcaagctggaggactggcagaaggagctctacaagcacgtgatgaggggcaactacgagacgctggtctccctggattatgcaatctccaaaccagacatcctcacccggatagagaggggagaggagccttgtcttgaccggtggggccaggagaaggggaatgaagtagaggtgggacgtccaaggatgatgggcactgattctgtcatgacctgcctggcgatcattaccgtgatttcctgtctgctgaattcctgtgctgcagtttccttctgtgggacatgaggctttagactggaatctagctgccagcctccctccgtatccagagcacctcaccagcccacttagccctgcccaggaggagctgaaagaagggcaggcccccaagcagcagcaggactcagggacgtccaaggatgatgggcactgattctgtcatgacctgcctggcgatcattaccgtgatttcctgtctgctgaattcctgtgctgcagtttccttctgtggacatgaggctttagactggaatctgctgccaattccn

SEQ ID NO: 465633 - DNA, 1040 bp, Homo sapiens
gcttttagcagcaccaaccaggactgtgcccattgcgcatgcacaatgagggcttgtgaatcagataccagggaccccgagacagacaagcacacagaggaccagagtccttcgacacccttgccccagccagctgctgagaagaactcgtacctctactccacggaaatcacactgtggacggtggtggccgccattcaggccttggagaagaaggtggattcctgcctgacccgcttgctgactctggaggggcgcacggggacagccgagaagaagctggccgactgcgagaagacagctgtggagttcgggaaccagctggagggcaagtgggccgtgctggggaccttgctgcaggagtacgggctgctgcagaggcggctggagaatgtggagaacttgctgcgcaacaggaacttctggatcttgcggctgcccccgggcagcaagggggaggcccccaaggtgcccgtgaccttcgatgatgtggccgtgtatttctctgagctggagtggggcaagctggaggactggcagaaggagctctacaagcacgtgatgaggggcaactacgagacgctggtctccctggattatgcaatctccaaaccagacatcctcacccggatagagaggggagaggagccttgtcttgaccggtggggccaggagaaggggaatgaagtagaggtgggacgtccaaggatgatgggcactggcctccctccgtatccagagcacctcaccagcccacttagccctgcccaggaggagctgaaagaagggcaggcccccaagcagcagcaggactcagaggcgagagtggccccagccgggccagaagcaggactggcattgcggactgacctccagggagaggcccagatctgatctgcagagatctcccttccggctatcgtggctgctgttcaggtggtggagaagaagatggaaccccaggctgcctggctacagagcctggagggatgcatgtggacagccaagaagaagctggctgactgcgagaaggtggctgt

SEQ ID NO: 465634 - DNA, 865 bp, Homo sapiens
gcttttagcagcaccaaccaggactgtgcccattgcgcatgcacaatgagggcttgtgaatcagataccagggaccccgagacagacaagcacacagaggaccagagtccttcgacacccttgccccagccagctgctgagaagaactcgtacctctactccacggaaatcacactgtggacggtggtggccgccattcaggccttggagaagaaggtggattcctgcctgacccgcttgctgactctggaggggcgcacggggacagccgagaagaagctggccgactgcgagaagacagctgtggagttcgggaaccagctggagggcaagtgggccgtgctggggaccttgctgcaggagtacgggctgctgcagaggcggctggagaatgtggagaacttgctgcgcaacaggaacttctggatcttgcggctgcccccgggcagcaagggggaggcccccaaggtgcccgtgaccttcgatgatgtggccgtgtatttctctgagctggagtggggcaagctggaggactggcagaaggagctctacaagcacgtgatgaggggcaactacgagacgctggtctccctggattatgcaatctccaaaccagacatcctcacccggatagagaggggagaggagccttgtcttgaccggtggggccaggagaaggggaatgaagtagaggtgggacgtccaaggatgatgggcactgattctgtcatgacctgcctggcgatcattaccgtgatttcctgtctgctgaattcctgtgctgcagtttccttctgtgggacatgaggctttagactggaatctagctgccatcacccgtagctgacctacccgtggtcccagc

SEQ ID NO: 465635 - DNA, 1031 bp, Homo sapiens
ggaaaccacctccatgattcaattacttccacctggtctctcccttgacctgtgggaattatgaggaaggcaattcaagatgaaatattgggtggagacacagccaaacatcaccttggggcacaggctcaaaaacagtccacaggataccatcactgagctggaatacaacatggggcatctgaaaagaagaaccaaaatagatgcctggtcttcaactaaattacctgttcatctttttccaggaaaccttggaacaccaaggaatcagcagtcaaacgagctcagtctctcagaacacatgtgggggaattgagtatttcaacttttaggtagacagtttctacaagctaaatagtggaacgaaaggagccaaataaagaagttataaaacacgtgcatatttagcccctactttttattaaactaagactttttattcacatatcaattaattagtttatttattattattcatttattaagggaatgtatggatatctccgcggaaagagaacagcattatcggatgttgtcttcttaaaaatcatccgtctcagtactgagcatattaccacagggaaaggagaggggaagacacatgccacagaatacagtgtgagtcccactaaagtggaagctacatctacctcctggccacctttagatcctcacggcaaaggatccgtgagtgaaaaggcagttgctccactggctggaatgttgaccctaatgaccgtgaagaggccgggtggccagcatcgaggaggctggcaggggaaaggatggcatggaagcctcttcgcacctccatggcctggcagtaactgtttcgggaaaaatatagcaattaaaagacagcaaaaggagataacccaagtgtttagaccttcatcaatcctggtctgggtcttctcaccaggcaatgaaccagacaggccaaagtgagggtaagggaagcctgacatgggtaataaaggggagagaagatgaatgtcccttacgtcttcaagccaaccacattagtgggg

SEQ ID NO: 465636 - DNA, 2298 bp, Homo sapiens
gcattgttcactgtgtgatcgtttacttttaaaatgatgtcacagccccctggtacacacggttctcatctaaatttgcatcttttttaacgctaggataactatgaaagagcatacgattgtgattctgagtttcttactggatttgctttttaaactgcagaatgaaattagttgtttcaagaagtaaagtacaggcatgtcgaagtaaaattcaacaatgggttgttgggcaaaaagattataaaagtcctggggtgtgccagggtcaaaaaaaaaaaaaaaagcttgtccctggggttatcttggcaaaaaagaaaccaccaccacaggttctaaatgcagataagactggcagaaaaatgcagaccaaactattctgcattttgaaagtgaatgtgcctgtgtgacattggaggaatgtaaagaactgtatgtcaagtgtggactttatctcctcaggctagcttagagtggctgctgaacttaagggtgattaagagctgcttgcacctgggtggagctgaaactgcataaggtgaataatacctttgtgcaacagaagaaaaaaaaaaaagcctaatcagggcatggactttggccacatcagtgtcatagagcttcttcacagcctgtttgatctggtgcttggtggctttaacatccacagtgaacacaagtgtgttgttgtcttctatcttcttcatggcagactcagtggtcagaggaaactctgtgacagcatagtgaggcctgaaccttcctctcacctgcccccagacacaggaagatttgggaccaattcagctggacatcgtatggtcgatctcctacctccattatctaggtctcttaaacctgctaccctgtcaccaactcccacacccctaaacatggccttgcctcttactcaatggagaaactgggcaccatcagaaggagctgccacataccctccgactcaccaaagagtctgcttcttacgccagttgcccttcaccatttcccagtgcctctcaccattccccagtgcccttcaccattccccagtgcccctcaccatttcccagtgtccctcaccatttcccagtgcccctcaccatttcccagtgcccttcaccattccccagtgcccttcaccatttcccagtgcccttcaccatttcccagtgcccttcaccatttcccagtgcccttcaccatttcccagtgcccttcaccatttcccagtgcccttcaccatttcccagtgcccttcaccattccccagtgtccctcaccatttcccagtgcctctcaccattccccagtgcccttcaccattccccagtgcctctcaccattccccagtgcccttcaccatttcccagtgcccctcaccattccccagtacccttcaccattccccagtgtccctcaccatttcccagtgcctctcaccatttcccagtgcccttcaccatttcccagtgcccttcaccatttcccagtgcccttcaccattccccagtgtccctcaccatttcccagtgcccttcaccattccccagtgcccttcaccatttcccagtgcccttcaccattccccagtgtccctcaccatttcccagtgcctctcaccattccccagtgcccttcaccattccccagtgcctctcaccatttcccagtgcctctcaccatttcccagtgcccttcaccatttcccagtgctcctcaccatttcccagtgcccctcaccatttcccagtgcccttcaccattccccagtgcccttcaccattccccagtgcccctcaccatttcccagtgcctctcaccattcctcagtgcctgatgccctctcttccctggacatgcacacatattgttatcttggatggccacccttctgtcctgcccaggccctgccagttctcctggatgactctggctcaagctggtgtcatctaaccctttttttggaacctgaaattggggggaaaaggagtaatgacactgctcagtggatgcccataggctgctgcctctcatccctgcagctctggcaacataacaattacctgggaggctctgagaaatgctggtgcccagatgtcactccaggcgaatgcaatcagaaaaggatggcatctgtaccttttagaagtttctcaggtgattctgccaagcggggagcccgagacccacagctttagggaaaagagaaatgacctctttgctcattccttatgatatgatagatttttaacatatatatctaaaagtaaatttatctttacccagggtctgtacagt
